United States Patent Application Publication US 2005/0228172 A9 - sequence listing, part 180

SEQ ID NO: 807774 - DNA, 531 bp, Homo sapiens
ctttttattgaaggagaacacacaactatgaaaagcttgcaatttacatcccacaggaggacctctcagcttacccccatatcctagcctccctatagctccccttcctattaatgataatcctcctctaatctccccggcccagaggaaataagcaaagaaatctccaaagcaccaaaacccctcaggctatgtccccttcaagctgtagggggaggggaatttggcccaacccaggtacatgtccccttctccctcactgatttaaagtagatcaaggcagacctggggaagttttcagatgatcctgatagatacatagatgtcctacagggtrgagggcaaacctttgacctcacttggagagatgtcgtgctactcttagatcaaaccctggcctttaatgaaaagaatgcagctttagctgcagcccgagagtttggagatacatggtatcttcatcaagtaaatgatagaatgacagccgaaggaagggacaaattctctaccagtcagcaagccatccccagt

SEQ ID NO: 807775 - DNA, 531 bp, Homo sapiens
ctttttattgaaggagaacacacaactatgaaaagcttgcaatttacatcccacaggaggacctctcagcttacccccatatcctagcctccctatagctccccttcctattaatgataatcctcctctaatctccccggcccagaggaaataagcaaagaaatctccaaagcaccaaaacccctcaggctatgtccccttcaagctgtagggggaggggaatttggcccaacccaggtacatgtccccttctccctcactgatttaaagtagatcaaggcagacctggggaagttttcagatgatcctgatagatacatagatgtcctacagggtagagggcaaacctttgacctcacttggagagatgtygtgctactcttagatcaaaccctggcctttaatgaaaagaatgcagctttagctgcagcccgagagtttggagatacatggtatcttcatcaagtaaatgatagaatgacagccgaaggaagggacaaattctctaccagtcagcaagccatccccagt

SEQ ID NO: 807776 - DNA, 677 bp, Homo sapiens
ctaaatttataaagaagaaagaaaatgagagtaaatttaactacataaagattaaaggcaaaaacttttgtaaacaattaaaactgaaagtgtatttacaaagtgacacagagttgttaacatctttaaaatacaagcaactgctcccaaatctaataggaaatgggcaaatgtaccaataaaatagatttaaaatattggcaggaatttaatatttcttaaaagaagagggtttagtaaataaatgtgcatccaattgatagattattattcacattgaaaattatggttgaaagaatgatgaaaaacattggaatattaattataataaaaaacttttttaaactaatattataaaacttttactgtcatcaatcactgttttaggggctgtcccagttgaacatcttgatataatacattacagatcttccacatcatcatcttccactgttaaaattctacaaactatggaacaagtrcaatagaattggattatgatttctaaacatagcactgctaacacatcaatttgatgttaaggatacttaatatcccacactagtgtatgtaaaaatccatgtttgttttctactcctaaaatgacataaaaacacatctagatcatgtcaactaactacattatttataaaaggattttccaattctctgtaaca

SEQ ID NO: 807777 - DNA, 645 bp, Homo sapiens
atcttttcttaaaatgtgggctttttattttatagctgtatcttaaacgcacaacacaataaacaatcataatttagcacaggtggatcgggtagtttgcataaaaaatgccccagagcgggaagcaattacagctgaaggagaaacaaaggtggtcatagggaaagccacagaggaagtgacctgggctttgtaaaacttaatgccgtgatatacttaatgagattattttgaattaaagcagttgttttcatcttccaatctaatttgtctaattacatgtttaaaatttccttattgtgatgacttcagaagaagactacaaaaccaagtcttgactacctgatatcactacagagtctgtatacaaacacccttaattttacagaagaaattaaattaatatatcaggaatgattctcrtacctctaagtacagatattattgactctatttattatgcctcatgctttggtcccaaatgatactgttgagcaggtaagagttatacatttttaatagttttggaacaaaccaaagtcagcaaaccttcacagaaacttcttttttaattcacctagaattaaatcactgagcagagagaacactaaattcaagttcctgtagttaaattagtgaatatgc

SEQ ID NO: 807778 - DNA, 637 bp, Homo sapiens
gggaaataaattattcatcaaaaaaactataatgggtaaggtagttatgaaaataacccaaattctattgagaatagatgggcaaaggcttgtaaattactaaaagccgtctaagagcaaaaatgttcaggaaagagcataggacatttaaaaatatcagaaggaatgtagagagaggtagaaattcagttgatggacactgaagagaaaagaaacatatactaaataaaagaaagtccctcaaagaagctcatctgattccaaaacagaaagaggggaaagcagaaataatgcaaaaaccataggctacagattcaggaaagggccactgaaatatttacataagattcttatccacatagatatgcatcttttgatttctccctgttatagactgaatggtcattccccccgaccccaaaactcatatgttaaaatctaacccctaatgtatttgagtgtgggggactttagaaggcgattaggtcgtgagtgcagagcyatcataaatgagattagcacctctataaaagaaaccccagagagcttccttttcctttccaccaagtgaagacagtgagaagacagccaactatgaaccagagagcaggctgtcactagacacttatttgtgtgt

SEQ ID NO: 807779 - DNA, 594 bp, Homo sapiens
ttagtagagacaggatttcaccatgttagccaggatgaactcgatctccggaccttgtgatctgcccacttcagcctcccaaagtgctgggattacaggcgtgagccacctcacccagccaaggatggcatgatctccgcttactgcaagctccgcctcccrggttcacaccattctcctgcctcagcctcccaagtagctgggactacaggcacccaccaccatgcccggctaattttttgtgtttttagtagagactgggtttcaccatgttagccaggatggtatcgatctcctgaccttgtgatctgcccatctcagcctcccaaagtgctgggattacaggcatgagccactgtgctcggccagccaaggatgattcttatgaggactcagagaaagggaaagcctggaacttcttagagattacttaagtggtcataacccaattgttgatagaaatatggacattagaggccattctaatgaggactcaaacagaaattagtaacaacatattagaaactagagtaaaggccatccttattataaagtagcaaaggctgcctgaattgcatttgtgtcctaggactt

SEQ ID NO: 807780 - DNA, 594 bp, Homo sapiens
ttagtagagacaggatttcaccatgttagccaggatgaactcgatctccggaccttgtgatctgcccacttcagcctcccaaagtgctgggattacaggcgtgagccacctcacccagccaaggatggcatgatctccgcttactgcaagctccgcctcccgggttcacaccattctcctgcctcagcctcccaagtagctgggactacaggcacccaccaccatgcccggctaattttttgtgtttttagtagagactgggtttcaccatgttagccaggatggtatcgatctcctgaccttgtgatctgcccatctcagcctcccaaagtgctgggattacaggcatgagccactgtgcycggccagccaaggatgattcttatgaggactcagagaaagggaaagcctggaacttcttagagattacttaagtggtcataacccaattgttgatagaaatatggacattagaggccattctaatgaggactcaaacagaaattagtaacaacatattagaaactagagtaaaggccatccttattataaagtagcaaaggctgcctgaattgcatttgtgtcctaggactt

SEQ ID NO: 807781 - DNA, 529 bp, Homo sapiens
atgaaataatctctacctgggctgcaaacttcactttttaccttcatcttcacaggagatcaaattgacattgaaatcaaaagcagatttctctataattcaaaataatgtcagtgtatcacatttagcctaatgctataactctggtcaagaattattcagttatatacccaggaggtatacacaggagtacataaaagtattgttggttgatgcttgcctgcctgcataatccagatctcttactctaaatttctcattccaactataaaatgcaaatgttaatatggtttggtaaagataaaagtmagtataacctaaatccaaggatatcagcatctacattgtccagaaatatatccaggacatttctgaatttggctagttatgaaaaacaattagatactgctataattttcagtcagatgactttcatttctacttaaagagtgaaacatcttagaaattagaactgaagaaagtttgtactttatggtacatttgtaagacataagatgtgtaaaggata

SEQ ID NO: 807782 - DNA, 528 bp, Homo sapiens
atcctttacacatcttatgtcttacaaatgtaccataaagtacaaactttcttcagttctaatttctaagatgtttcactctttaagtagaaatgaaagtcatctgactgaaaattatagcagtatctaattgtttttcataactagccaaattcagaaatgtcctggatatatttctggacaatgtagatgctgatatccttggatttaggttatactkacttttatctttaccaaaccatattaacatttgcattttatagttggaatgagaaatttagagtaagagatctggattatgcaggcaggcaagcatcaaccaacaatacttttatgtactcctgtgtatacctcctgggtatataactgaataattcttgaccagagttatagcattaggctaaatgtgatacactgacattattttgaattatagagaaatctgcttttgatttcaatgtcaatttgatctcctgtgaagatgaaggtaaaaagtgaagtttgcagcccaggtagagattatttcat

SEQ ID NO: 807783 - DNA, 622 bp, Homo sapiens
ggcatattcactaatttaactacaggaacttgaatttagtgttctctctgctcagtgatttaattctaggtgaattaaaaaagaagtttctgtgaaggtttgctgactttggtttgttccaaaactattaaaaatgtataactcttacctgctcaacagtatcatttgggaccaaagcatgaggcataataaatagagtcaataatatctgtacttagaggtaygagaatcattcctgatatattaatttaatttcttctgtaaaattaagggtgtttgtatacagactctgtagtgatatcaggtagtcaagacttggttttgtagtcttcttctgaagtcatcacaataaggaaattttaaacatgtaattagacaaattagattggaagatgaaaacaactgctttaattcaaaataatctcattaagtatatcacggcattaagttttacaaagcccaggtcacttcctctgtggctttccctatgaccacctttgtttctccttcagctgtaattgcttcccgctctggggcattttttatgcaaactacccgatccacctgtgctaaattatgattgtttattgtgttgtgcgtttaagatacagctataaaataa

SEQ ID NO: 807784 - DNA, 532 bp, Homo sapiens
actggggatggcttgctgactggtagagaatttgtcccttccttcggctgtcattctatcatttacttgatgaagataccatgtatctccaaactctcgggctgcagctaaagctgcattcttttcattaaaggccagggtttgatctaagagtagcacracatctctccaagtgaggtcaaaggtttgccctctaccctgtaggacatctatgtatctatcaggatcatctgaaaacttccccaggtctgccttgatctactttaaatcagtgagggagaaggggacatgtacctgggttgggccaaattcccctccccctacagcttgaaggggacatagcctgaggggttttggtgctttggagatttctttgcttatttcctctgggccggggagattagaggaggattatcattaataggaaggggagctatagggaggctaggatatgggggtaagctgagaggtcctcctgtgggatgtaaattgcaagcttttcatagttgtgtgttctccttcaataaaaaga

SEQ ID NO: 807785 - DNA, 532 bp, Homo sapiens
actggggatggcttgctgactggtagagaatttgtcccttccttcggctgtcattctatcatttacttgatgaagataccatgtatctccaaactctcgggctgcagctaaagctgcattcttttcattaaaggccagggtttgatctaagagtagcacgacatctctccaagtgaggtcaaaggtttgccctcyaccctgtaggacatctatgtatctatcaggatcatctgaaaacttccccaggtctgccttgatctactttaaatcagtgagggagaaggggacatgtacctgggttgggccaaattcccctccccctacagcttgaaggggacatagcctgaggggttttggtgctttggagatttctttgcttatttcctctgggccggggagattagaggaggattatcattaataggaaggggagctatagggaggctaggatatgggggtaagctgagaggtcctcctgtgggatgtaaattgcaagcttttcatagttgtgtgttctccttcaataaaaaga

SEQ ID NO: 807786 - DNA, 532 bp, Homo sapiens
actggggatggcttgctgactggtagagaatttgtcccttccttcggctgtcattctatcatttacttgatgaagataccatgtatctccaaactctcgggctgcagctaaagctgcattcttttcattaaaggccagggtttgatctaagagtagcacgacatctctccaagtgaggtcaaaggtttgccctctaccctgtaggayatctatgtatctatcaggatcatctgaaaacttccccaggtctgccttgatctactttaaatcagtgagggagaaggggacatgtacctgggttgggccaaattcccctccccctacagcttgaaggggacatagcctgaggggttttggtgctttggagatttctttgcttatttcctctgggccggggagattagaggaggattatcattaataggaaggggagctatagggaggctaggatatgggggtaagctgagaggtcctcctgtgggatgtaaattgcaagcttttcatagttgtgtgttctccttcaataaaaaga

SEQ ID NO: 807787 - DNA, 532 bp, Homo sapiens
actggggatggcttgctgactggtagagaatttgtcccttccttcggctgtcattctatcatttacttgatgaagataccatgtatctccaaactctcgggctgcagctaaagctgcattcttttcattaaaggccagggtttgatctaagagtagcacgacatctctccaagtgaggtcaaaggtttgccctctaccctgtaggacatctatgtatctatcaggatcatctgaaaacttccccaggtctgccttgatctactttaaatcagtgagggagaaggggacatgtaccygggttgggccaaattcccctccccctacagcttgaaggggacatagcctgaggggttttggtgctttggagatttctttgcttatttcctctgggccggggagattagaggaggattatcattaataggaaggggagctatagggaggctaggatatgggggtaagctgagaggtcctcctgtgggatgtaaattgcaagcttttcatagttgtgtgttctccttcaataaaaaga

SEQ ID NO: 807788 - DNA, 656 bp, Homo sapiens
agtcagttaccaaaaagtcgaaaaagaacttctgcaatatgactgcttctccttgtgagaagctcacttagatagtctggaagtcaaacttgatgggaaaaaaagtgcttgaatttaacaagacacaggtgtgttcaaggttatcagtagagcgggggaatatgtgactcttgggaagagcatgagttttctgattacattgaaaatttagacatatcaagaaaagccaagagtacaaaatcaaattatactggaggaaagaattgcttctctaaacttgcaacataaaacattttagcattaggccacaacaacagttagaactggaagaaaaaagttacaggagctaacaaaaatgctgtagragagagttattgtctcaggcttctcaaggggagaaaaagctgaaagcagcaggacacagaaaagttgaactgagatatgattgagaaatttttaaaagaaacagattataaaattaaaagtaaaatttcttgcaatttcattaagagcaaatcaacaccttaagaaaatcttgttttaacataggggactaaccctagaaagagtattataaattatttccttttaattataaccaacttaatcacatacaaaattcctttcataaattccccttcacaaagcttatcaca

SEQ ID NO: 807789 - DNA, 576 bp, Homo sapiens
aagaaacacaccatacacccacaatcaaggcaggttataaattatataataaaagaaaagcaaaaagacaggcattgatttctgattgaaaaatcaagaaaagtttcatagacagaatgtcttggaagtcaggcctaggagtataggttatactttaattaaagaaaataaggttaaaagtacatcagtctgagggagcagcgtcaactacggcatgagaagaaagtgcaacaatctgttcgcagttcttgtactgggaatatcatggggatgaagctggaaggtaaacagaggtcagacaataaaaatgctttcatgccatgcaaaacaaattggacttcattccaaactggtgatttggagtgatcaagtaaatcactgtaatattaawacaaccaaatgaggactattcgaaatatagatgtcaaattaatagtgatccaattttaaaaggaaagcaataaacccttcagaatgtgtgggttttcaaattttgttcagataacactgaagggaaaaagtaaaacaagggaattatttttacttgggtttgtttcttataatcttaatgaacac

SEQ ID NO: 807790 - DNA, 577 bp, Homo sapiens
ggagttgaacaatgagaacacatggacacagggaggggtacatcacacactggggcctgtcagggggtggggagctaggggagagatagcattagtagaaatacctaatgtagatgacgggttgatgggtgcagcaaaccaccatggcacgtgtatacctatgtaaaaaccctgcatgtgtatacctatgtaacaaacctgcaggttctgcaaatgtatcccagaacttaaagtataatttaaaaaagaaagctcacaaatcatattgtgaagaagcaaaaataaataacagtgagtttccttaagagatgtagatgatggagaaggagagtagaatgagtgtgggtgctgaagtaataggaagctgagggagtttctgtctaccttctattktaatttatttattcaatacttactgactttctactatgtatcaagcacttaaggtagagaaaaataagagacctaaggtccctactctcatagaaattcaattctagagaaggcatttagacattaagcactaaaaactttaagatatactttggaggcaaagctggcagggcttcttaatgaa

SEQ ID NO: 807791 - DNA, 622 bp, Homo sapiens
ttatacatgcatctaaaaattaaatgtgaaaagcaaaaccatagaagtactataaaataacatgggagaacactgtattatcttggaggagggaaggaaattttaatcaatacaaaaaaatacccagcagatataaaatagrtatttatatagataaatttgacaatgtaaaaattacatagattctgcatgtttaaaaaaaaccccaaaagtcaaaacccagtatgacaatggaccaattttcttaatatagaaataatttctttaaaagcaatttttaaataaaaaaaggcaaacaaaatacatgtctaatttaaagaaatatatatatacacatatatgtgtgtgtatatatatatatgaatgctttaaacacattaaaatatgcccaacctcagacatattaaaaataaaaaacattttaaaaggctgggggtgggaaaaatggagagatgtggtcaaatggtataaaatttctgctagataggaaaaataagttttttgagatctattgaacagcatggtgatcacagttgataataatgaattatactatatttcaaaattgctaagagtatacatttcaaatgttcttaccacaaaatataagtcttcaagtgtt

SEQ ID NO: 807792 - DNA, 634 bp, Homo sapiens
ttttaatgtgtgttgtttgtctttgtatagtctgcagatgtggatcccgactcctgcaagcagtagctcactgtgacaaagctgcctttgcttttatcactttgcaaatcaaagaagggggatgtgttgggaacaggcccccccaaaatctggccataaactggccccaaaactagccataaacaaaatctctgcagcactatgacatgttcttgatggctatgatgcccacgctggaaggttgtgggtttaccaggatgaggkcaaggaacacctggctcacccagggcagaaaaccacttaaaggcgttcttaaaccacaaacaatagcatgagcaatctgtgccttaaggacacactcctgctgcagataactagccagacccatccctttacttcggcccatccctttgtttcccataaggaatacttttagctaatctataatctatagaaacaatgcttatcactggcttgctgtcaataaatacttgggtaaatctctgttcaaggctctgctctctgaaggctgtgagacccctgatttcccactccacacctctatatttctctatgtgtctttaattcctctagcaccactgggttagggtctccccacctgagcaggtctcag

SEQ ID NO: 807793 - DNA, 587 bp, Homo sapiens
atcaccaccgatcccacagagatacaaactaccatcagagaataccataaacacctctacacaaataaactagaaaatctagaagaaatggataaattcccagacacacacacaatcccaagattaaaccaggaagaagttgaatccctgaatagaccaataacaggctctgaaattgaggcaataattaatagcctaccaaccaaaaaaagtccgggactagatggattcagagccatattctaccagaggtacaaggaggagctggtaccattccttctgaaactattccaatcaatagaaaaagagggaatcctccctaattcattttatgaggccagcatcatcctgatgccaaagcccggcagaggcacaacaaaaaaaagagaattttagaccaatatccctgatgaacatycatgcaaaaatcctcaataaaatactggtaaatagaatccagcagcacatcaaaaaccttatccactatgatcaacagcccttcatgataaaaactctcaataaattaagtattaatttgacatacctcaaaataataagagctatttatgacaaaaccacagccaata

SEQ ID NO: 807794 - DNA, 587 bp, Homo sapiens
atcaccaccgatcccacagagatacaaactaccatcagagaataccataaacacctctacacaaataaactagaaaatctagaagaaatggataaattcccagacacacacacaatcccaagattaaaccaggaagaagttgaatccctgaatagaccaataacaggctctgaaattgaggcaataattaatagcctaccaaccaaaaaaagtccgggactagatggattcagagccatattctaccagaggtacaaggaggagctggtaccattccttctgaaactattccaatcaatagaaaaagagggaatcctccctaattcattttatgaggccagcatcatcctgatgccaaagcccggcagaggcacaacaaaaaaaagagaattttagaccaatatccctgatgaacattcatgcaaaaatcctcaataaaatactggtaaayagaatccagcagcacatcaaaaaccttatccactatgatcaacagcccttcatgataaaaactctcaataaattaagtattaatttgacatacctcaaaataataagagctatttatgacaaaaccacagccaata

SEQ ID NO: 807795 - DNA, 671 bp, Homo sapiens
gtctcattttccttcagttcaggtttgattttggttatttcttgtcttctgctagttttggggctgattttttcttgcttctctaatttttttcagttgtgatgttaggttgttaacttgagatctttctgactgttttacatgggcatttagtgcaatgaatttccctttgaacactgccttacttgtctcagagattctggaatatgatatctttgttctctttagtttcaaaagcttattgatttctgcctaagtttcattatttacccaaaagtagttcagaagcatgttgtttaatttccatgtaattcatggttttgaattattttcttagtcttgacttctgtttttattgcactgtggtctgagagtgtgtttggtatgatttggatttttttgcatttgctaaggattgttctgtgtccaattacatggtcgattttaggktatgtgccatgtagcaaagagaagaatgtatactctgttgttttggtgtggagagttctgtagaagtgtatcagatccatttggtccaatgtttagttcaggtcctgaatatctctgttaattttctgcctcaaagttatgtctaatattgtcagtggagtgttgaaatctcccactactattgtatgggagtctgtgtcttgtcgtaggtctctaagaac

SEQ ID NO: 807796 - DNA, 627 bp, Homo sapiens
taataactttttaaagaatgtcaatcacattctttaataatttataggaacttgacatcgagagcatcctcatgaattctattgccatgttgtgtgctatggactgaagtttcgtgttccaccaaaattcacgtgttgaagtctaatccccagtgtgattgtatttggaggtggggcttttgggagatgatttcactctcttgaatggggttagtgccattatargaagagacacaaggtgataattcattcagtcatgtgaggatacagagggaaggtggctgtctacaggccaggaagttgcccttcaccaggcaccagttctgttggccccttggtcttgtactccccagcctccataactgtgagaaataaatgtctgttgtttaagccacccagtctgttatgtttggtatagcagcccaagcttattgaacatgatgatagacggaattctaagctgactcccaagattccagctccctggtgtacatgccttgtatgatcccttatgcttacatggcttggggatggaacctttgaatatgatgggacagccactccatggattaggttgtgttacagagcaagtgctgatggaatagtcaggtgtgtgatcatctgaca

SEQ ID NO: 807797 - DNA, 581 bp, Homo sapiens
taggatccctctaggtatataatgattagttctttgattttggattctgatctttgggagactgacatcctcagaacatgtggctgtcagacatttggtgtcttgagataatgtacactccagttccacatgagaaaatggaggaagatatagaaaaagagcataaggagaaaagctatagccctggaaaaaattggattctcttgatactttattcctctgtggcatttgtcccaggtcaaggctgcygggaactttgatctcagggtgctgctccctgttacccacactgctggaccttctagaaaacctcagcaatggaaacttttttgtttctggagactttttcagtaggagtctagataattctggataggtaaaatatagctagagatatgtttccgttgcctttgatatttgtaactgtttgaaagtaatatcatgtaataattcaaagatgacataagcactgcaagattggaaatagtatttcatatcaataatgccaactgaggctcagcatggttgctcatgtctgtactcagcacttttggaggctgaggtaggaaactcacttaagc

SEQ ID NO: 807798 - DNA, 641 bp, Homo sapiens
taccttccacaacaagttagacactttcttttaggataagaattgactttcaagtgtttttagctggtaatttgtgaattatctatttttactgttatggtggaaggaggaggggtgagaaataaggcagtcattttgatattaatttttttctgagtaaaggaaatagagctaaaactcaaattggacagtttattttattattttattttcacagtctaaattagtacttggtaagtggacaggtcgaatccattggctaaagtgattctttaaagacaaattttatttttaatcacctatgctatctatttcacaagaccaaraaaaatgattggtgcataacattttatgggtaaagttcatatgaaaacgatggtatggaaatgccctagttattcatccttaattaatatagtaatatttatattaatacataataagattaggtaaaataaatattgaagataaaataattagtaatccataatcagtcacatttaagcatggccaaaggtaataaggcagacattgttgatggtggatggctcctgctatgtttctttcattttctttcacctagtcagtttcattgattccatgctcaggaagagagaccatgttggaagaggaaattggtg

SEQ ID NO: 807799 - DNA, 726 bp, Homo sapiens
aatcacatcatggaaaagtaggtatccatccccgtaagtatttattctctgtgttacaatctaattatactcttttagttattttaaagtgcataattattattgattatagtccccctattatgctgtcaaatactaggtcttatttattctaactatttttttgtacccattaaccatcctcaccttcctccatccctctcactacccttgctggcctctggtaaccatccttctattctctctctccgtaagttcaattgttttgattttcagatcccaaaaataagtgagaacatgtgatgtttgtctttctctgcctrgtttatttatttaacataatgacttctagttccatccatgttgttgcaagtgacaggatctcattctttttcgtggatgaatagtactccattgtgtatacgaagcacattttcttcatccattcatctgttgatagatacttgggttgcttccaaattttcgctcttgtgaacagtgctgcaataaacatgggagtgcagatatctccttaatatactgatttccttccttgggttatatacccagcagtgggagtgcaggataacatggtagctatatttttaatttttttgaggaacctccaaaatgttctccatagtggtcgtactggcttccattcctaccaacagtgtatgaggtttcccttttctctacatcctcgccagcatttgttattgcctg

SEQ ID NO: 807800 - DNA, 637 bp, Homo sapiens
acaaccactgtagaaaccactgggtatctatccaaaggaagagaagtcattatataaaaagacacctgtatatgtatgtttatcgcagcacatttcacaattgcaaagatagggaaccaacctaagtgtcagctgatgagtggataaagcaaatttgatatatatacatcatgaaatactccccagccattaaaaaaagaatgaaataatatcttttgcagcaacgtggaaggaaccagaggctgttattctaagtgaagtaactcyggaatggaaaaccaagtaccaggtcgtctcgcttacaagtaggagctaagctgtgggtactcaaagacattcggagtggtataatggactttggagactcagaaagggggagggctggctgaaggtgagggataagaaactacatatttagtacaatgtacatactaggatgactgcactaaaatctcagactttagcattaaacaaaaaacaaaaatggtggtacttatagagagtttatgttgtttcatatgctagctaggacttgttgttaacagactttttatttttgccagtctggagttgtgtattactcatgaacagcagtgttcactgggctatttgcatcagtacacttgcaaaaatttaa

SEQ ID NO: 807801 - DNA, 637 bp, Homo sapiens
acaaccactgtagaaaccactgggtatctatccaaaggaagagaagtcattatataaaaagacacctgtatatgtatgtttatcgcagcacatttcacaattgcaaagatagggaaccaacctaagtgtcagctgatgagtggataaagcaaatttgatatatatacatcatgaaatactccccagccattaaaaaaagaatgaaataatatcttttgcagcaacgtggaaggaaccagaggctgttattctaagtgaagtaactctggaatggaaaaccaagtaccaggtcgtctcgcttacaagtaggagctaagctgtgggtactcaaagacattcggagtggtataatggactttggagactcagaaagggggagggctggctgarggtgagggataagaaactacatatttagtacaatgtacatactaggatgactgcactaaaatctcagactttagcattaaacaaaaaacaaaaatggtggtacttatagagagtttatgttgtttcatatgctagctaggacttgttgttaacagactttttatttttgccagtctggagttgtgtattactcatgaacagcagtgttcactgggctatttgcatcagtacacttgcaaaaatttaa

SEQ ID NO: 807802 - DNA, 586 bp, Homo sapiens
cccagaggtctcaccccagcctctccccctgggatcggcacgtctgcagactttccagttccaacacgttttgcagacagcaaaactgcccgccagccccactgagcatccgtgtgacccacaccggcccttcggtctctgctctccctcaggccaaagtcagctttttggctcttaacagacttttccggggccttaattttcacacgttttccctgctccctgcctgtgccacctgggctacatcccttggtgaggtcaggccacgtgtgcggacatcgtcccccagtctactttgtctcgaccttcgagaccagcttctcaccatgygtgcggggcttgcccttctgtttcagtggagaagctggttggggcccagggtcagccaggctccccagtgtgagggtgagttacaggctgcaccggcactgtggccgggctctggactcgacctaccgtcctgtccagcaccgtggggatgaagtcgtagccgatcccttccacctcgtaggttgtctgctccgtctggttcagctcctccggctctgcgaggatggacccttcgggatccaccccaatgatctgc

SEQ ID NO: 807803 - DNA, 566 bp, Homo sapiens
accgcgtcatgccgaggcttcggcactgacttgtgcagatgcctgcactgcagggcgctgatctgtttaaatggcgcgagccctggggactcactccctccctacccccaagcaggcacagggccagcgtccctgcatgctgtgtgggcccaagctgacccgcaggtgggcagtcccgggtcagaccatggacagggatggccttacaagttctctgggccttaaaatctagattcatgttctccaatctgctttgtcagaaataaagttgataaggcaaaaaaagtctactsaggtgaaaaccctcagaggcatccttgaattctctctcacagcccacactggacgcaacagcaaatcccataggctctttttttcttgagtcaggtcttgctccgttgcccaggctggagtgcagtggtgcagtcctggctcactgcagcctcaaccttctgggctcaagtgaccctcccacctcgggctcccgagcagctaggaccacaggcatgtgccactgtacctggctggtttttaaatactttttgtagagatagggtttcaccatg

SEQ ID NO: 807804 - DNA, 648 bp, Homo sapiens
ctagcttcatattggtctgaaaatctcattcttcctctctttcaaaaatttttctgaaagtcccaagtttgcttttatcttttctccctgaactgtcactctgcatcagaaattggcatctattttattgacaagagtaactatttttttctgtttatttttttctcataagacttaratttttgagagtaagacaaatgcatagcagcccctacattgtccatttgacttttttttttaaatttctgacttgctctatttgaatacttaaaataggttttagttttactgttgaggcaataaagttaagaaaaaaatgggaatatagtaaatatatcactaagaattagagtttctcaaataaaatttccttgcagcagcagaggggcagccctctgccctgctgcccatattttaggccagtgaattattggctttctcattgagctggagttcagtgggtctggagacgatctgccagctgtgaggcaatgtttaggttaaaagatctgtctcagtgattgggaatgctgaaacacgggtaaagaaaataaatgtcttgagggacattaacttatagagagcatatttatcccatatgaataccttgcctgcctggagtaatccagatatttaacctctgagacg

SEQ ID NO: 807805 - DNA, 599 bp, Homo sapiens
agcagcccctacattgtccatttgacttttttttttaaatttctgacttgctctatttgaatacttaaaataggttttagttttactgttgaggcaataaagttaagaaaaaaatgggaatatagtaaatatatcactaagaattagagtttctcaaataaaatttccttgcagcagcagaggggcagccctctgccctgctgcccatattttaggccagtgaattattggctttctcaktgagctggagttcagtgggtctggagacgatctgccagctgtgaggcaatgtttaggttaaaagatctgtctcagtgattgggaatgctgaaacacgggtaaagaaaataaatgtcttgagggacattaacttatagagagcatatttatcccatatgaataccttgcctgcctggagtaatccagatatttaacctctgagacggcagttgaagcagagagtaatggaagtgatgacaatgaaagcgagaagggtgagggacaactgcagtgggggctcaagggattgtgatttttttttttaagaggagtccctaggtaaggaaccacatactgggttctgttaatcaacatttaat

SEQ ID NO: 807806 - DNA, 605 bp, Homo sapiens
cttagcacaatggcagccattttgcaaccatgacagaaaagcctgaagatgaagaccaacatgttgaggatgctgggggaaaagaagaaaaaaaacaggtctctgatcatttttttgagctcctgaaattataaccttggactcacctasctgtagacttcttgaaagctgaaataaggctgagcttcaaacaatgggagacatatggcaggagaagggatcctggctgactggctgaactggttggatgtgaatggtagatgatggctcatcaactctttacctattctctcaaaaaatttatgtgataccacttacaagaccagatatgacataaacatttgcttaactttaaatatcaatttttttcctaaaaccacacccctgccccattttctagagttgtagcataggaatgaatggcttcctggaccatagtggacttaatcatatcctttgggcagtgccttttattcctagttgtagagttagttttcccacttccatccctcaccccccaatcctgggtgcttctccattcattctggctggcatagtagaaatataatttgctttgacctcttgtactctagaaaaaagtatgc

SEQ ID NO: 807807 - DNA, 647 bp, Homo sapiens
ctgggagccctcccaaacgcttttgtatcatttctggtgactgtattcagtagcttttcaagagaagtattttatttttaatccaatcatttttattaggaaactgagactcagagaaattgaatacattgcagtcatgtaactaaaaactgccagatgcaagattcaaatacagtctaattcagaactcatgtgctttacattacactrcatgacagtttatactttacagttttaagggacatgagagtagatttagtccaatcacttggcccataccagtgattcacattcatgtttatttgctttttttgaagttctttctctgaagaattacactgattcacagtatgggcaccaaaataccacttttaattcttatggaaagtaattccaacttttattagttatttgagaaatctatgacacattcaagccatcaaggactatgtaaaccaaaataaagaattcaatttcaagtgtcttactatttcaaatatgagtcaatacaggtttaaagtatcagccattctacttggccagttgaattctctttaatacagttagtctcgtagaggacagccttgtgattttaatgcactccacactgattaacatcttaaattcagttgtctatcttctaaaac

SEQ ID NO: 807808 - DNA, 515 bp, Homo sapiens
taaggtgtatagcttaaggtgtttataggtaaaatgttgcttgttttgtaagttatattttcatacacagtgtttcttgttttgtgttcagctattatattttaatatgtgactgtgtgtcagactgccgttcttagaagttatgctttaaaaaaagttctctttcctatgagtgttttttcacaataagaaacaccttttacaaattaactcatactcaattaagtatacctatacatgaatctttgagtgtatgtataaactraaaccaaagttgcatttacaaaggattctaatgagtattgcttccattctgttcattttgtttcattctcccccactgcccccccacccccaacagatgctggaagaaatccactgaaccgattttataccctattaatggattgtaatacacagtttgaaaaatacgtcttctggagctctgtgtgcattaaaataaattaaccctttcctttttcaaatcaggttgccttttcttttagaatagctgt

SEQ ID NO: 807809 - DNA, 622 bp, Homo sapiens
aagaaaaaaatcaaacaaacctaatactgcttttaaaataacactgtaatggtagctatgtttttggactcatgctaggaacgaagctaaatgctttacatcatgattttattgagccttcataattatttcttgatttgatttgtgtttgatgttattattwtatttattttataaatcagaaagcagaggcatctgttaatgttgttcctatcatcttgaattcttaagtaccgcttcatgctgcctctgtatttaaactgaaagaaaatatgcaaaaacaaaaaattgaaatacctgaaaaaaattcacatctgaattagtattgtccttttcaaggttgggttggctatacatgtaattctagtggagctgttagtgatgaaaacattccacaaaacctttgttggattaccttcagaacctatgagacatagtcttttgaatattcatagaggtgaccgttttatgtcttgagagaggtttttatttttattttttttgaaatagccaaatatcacttgataaagtaggaagtcaaattagataacactattgattaataaagcagtatacacaattaaacagtaactttataatggttaagattatttatacagtt

SEQ ID NO: 807810 - DNA, 494 bp, Homo sapiens
cttaattacttttctttacgtagtcatagtattttaattaaatagtagctccatcaaattaatcccttgaaattcattttattacaataattagaatgttcattctttatcattttaaacagaatcatcactctgtgttctttgaaaaaccaaaaatggtgggatagattacacattgctttataatttacaaggagctttcctatttttattcttttttgagtctagcaaccctgtgaaattggtactaataaaaatttagaaaaatatggctaggtctaaaacttttgtcttcctattcttcactygaatggccacttaaaaggtctccctgtgttgtccaggctggtcttgaactcctgagctcaagtgatccctctgctttggcttcccaaagtgctgggattacaggcatgagccaccaaacccagcctaatttaatgttttattttactttatctctaattgtgattgctttagtttaaattttcagt

SEQ ID NO: 807811 - DNA, 494 bp, Homo sapiens
cttaattacttttctttacgtagtcatagtattttaattaaatagtagctccatcaaattaatcccttgaaattcattttattacaataattagaatgttcattctttatcattttaaacagaatcatcactctgtgttctttgaaaaaccaaaaatggtgggatagattacacattgctttataatttacaaggagctttcctatttttattcttttttgagtctagcaaccctgtgaaattggtactaataaaaatttagaaaaatatggctaggtctaaaacttttgtcttcctattcttcactcgaatggccacttaaaaggtctccctgtgttgtccaggctggtyttgaactcctgagctcaagtgatccctctgctttggcttcccaaagtgctgggattacaggcatgagccaccaaacccagcctaatttaatgttttattttactttatctctaattgtgattgctttagtttaaattttcagt

SEQ ID NO: 807812 - DNA, 528 bp, Homo sapiens
cttcaccagttctgtcttctgccacatatagtcttctggttaatcttcccacagagttttgaattttaattattaatagtttctaaaagttctatttctagtagttatttttaaaatccacattacctgtgttttcaaggttctcttttatttctttaatcacattaaatatggttgtatattctgcctgagaatcccaatgtttatggttttggggtctattgctttcttacttatgacatccttgggtgttgatttttgactgcaaatatcttccttggaattatgtctgtagatagaatgtggttgaggcctagatggaaactaaattccttgtttctgccagtcccctgggtgcacaaytagccaggaacattctaggctaaattctcaagtttttttcagacccattgagggcgaacttgtgcttatatattttcaaggaagtttttacttttttctgtcacttatcgggcattactgttatattttcaaaaaagtttttactttcttccaccacttatctag

SEQ ID NO: 807813 - DNA, 489 bp, Homo sapiens
agcattgctgttatttttaaatttttatttatttagagataggctctctgtcacccaggctggagtgcagtggtgcaatcacagcagccttgaccttcctggctcaagccatcctcctgccttggcaggcctccctccaagtagctgggactacagatgcacaccaccatgcccagytaatttttatattttttgtagaggtgaggtttcaccatattgtccaggctggtctcacactcctgggttcagttgatccactcaccttggcctcccaaagtgctagaattacagacatgagccgctgcacctggccttatctagcattattgttaatgcaggcaaatgtctctagtgtttccttctttctttcacctttacacatcttcagctttgtgtaggggtatcctgttaggcttcctaccatcgatggaccctgagttttcattagtattctccatgtcccaagaagctgtcaaaatggaaagccag

SEQ ID NO: 807814 - DNA, 427 bp, Homo sapiens
aatagttgttatactgtatttttagtcagtattgttttatattgttgcattgttactgtttattgtttttactctggaatattttcaatcagtggttagttgagtccatagatgcagagcctacagatatggagggatggctgkataataaaattccattgatttagaataagtaggggaaagctagtcactattgatgtgaaataaatgaatcttcagataaaaggaaagtaatcaccatgtcaggctgtggttcaggaaagagcattttctgccctgcttccatcactaactgtgtaatctggcacaagttatttaccatcattttaccttaatacttacatgtgtacaatgaaagagagaaaccaaatcttgtctttcagagttgtttttcttcttactctctttttatgatcacaactgacca

SEQ ID NO: 807815 - DNA, 610 bp, Homo sapiens
ttgatttgtgcacgtgggcagtatttaaaccactggagatgaagacaaaatgaaaaaccatacatctcttaagagttagctctcctttttctgagtaatgaatcttatcctccttcaggagcctctgctgagagaaatataatcccatcatatcactttagctaaaatatagggaaaatgtaaaatctcaaccttcttccaagcagtcttttaaatagaataatcatttctttcctaactagtcttgattttttgtttgtttttgtttttttgagacagagtctcgctgtgtggcctaggctggaatgcagtggcatgatctcagctgactgcaacctctgcctcccgagttcacgtgattcttctgcctyagcctcccaagtagctgggactacagacgtttgccaccacactcagctaattttttgtatttttagtagaaatggggtttcactattttggccaggctggtctcaaactcctgaccttaagtgatccacccccctcagcctcccaaactgccgggattacaaacatgagccaccacacccagtctgattctttacagaaaaacttagaaaatacatgtaaataaaagggaaaatatcag

SEQ ID NO: 807816 - DNA, 628 bp, Homo sapiens
ctcctttaagtagtctacacttgatgatgatttgtagcacaaaaatccatacagcatacagccagcagctagacagtagtcacttgtgattcctgggtcactggcttttggcacagtaagcaaatgaaagctcagtgactacatatttagcattcacttctcagcgtcacaggccacagaaatgctgcttaattattcaggcaatgatttgcaattgcaagtcactgctgagacagtgacaagcaagtcagagttttagggggagaacacgtcttttttctaccacacatgctcctatttgacttcaagggtattgctggagtcagaacccaaatattgctttatctcatattagttatatttttgtggttcctttctcccgtgacatgaaacayagaataaaactctaccagttattcaaaagtcaaagaagaaaagagaaaattgtgaaacttgttcataatttctgtcatgcactgagttgattaatggcagcagcaattttggaggtggtggtgggtctgttgtgtgttttcatcattcctacacagtaaaagcaaagtatcacataagtttatggaaaaaaaccctctaaatatacagagaagaatctattatgctatttgta

SEQ ID NO: 807817 - DNA, 621 bp, Homo sapiens
gtgagggctgctttatcgccaggatcctgtgcctaaagctccatgacatctccctggtaaaggcgaggtaggactccatggcatgcttgggcttgagaccgaagacaaccttcaggctctcaccatatataaattgtgatctcagggttgttactattgagtgaccagtggggatgggtcagccacgaggagagtgttccagggtaacttgcatggatctaataccctacttctagttggccctgctagcaatagacatggcccaactaaggaatcaaatgttgtccatcataagaaccttctccctcctcgtgatgggagatgaaagttggcaagggacagtcagaggacctcaggagtcctgtgcactttccacctatcaagacaagaagaaagacaggaggagcattttatcccctttcaaagaggatattttgtccaaggggcagtctgcaggggttccaagkcaagttacattttgtgtatggaaagtgagtgatggaaaaaatgctcagtaattttctaatcggcctgtattttcaagagtctattattaatttgaattaaattcatgtatgtgattcatatgtataattaatgtggcttacagaaaataaattg

SEQ ID NO: 807818 - DNA, 646 bp, Homo sapiens
atttccacttaccttccaaggttgaatctagacaatgtagtatctcacctctttctttgctttgttctccaagacagagtcttgctctgtcacccaggctagagtgcagtggcgtgatctcagctcactgcaacctccacctcccgggttcaagcagttctcctgcctcagcctcccaagtagctgggattacagggtcacaccaccacacccggctaatttttgtatttttagtaaagacggggtttcaccgtgttggccaggatggtcttgaactcctgacctcgtgatccgcccrcctcagcctcccaaagtgctgggattacaggcgtgagccactgcgcttggccacacctcacctgtttatgatcctttttacatagtttattttgctcctgaacccacataactcttacaagggtatccagccagattcctttggttctcaaagactgttaaatttttctctactgtagtcatattcctttatctttcctgttaaaatccccttcaaatattgtaaggctaaataaataatattcctattctaatgccaggatctaattcactggggccatggtgtctttttctcatataataagttctcaggatgtatttttctattctcatggtctatttcctttta

SEQ ID NO: 807819 - DNA, 646 bp, Homo sapiens
atttccacttaccttccaaggttgaatctagacaatgtagtatctcacctctttctttgctttgttctccaagacagagtcttgctctgtcacccaggctagagtgcagtggcgtgatctcagctcactgcaacctccacctcccgggttcaagcagttctcctgcctcagcctcccaagtagctgggattacagggtcacaccaccacacccggctaatttttgtatttttagtaaagacggggtttcaccgtgttggccaggatggtcttgaactcctgacctcgtgatccgcccgcctcagcctcccaaagtgctgggattacaggcgtgagccactgcgcttggccacacstcacctgtttatgatcctttttacatagtttattttgctcctgaacccacataactcttacaagggtatccagccagattcctttggttctcaaagactgttaaatttttctctactgtagtcatattcctttatctttcctgttaaaatccccttcaaatattgtaaggctaaataaataatattcctattctaatgccaggatctaattcactggggccatggtgtctttttctcatataataagttctcaggatgtatttttctattctcatggtctatttcctttta

SEQ ID NO: 807820 - DNA, 627 bp, Homo sapiens
agatcaatcactgtgactttaatttcctaaatttggttaattcctgaggtggtggtaggatcaaataagttaatttctgtgaacacactttgaaaattttagatctgtacacaaatctaaatcacttatgattattaataatcctgttctcgggaaatatatgtcataaatagttatttttagaaacgaggcatttattcatttgggagtatctaaccctgagtatcacctcagaggaaatattttgagttaggagggaccatgttgctacaagcaaatatattttaatattaatgggaggaatagtgtggacacgtaattgtataagaagtagttttggaagaaattgggcattggtgacagaaaagtatttgggaaagataagacttctctaaaaggattgctttggaaatgttagtagagtttaacctcttatatgtggctgctgcagaggctgtggcaggagactgttawgggcggacttctccagaggcagaaattgaggcagaagttggtgtgagtttatcttatccgtcggaaccgaggcctgcaaagggaaaaccgctagatccccagctcgctcagcctctcggtgcggctgccagggacaggtgccgatgctgacag

SEQ ID NO: 807821 - DNA, 622 bp, Homo sapiens
atctttcacagtccctacaacgccatacccttagcaagttcacaggccaggaagaatttgctaaattgaattttatcagtgtcccctactgtattttggttttgtaaccatttgttttctttctctttgctattgcaaagagagaaccactttttttgagactgagtctcactctgccgcccaggctggagtgcagtggcgcaatctcggcttcacttaaacatctgcctcccaggttcaagtgagtctcctgcctcagcctcccaagtagctgggatacaggtgcttaccaccacgcctggctaatttttgtattktttgtagagacaggatttcgtcttattggccaggctggtcttgaactcctgacctcaggagatctgcccacctcggcctcccaaagtgctgggattacaggcataagccaccacacccggccaaagatagaaccaatttaacatatggttgggtccattcatgttttctgtgttgtctgctgccatttcacggggatgtccatcagtcaccattccactaatattttgtaaaagcaaaagatagttgcacttcttaaaaccttaatcagagcctgccactgttggcttcttcttacttcacactg

SEQ ID NO: 807822 - DNA, 620 bp, Homo sapiens
ggaagtttctcaaattaagtcgtttaatagacatattgccaaaaccagaaaatccttttagtggcttttgcattgtcctccacctgttgctgttatcttctataatgtgtgtgaggaaggataggaagggaaaggaggagtagggaggagaaaggaataaaaacccggcaattattaggcatatatgacagtccttgtctgatctctaccttgtcatatagcatttggcaaattgtgttttccctttgagtccctcctatattttccattcataaaataatagatttatataataacaacaacccttgttgaggactcagagtatgcctagcactgtgctacatacattatattattatgtgcattatgctatatatgtcacacaaaaatcttctaagaaaagtattattgtctctatttttagataataaattgcaaatatgraaggtcaaataatttggccaaaatctcaaagctataagtagcaaagccacgatttgaacacaggtctgtctgattctaaacctctatcttcagccctgtgttactgtcctcttcttattttctatcaaatattcatgaagattcctgtcatctctaaccttctccgggtctctaat

SEQ ID NO: 807823 - DNA, 611 bp, Homo sapiens
atgaactgaggccctttgtagtatggatgggaagagacagaaggtgggctgggggctggttctcctacactgccacagtccatcattaaactttgaagagtccaataattctaaactagaaccataccatctgggttttaatgaaatttgtcaaaggtggtaagggataaaaaagactttatttaacagttagcttgatttttataaccatgaagtatttagccataggacacacggtcctctatttgtaccctttttcggggactataaattcagaggtaggtttagcacctagcacagtgtctgacacacaagaaacccttaataaccatatttcggatgattggtgactatttttaaggcttwttcttgcttaggagtgcttcaagttaaatacaatatggtgttttgaagtgtgttgagtggggtttaaaatactcaacaattagattttacaatgaaccattcaggacagacacagtgctcacgcctgtaatcccagaactttgggaggctgaggcgggcagatcacctgacgttgggagttccagaccaagcctgaccgatagggagaaaccctgtctctaataaaaacacaaaattagccaggt

SEQ ID NO: 807824 - DNA, 579 bp, Homo sapiens
aggaacatgtggtgaggaactgaggcatcctgccgagaagcagcaacaacttgtactgtgtgcctggagtcacagctgcttgggagactgaggtgggaagatcacttgaactcaggaggtggagactgcagtgaactattgtgctaatgcactccagtcctggtgacasagaaaggtgctatctcaaaaaacaaaacacaacagaaaaagcgaccaagtgccatgggatgtgttgatttgctttagcgatgaaattatacctggaacagcagctgcaattggagttacaaggctgtggataacccactttcattctcctgtgtccttcagtctgctgacaggcaaacaggtgatttgagcagggatatggtaggaattaccacctctgtgtctttcaagaccttgttagtggcactaatctcatcaagccttccagaaatgtgatactgtttttggtttactattttagtatgtagacacagttctagtggattccacttggccttttttatcatgatagccttcgtgccatgggtcagagaaccaatacaagaagtctaccagttgttgccgggcgcg

SEQ ID NO: 807825 - DNA, 579 bp, Homo sapiens
aggaacatgtggtgaggaactgaggcatcctgccgagaagcagcaacaacttgtactgtgtgcctggagtcacagctgcttgggagactgaggtgggaagatcacttgaactcaggaggtggagactgcagtgaactattgtgctaatgcactccagtcctggtgacacagaaaggtgctatctcaaaaaacaaaacacaacagaaaaagcgaccaagtgccatgggatgtgttgatttgctttagcgatgaaattatacctggaacagcagctgcaattggagttacaaggctgtggataacccactttcattctcctrtgtccttcagtctgctgacaggcaaacaggtgatttgagcagggatatggtaggaattaccacctctgtgtctttcaagaccttgttagtggcactaatctcatcaagccttccagaaatgtgatactgtttttggtttactattttagtatgtagacacagttctagtggattccacttggccttttttatcatgatagccttcgtgccatgggtcagagaaccaatacaagaagtctaccagttgttgccgggcgcg

SEQ ID NO: 807826 - DNA, 451 bp, Homo sapiens
ggtcagagaaccaatacaagaagtctaccagttgttgccgggcgcggtggctcatgcctgtaatcccagcactttgggaggctgaggcaggtggatcacgaggtcaggagatcgagaccaccctggctaatgcagtgaaaccccatctctactaaaaatacaaaaaattagccgggcgtagtggygggcacctgtagtcccagctacttgggcagctgaggcaggagaacggcatgaacccgggagtcggagtttgcagtgagccgagattgcgccactgcactccagcctgggtgacagagcgagactccgtctcaaaaaaaaaaaaaaaaaaagagtatgttgttgagtatgtctactcatacacctactgaatatatctaaactgcaatgtatacccacctgtgcattctggaactggggaaataatgatgcgatgagttctgggaac

SEQ ID NO: 807827 - DNA, 451 bp, Homo sapiens
ggtcagagaaccaatacaagaagtctaccagttgttgccgggcgcggtggctcatgcctgtaatcccagcactttgggaggctgaggcaggtggatcacgaggtcaggagatcgagaccaccctggctaatgcagtgaaaccccatctctactaaaaatacaaaaaattagccgggcgtagtggcgggcacctgtagtcccagctacttgggcrgctgaggcaggagaacggcatgaacccgggagtcggagtttgcagtgagccgagattgcgccactgcactccagcctgggtgacagagcgagactccgtctcaaaaaaaaaaaaaaaaaaagagtatgttgttgagtatgtctactcatacacctactgaatatatctaaactgcaatgtatacccacctgtgcattctggaactggggaaataatgatgcgatgagttctgggaac

SEQ ID NO: 807828 - DNA, 451 bp, Homo sapiens
ggtcagagaaccaatacaagaagtctaccagttgttgccgggcgcggtggctcatgcctgtaatcccagcactttgggaggctgaggcaggtggatcacgaggtcaggagatcgagaccaccctggctaatgcagtgaaaccccatctctactaaaaatacaaaaaattagccgggcgtagtggcgggcacctgtagtcccagctacttgggcagctgaggcaggagaacggcatgaacccgggagtcggagtttgcagtgagccgagattgygccactgcactccagcctgggtgacagagcgagactccgtctcaaaaaaaaaaaaaaaaaaagagtatgttgttgagtatgtctactcatacacctactgaatatatctaaactgcaatgtatacccacctgtgcattctggaactggggaaataatgatgcgatgagttctgggaac

SEQ ID NO: 807829 - DNA, 655 bp, Homo sapiens
cgggatgccacaccaaggaaccagaggaggatgcctcaccccctgggcaagtctgggacagttttaggactaaaagaataacagtaatgaattataacctaatcaacaaaataaggatccattgagttgggccaggcgcgatggctcacgcctgtaatcccagcactttgggaggctaagccaggtggaacacttgaggtcaggagttcgagaccagcctgcccaacatggtgaaactccgtctctatgagaaaaaaaaaaaattagctgggagtggtggcacatgcctgtaatcccagctacttgggaggctgaagcaggagaatcacttaaacctgggaggtggaggttgcagtgagccgagattgccccctgccctccagcctggcgaaagagcgagactccgtctcmaaaaaaaaaaaaaaatccattgagtctattcttattttttactttttgacacagagtctcattctgttgcccaggatggagtgcagtagcatgatcacagcccactgcagccttgatgaccagctaatttctaaattttttgtcaagacggtgtcttgtcatgttgcccaggctggtccaaaactcatgtgcttaagccatcctcccaactcagccttccaaaacgctgatattacaggagtga

SEQ ID NO: 807830 - DNA, 632 bp, Homo sapiens
cataactaaaagtcccttccagagggttttcctagaatgaaaatggattaacttcagctttgaaatgacaaatttcatttcctctccattcctataaaagcttcaaagatttcagggtcaattttctgttggggctcaagctccaagggtctgtgtgtgtgcatcccctggattccccaagaagaagaacccggcccaagacctccatgcagccaagcctgtctctaccaaaagccaaagcttgggcgagaatacagatggaggctcatagaccatatacctgatagttacaagttataaagagactattagaccaaatatggtttatcctcctgtgatattctgaaatatatatttggtctttatcaccatttcccagcatacaactcctaaaatcctgggaatctacaaagtgctgtgttttgttttttgcttttttgttttgctttttcttttgtgagacggagtctccctctgttacccaggctggagtgcartggcacaatctcactcaacgtccacctcccggattcagatgactctcctgcctcagcctcccgagtaactgagattacaggtgcccgcctgtcaccaacatggtgaaatcccgtctctactaaaaatacaaaaat

SEQ ID NO: 807831 - DNA, 598 bp, Homo sapiens
ctttcacattcatgcactctaattttcaaggaccagatccccttttcaagacactgtttgtcatttctaactgaacacatgtaaaaccaaacttatcacattaaattgaattttttctacctctatcgaaggtactaacaatatccaaggtatttgggctaggaattctcatgtagcagggttcacaaactccaaattttctcaaaaggcaggcaggaaacaaatgtttgaatcacttaaatagaaggaaagacagagaagtggggctgcagccaaaccagagaacayagcactacctcaaactttccttggcactcagttcaatttgtggtccatgaatctaaagccgaacattaaaacaaaaaacagcagttctaaatggtgaaactgtcaatatggtattattcaaatccaagccatccccttctacccttcattgttaaagtccttgattatctccgtcatcttagggtattcagcttttcctgtgtttatgcagcaaacttatttccaaatgaacatatagctgaccacaatgtaggggctcactgctgtatcttgctctttctgaccaccaagtaaacactatggctgcagc

SEQ ID NO: 807832 - DNA, 600 bp, Homo sapiens
tactggaagtgtaacatatggaggttaataaagtacagtacaatatttaggattaactgtgatgttgaaatcttaaattttacaaatgtcttaaattttacaaattttacaaatgtcttaaattttacaaattttacaaatgtctaactatcaaaactattttgccaagattctacctttgtttggaaatactcatgtttgtgaatggttaagatctgttatgaaactgaataaaaactaaatcttataattaaagggtttaaaaatgaatgatgtaatgcccatcatatatttaatacttggtactaacttagcatagaagtaaatgtatcacatttctagccagatcaaatgaatgatttcaaaagaaaaaagctatagttaagtattcctgtttcccaatttcaaacttaaaataatcgtatgtttatgtgtatatatacataaatatcttatatmtgtatatatacacacatataccttatatgtgtgtatataagatatatgtgtgtatatttatatatgtgtatatattatgttacatgcttatataatagcataagtttgatacttttgatacttttcaaaagtctgaatata

SEQ ID NO: 807833 - DNA, 563 bp, Homo sapiens
tagaacccagtcttgcaattctttgctcaatgcttattccacatttcctatataatccttctcagaaaaatgtagagaagatcaatcactgtggccaacaacaacaataatgtttaagaagcaatacagattaaggcacattttggaatcgaaayggtgctaggttgaaattctagttctaccataaaccagctgtgtgatctcatagaagctacttaactaatttatgtctcagtttcctctttcctcatctgtgagtttcctctttcctctttacgtcctgatatgcaaaaattcctaagatataatgttaaaggcaaggtgcagaaccatgtacaggttgggcagccctaaccccaaaactcaaaatccaaaatgctccaaaatccaaaactttctgaatgccaatatgatgccagagtggaaaataccataccctacctcatgtgatgggtctcagtcaaaatgcagtgaaaactttatttcaagcacaaaattattaaaaatattgtataaaattaccttcaggctatgcatataaggtctatatgaaacataaatga

SEQ ID NO: 807834 - DNA, 634 bp, Homo sapiens
aacagcaacaaaacatttttttaattaaataatgaacataaaacttgaatagacatttcttaaaagaagacatgcaaatggttaataggcatatgaaaaaatgctcaacagggctgggcgtggtggctcacatctataatcccagcactttgggaggccaaggcgggcggatcacccgaggtcaggagttcgagaccagcctggccaacatggtgaaaccctgtctctactaaaaatacaaaactagccaggcgtgttggtgcatgcctgtaatcccagctactcaggaggctgaggcaggagaatcacttgaacccgggaggcggaggttgtggggagccgagatggcgccattgcactccaacctgtacaacaagagcaaaacttcgtctcmaaaaaaaaaagaaagaaaaaagaaaaaatgctcaacatcactatgattatggaaaggcaaatcaaaacgacaatgagatatcgtctcactccagttagaatagctattatcaaaaaagacaaaaagtaacaaatgatggtgaggatgtggagaaagggatactcatgtattgttggtgggaatgtcaattagtacaatcattatggtcaacagtatgaaggttcctcacaaaaattaaaa

SEQ ID NO: 807835 - DNA, 601 bp, Homo sapiens
tattaccattatttccatttctcagatgaggaaactgaggcaaagtaagaaaggttagtaacttgcctgttatcgaaggccagaggtgggatcaaaatctgatctgtccgacactgggacccacagaggtgagcccaaatgttgtgaaagcttacaaaattgtctgggggaaggataggtccttgtcaagaaaaaaaaaaaaaaggcaaaaaacagtagatactggccaggcctgtgcaagggaggagtctgaggttccaacttcaagctttkggtaccccaccttagagaatggatttttttttttttttttttgagacagagtctcgctctgttgccaggctggatggagtttagtggcaaattctccgctcactgcaacctccatctcccgggttcaagggattctcctgccttagcctctcaagtagctgggactacaagtacatgccaccatgcctggttaatttttgtatttttagtagagatgggttttcaccatgttgatcaggctgatcttgttctcttgacctcgtgatccaccctcctcggcctcccaaagtgctgggattataggtgtgagccaccgcgcccggctgag

SEQ ID NO: 807836 - DNA, 601 bp, Homo sapiens
tattaccattatttccatttctcagatgaggaaactgaggcaaagtaagaaaggttagtaacttgcctgttatcgaaggccagaggtgggatcaaaatctgatctgtccgacactgggacccacagaggtgagcccaaatgttgtgaaagcttacaaaattgtctgggggaaggataggtccttgtcaagaaaaaaaaaaaaaaggcaaaaaacagtagatactggccaggcctgtgcaagggaggagtctgaggttccaacttcaagctttgggtamcccaccttagagaatggatttttttttttttttttttgagacagagtctcgctctgttgccaggctggatggagtttagtggcaaattctccgctcactgcaacctccatctcccgggttcaagggattctcctgccttagcctctcaagtagctgggactacaagtacatgccaccatgcctggttaatttttgtatttttagtagagatgggttttcaccatgttgatcaggctgatcttgttctcttgacctcgtgatccaccctcctcggcctcccaaagtgctgggattataggtgtgagccaccgcgcccggctgag

SEQ ID NO: 807837 - DNA, 605 bp, Homo sapiens
atacatgtgtctttttggtgtaatgatctattttcctttgaatatataccactgctgggccaaatggtagtttccctctaatatctgatgatcctgagacggctgctctagtttattcacggtgtatttaaaacagattaatagaatctgtttgcatatagttttatgattttatgacatctgggtatcactgtaagtgatttggccagtgcattacaagttcagtttcttaagaccttttccttgggttgtctagaatgcccacagaagacatttccaaatccttgcctgagartgaagtcattctggaactcaagtgaagggagaaggctgagggcttcaaaattcaatgtgtgagcatttaccgaaaccctcctttttcagtactgggcattcattttcagctgactggtctccttcagatccttgaacctctggtgtactctcttagaaaatatatcttctgtcttctgtctggttgtggaaaaggcaatatcctgtctgtatggagcagaggacaagatccaggagtctgacttcttcttaaacttttaatcaatcctgttttcacactacttttacccctttttctagtttatttgtag

SEQ ID NO: 807838 - DNA, 603 bp, Homo sapiens
tgcatagtataggttctgggacaaccctcccatctctgccactatctcggtgatcctgggttctttatgcctcagctcctacaaaataaagataataatacccacacttcatggtgcttttatgaagattaaattggatgatgccattaagcactgtgcccgatgcacagtacaagctttacctgctcttctgcttcttttgctgctggttcttatgactgcycagctacctggcagggactgtgtccccttgagaaaccagtactgctcccttcccacagtttatgctgaattaataattgctgaagtagaacaaatgagatcatcctatcacctggccaatcaagacatcacttctagcaggggtcagcaaacttatgttaaggggccagatgatattttggctttgtagatctcttttgcaactactcaactctgctgtaatttgttgtagtgcaaaagaagtcacacataatactgaaataaataggtttgactgtgttccaataaaccttcatttacagaatcagagttagggcacaggccacagttcactgagccctgacttagagcagcaaatacgaggcagcaacgcttaaaaac

SEQ ID NO: 807839 - DNA, 603 bp, Homo sapiens
tgcatagtataggttctgggacaaccctcccatctctgccactatctcggtgatcctgggttctttatgcctcagctcctacaaaataaagataataatacccacacttcatggtgcttttatgaagattaaattggatgatgccattaagcactgtgcccgatgcacagtacaagctttacctgctcttctgcttcttttgctgctggttcttatgactgctcagctacctggcagggactgtgtcccctygagaaaccagtactgctcccttcccacagtttatgctgaattaataattgctgaagtagaacaaatgagatcatcctatcacctggccaatcaagacatcacttctagcaggggtcagcaaacttatgttaaggggccagatgatattttggctttgtagatctcttttgcaactactcaactctgctgtaatttgttgtagtgcaaaagaagtcacacataatactgaaataaataggtttgactgtgttccaataaaccttcatttacagaatcagagttagggcacaggccacagttcactgagccctgacttagagcagcaaatacgaggcagcaacgcttaaaaac

SEQ ID NO: 807840 - DNA, 626 bp, Homo sapiens
gcaaaagaagtcacacataatactgaaataaataggtttgactgtgttccaataaaccttcatttacagaatcagagttagggcacaggccacagttcactgagccctgacttagagcagcaaatacgaggcagcaacgcttaaaaactatagcttccactcattagttaacgtatttctttagacattctagtttctttttgccatctgtgatggttagtgctacatgtcaacttggctaggccatggtacccagctatttagtctggagtcaggttcaccaggaggatatatatkctctgaatcagtatccaacatatggtatggtttgtcccataaccaggattcacaggtcccagaatcaaggggtggaagtgggagtggcaccactcactgttatccctactgatccactagcaaaatttttgcttcctgttcctataactttatgttatattggcctagagggcctagtttcaaagggaggaatacttctagcaacagaagcaaaaatgattccattgaactgaaaattaaggtgccacctggctactttggtctcctcatgcctctgcatcagcaggcaaaaaagggagttattgttctagctggggtgactgatcctg

SEQ ID NO: 807841 - DNA, 626 bp, Homo sapiens
gcaaaagaagtcacacataatactgaaataaataggtttgactgtgttccaataaaccttcatttacagaatcagagttagggcacaggccacagttcactgagccctgacttagagcagcaaatacgaggcagcaacgcttaaaaactatagcttccactcattagttaacgtatttctttagacattctagtttctttttgccatctgtgatggttagtgctacatgtcaacttggctaggccatggtacccagctatttagtctggagtcaggttcaccaggaggatatatattctctgaatcagtatccaacatatggtatggtttgtcccataaccaggattcacaggtcccagaatcaaggrgtggaagtgggagtggcaccactcactgttatccctactgatccactagcaaaatttttgcttcctgttcctataactttatgttatattggcctagagggcctagtttcaaagggaggaatacttctagcaacagaagcaaaaatgattccattgaactgaaaattaaggtgccacctggctactttggtctcctcatgcctctgcatcagcaggcaaaaaagggagttattgttctagctggggtgactgatcctg

SEQ ID NO: 807842 - DNA, 540 bp, Homo sapiens
gctgagcatccccagtccaaaaatctgaaatctgaaatgtttcaatgagcatttcttttgaaaatgtttcaaaattttggattagggatgctcaacctgtattggtcaaatcaatttgctgcactacaatttggtctgccaggtaaattamcattcctaggagaaacttaagtaatctcctcctgaaacaaaatttataaaaatttcataaaatccctaattagttttatgtgaaatttatgaaaagttcatacaattgttaaaagtcaaatttggtaacagaaattctgaagcataactgggaacagcaactccacttcattcctctccctgtaacatttctcacatgcaatgcagtggtggtagatatcttacttcaaaagcatatgaagtatgctttcaatataaaaacagtggcatttgggatgctatcaaaacagacttgagtgatacagctaaggtccccctgcctgtactggaattcccagcatagattaatttgacattttatgttagaaggaaatcatccatccaatttac

SEQ ID NO: 807843 - DNA, 506 bp, Homo sapiens
gtcttttctttcgacgtcaaactaccccacaaagagacaactgaatttgattttaacatgtttatcatttctggctcatgtattaggggctatacatctaattcaacacagtgttttgcggataaccccattgctccaggcccaggaacrtgatatctttgacaccttgaaagtgactttgtcagaaacatttgtattttgataaataaataaataattttaaaaatcttgataaaaacttctgataaaagtatcttttaaaatgaatgactagctagtgtaagtaatatgaaggttatatttttaaaaagcctcctggaaatgtaagacgtgaagatataggattctgtatagcaagtgataactcatacgtccatgcctttcctcccccagcactgagtgaatgagggcctgtgtgataatattacccctttgtgcacatgaacaatttatgggtccacataatgccatttcagtatgttcaaattatacaagggtgaaggagg

SEQ ID NO: 807844 - DNA, 623 bp, Homo sapiens
ggatggtcatcagaaaaatgtgtaatagaattgctgaaagacgattgttcccactgttatcattgttaaagaaatgatttccattttgtgattcaatcacatcgcattttctctttttcactcttaagtaaaatgargcattgttttccaaatcagcagagacatccatgtccttggaataagacaaattcttttatcaccatcctgtggtaatttgacatgacacgtagcacagaactgattggtgggacccggagtcctgaatctacctgaaggctaatatttagcaaggcatccctttatgcaagttttcgttttagctaatatataaacaaggatatgaatcctatggttccttcatgggaagtatccaaactaacatcacgagagacttcttaactgaaccagttaacagtgcttcagtgtcaccactggcatccagtgaccttgctccttgctgagactgcttgtcaccagctcagactgtatccctctctaaggacagtcaagcagccaaacctgcactaaccatgaggggttgttccggagcatgttgacatacaacccgatgagaacatgttcatcagctagcctgtctgccacattcaggctgtactgtatcc

SEQ ID NO: 807845 - DNA, 621 bp, Homo sapiens
gcagctcatttgcgagagagggtctcccaactttcagtccgtggatgtcccacggccccaacacaccaacatttgttgtttttattttgtctgtcctttctttctctcttttttttgtctgtcctttctttctctttttttttgtctacctttctcttttcttcttccctttttcttcatttttttgtttctttctgatgccccctctttccttctttgttttattttttgaaagctacttgtcccagccactgttcttgtaaactttcttttgttttccttactctattttattccttttccctccatcagtgtcctctttaacaattggtattgggaatactttatctttactcaacaaaattgacttttcagtaattagatatgtacagtgtagaattcaattcttgttgatctatcttgggyaagacaagactagatagttcataacctgctgctgtttctggcctgttaatctcatttgataaccaaaaataaactctttctgcttccctttccaaatataccaaatgaaaaggactgaacctatctttcccctcagtgaatgacaggaagctttgaaaactgccccctatgtttctattgcttctgtcaccatta

SEQ ID NO: 807846 - DNA, 583 bp, Homo sapiens
aaaactatttcaaaggtggtgtttcatttgtaggtttcatggcctaatatgaccaactccatgtttttaagatcctaaaattagaaagtgctatggtttgaatttgtgtccccccaaaatatctattgaaatctaacctccaatgcaaaagtatgaagagctgaggcccttaggagatgagtaagtcatcaaggctctctgctgttataatgagatgagtgcccttataaaagaggtttaagggagctgttcaccmcttctgccttttgaggacacagcaagaaggtggcatctgggaagcagagaagaaacccacatccaacactgaatctactgatgccttgatcttggactttccagcctccagaactgtgagaaataaatatttattatttgcattaacaagactaaggtattttattatagcagcacagcatagactcagagagttagcttttttttttttttttttgagacggagtctcgctctgtttcccaggctggagtgcagtggcgatcttggctcactgtaacttctgccttctgggtttaagcgattctcctgcctcagcctcctgagtag

SEQ ID NO: 807847 - DNA, 583 bp, Homo sapiens
aaaactatttcaaaggtggtgtttcatttgtaggtttcatggcctaatatgaccaactccatgtttttaagatcctaaaattagaaagtgctatggtttgaatttgtgtccccccaaaatatctattgaaatctaacctccaatgcaaaagtatgaagagctgaggcccttaggagatgagtaagtcatcaaggctctctgctgttataatgagatgagtgcccttataaaagaggtttaagggagctgttcaccccttctgccttttgaggacacagcaagaaggtggcatctgggaagcagagaagaaacccacatccracactgaatctactgatgccttgatcttggactttccagcctccagaactgtgagaaataaatatttattatttgcattaacaagactaaggtattttattatagcagcacagcatagactcagagagttagcttttttttttttttttttgagacggagtctcgctctgtttcccaggctggagtgcagtggcgatcttggctcactgtaacttctgccttctgggtttaagcgattctcctgcctcagcctcctgagtag

SEQ ID NO: 807848 - DNA, 654 bp, Homo sapiens
gtttgcttattataatccctgggaaggaggaaagcatggtagagaaagacttcagtctgatggagtccactccacatcagcttggggagagggcaagttattttacgtctctttgtttgaactcctctgtgtaaaacagaagcaatatgtatttttagtggttattgaaaagtctaaaatcaatagcaccatacctagcaaacaataayaacaacataatgtttcttctcccttcccctcttcacaaagctaatccttttcaccacaggaagagtgtaccctgagaacaatactgtgtttttattttattttattttattttatttttctttgtttttcttcctatccatacataccaaaggctgagcacagagttggtgctcaataaatacttgttatattatattgtccaatttgatttgaatcaacaaatacaaatgtattgaacaagtcacttctctaattgaataagaaattgagataacttgggattttgactcaagagaattagtttgagtccatctgtaactttgaagttacttgatctttggtgcaagttattttacttatttaattacatgaggtagtatatataaatgtatttgtaatgtaaaatgctgtacagattaaagtagctttcgtgcccatagagtt

SEQ ID NO: 807849 - DNA, 594 bp, Homo sapiens
aataagctatagagtaacacctaaatacacctgaagttatacagaatctagcagatgaaaattggcatttactaaatgaaaatattactaaattctttacatctattgctaaacagtgatcacattttatgctatcattggattgatcttttcttacagaattatgtgaaataatttaattgataaaaaaatrcaatacagagtgaaatatttaagaataaaaatccaaaaacagtatctttaaactaaaaaaaacagtttcagtactatttctcaattttttagaggcatgttaaatgtctttatcttttctctaaagtaaatgttaataattattactcaagtgaaatatttttatcaacttcatataatcatgttttccaaaaataacaatattcctttcattagaatgacaccacaaatattacaaatgataatatactacattagttttatctactggtcccaacagagttatcattctaaaaattacactaattttaaaataccacagcaaatcaggatttattttgtatgtgtgtttttattttaagtttcagggtacatgtgcaggatgtgcaggtttgttacata

SEQ ID NO: 807850 - DNA, 634 bp, Homo sapiens
cagagctgctttaatcatgtaaatcttgctctctgccttctttgtgcagtgtttgttgctctaccaacatgggatgcctttttctccttccttcttgcttgacaaattcctgcacatcacttcatatgtcaaatttctgaaaagatctccctgccctgtctcctctgagttgtctaattgtcactccaatytgctgccctcataccctgaacttactgtgataatgtcacttttcacgtttatttgagcatatcctgatgcagtgcataacacataatagccactcaataaaaccagttgaattaattcattcttccatcctccttcatcttctccatttttttcatgccttctctctctttttcttctcttttattcatttgttatattttaatcaagcatattatttaaaatgtataacctcgggtgttttccattaactagcttattatcactacattctctaattttgtgtcacaacattaaaaaatcttcagtgttgtgattttaactgttctatttgttcagtgacatgtgtacaactatttatcttaaaaaatagaactataaaatgctttacattttgtttgtttttagtggtacaagccaactattcttcaaactatatcagata

SEQ ID NO: 807851 - DNA, 624 bp, Homo sapiens
ttatgaaataaatccatgaaatgcaatcttttattaacaaatgaaattgtaagcaatctgatagagtgtcacatattttatcaaacatacaattaacatttaattttgggagtaagcagagaatgattttgaattgcctaagtaaaccaaaagacagtcaaagtttctctgagataaactctaatgatattttgaaaatattttaaatggccaaaactgtttaatacaaatttatttctcacactttctaataatttttcwaatgcttttggagtatcttctcttgctgactgagctatctacctctggatattaattattacattttgaatgtaggtagaaattgttcttggagtaactaaaaatcattagctgaaatttaacttacatatgttcgtttgtcttcatatttcttttcacttgcttaattatgggaaagaaaatgtatatctgaacataaaagtacaattaaagttaaggttcagttaatgatttttaattactccaagaacattttgtacctacattcaagaatgtaactttttatgataaatgtccaaatttatattatattttaaaattttagaactgatattatcagagcaacctgtacatcagagaaca

SEQ ID NO: 807852 - DNA, 623 bp, Homo sapiens
ttagaagactagtcacaaaatttttttaaaaagccactcatttttaaaaatagttaactagttagaaaatatctagttaatagatttttttaagtctttgttttttctggatgagaaatttccatactgttattgtttatagacttatagagtttgccacaaatgactacgaaaatgctatttaaatatatagtttctttttagattaataaaatatactatcctattaaaatgttatacattcaaaattatttctgaatgtgtgcgttcatttattcatcattctacaaatgtttggtaagtgttgctgtaatygatttcaattttttttttttttttttgagacggagtttcgctcttgttgcccaggctggagtgcagtggcaatctcggctcactgcaacctccgcctcctggattcaagcgattctcctgcctcagcctcctgagtagctgggattacagtcattagccaccatgtccggctaatttcttatatttttagtagagtgggggtttctcatatacattctagtccctaattctgactgcccattttcttaaagtaactgtaaatttaggctgagtcttaagttctaatacagatggtaattcaatttctg

SEQ ID NO: 807853 - DNA, 586 bp, Homo sapiens
gcccccacgttttagaatagcaggtgctgagcacattccaaatgtaacctccctttttctgcttctcatgcattaactcacggctgtcattcctgtaaaacttgttccactcctgtttcatctgacaaactgctgtgatatttcttccctgcagtgaatctggaggagtgtctcaagtcggccagcctaatccggtccagtgaccctgccttcagaattctagaagatggctcaatttacacaacacatgacctcattttgtcttctgaaaggaaaagtttttccattttcctttcagatggtcagagacgggaacaacaagagataaaagttgtactgtcagcaagagaaaacaaggtataaggcaagggcttaagcagcctagcacagtmatatgcttacgggagtccttcgtgtttcatgtgttttaacgtgtttcatgttaaaatctatgctattgaatgacaaatttgtcttttccacttacaattagtgtaaataaagactagacttttaaggagtggcagagccatttacaaacttttataaagatgaatgactctgtagaccaggagcaaagtaagaa

SEQ ID NO: 807854 - DNA, 622 bp, Homo sapiens
gggtctaaaactcagcgaaatgtgattcaggctggagatgtgggctccaccctgtgcggctctcttcccactgattgcgggtttgagtctctctttaaagaggagaagagactgtttaaagcttactcccatcttactagaatattctatagggcagsccctctcttcagagagtggaggtgtggccaatccacagaattgatttgaatgtttaactctaggctcattttcttgcactgagcggtagagatcagttcagaaagcagggaggaaaaagttgctggaattcacatctcattttcagcaaattcaccacaatgaatttcgtcttataaaaccatttcttaataaatgattctatttaggagaggatttcccaactaaattctttttgattgtatgaactcctcttaatatgcttaagactttaaaaatgttattttatatccacattgtaaaatccccacattatataaaatcaagtatacttgagcaaatgctgacctgtgtctacatagatgtataaatgattgtattgtggagtgagggttttaacagattttggttgtgccagtcctagtggaataaagttgatccttaaatatttattaatgaattatct

SEQ ID NO: 807855 - DNA, 622 bp, Homo sapiens
gggtctaaaactcagcgaaatgtgattcaggctggagatgtgggctccaccctgtgcggctctcttcccactgattgcgggtttgagtctctctttaaagaggagaagagactgtttaaagcttactcccatcttactagaatattctatagggcaggccctctcttcagagagtggaggtgtggccaatccacagaattgatttgaatgtttaactctaggctcattttcttgcactgagcggtagagatcagttcagaaagcagggaggaaaaagttgctggaattcacatctcattttcagcaaattcaccacaatgaatttcgtcttataaaaccatttcttaataaatgattctatttaggagaggatttcccaactaaattctttttgattgtatgaactcctcttaatatgcttaagactttaaaaatgttattttatatccacattgtaaaatccccacattatayaaaatcaagtatacttgagcaaatgctgacctgtgtctacatagatgtataaatgattgtattgtggagtgagggttttaacagattttggttgtgccagtcctagtggaataaagttgatccttaaatatttattaatgaattatct

SEQ ID NO: 807856 - DNA, 619 bp, Homo sapiens; identical to SEQ ID NO: 803820

SEQ ID NO: 807857 - DNA, 597 bp, Homo sapiens; identical to SEQ ID NO: 803821

SEQ ID NO: 807858 - DNA, 605 bp, Homo sapiens
cttcagtttccttttctgtaaaattgggatcatgcgtatcccaacaagtcctatgtagattttaggagactgtttccctgatggtgttgaatttgaatgagagactacataccctattttccttttttggcaaaacagtcatcattttcaattcaacaaayatatgagtagttattctacatccagcccaatcttaggtgctgtgggggagacaacaggtaagagatgatgccggcccttgtctttcaaaattagaggcttgagaataacgaagacaccagaatctgtttttcctttttgttttgttttttaaacagctgtgctgagatgaatttacataacatatgatgcacccatttaaagtgcacagtgtaatggtttttaatgtattttaatgtatttaaccgttaggcaagcttcatcacaatcacttttccaattttttcagcaccccaagaagaaagcccatccccttgagctatcactcctcattgtccccattcatcccagcccctgccaactgctcatgtactttctgtgtctttagatttgcggattttggacatttctcttttttttggagacggagtcttgctctgtcactc

SEQ ID NO: 807859 - DNA, 605 bp, Homo sapiens
cttcagtttccttttctgtaaaattgggatcatgcgtatcccaacaagtcctatgtagattttaggagactgtttccctgatggtgttgaatttgaatgagagactacataccctattttccttttttggcaaaacagtcatcattttcaattcaacaaacatatgagtagttattctacatccagcccaatcttaggtgctgtgggggagacaacaggtaagagatgatgccggcccttgtctttcaaaattagaggcttgagaataacgaagacaccagaatctgtttttcctttttgttttgttttttaaacagctgtgctgagatgaatttacataacatatratgcacccatttaaagtgcacagtgtaatggtttttaatgtattttaatgtatttaaccgttaggcaagcttcatcacaatcacttttccaattttttcagcaccccaagaagaaagcccatccccttgagctatcactcctcattgtccccattcatcccagcccctgccaactgctcatgtactttctgtgtctttagatttgcggattttggacatttctcttttttttggagacggagtcttgctctgtcactc

SEQ ID NO: 807860 - DNA, 611 bp, Homo sapiens
tcccacttccctgccttccacaggaaggaacagcttctacatgggcacttgccaggatgagcctgagcagctggatgactggaaccgcattgcagagctgcagcagcgcaatcgagtgtgccccccacatctgaagacctgctatcccctggagtccagggtgaggcctggggtcactgtgcagggcctcccatccctgccctcccttggaatcccacctgctgatctagcctgagcactagggacctggatcactgactggccgaggagggggagggtgaccttctcatgtttccaggtggaacagacagctgggagggcactcaggggtgaagtccctkggggtaggcaggagctcagagaggaatctggtcaggactgcactgcttgtggccatttgcccagggcttaggtagaaagcagaacaggaaaggaggccttgtgtctttctacctcgtgaggcaggaagggtcccgaccataagtgtcgggcgagtgtagagttctgggacagccccaggtcctcctccatctccatacagctatggtccactgaccacctcttccacccatgcagccttccctgagcctgggcaccatcacagatgagga

SEQ ID NO: 807861 - DNA, 603 bp, Homo sapiens
aaaaatccaaaaggttgtacaacagacttctaacagtggtcacttctgagctggggagtgtcactggcaaatgtgggttgaggcttaatgaagagggagttttacattttactctagatacctccgtattatattatttcacagtgataatgtattccttctcctttccaattgtttggagagctcctgggcctgtctgcacttgccaggrttaggagtgtgacaaggtagctagctgtgctcacatcagttgagttggaagcagctgctgagaccagaacagggagcacatgtaaggggaggagggggatagcatgtgcaagtgactgagagaggcagccaagacaggccatttccaatttaccaacagtaactatcacatgtcttgtcttgacattctccaagttactttgctctctgtcatcacactggaccctgaggatgattctctgagcaagggaggtagggatgatgatgagaccaggagtaatcaaaacatgggacaacaaggaaagtatgtgtgtagaaatagttttttttctttaacttgaaatacgtcaaggatactcattacagcattgtttgaaatggtaacactgaaaa

SEQ ID NO: 807862 - DNA, 603 bp, Homo sapiens
aaaaatccaaaaggttgtacaacagacttctaacagtggtcacttctgagctggggagtgtcactggcaaatgtgggttgaggcttaatgaagagggagttttacattttactctagatacctccgtattatattatttcacagtgataatgtattccttctcctttccaattgtttggagagctcctgggcctgtctgcacttgccaggattaggagtgtgacaargtagctagctgtgctcacatcagttgagttggaagcagctgctgagaccagaacagggagcacatgtaaggggaggagggggatagcatgtgcaagtgactgagagaggcagccaagacaggccatttccaatttaccaacagtaactatcacatgtcttgtcttgacattctccaagttactttgctctctgtcatcacactggaccctgaggatgattctctgagcaagggaggtagggatgatgatgagaccaggagtaatcaaaacatgggacaacaaggaaagtatgtgtgtagaaatagttttttttctttaacttgaaatacgtcaaggatactcattacagcattgtttgaaatggtaacactgaaaa

SEQ ID NO: 807863 - DNA, 668 bp, Homo sapiens
taataatgtcacctagcttctaatattaaagacaatgccacatgctttaagtgtcagaaataaaagtcatatcaaagttgtcaatggaaggtcctttgagaagacttcagaaagattttaaagtgtgtttcataaatcctaccaatgaaacaaaaataattctaagactcctatggtaattatcccactgcacacacacggactctcagctccaacccaagaagagtcagttgcaaagatatttgtgagtgtggctcttgtatagtgttttaaatgacaatttaaaaaacacagaaatattacaatgttttttaggaaattgcattgaaggaagcaccttagcattttcttgtaaacagtagtgtctatttttggttatttactcctctcttcctccattgtatgctgagaatgagaaagaaaaaccctgtctctagtycatagacctgaaaatagagaaccagaataaaagagctgtgcattggaaattgtaccccaagagctttgtcaacactcactctggatatagaatttgacatcctggatgtcaaattgagctcatgatgggacaagatgttaactgacctgggaactcctgaatcccgctttcccaatctaggatccctgaattgccattacaggtctaacaaactcgctggaaaggcttt

SEQ ID NO: 807864 - DNA, 589 bp, Homo sapiens
ggtttggaacataatgagcttaacattcaggtaaagaaaagatgcagcctagcagtttccaaatttgaatagaatcagagccagctaagggaatttaaaaatacataggttctctgattccccagcataactgccagtttctggggatgctttcaagtgcttttgatggtacactgccagctgggactcttggtctaccaggaagaagctcatgtgagccctgaatgaagaagcacacagcaagaaatgtagctgagggaggacttcaggcwgggcccacattgaggagcacccaatggtggtgcagcaaaccagagaggagagaaggggctcttaccagtatctccaggaagggcacataaaggaaggaaatgggaccaacaagtcagtcagtactgcaggggacagtgcaagagctgatctgccctgagcttgctcaggcaggcagcacatggaagaagtggtcctcctgagccccactctgagatttcagctgcagaaagccccaggagggaagggtgaatagaagcagaatggacaggagaggctgggtgctggggatggacactgttcctctctccaccttgac

SEQ ID NO: 807865 - DNA, 536 bp, Homo sapiens
cgctatccttggctggactttcttccactatctctctctgctccgtggatgcagggtgtcccagggttgtgtccttgccctgctccctgctctgtgcacaggcgctgcctgagaaccctcacccaatcccatggcttcaactgctcacagtgccctgagctgcctgttcccctccgctgacctcatgtatagcccattgcttcatgaacacgttcgttagaacgttccacagaacctgggactcctcatgtgccaactccgccttatcaagtaagtttgcctttctttccccatccccaaccttgatgagtaaaggacttcaccctccatcctcggcccttcctgggctcctccttctcattcatctccayatctggtctattattaaatcctgtccttaataatcattgcctccgaggactcagtgcctatagtgtgctggatttttatgtacattatctcatctaatttgcacaacaggactgcaagagaggtattattagcccactattatcagtgaagactgaaatttgtat

SEQ ID NO: 807866 - DNA, 620 bp, Homo sapiens
aataaactgtattttatgtaaagcaagacatctatttgtttaaaccctggattccataggtaggtagcatgccatatccaccatatatttttccatccctcaagttccaaaattgattccctgaagtaaacaggaaaaacttgggagaagtaatcagtagctaaaattatttttgtttttgtcctgttccagttaatggctattaaaagcaagatttccatgactgcttctattccagatgcccatgttctcagctctaggagtagcaaaagaagttgcattctaatgactcagaggagtcattagccttgatgagtgttcagattgcagtaactcactgcaggatgtttagtgccttgggatccccgggcagcctataatttgctcaaaagctggaaatgtttctgcacstctgcagagcctggcctgcagcttcctgtgttttcccaccttcctgcctcccattgtgcctcagagcaggataataccactttaaacatgtcacattagctgtcaaaggggttttgactcattctcaaggagagaagattgaaacagacccagctgtggaatacagagagctccttggcacctaaatcgctaccccaatcatccgtaaa

SEQ ID NO: 807867 - DNA, 626 bp, Homo sapiens; identical to SEQ ID NO: 754757

SEQ ID NO: 807868 - DNA, 626 bp, Homo sapiens; identical to SEQ ID NO: 754758

SEQ ID NO: 807869 - DNA, 569 bp, Homo sapiens
ggcaacatagatgagcttggaggacattatgttaggtaaaataagccaggcacagaaagataagtaacactgttatcattcatatgtggaagctaaaaacattgatcctgtagaagtagagattagaatacttgttactagaggctggggagggtagcggaaatagggcaatagccaaaggtttgttaatggattcagaagtacagttagacaggagaaataagttttagtgctttattgcacaatagaatgactataaccaacaacaattgattktattattaaaatagctagaggagcagattttgaatgttctcaacacaaagaaatgataaatgcttgaggtaatggatatgctaattaccctgattacattgtaaacatgtatcaaaatagtacactgtatcccataaatatatatgattattatttgtcaattaaaactaataataaaggcaaaaaataaaatataaaaaggaataaaattgtaaaaatcaaaattacaaaatcacgtgcttcctttccactagaaaggaattgtcactagaaattaaggttactaggggtta

SEQ ID NO: 807870 - DNA, 525 bp, Homo sapiens
ggatgaattgcccatcccattcatcagtggcctgtttggaactacccatgggggatgtatttttttcctcaggcttaagggctaataaaaccttagctgtgttgaaaagctggtgttcattcatcaatgattcgatatagttactgtgcacctactgtgtgctgggcactgtcctcgctgctggtagagggtaatgaacaygcaagtaaacaccactcctttctcccagggagcgtttgtctcttggattctgaggaccttgtcactgctttcctttctgtggtcactgcccccatgttcagagccaattttctgaaatgttctgagtacaaaaacatcccctctgatctcacctcattattctatgcttcttctccctgtgtcttggttgtttttgacagaaaagggaaattcatgacgagcatgtggagcccttggtggcccagtgcaggcctggggagctgccgggttgaggcgctcttgtttctctctggaacctctcggtcgctacctctgcccctcacc

SEQ ID NO: 807871 - DNA, 608 bp, Homo sapiens
cattgacgatattctcccaagagggaaagtctttagagaagatgtcatcatcatttacaaggcaaaacatagaggtgggccatggagaactctgaattcttcccactgtgcaccacctgccgagaggctctggctcctgcctcctgtgcctttggtccacgctgcatgctggtgtgggtggggagtgaagagtggaggaaactttcataggggcaaggcccacctgtctctgtggaatatgattcacatagttgtaggtagatgctgaggaggcccgggtagcacaggaagtaccagaccctgagcacctaccattaccaggcccctcgctgaccttcacaacactcactgagyggggctgaggaagccgaagggcctttgtatccattacaaagataacaggtagaagagctgggaatgaaatacaagtcctctggctgctgagtcctagaggctggggacggtgaggggagaggctttctaaaggaggtgaggtgcaggcggtggggacacaggcagtgtggggtgcagtgtcaggagggatgagtgggggttgaggtgagaggtgaggaagagaggttgaccaaggctgggagatgcagatggga

SEQ ID NO: 807872 - DNA, 527 bp, Homo sapiens
ggaactgtgagtctattaaacctctttttcttcataaattacacagtctcaggtatgtctttatcagcagcatgaaaatggactaatacagacacttaggtgcttccaaatcttggctatcatgaatagtgctgcaataaacatgggagtgcagatatctcttcaatacactgatttcttttcttttgggcatataccagcaacggaattgctagatcatatggtagctctatttttagttttttgaggaatctccaaactgttctccatagtggttgtamtaatttacattcccaccaacagtgtacaagggttcccttttctccacagcctcaccagtcatttgttattgcctgtcttttggataaaagccattttaactggggtgagatgctatctcattgtagttttgatttgcatttctctgatgatcagtgatgttgagcaccttttcatatgcctgttttccatttgcatgtcttcttttgtgtgttcagatcttttgcccattttaaaaacaggattat

SEQ ID NO: 807873 - DNA, 625 bp, Homo sapiens
tggtggatcagcgggtgctagcccctgatagacaaagcctagtgacaggctggaggggaggaggccagcccaggccctggggcctgagaggagtaggcggagttcaaggactgtttgagcataaatatgcccccgcccccccatcccctactctacccatgtcctctacacctgccaggattccctcatcccatcctccaggaccagacacttgtgcccagatagtgcagcaggtgacccaagcagctgggaggcagggtcagagtgcagatggaaggatacagggccccctctcacccaccttgtccttcaaggtcagcacattctgatgctgttagcaagtggctttaggaagctctgaggtcaccactgtgggggctcccaaccacctggcgggactggctgggactccccactcaccttttccgggcacctgagtaggagggaagagacttaaccctgtttaggygtgcttctgaaactcagctagaggctctctatccaggccccagtagcaaagcaggctttcaccccagaaagccaagcagatctgggcagagagaagccatgaaggttactgggatgtggggcatcacccatcccctgcccccagggccaggagcgc

SEQ ID NO: 807874 - DNA, 632 bp, Homo sapiens
aaaaaactttaaagtgctaggtaaactatttgtcattaatgttaaggaagctagcattaatatgaaggagattcctgaaggctaccagtatcacagaatcagagcagaaggtccttggagagtgacctgaaagagaaagacagcagcagatatttgatgtcttcctgactttctattgtggtctaggttgtgtaaccaatgagtttattatttttgcaatagatatttctcgatcttactatttttttgtcttcatgtatacttaaattgtatattcacagacaatatactattttaaaattttctttgctggttaccagtttttggataatatgtatttgcatatcaacataaccactacttttattttacttggttcattaactacagttgttttattcttcattattccatactatagtttactaatttgcaacataggttcttatgaatcttccaaaatcrctcattcacatagccgttgacacaaaactctaattccttgccggctggttgcaaggaggccttagttcctcaccagcttgacctctccataagtttgcttcgtccttatgtcctctagagtgagtgtcctaagatagggcaaggaggaagccacaatatctattatc

SEQ ID NO: 807875 - DNA, 669 bp, Homo sapiens
caaggtgctgtcagggttggtttctggtgagacctctttttttggcttatggacagcagccttcttggtatttccttacatgggctttcctctgtgcatgtggtcagggggtggtggcggggctggggggagagagccagggagagtgagagagtgagagcgaaagagcgagcaaggagcaagcatgtgagtaagtgagagctctctctggtgttgcttccacttcttatacagacaccaatcttaytggattagggcctaacccttaagacctcatttaacctgagttactttcctaacagccatctcttcaaatacaggtgcattggggattagggctttaacatatgaatttttgggggacacaatcagttttataacatgaggtaactgaccataagttttacatgaaataatcagacaatagttttctgttgaaacttagttggcataagtaaactgctctgatgtgttttgtggtttagtgtcataacaatccaaagtgaaattcatgtcactatattattatagataatatgcaaacttttcttctagtcattcatgctgtagtcactactaagtattgagtgtataaaattggataatttatttttgctcagataggtctcaataaaaaagcatgtaaatgtctaggttctcatgaaattt

SEQ ID NO: 807876 - DNA, 632 bp, Homo sapiens
tcagggtgcaagctgtcagtggatctaccattctagggtctggaggatgttggctgtcttctcagagctgcactaggcagtgccccagtgtggactctgtggggactccaaccccacattttccatctgcactgctgtagtagacattcaccatgaagtctccaccccagcagacttctactggacatacaggcttttccatacatctttagaaatccaggcaaaggcttctgatatggtttggctctgtgtccccacccaaatctcacctcaaattgtactcccataatttccacatgttgtggggggacccagtggtgataactgaatcatgggggcagtttctcccatgctgttcttgtggtagtgaataagtctcatgcgttctgatgrtttgaaaaggggaaaccaattttgcttggctgtcattctctcacttgcctgctgtgatgtaagacatgccttttgccttctgcctccccccagccatgtggaactgtgagtccaattaaacctctttcttttgtaaattgcccagtctcaggtatatctttatcagcagtgtactcctgtactttgtgcacctgcaggtttaacaccccatggaaattgccaaggcttgtggcttgcac

SEQ ID NO: 807877 - DNA, 441 bp, Homo sapiens
tccaatcaaattgaacagggagtgtctccagaatgaagtttttgattagattcagtgtctgtgcaatcaggacatgtctcttggaatgtagtggtgattaggtttattaattatttttttcatatataaggggaagccaatcagaggatgcattttcccagagaaggagcatctgaagagtttaagaccttggggaaagagagtcttgctgcttgcttgtgagacttgccttggaaggtagataagttcactgcatcctccagctttttatttytggtgagttctccaagcactgagatgtgaactggcctcattcccttacaatgatactgttaccagtagaagagattccagttactggcagcatatctgcatgggtccataagcaacttcagtccttgcctcctcagaagaaagaattcgactgaagggcatacagcg

SEQ ID NO: 807878 - DNA, 526 bp, Homo sapiens
agaataggaaaaagcacgttgagtagtttttccacaccacagcattcttttaggctcctgcttttaccttctgcttccctcagcatcctgcatctcaccaggagagacacagcttctttgccattctcggcattccacttcggaatcaatcagaatagctcctattgctagaaacttgctttattaagttctgtttattcagggcttatctgaaagagaaacattttttatgatttgagatttctaagccattttaaaacttggttttaacagcttgagaaattgggggtatagtagggayggaaatacatatatttggatgtgacttcaagctagataaaagtttggaaggaataaaagtttgacatctaaagtttttgcatagtttgagttgagcaggaggtactaggtatgtttttaaaatatttttttcagccaggcacggtgactcatacctgtaatcccagcactttgggaggccgagacaggcgatcacctgaggtcaggagttcgagaccagtctggc

SEQ ID NO: 807879 - DNA, 526 bp, Homo sapiens
agaataggaaaaagcacgttgagtagtttttccacaccacagcattcttttaggctcctgcttttaccttctgcttccctcagcatcctgcatctcaccaggagagacacagcttctttgccattctcggcattccacttcggaatcaatcagaatagctcctattgctagaaacttgctttattaagttctgtttattcagggcttatctgaaagagaaacattttttatgatttgagatttctaagccattttaaaacttggttttaacagcttgagaaattgggggtatagtagggacggaratacatatatttggatgtgacttcaagctagataaaagtttggaaggaataaaagtttgacatctaaagtttttgcatagtttgagttgagcaggaggtactaggtatgtttttaaaatatttttttcagccaggcacggtgactcatacctgtaatcccagcactttgggaggccgagacaggcgatcacctgaggtcaggagttcgagaccagtctggc

SEQ ID NO: 807880 - DNA, 544 bp, Homo sapiens
ttcctatcacatttaccacgattctacaattttacatagaagtgaaaccacctttgcaaaaattacaactgtgaaagaaatcagacctaatcgactccatcttgcttctaatctttaagctgtcctttttcattcctgggcataggtggaacaaactttgggaagtaattcagttcatggtttgactctgaaacaaaattgataatagccctttcccaaaaagactcccttcttgcctggggaccagtctgccttygcaggactaacaaattagctacaagattagaaattacagtttaggggtcatgtggcctctggctccaagagtctgcaccctcccaccctccaagttgcttctggggataacatctctattgtaaaatctaagatcagtgcttgagatattttacagaccctgcactccatagatcagctgacaccactgagaccagcaatctggctcaaccatatctgccatcccacccaggaacagaagatagcaagaaaaactcacttagaccccctatgattccatctccaacct

SEQ ID NO: 807881 - DNA, 660 bp, Homo sapiens
aaacggggacacatcaggtctgtcttgttcatcactgtgtccacagggcctgacacctagtaggctcagtgggagaaaggagccccaattaccaacaaaagccaggaaagaacgggaggctcttacggaaaagggtgatacttaaactgagcaaggaggcacctggaaatagtgccacctaataatttttggcgatcagactggcacactagaacggttcataagaccagccttctcccattggctagcttccttcctcacccttctcaccctgggcaagccgcttcctctctctgggcctcttgcttttcctctgtaacataaaaggggttgagcaatatcatctctgagagcgccakgtgtgtgcgtgccagagggaaaacccccacaacgctaatacatcaaaactgcaggtttgcacaaaaactgaattctgctgaatgcaaacaggcaaacagcatttaccaggaaacaaaacaaaatcaagcacataaaaaagtaggaagagttggaaaacggaaggaagataagttctcaaacagctggaatagttgatgttagctagcgaagtttttcagaggaaaaaacaagaagttggttatgaggcaagtggacctgagaaaaaagactaaaggggaagaatagcaagtaaaacagaac

SEQ ID NO: 807882 - DNA, 607 bp, Homo sapiens
tctatttgtttttatgatgttcatctccttggtaaatttctcattaatatcctggattgattttctgatttctttgtattgattttcaggtttatcttgcatctcattgagattctttaagatcagtattttgaattctttatctgaacttttaaagaggaattatttttkattgggatctgttattggataattttggtcctttgatggtatcatatttccctgatttttcatgtttcctgtgtccctccattgattttggtgcatcttgtatagcagtcacttttgccaagtttttgaaattgctttcataggggagaattttttcctgaggatgtgtatatgttgttgattcagttaagatactgtggctttgattttgggtgctcatggtagtgtgatctttgtatgaatattttggcagtacacaggcagtggtctctgtgatttcctcagtgactaagggtacagctaatagttgagtttgtggtggaattaagctagtgacctggacaccaactaaatcagtcttcaggctctggtggtagtagcagtggggtcctttcaggccccagagcaacttacactggctctagtgtttgtgagt

SEQ ID NO: 807883 - DNA, 636 bp, Homo sapiens
cagcaacttctccatatcattgccaatacttgttattgtttatctttttagtatagccatcttgtgggtatgaagtagtttctctcattgtggctttgatttgcatttccttaatgactaatgttgaacatcttttcatgtgcttattgacaccatttgtatatcttcatagtagaaatgtctattgatatcctttgcctatttttaaaatagccatagttgtatttttcttattgagttgtaagacttctttctatattctagatactagactctggatacagatatgatttgcaaatattttcttctgtgagttttcttttcactttcttttttttaacatcaattaaattacatttatttaaatatcctcatcaaaacacatcttatgaagcatcttttctgtgacaccctgatctatgccagatccactctrtgctgctgttttctgacatcagtttctgccagtgccctccagtgaggagcccccaactgggcattctgagggtgcatgtgtctccctcgaggcttcctgaagcaggggcacgacacctcctccatgtaccagggggtgaaggtctgcagggtcaggggttggggggaacccctgtattgttgctgctccctgctgctgtc

SEQ ID NO: 807884 - DNA, 528 bp, Homo sapiens
catttgcaaactgtcgtggcactggtgggagtgtcttttcgcatgctaatgcattataattagcatatgattagcagtgccaggtccagaggtcactttttttgccatcttggttttgatggattttggctggcttctttatcagccaaaatcccatcctgctgacctcctgtcttgttccgtgattatgaatgcctaatctcctgagaatgcagctcagcagatttcagcctcattttatccagccastattcaagatggagttgccctggttcaaatgcctctgacactaccatggtgtttaatgtctgctactatctgcctcatctgcctttttcttcttcctctatagaacagctttctctcattccttatatacttggcctaaatatggaagcctcagctttagctttacactaccttcactataagtatccaaaaaagtatcatttttatttgagtcctaattctgattttccagacaaagaatctgggattagtgtgagatttggcaaggggaatgaggga

SEQ ID NO: 807885 - DNA, 622 bp, Homo sapiens
cttatagactacattttataatgtggcattgtcattacgaacattttcttgtgtctaacatcatttttattagtcacataatatttcagtgattgtatttcctatggttcatttaaccaaactccaatttttattcacgcatttaggatgtttactttttttgctattaataatgttggaatgagtatccttgtacattcatctttcagtccttgtccaattatttccttagagcaaactcctagaagcagaattacccacttaaaggtctttcacatgctgcgtcgtgttttctttcasagagaacagaacaatttccatttgtaccaatagcgaatgaaggtaccctatgatcttctttataaataagactggaaaagatcatgaagttcccaatgtccaatatctgagttttatcagagacttcccttaatgaggctaaaacgagagccctggctccctttgatggggagggcacatattctcaaagaggggaatctgggctgcagaagacttatgattttgacttgacccagctaagtattttcaggaaatttgtcctccatagccccaaagtgcagcgtgaaaccagccagcatccaggtgctccctgcagtgagag

SEQ ID NO: 807886 - DNA, 636 bp, Homo sapiens
tgaagaaagggaaagaagcaagcaatgagctgagtccaaacagagatcattttcctggaaaaatcagaaaaatatgttcccagggttcagcctataaaaaatagtaggctcccagggaacatgagagggttccagacaacaaagggctggattcagatgttgccaggattaatctaaagcaggagaggaacaaaactcatttccaaaggaaggatctcatctgtgtgtcgctgacagccccgatgaagtctatacctagaattacaaggccattgaacatcagtgctaggaaggccctgggaaggccctgagacatcatctgagccaattctctctcacttcaccaactgagaaaataaggcccagaggggtgaagtaaattaatcaagaaaacacaactggttaaaagtcaaacctggaccagaacctaagactcttagctcctggtcaagtgcaattctcaccaaatagcaactctatgagctggatttcccaatatamgattgggacaatttcaatcttatgtaatttcttctttccaataatgatcatgttacttagatgtgtgcgtaacaaaacgtgatttcatttttgtacctttgtgtggcttttcatgttaaaaatttggaaaaaaaa

SEQ ID NO: 807887 - DNA, 555 bp, Homo sapiens; identical to SEQ ID NO: 805421

SEQ ID NO: 807888 - DNA, 648 bp, Homo sapiens
actctcagacttaggagctgtggctgggactcaacaaagggcagctgtgaaattctgagaagagccaaggggaaaggagccgagaactgggtcttcccaactctgcctccaattctaggaaacgggaagaatcataaagtgaagtgtgatgaggccttcagatttgccaracttgtatggaatctccaggcttcctcctctcacatcctcctgcaccgcgcccccccccggcaccaaccaaagggggaaaaaaaaaaaaaaccttcttgatttttccatgtgtgtagtcagggtagctgagaaacagcagattcttacgttcctggaaagttgggtgcttggtcccttgcagtcctttgaaagatatggttcagggtcttcctaagagaaagacagtagcctcaactcaaagaaggaggcttcctgaaggatgggtaccttgctcataattcctatcatggatatagaattttaataaataatcctgcttactaataagaacaaaggagccacttgtcttccccagcccatcagtctaagagcaggagaccctggcatgggagagaggagggcggtgaggtgggaaagaggaaaggtagacagagctagcatccagtgattcagagctattccaaattccactttctg

SEQ ID NO: 807889 - DNA, 648 bp, Homo sapiens
actctcagacttaggagctgtggctgggactcaacaaagggcagctgtgaaattctgagaagagccaaggggaaaggagccgagaactgggtcttcccaactctgcctccaattctaggaaacgggaagaatcataaagtgaagtgtgatgaggccttcagatttgccagacttgtatggaatctccaggcttcctcctctcacatcctcctgcaccscgcccccccccggcaccaaccaaagggggaaaaaaaaaaaaaaccttcttgatttttccatgtgtgtagtcagggtagctgagaaacagcagattcttacgttcctggaaagttgggtgcttggtcccttgcagtcctttgaaagatatggttcagggtcttcctaagagaaagacagtagcctcaactcaaagaaggaggcttcctgaaggatgggtaccttgctcataattcctatcatggatatagaattttaataaataatcctgcttactaataagaacaaaggagccacttgtcttccccagcccatcagtctaagagcaggagaccctggcatgggagagaggagggcggtgaggtgggaaagaggaaaggtagacagagctagcatccagtgattcagagctattccaaattccactttctg

SEQ ID NO: 807890 - DNA, 648 bp, Homo sapiens
actctcagacttaggagctgtggctgggactcaacaaagggcagctgtgaaattctgagaagagccaaggggaaaggagccgagaactgggtcttcccaactctgcctccaattctaggaaacgggaagaatcataaagtgaagtgtgatgaggccttcagatttgccagacttgtatggaatctccaggcttcctcctctcacatcctcctgcaccgcgcccccccccggcaccaaccaaagggggaaaaaaaaaaaaaaccttcttgatttttccatgtgtgtagtcagggtagctgaraaacagcagattcttacgttcctggaaagttgggtgcttggtcccttgcagtcctttgaaagatatggttcagggtcttcctaagagaaagacagtagcctcaactcaaagaaggaggcttcctgaaggatgggtaccttgctcataattcctatcatggatatagaattttaataaataatcctgcttactaataagaacaaaggagccacttgtcttccccagcccatcagtctaagagcaggagaccctggcatgggagagaggagggcggtgaggtgggaaagaggaaaggtagacagagctagcatccagtgattcagagctattccaaattccactttctg

SEQ ID NO: 807891 - DNA, 546 bp, Homo sapiens
atggacatgttaccatcaaggcctgcctgattaggggacctttggtccccaagagagttggttctctgttaggtgctgggggtagcacctccattccccagagaggacatcagccagggagggagaggcttctctgccaagtctgccagggacagtgcctggaggggaaacaggctcattggtggtgagggacagtggccactgggatcagaccaggayatagccccagccccagcccttgccctggaatcaatgtagtcccaactctggctatgggcctttccccccagtagcactggacaggttccacaggttccagctggacctgcccccaagcacaggtcctggccatggggaggatgatacgggggaagggtaaagtggacaaagaactgggcagggggaagaatatcgggacactggtcttctgtctgccacggacactctaggtgactgagggtaagtcatgtctcctctatcagcctcagtttccccttatgtaaaaagagagcattgacctgggtgcctgccttgccagaccccagc

SEQ ID NO: 807892 - DNA, 601 bp, Homo sapiens
ggtggcttcagtacagtgaggaattatttcaagtgattctaaaatacaggatgactgtgcatccttagcaggacatatcctacagacaaagaactgcaaagaaatcttattttcagtaatcaaattgttggtaataatacaggttttgcttttctaaacctcgtgtatttgtctaaagcaaatagatatttttgttaatgttcggaaccaccaaaattcacaacataaaaaaaacagcaatctaaacatcaaataagttttttaaaaagtgtaaccataagttkgagctgggattattaatgttctcataatgcattttctcttaaaactggcactcctaaaaatgtcattttcattggtttattcaagggaagaaaaaagtcatgttccgtaaaactgcacactaaaaattacagagcttattataaaaattacagaccattaggaatgaaccactcaaaaccaatgcagctttgcagtaagagccctaaaaacagtaattcgcacctcatgagaagatctgaatagaccagacaggtccgtgtggctatatactgccctgggggatactgaaagtacataaaaacaacagaatggaaat

SEQ ID NO: 807893 - DNA, 599 bp, Homo sapiens
acttaaaagctaagtagaagttcatcatgtagaaaggggaaacatattttaaagagaaagaacaatatgagcaaaggcagagatatccttttaaggtgattctaatgacataataataataaaaaaaatcctagactccatcatgacattatttagctcctctggatgaatggatactccatcacactcctcatgmaaccaacaagtaatttatcaaaggcctactgaatgttagagaaacaaatatatacaagacataatctttgccatcaagtaccttatgtcctatataactttaaataccaactttcctttctaccttgaactagaaaaagaacaattaaacccaaagtaaaaggaaacaataaagataagagcagaaatcagtgagataaaaaataagagaaaattaacaaagccaaagtgttattttggggagattaattttattaataagccttttataaaacccattttgaaaacagaaaaatataaattatcaatcaggaatgaaacagtaaagaaatctgtatcgagtacaggttctacaaactcgaagaataaagttatataatgaacgggtttatgccaataaactc

SEQ ID NO: 807894 - DNA, 617 bp, Homo sapiens
ttttttataagtagaaagactaccctctaaaatgataaaaagtatagtgcagtaattatagtagcatagtcatttttattatcaagtattatgtatatataactattaatatatatgatatactttcacatgactggcagcacagtaggtatatttataccagcatcatcacaaacacgtgaggaatgtgttgcgctaccatgtcatgacagctatgatgtcactaggcaatgggaatttttcagctccattataatcttacgagaccactgtcatatatgcagcccattgttgacccaaacatcgttatgcagcgcatgagtaatcttatgaagttagcacaattttgacacagcaacttgataaagacattaccagaaaagaatgtaactgacctgtagacctcataaacacaggcaacaaatgcytagtgtaatattaacaaatctaatccagcaatatataaaaaaggataatacatcataaccaagtggagtttatcccaagaacacaaggttggcctaacattttaaaatcagtgtaattcaccacattaataaaaacaccatctgagcatccaatcaattcaaaaaagcatctgtccaaaatcaataccc

SEQ ID NO: 807895 - DNA, 607 bp, Homo sapiens
aattagctgaaaaacactaacccagacattgaggaagatcagcaaactccaagttagacaagctcaaagagatccacaaacagacattttgtagtagaaatgctgaaaatcaaagacaagaagaaaatcttgaacgcagcatgaggaaagcaactcaacacttacaagggagccccaataagattaatggatgacttatcacagaaacgatggaagccagaagacaatggaaaacatattcaaagtgctcaggrtgcaagtgggggcggggggggggactgtcagcctaaaatcccatatccagcaaaactatctttcaaaactgaaggtaaataaataaataaataaaaataaaaatgttgaaaacctgaaggtaaactaaagacattgtcagagaaataaaatctgaaataatcattgctagccaacccactttacaagaaataataaaggaagttttgcaggctaaaatcaagtaactctcagcactaatttaaatccacaatgtggttgaaccttggaaacattatagtacgtgaaaaaagcctgtcacaaaaggtcacatgttgtataatgccatttgcatgagacatccagagcatgtaaa

SEQ ID NO: 807896 - DNA, 642 bp, Homo sapiens
acatacaacacctttaatttctagtcaccgtcttactattccaatatctgcaggtttgtgggcctgattctatggttgctatttctgctagctctcactggtggtagcttgttttcttgtgtgtctagtgattatgaactcatgttccttgcaatttaattgttctttgaggtccaaactgtgtttttccagagtcgatttgtgagttcaccaactaagattcttcgaagtaaatttgtaattggaattttttgggtcccagcagtaatgaattgcagctccaratatgcatgcaaatgggcttatggttagaaattattggggtgagaattttctttttcgtgctctaaccagacacaagggtgagatatgcaagtattcccaccagccacctctcagaaacctttttaaaaaatacacccatcgtgacctacatggtgaaaccctgtctttactaaaaatacaaaaacttgccaggtgtggtgacatgcgcttgcaatcccagctacccaggaggctgaggcaggagaatcacttgaacccgggaggccgaggttgcagtgagccgagatcgcaccactgcactccagcctgagtgacaagagtgaaactcattctcaaaacaaacaaacaaacccccca

SEQ ID NO: 807897 - DNA, 642 bp, Homo sapiens
acatacaacacctttaatttctagtcaccgtcttactattccaatatctgcaggtttgtgggcctgattctatggttgctatttctgctagctctcactggtggtagcttgttttcttgtgtgtctagtgattatgaactcatgttccttgcaatttaattgttctttgaggtccaaactgtgtttttccagagtcgatttgtgagttcaccaactaagattcttcgaagtaaatttgtaattggaattttttgggtcccagcagtaatgaattgcagctccaaatatgcatgcaaatgggcttatggttagaaattattggggtgagaattttctttttcgtgctctaaccagacacaagggtgagatatgcaagtattcccaccagccacctctcagaaacctttttaaaaaatacacccatcgtgacctacatggtgaaaccctgtctytactaaaaatacaaaaacttgccaggtgtggtgacatgcgcttgcaatcccagctacccaggaggctgaggcaggagaatcacttgaacccgggaggccgaggttgcagtgagccgagatcgcaccactgcactccagcctgagtgacaagagtgaaactcattctcaaaacaaacaaacaaacccccca

SEQ ID NO: 807898 - DNA, 646 bp, Homo sapiens
gtctcaagtttggttatctctttggatttgggatttcctatcatatatggctttaagaatttccccttctttctctccagcttagccatacatttaaaagatgctttttattacagcaaaatttaaaacttttgtgcaccaaatgacaccatcagcagaatgaaaaggcaattcatggaacgggagaaaatatgtgtaaatcatatgtctgaaaagtgattaatattcagaatatataaagaattcatagaattcaagaacaacaaaaccccaatatcactcaaaaatggacaaaggacttgaataaatatttctccaaagaagatatataaatggccaataagcatatgaaaagatacccaacatcaataatcattaggaaatgcaaatcaaaacctttgtgagataccacttcatacccattaagatggctaataaaaaaaamtcccaaaaaatcacaagtgttggtgagggtgtggagaaattagaaaccagtgttggctagaatgtaaaatgatgcagctgccatgggaaatctaatggtggttcctcaaaaaacaagaaattgccatatgatccagcaattctgcttctggttatataaccaagataattgaaagcaaggactccagcagctattggtaca

SEQ ID NO: 807899 - DNA, 532 bp, Homo sapiens
gaggaaactatagcttaaaagatttcaaaagcaaactacagaccttatatgggtcctgattcaaacaaacaatatttttaaagtgtgagatgtatgagatgattagaaatttgaacactaaatatctgaagctattgtttattttaggtgtaataatattattcctatatttgtaagcccttatcttttagagagacacactgataggatatgtggrggacataattaggatgtagatacagcaagattagccataatctgattattgctgaacctgtgtgttaggtacatggaaattaattatatgattgtctctacttttaaatgtttgaacttttcaacaaaataattttctctttttgagacagggtctcactttgttgcccaggctggagtgcagtggcgtgatcttggctcactgcaacctccacttcccagattcgagcaattctcctgcctcagcctcccaagtagctgggactacaggtgtccaccatcacgcctggctaatttttgtatttttagtagagac

SEQ ID NO: 807900 - DNA, 638 bp, Homo sapiens
agccttctggatctacaaactggggcataaaaaaagactaggcacccattgtgcctcagatccatgccagcctttcctctgtgcttctttttgatcacagggaactgcatttcccaggctcctttactccatggcttctagtaggcatggcccatgggaagcctggtggaaaactagagggaggaaggaaaggaactgcctggtgctttttgcccttttgcttggcttcctgcatctcagcattggtggctgtgtttccttcatggctccagtttcttccagacagcccttcccttagggtcccagctcccacagggctatcccaccagtttcagcatctgctggttttggcctctagtaacgacttcmgcttccctttttcatgggccttcatgtattattggcttccttctgtggctaatccctgcctttctcctctcccctatttaaatcgtaaattcttctgtcagctgatgaaccaatttcctgtattaaattcctccatccaggccagggacggtggctgacacctgtaataccagtggtttgggaggctgaggcgggagaattgcttgagctcaggagttcaagaccagcctgggcaatacagcaagaccccccctctgtaaaaaataaaa

SEQ ID NO: 807901 - DNA, 638 bp, Homo sapiens
agccttctggatctacaaactggggcataaaaaaagactaggcacccattgtgcctcagatccatgccagcctttcctctgtgcttctttttgatcacagggaactgcatttcccaggctcctttactccatggcttctagtaggcatggcccatgggaagcctggtggaaaactagagggaggaaggaaaggaactgcctggtgctttttgcccttttgcttggcttcctgcatctcagcattggtggctgtgtttccttcatggctccagtttcttccagacagcccttcccttagggtcccagctcccacagggctatcccaccagtttcagcatctgctggttttggcctctagtaacgacttccgcttccctttttcatgggccttsatgtattattggcttccttctgtggctaatccctgcctttctcctctcccctatttaaatcgtaaattcttctgtcagctgatgaaccaatttcctgtattaaattcctccatccaggccagggacggtggctgacacctgtaataccagtggtttgggaggctgaggcgggagaattgcttgagctcaggagttcaagaccagcctgggcaatacagcaagaccccccctctgtaaaaaataaaa

SEQ ID NO: 807902 - DNA, 563 bp, Homo sapiens
tactcttcaaagcatgaaggatctagtttctgctcctttatcaaaaggtatatgaagggtcactaggtgttagactttggcactagaatgggaacaggaatgtgtagaaaggtaaagttatgagaaaatctgaaatatatagcatccagggacacaaccagaattgatatccaagggtgactgaaacttgatatccaagggtggcagaaaggcaaaatcacacataagtcatcaagacaggtacctggcatgaagatacccaagaaattttagagtggtgagtagaagatggatgcagcagagattcctgggacacaattatagagtgtcttttgactcattctagagtagtgaagaaattaataaagatgacaagacagtctggatagaaagkttatcagtgaaactggtaatgcttgttaaaactttcacaagagttccccactgagcatgtacaggtagtcttagagaggatcattaggtaaacagccttaataaagatgacttatatgcacagtgcacttcattgtttatattagtttaacttttttcatgcacttcta

SEQ ID NO: 807903 - DNA, 501 bp, Homo sapiens
tgcccagctaattttttgtatttagtagagaaggtgtttcgccatgtgggtcaggctggtctcaaactcctgacctcaggtgatctaccagcctcggcctccgaaagtgctaggattacaggcatgagccactgcgcccagccctttatttagttattatattttttagctctaaactgtcatttagttattcctatggttctaatactttgctgaaactttctattttttgtttcaaaaggtttcaaaattccatattgggacaattttataatgcctgctttatagactttgtcagataatttcaacatctgtgctatctcagtcttggcatctgttgattgctttttcccatgtaagttgagattctccttgtttttcacatgatgactaatttttgactgtatcctgtttaaacagcatacaaaatgttgacttttttttttttgttaggtyccggctgcaagttcagtttcaccttctgtgggggttgtctattgt

SEQ ID NO: 807904 - DNA, 612 bp, Homo sapiens
gacattctgtagggatagtaatacattaaagtttatttatctcaaaaggcctgtaggtaataaactttcactaaataccaaaaataatacagaatgaaactttaatagttatctaatctcagataccttgggagaatataaattaggaacaggcatagaaaattggaacaaagamataacagccttgatattaattgtcttgcttatctgtataaagcagggctgaggaacatattttgtttgttttagttcatcaatttcttttgttcagagtaagtatatgttcaacagaatagaagtgaatgccgttttattttctactaataacatccaaggatgtgacttcatgattgcttttttgtttttgttgttttttgccatttagaatgactggaacaaaaggaaaataaccaattgagaatgactaatagcataaaaagcaatgctgagattttgttctagctgattcaaaatctgaagatttggagatttatgcttgcctgaaaaatgctgcagtgaaacactaagagcccagaacacttaggatgacaaactgtgaaatcactcaaagaaggactcatcagcaggtgctaggaccgagatggataaaaa

SEQ ID NO: 807905 - DNA, 612 bp, Homo sapiens
gacattctgtagggatagtaatacattaaagtttatttatctcaaaaggcctgtaggtaataaactttcactaaataccaaaaataatacagaatgaaactttaatagttatctaatctcagataccttgggagaatataaattaggaacaggcatagaaaattggaacaaagacataacagccttgatattaattgtcttgcttatctgtmtaaagcagggctgaggaacatattttgtttgttttagttcatcaatttcttttgttcagagtaagtatatgttcaacagaatagaagtgaatgccgttttattttctactaataacatccaaggatgtgacttcatgattgcttttttgtttttgttgttttttgccatttagaatgactggaacaaaaggaaaataaccaattgagaatgactaatagcataaaaagcaatgctgagattttgttctagctgattcaaaatctgaagatttggagatttatgcttgcctgaaaaatgctgcagtgaaacactaagagcccagaacacttaggatgacaaactgtgaaatcactcaaagaaggactcatcagcaggtgctaggaccgagatggataaaaa

SEQ ID NO: 807906 - DNA, 612 bp, Homo sapiens
gacattctgtagggatagtaatacattaaagtttatttatctcaaaaggcctgtaggtaataaactttcactaaataccaaaaataatacagaatgaaactttaatagttatctaatctcagataccttgggagaatataaattaggaacaggcatagaaaattggaacaaagacataacagccttgatattaattgtcttgcttatctgtataaagcagggctgaggaacatattttgtttgttttagttcatcaatttcttttgttcagagtaagtatatgttcaacagaatagaagtgaatgccgttttattttctactaataacatccaaggatgtgacttcatgattgcttttttgtttttgttkttttttgccatttagaatgactggaacaaaaggaaaataaccaattgagaatgactaatagcataaaaagcaatgctgagattttgttctagctgattcaaaatctgaagatttggagatttatgcttgcctgaaaaatgctgcagtgaaacactaagagcccagaacacttaggatgacaaactgtgaaatcactcaaagaaggactcatcagcaggtgctaggaccgagatggataaaaa

SEQ ID NO: 807907 - DNA, 616 bp, Homo sapiens
ctggtgacaaccagctcagtggctggactgagaagaagctccacagcacttcccaaagccaaacttgcaccaaaaaaaggtcatggtcactgtttggtggtctgctgccagtctgatccacctcagctttctgaatcctggagaaaccattacagctgagaagtatgcgcagcaaatcaatgggatgcaccaaaaactgcaacacctgcagccggcattggtcaacagaaagcgcccaamtcttgtccacaacaatgctagactgcacatcacataaccaacgcttcaaaagttgaacgaattggactatgaagttttgcctcatcggccatattcacctgacctcttgccaattgactaccacttcaagaatctcgacaactttttgcagggaaaacgcttccacaaccagcaggatgcagaaaatgctttctaagagttcgtcaaatcccaaagcacggatttttacactacaggaataagcaaatttatgtctcattggcaaaaatgtgttgattatagttgtttctagtttgattaataaagatttgtttgagcctagttataatgatttaaaattcatggtgcaaaactgcaattacttttgcaccaacca

SEQ ID NO: 807908 - DNA, 518 bp, Homo sapiens
ttctgccagcaggattatcttttgtgctcctataacagaatacctgagaataggtaatttataaagaaaagagctttatttcttgcagctttggaggatggaaagtccaaggtcaagaggtttgcatctgatgagggccttctttgctgtctcatcccatggaagaaagcagaagggtaagagagcaagaactcacagcctcaagaccttttgtaatgttactgatggaaggtcttgactgctgatcgtccaggttattggtgttttgaacaaataattggacaaaacacacaaacgatgcaatgacagaatgaagcaacaaaagcacacatttattgaaatgaaagtacactccmcacagtgggagtgggctccagcaagtggctcaagagtgctggttacagaattttatggggtttaaatgctttctagaggctcctcattggttacttggttacaccctatgtaaatgaaggagtggtcccaaccagactgattgactgtgggaggtgaccaat

SEQ ID NO: 807909 - DNA, 518 bp, Homo sapiens
ttctgccagcaggattatcttttgtgctcctataacagaatacctgagaataggtaatttataaagaaaagagctttatttcttgcagctttggaggatggaaagtccaaggtcaagaggtttgcatctgatgagggccttctttgctgtctcatcccatggaagaaagcagaagggtaagagagcaagaactcacagcctcaagaccttttgtaatgttactgatggaaggtcttgactgctgatcgtccaggttattggtgttttgaacaaataattggacaaaacacacaaacgatgcaatgacagaatgaagcaacaaaagcacacatttattgaaatgaaagtacactccacmcagtgggagtgggctccagcaagtggctcaagagtgctggttacagaattttatggggtttaaatgctttctagaggctcctcattggttacttggttacaccctatgtaaatgaaggagtggtcccaaccagactgattgactgtgggaggtgaccaat

SEQ ID NO: 807910 - DNA, 562 bp, Homo sapiens
cagcacaaagagggcatgagaaagaccttacttgaaaagggcaattggatccttaaactcctggttcagaaatttgggctttctcctctccagtgttttctaaagtatagttcccaagattattttagattatacatagacagactctatttcaaaaattatgtatttattttagtaaactggaraaatatagttagatatagcaaatcattatttcatagtgatattgaatttctatgttaaataaagttaagaaaataaatgaattgaaaaatgctaagtgagtaataggacagatggtatgtgaatatggcaacagcataaaagcagtacccaaataagtgacttttagaaaacactgctccaggcctgggtggtatactcggatgcctagaaaccaggcaggtgacattagtgcaggaagctacagagatggcctgtggctgatcatagggtctgggcctgccctaaatgagaagagattattcccatgttggatcttccaatttaaaaacttttttttggtatttaacaagttctaagtatcgaaatagatatatga

SEQ ID NO: 807911 - DNA, 610 bp, Homo sapiens
tgaccagttacatgacaactttactcttttgagcctctgtttccccatctataagacggtgataataatacctagctttgagagttgtggagattaaaagaagtgacgtgttttatgagctcctcatggagcttggtatttactgacatgaactaccagatgggagctctctttgttggcatcawcttcattgtgtatcaaggttttcactgaaaaatgaagtgaggacatatcaggacctggggagtgagaagcctgagttttgtattaggggacattgctatgactgacatctcagctcccaggtacctaccaacccactcaccgcacagatgaagaaactcaggcttgattagcgcctttgtgtcagggcctgggactgagctaagcccagttcttcagacttctagttcaaagctcttcccacgaagtgaccctgttattacattaatcacaatagaaaatcatgtccagagcaggacagccatcctcattgcttgttcttccatcaggcgctgcttcccaggtgaagggaaccatctccttgggtctaaggtaaggggaatgaacccacagcacgggccatgtcaggccatcaagcagccctccc

SEQ ID NO: 807912 - DNA, 610 bp, Homo sapiens
tagggagtgccagacagtgggcacaggtcagtgggtgcgcacaccctgcgcgagcggaagcagggcgaggcattgcctctctcaggaagcgcaaggggtcagggagttccctttcctagtcaaagaaaggggtgacagatggcacctggaaaatcaggtcactcccaccccaatactgcrcttttctgacgggattaaaaaacggcgtgccagattatatcccacacctggcttggagggtcctacacccacggagtctcactgattgctagcacagcagtctgagatcaaactgcaaggtggcagcgaggctaggggaggagcgcccgccattgcccaggcttgcttaggtaaacaaagcagccctgaagctggaactgggtggagcccaccacagctcaaggaggcctgcctgcctctgtaggctccacctctgggggcagggcacagacaaacaaaaagacagcagtaacctctgcagacttaaatgtccctgtctgacagctttgaagagagcagtggttctcccagcacacagctggagatctgcctcctcaagtgggtccctgacccctgacccccgagcagcctaactgggaggcaaccccca

SEQ ID NO: 807913 - DNA, 610 bp, Homo sapiens
tagggagtgccagacagtgggcacaggtcagtgggtgcgcacaccctgcgcgagcggaagcagggcgaggcattgcctctctcaggaagcgcaaggggtcagggagttccctttcctagtcaaagaaaggggtgacagatggcacctggaaaatcaggtcactcccaccccaatactgcgcttttctgacgggattaaaaaacggcgtgccagattatatcccacacctggcttggagggtcctacacccacggagtctcactgattgctagcacagcagtctgagatcaaactgcaaggtggcagcgaggctaggggaggrgcgcccgccattgcccaggcttgcttaggtaaacaaagcagccctgaagctggaactgggtggagcccaccacagctcaaggaggcctgcctgcctctgtaggctccacctctgggggcagggcacagacaaacaaaaagacagcagtaacctctgcagacttaaatgtccctgtctgacagctttgaagagagcagtggttctcccagcacacagctggagatctgcctcctcaagtgggtccctgacccctgacccccgagcagcctaactgggaggcaaccccca

SEQ ID NO: 807914 - DNA, 601 bp, Homo sapiens
caaagagactggtggcattgtgcccctgctctagagagctgtggaactttgaatttgagagagatgaattcaggtacctggtggaagaaatttctaagcagcaaagcattcaagaattagcctggcttcttctctattttcaaagagatggtctgaaattggaatttatatttaaaaggaaagcagagcatgaaagtttgaaaaatttgcagcctgaacatgtggtagaaaagaaaaacccattttatagggaggaattcaaggctgcagaagtttgcataaataaagaggagctacatgttaatagccaagacagtggggaaaatgcctccaagaaatttcagagacctttattacagccactcccatcayaggctcagagggcaaataggaaaaaatgatgtcgggggccagacccaggtctgcagtgctctgtgtagcctcagaacatgatgacctgcgtcctagccactccaactccagtcaggactaaaaagtgccaaggtacagcttgggccattgcttcagagggtgcaagccccaagctttggcaagttccacatagtgtctggcctgtgggtgtgcagaagacatgaattaa

SEQ ID NO: 807915 - DNA, 489 bp, Homo sapiens
ggtaataaacagagggagaagagtgaacttcataatcttgatatttgtatagcattagtagtgataggacagatgtcctaaataggtatcgtaccgttacagtaattagtaggaagcaaagaaaaatcaatggaacagagcagatagccctaaatcaggtcccagtaagttttgtaagtaagcatgtgacaaaggagcaacaagccgaggaggaaaggaaacaaagcaaaatagtgcagatagcacagaagccactcaggttttcagcttttgccagcaggatattagggaggctccaccctgatttccagcctcyctgtgccaggcagatgtggatctccagcaagctggccacctgccacagcaacactgctggtacctggctctgccaaaggccctatcaccctggatgccatctgcctgcaatttacaaactgtataggaggggtaggtcaggcctggacacctcgtggctggactatggaaact

SEQ ID NO: 807916 - DNA, 529 bp, Homo sapiens
cagccatatttatagcaaacagtttttcttattttcttacaactctttctgccttggttttgtgaattttcattatttcaccatcttactttatttttatttttttattttttattttttggtgcagtggcaagatttattaaagcgaaagtgaaagtaaagcttccacgcggtggaaggggacccagaagggatgctgtttgtggcttggctgtcttatgcttatatccccttatgacccctcccctttcctctttttgtcctatagaattagcttattttctatccacytgtgggttggcaggcctgattggtttaaaacatcaggctgcagttagagcttaaactccctatataattggttgaaatttcaatcccttatcttgcagctttgactcattttggcttaggggaaagtcccctttgattggttgaagttttaattcctttgcttgcagctatgatttattttggctcttgcagctatgatttattttggcttaggtaacgtccccttagggaagtccct

SEQ ID NO: 807917 - DNA, 529 bp, Homo sapiens
cagccatatttatagcaaacagtttttcttattttcttacaactctttctgccttggttttgtgaattttcattatttcaccatcttactttatttttatttttttattttttattttttggtgcagtggcaagatttattaaagcgaaagtgaaagtaaagcttccacgcggtggaaggggacccagaagggatgctgtttgtggcttggctgtcttatgcttatatccccttatgacccctcccctttcctctttttgtcctatagaattagcttattttctatccacctgtgggttggcaggcctgattggtttaaaacatcaggctgcagttagagcttaaactccctatataattggttgaaatttcaatcccttakcttgcagctttgactcattttggcttaggggaaagtcccctttgattggttgaagttttaattcctttgcttgcagctatgatttattttggctcttgcagctatgatttattttggcttaggtaacgtccccttagggaagtccct

SEQ ID NO: 807918 - DNA, 625 bp, Homo sapiens
tttaaattcaaccctgtaatattagtaattacattaaatgtaaatggactaaacaatccagttagaggcagaaattgtcagtctggattaaaaagagaaaacataatctgaaaacagaagggtagaaaaagatatgtagatatatcatgtatattagttatatgtaactgcaggataaattatccccaaaatttagcagctaaaaatgacaaacacttatttctctgttttttctggttcaactgggggaaatttggttccaagctcactccccaggacaagagagtgagatagagacagaatacccaataaaaagctgtcattttttaaaaattgattttgttttttacagcaatattaggttcaccgcaaaatcaagcagaaggcctacaytggcataccattatcacccaaagtctgtaatctacgttaagattcactcttggtattgtacattccatggatttggacaaatatataatgacatgtgtccaccattatagtactgtacagagtagtctcactgctctaaaaaatcctctatactccacctatttatctctccctccccgacccctagcaaccacttatcttctttacttcttccctagttttgcattttcca

SEQ ID NO: 807919 - DNA, 644 bp, Homo sapiens
aatgaatgaatatctctgagtgtctcaaatcacagatgtgtctacactagcccaaatgagctttactgtagattcaactcttgtatactaaacagccatattggataaaacatggcagaaggttttttgatgatttaattgatttgcagaaatgcaacaaactgtattttctccatatcacttcttacttggagatgtgcacacactcccacctctttagggggttatatcttcatggatgcatcccatgtgagcctcttgctggagctgtcgccatcctaactttctggtggttagccacactcacagtgaaaaaacctattgcatttatgaccaaagcaaattaatgtccccttaatggcaattrtggtagacttatagggaaaaataagactataatgtttatatgtttatgtgtttttaatgtttattggtttgctgttacagccctcatcccgatgagactaggtgtgtctgagttaactcattgtcaaggaggttataggcatgcagagtttctgctaactacccaagctcataaatgcctgcaaatggattttttcatttttatggggccaagcctcagatcaccacacacataaaaggggtgcaagggttccactggcctcagagggactcccagc

SEQ ID NO: 807920 - DNA, 644 bp, Homo sapiens
aatgaatgaatatctctgagtgtctcaaatcacagatgtgtctacactagcccaaatgagctttactgtagattcaactcttgtatactaaacagccatattggataaaacatggcagaaggttttttgatgatttaattgatttgcagaaatgcaacaaactgtattttctccatatcacttcttacttggagatgtgcacacactcccacctctttagggggttatatcttcatggatgcatcccatgtgagcctcttgctggagctgtcgccatcctaactttctggtggttagccacactcacagtgaaaaaacctattgcatttatgaccaaagcaaattaatgtccccttaatggcaattatggtagacttatagggaaaaataagactataatgtttatatgtttatgtgtttttaatgtttattggtttgctgttacagccctcatcccratgagactaggtgtgtctgagttaactcattgtcaaggaggttataggcatgcagagtttctgctaactacccaagctcataaatgcctgcaaatggattttttcatttttatggggccaagcctcagatcaccacacacataaaaggggtgcaagggttccactggcctcagagggactcccagc

SEQ ID NO: 807921 - DNA, 511 bp, Homo sapiens
aggagaaaaacaggtaccaggggactaagagtaggaaggagccaagacgcccagttaaaaagtgcccaggtaggtccagcataattatttgcctggctggcgagttttggggccctaactttaagcttttttatgttgtcatatagcaggctggattgatttagataaaaacaacattcttcatttaaaaatatgcagagttctcctttttcagcagtgagtaggtcaaggccttggtgattttggaggacaactgcgactaaggaaccgacctgggcccgaaggactgataaagtttgtgatatatctgtaatgctagcaggaaagtcattagaaakacaatggaaggttgtgacagaagttgaaatgccaggtaggtcagagagatacagtcatgggggtcaggtgtggtatcaggaataatgtgggaggccggattgaagtctgggccaggaacaatggtaattatgggagactcaacaaagagtgagtatagctgaaggagctggag

SEQ ID NO: 807922 - DNA, 625 bp, Homo sapiens
ttccgctcaagcaggaggtgagccaagagcctcgctcagagttctaaaaacacaatgtttctcacctctgtatctttgcacatgccattctctagctggatttaatactccggtgcaagcgtccaggttgggagcccccgcagttctctgaggtacttttatctactgtaactctagggcaacaatcctggcttctccactagtgcgtgaacgtctctagcgttaagtttttttctcacctaagtatccccaatactacacagtgatgacccagcgcaaacgaccactctttcaacgcaagcatgaactagctgataaaacttaaaagtggctacaaacgcctgcgcaggagcccttccsgcccggggtgagacgcgggtctaaagaaaaggtgggcgggaggtttaaatagctgactgcagtccccggactggctgcgccgctcgccgcatgcgcgcagctagcgggcacggcttcagagggctttctccgcatgcgcgggatcccggatgtggatcaagttggtgggaagcgtgcggtgccgcagcaatggcggcgctcacaattgccacgggtactggcaattggttttcggctttggcgctcggggtgactcttctcaaat

SEQ ID NO: 807923 - DNA, 625 bp, Homo sapiens
ttccgctcaagcaggaggtgagccaagagcctcgctcagagttctaaaaacacaatgtttctcacctctgtatctttgcacatgccattctctagctggatttaatactccggtgcaagcgtccaggttgggagcccccgcagttctctgaggtacttttatctactgtaactctagggcaacaatcctggcttctccactagtgcgtgaacgtctctagcgttaagtttttttctcacctaagtatccccaatactacacagtgatgacccagcgcaaacgaccactctttcaacgcaagcatgaactagctgataaaacttaaaagtggctacaaacgcctgcgcaggagcccttccggcccggggtgagacgsgggtctaaagaaaaggtgggcgggaggtttaaatagctgactgcagtccccggactggctgcgccgctcgccgcatgcgcgcagctagcgggcacggcttcagagggctttctccgcatgcgcgggatcccggatgtggatcaagttggtgggaagcgtgcggtgccgcagcaatggcggcgctcacaattgccacgggtactggcaattggttttcggctttggcgctcggggtgactcttctcaaat

SEQ ID NO: 807924 - DNA, 625 bp, Homo sapiens
ttccgctcaagcaggaggtgagccaagagcctcgctcagagttctaaaaacacaatgtttctcacctctgtatctttgcacatgccattctctagctggatttaatactccggtgcaagcgtccaggttgggagcccccgcagttctctgaggtacttttatctactgtaactctagggcaacaatcctggcttctccactagtgcgtgaacgtctctagcgttaagtttttttctcacctaagtatccccaatactacacagtgatgacccagcgcaaacgaccactctttcaacgcaagcatgaactagctgataaaacttaaaagtggctacaaacgcctgcgcaggagcccttccggcccggggtgagacgcgggtmtaaagaaaaggtgggcgggaggtttaaatagctgactgcagtccccggactggctgcgccgctcgccgcatgcgcgcagctagcgggcacggcttcagagggctttctccgcatgcgcgggatcccggatgtggatcaagttggtgggaagcgtgcggtgccgcagcaatggcggcgctcacaattgccacgggtactggcaattggttttcggctttggcgctcggggtgactcttctcaaat

SEQ ID NO: 807925 - DNA, 614 bp, Homo sapiens; identical to SEQ ID NO: 728635

SEQ ID NO: 807926 - DNA, 448 bp, Homo sapiens
ttctttttatgctactataaatgagattgttttcttaatttcctttcatgatagtttattgtgtatagaaacaccattgatatgtgtgtgttgatttttgtgttctacatctttactgaatttattaattctaatcatttttcttgttgagtattaagggttttctgtgtacatcatcatgtagattttataratcatatcgattttgtagattattgctgcagacagataattttaccttttactttagattttgatgccttttatttctttttcttatctacttgctctgtctagggcttctaacactgtgttgaatagaagtagcaagagtggacattcacgccttgtcctggatcttagagaaaagattgattatgatgttagctgtgggattttcatatatgccctttattatgggatttttttttggatatgacaccaaaag

SEQ ID NO: 807927 - DNA, 523 bp, Homo sapiens
gaaatagggaaagactttcccacataggaaaataaccctggcaaaagctgtgggggctctttgtctcctggtaagaaaatgttcctggcctaaggcccattcttatgtggccaagtcgtggagttgaaagaccacatgcataagaccacctttccttacagcccatcccgactcttgtctggccactgaaacagcagataaaacatatcaaatcacccaccttgatttgraggtgtagttgggtcccatggagcccctgaacaacttgtgcagatgcagtttgctcaaacagcctcttttattttgaaagagcactttaccagagtcaataggggaactaaaagcaggagaatggttctcatcagaaatcccaagtgcttggattaaggtaaacaaagaggtaaaaaatgagtctgggtggactgtggatacatagctgacaaggacctcactgagtgtggatattcagcttggtttctaccctccctgaattaatgatatacacatagcaagtggtgttggc

SEQ ID NO: 807928 - DNA, 636 bp, Homo sapiens; identical to SEQ ID NO: 786402

SEQ ID NO: 807929 - DNA, 636 bp, Homo sapiens; identical to SEQ ID NO: 786403

SEQ ID NO: 807930 - DNA, 531 bp, Homo sapiens
attcctctagctttgttctttttgcttaggattgtcttggctatatgggctctttttcagttccatatgaaagatcaagtagttttttctaattctgtgaagaaagtcactggtagcttgatggggatagcattgaatctataaattactttgggcagtatggccatattcaccatattgattcttcctattcatgaacatggaatactttttcatttgtttgtgtcctctcttatttccttgagcagtggtttgtagttctccttgaagaggtccttcacatcccttgtaagttgtattcctagatattttattctctttgcagcaattgtgaatgggagcttatttatgatttgactctctgtttgtctattattggtgtatagraatgcttgtgatttttgcacactgattttgtatcctgagactgctgaagtttcccatcagtttaaggagattttgggctgagacaattgggttttctaaatatacaatcatgtcacctgtaaacagagacattccctctcttcc

SEQ ID NO: 807931 - DNA, 618 bp, Homo sapiens
tctgcttgccctcagctgaagggatcctgaggacagtagaaataatgaagacatcagtcaggatgatgagcagaagggtacccagcaaaccagacactgagatcagtgttataatgaattctgtgtggttactgtctatacaagacagcctaataactgccagcatatggcagaagaagtgtttgacaaggttgggtctgcagaaagagtccctgaatatcagtgcagtctctgtaagagagataaagaagcctgcagtgcaagcagaggccacaagttgtccacatacaatgttggtcataagcagtggatatcttagagggttacaratggccaggaagcggtcatatcccatcaaagtgagaatgatacagtttgtgccaccaagtcccaagaagaagcacatctgtaagctacaacctgtgactgaaatgcttctgtccttggccagtagatcttccagcatcttggggacgatggtcagtgtatagcaggtctcagagaaggagagtgcactaaggaagagatacataggggtgtggagggacctgtccactcaagttagacccatgatggtcagattacctgcaagggtgagaaggtagagacaaaagaaga

SEQ ID NO: 807932 - DNA, 632 bp, Homo sapiens
gtattcaaatgttaataacagctttatttgtaatagcccaaaactggaaattaaacgacgtccctcaatagatgaatggtaaaacaaactgtagtatatccatatcatggcatatttctcagcattaaagtgaatgaactattgatattgatttagatgagtctcaagtgtattacgttgagggaaaaaattgtaaaaggtcacatactttatgactctatttatatacaattctgaaaatagcaattataaagaatgagaacaaattagtgtttgtcaggggtcattaatggtgagggtaggtggtgaatgtggctataaagaagtagcacaggagagatggaatacatcttgattttggtgaaggttaaataaacctacacrtgccataaaataacataaaaatatacacatattccaacatcaatttcctggttttgttattgtcttataattatgaaaaatgtaatgattgaagtaaactaaattaagattttaaaaaaagaatcattttccaagaagaccttgtcaagcttttgtatctgcaattcacatcaagaagacaacatattttaaaactgagatattatttaatacagtaggatgcacagatcatgagtgtagagtgagtg

SEQ ID NO: 807933 - DNA, 521 bp, Homo sapiens
cattgccattgaactgaccctaaaagaaatgctcaaggaagtcctaaacctggaagcaaaagaacataatggaaacacatgaaggtataaaactcactggtaaagtaatcacacataagataaagagaaaagactcaaatgataccactacagaaatccaccaaatcacaaaggtagtcaatataggaaaaagaaagcaayaaagaatatagaaaacaaacagaaaacaactaatgatatgacagcctcacaattactaataaccttgaatgtaaatggattgaattttctatttaaaaatatagaatgaatgaatggattaaaaaaaacatgatcaaactatatgctgcttagaaaaaaactggccttaaggaaaaacttaagaatttttttaaaaatcatgaaacaaatgaaaatggaagcacaacacaccaaaaccagtgggatacagcaaaagtagtgctaagaaggaattttatagcaataaatgcctacatcaaaaaaaaaatagaaagataact

SEQ ID NO: 807934 - DNA, 644 bp, Homo sapiens
tttttattatatcacctaatgataacaatcccttgtatttgaaagcctcttcacttttattatctttttcaattcttgcagtaatcctgcagagattccgggaattttttgttttcattatggagataaagaagtcaccttagaaaaggtaattaatctgcctatgtgrtataactaaaagcagacatcttcaataaaacctagacctctggaatcctggactgttatatatttcattacttctgttggttactgttccttttaagtggtttctagggtttgaagatacatcttattacagagtctcaaagaaatcatgtctttcctcttacttttattctcaagtgaatctagcacatattttggccaacatacacatacacacacaggcctccacactgttgattaaatcaaggtctatttccctacccttttagtagtcaggaagttagacgagcaaaactaaggtctatcttcttaaaaggcaaattttaactatgcattaactttaaagcatatatggtgtataaattaagcatctcataaagaatgtcattactcttgtttgctcaacaggaacccttagctctaggaaagagaggtctcttcttttgtaaatttatttattcaagcaactaagtttt

SEQ ID NO: 807935 - DNA, 610 bp, Homo sapiens
gatccaaggagctcaacaatcaccgagctgaataaacaaggaaaactccatcaagttatagcataatcaagttgtttaataccagtgataaagagaaaagctttaaaacaggtagagggggaaaaaaagacatattacatacagaggagcaaagatcatgatgacagcagacttcttatcagaagcttgcaaagtcagaagacaagrcagcacatctttaaaatactggaagaaagaagttgtcaaccaagaattttatatgtagtgaaaatatatttcaaaaaggaaggtagaatgaagacctttagatgaacaaaagtctagagaatttatggatagaagacctgcaatataaggaatgttagatgaagttcttcaagcagaagaaaaataatacaaatgaaaatattaacctaaagaaaggaatgaagaatactggaaatgggaactatgagggtgaatttttttctcatttaataatctcattcaaaaccagttgactaccaaagcaaagataatgatgttgaattatagggtatataacatgtaaaaatttaaaatatgtgacaccaatagcacaagggtgaaaacaaatggaagtatcaattta

SEQ ID NO: 807936 - DNA, 553 bp, Homo sapiens
ctcatccactgcacagtgctagaggctgtgcttggcatctagtgagatgcaaagaggcatgcggatcttactgtaactatcattccaaggtgtgcctagactctgccactggtgcaaaatctctctggatcaaggtgcagaggtgaagccctatgatgtaggaggttaggatgatggtaaaactgatttcttcattcagtggaatgctgggtgtttaagattgtcctgttatttaatgcaaatttgaaaatcacagatgcaggaatgtcagcttaatttgagattgtatagaggagagaaraacatgcacagatgtcaaccatgtcagatgctgtactaggcactgtggggaacccagaaatgaataaggtgcagtcctcctggagtttacagtctagagatgagcatgggaaggtcacgaaactgggcatacgtcaggaggcaaaatggaatggaggtttcaaattaggtagaagtcagagggttgatgaaataaatgctcagagatgaggaagcacacatcatgtcttgaaaatttcaagtgactcaattt

SEQ ID NO: 807937 - DNA, 637 bp, Homo sapiens
atctatctatctatctatctatctatctatctatcactttggaatgtgctggagactacttttaaccaaataattttattcaaccaaattggatgaattcaaccaaagcagtctaagtaaatgaagtttgaattcaacttggctccagataaataataacaacaaatatactataaataataatcatagctaagtattcctaagyatgagtttttgtttttaatatatcactctttattaaagcattctctaaaacatcaataacaaaagatagtaattagttgcaaatgatattaacagataacacttattttgcacaagctctgtgttttgcacattctctgcacttgcatggagtaagtcatttaatattcatattagcatttgaagtcctacttttaaaatatattacttttataccaatagatgataaaactaagatgcagacaagttaattatcaacttgttcaaagtcacaaagcaatatgtggcatcactgaaatacaaaccttaacctcttctgcagatctgattcttttaactactgtggttcgtaattcatagttgttattaatgcttatgtaatgtaataagcatttacttaaaatgtttatatacaaataataaattaatgttc

SEQ ID NO: 807938 - DNA, 665 bp, Homo sapiens
aaaaatgggttacatagttatttccttggtgggttagcatctttaaaactcatcaggattttagagccaaaaataaaattatttaaaaggattgaaacctactattcatgtttttattagtaaatttgcatgtatttaatattttttgagtttgtattatttaagataatttgtctatttgaacaccagatctactttgtaattataatttaagatttgtaattgaaaaattaacttggacttttaaaaattaacttcattcgggttaaatttaatagtcaataaaaattrcccagttaatcaagatagtaagcttactattttaggttgaaatcttacttcattgatcacagtattgaaacatttaaaaggatttaagatttgctttagttataattttctttttagattaaaaagattattttaaaagcctgatgaggctttattaagtcagcaaattgagatgcttaaaaatgaaatacatagatcatatttaaacatatttaaagagaattaaatgccaagtttatgaatcaaaccaaatatttgtgtaacacctttaaaaatgaataaaatatattaggtttattaatagaatactaaggtttttaagcgggaattgaaagaattaaagacctacttttttaatgtttacctcaaataaa

SEQ ID NO: 807939 - DNA, 668 bp, Homo sapiens
gctctataccatccaataccagagctttaaacactataaatgtgttgaagacatctaaatccatatctcaggcgatatttttctctgctactccagactcatatatttcactgcctactcacatctcctcttgggagtcgaagagccatctcaaactgaactcctggggtctctacccctagtcttccccatcacaaatgatggcaattgcaatctttcaactgacaagctaaactcctgcagtcatccttgtttctatctttctctcatatatccaggaactgactatgtttgaccacctcggtccaagtcacttttatctctcccctcttactgtaattgactcctaacagatctccctacttgcatttgttcacttgtagcctcatctcaacacaccagagtgatcctgttaaattctaaattaggttctgygtttccatcgatcaaatgtgttcagtgacatatcatttaaaacctttgctgtagctctttccttgttctagaatctctttcaccatttggatagctctttcatttatttcatctttgctcaaatttcaccagctcaactacctgggccaccctatataactgcagtgtgcctccatccttacatccatattctgtactgctattgcctttctctacttaatttttaacttttt

SEQ ID NO: 807940 - DNA, 606 bp, Homo sapiens
tcagccatcaaaaggaacaaaataatgttatttgcagcaagttggatggagcttgagaccattattctagtaacttgggaatggaaaactaaatatcatatgttctcacttgtaagtgggaactaagctatgtggatgcaaaggcataagaatgacacaatggactttggggactcaggggggaaaaggtgaggaggatgagaaataaaagcctacatattgggtatggtgcacactgctcaggtgacaggtgcaccaaaatctcagaaatcaccagtaaagaaattatcaatgtaacagaaaaccacctgtactccaaatactattgatttttttttatctcatgttgaactgtaatgagtttggatgttgtcctctctaaatctcatgttggatgtgaggcctgggagaggtgtttgagtcatgttcggtcatgggggtgaattcctcatggcttggtgckattctccatagtgtgtttttgtgagatcttgttgcttaaaagtgtgtggcatctcctccccttcttgctctcgctctaccacgtgacatgttggctcctcttttgcctcctgtcatgattgaaagcttcctgaaggctcacca

SEQ ID NO: 807941 - DNA, 615 bp, Homo sapiens
attgaagttaaatggttttaagtttaaaataacttgttaaaatgaaaatgtgcttttgttagcttcatggtaaccacaaaacaaaaacttacaatagatacaataaaagttaaaagcaataaatcaaaatatactactagagaaaaattttaaaaagactcaactatatggtgtctacaagaytcactttacctgtaatgatataaataggctgaaagagaatgaaagaagatatttcacacaaattgaaaacaaaaaagcaagctatacttatattagataaaatacacttaaagtcaaaaactgttaaaaaaaaaaaaaaagacagaagagtccattatgtaatgacaaagagatcactacagtaagaggatgtaacaattgtaaataaatatgcacctaatataagaacaccaactacatatagaaagtaaatattaagagacttaaagaaaaagactgcaatacaataatagcagagaaactcaaaactccactttcagcaatggacagatcatttagacaaaaaatcaacaaaaaaaacttcagcattaaatggtattctagactaaacaaacctaacagacatttatgaaacatcaaaacattccttcc

SEQ ID NO: 807942 - DNA, 615 bp, Homo sapiens
attgaagttaaatggttttaagtttaaaataacttgttaaaatgaaaatgtgcttttgttagcttcatggtaaccacaaaacaaaaacttacaatagatacaataaaagttaaaagcaataaatcaaaatatactactagagaaaaattttaaaaagactcaactatatggtgtctacaagactcaytttacctgtaatgatataaataggctgaaagagaatgaaagaagatatttcacacaaattgaaaacaaaaaagcaagctatacttatattagataaaatacacttaaagtcaaaaactgttaaaaaaaaaaaaaaagacagaagagtccattatgtaatgacaaagagatcactacagtaagaggatgtaacaattgtaaataaatatgcacctaatataagaacaccaactacatatagaaagtaaatattaagagacttaaagaaaaagactgcaatacaataatagcagagaaactcaaaactccactttcagcaatggacagatcatttagacaaaaaatcaacaaaaaaaacttcagcattaaatggtattctagactaaacaaacctaacagacatttatgaaacatcaaaacattccttcc

SEQ ID NO: 807943 - DNA, 609 bp, Homo sapiens
aacttctttcttttctactatttatgacaattgaagttaataaatattttatttccctccttactccgagttccaatgttagtctactttctcagtctgtggaccactatattctaggggctatttcggtgtctgcctcataggaagctcccaataaatatacttactcaattaaaaaaaatgaaaactaagtcctragttatgactcagtccaactaaggaaaggaccaaatgaagatcatctgacataggcaagaagttgatacctattatgagaccagctttaatatatgcatgcatctgggactaacaactaattgaaattccaatgaaatttattccaaaaataagtgttctatatttatttgataggtaaagaaaggggatagactagcataggccacaagcaatgaaagcacaacaccagccacaatttaaagatgctctattcctctttttcttatattatattttgtcttaatgcataactctttcagaaagagtaggaaatgcaaagaactagtcaatcaaactgaaaataattaaatttaaattatctgaaactccagcatccatattatgcccctctcagatttatttttaggtaaa

SEQ ID NO: 807944 - DNA, 600 bp, Homo sapiens
ggggatgaccacatagtctcttatttgaacagcccatttgcaaaatgggcaaaagatctgaataatcactttattcaaatgtcaaatacacatgatcagatgctcaacattaccagcaattaatgacttccagagcatcaacctatatggtacaagatattagccaagaacaagagaggatgtttaacagygaaaaataatttattgtgacttttacaggagcttgaatgccctcattggaagagtcaacattaataaaatctgaattattaccattaatatggccatgtcatttttatcggcaggtgctagagaaatgctacttatacatgtagcatttacaattaatatatgtagcattaaacaattatcaggaacattctgtctattaaaatgtaatcttccttcaaccctattatccacttacatttatatattaaaacacattatatatgacaaatttaatactcagctatttctttgaagttttgctttcattatataaatgtaaaatttgcatttcagtccctaatatcttattgcttaaaaatgttttatagtatttgttatagggtaaaatttatacacaaagaaaattca

SEQ ID NO: 807945 - DNA, 596 bp, Homo sapiens
taagacaacaagccctttcgctaaagcgccttaaatattgcctaacagtttatatctgtatagatctgtggcttatattatcacttacatggtttcatctcgacttcatagaaatcatgtaaacatagaaaccatgttatccatgttgcgtgcctgcgtgcgtgcgcgcgcacacacacacggagtaaaagatgtcgtataagttttgctgttagagttgaacttaaaaatctctaaattgttacatttggaggctctcattttgggggatcctagtgtgagatgctcctttgttggtcaattttaattatacagacataaataaaggatatattaattatagagaaaaagatmagaaatgtaaacaaaatgcagataagatggagacattcaatgatttgtccaataatataaaaacagtttttgtgtgcgggtagtttgttgtcattagtggaaggaaatagagagaaggataaataatatttgaatttgaaagagcggatgtatgaatacaagactcccttgaagaagaaaggatcgtctgggaccacagcaggccggggacagggagaagaatgagcaggctgtgtggaaga

SEQ ID NO: 807946 - DNA, 640 bp, Homo sapiens
ccttagccctttttttttttttttttttttttttgagacagagtcttgctcttttgcccaggcgggagtgcagtggcgctatctcggcttactgcaagctccgcctcccgggttcacgccattctcctgcctcagcctccagagtagctgggactacaggcgcccgccaccgcccccggctaaattttttgtatttttagtagagacggggtttcaccgtgttagccaggttggtctcgatttcctgacctcgtgatccgcccgcctcggcctcccaaagtgctgggattacaggcgtgagccaccgtgcccggcccttagcccactttttgatgggattatttgtatgtgcaatgcttgttccctggtgccataaataaatagcatttgaatatcaatttaattttttcagcaaggccatttttatactttttgtagaaagggtacwctcgccagcggttttgccacaagagtatacggaacaaaggagacaggctcatttataatctgacgcggccaccctcctgctgcgttcggtttccattggctgggacgggacctcaccttctgtatttgtcccgactggctagcacttagaactttttaaaagaggcaaaggcataggagaacaaaggaagga

SEQ ID NO: 807947 - DNA, 571 bp, Homo sapiens
ttattttagaaaaagagttatttattttagaatttttggcaagtttatcggatagggctgttaatccttgtagcacttttgttatagttctatcaggggcagtattaggaataaaggtataacattgagttttaattatgacacaaacttctttttttgctaatattatatttaaagctattttatttttctagaccatctggctggtaggtcctaattgcttagctttctctttgatggcgtcctcagtgtaatttatgaatcgttgctgattatagtagatatagtttatttagtctacttaaaaaaaatttatagttacttaacagarcaacatggatttaaactctgcagctatttgattttgtgctttaaacttatttggcacttctcataggaccttaatagcatttatgtaaacctaacgtttaaaggactcatgaggagtttcctttggcctgcagtgtcttgtttttacctttttttttttaggttggtgaaatgccagggtgcaggggatagccagttggattagagcataagtactgctccaattatttggcagagtgtc

SEQ ID NO: 807948 - DNA, 567 bp, Homo sapiens
aggtcctattttattcatcatgccatttgctgcctaaataccttacttttttattactgtgttattgttttataagtcctatgagatttatgctttaaatgttttatgttctattttggtgtatttcgaggattcatttcaagatttagagctctttttagcagttcttgtaatgctggcttggtagtggctaactctctcagcatttgtttgtctgaaagagacttgatctttcatttatgaagcttagttcactggatacacattctyggctgataattgttttgtttaaggaggctaaagatagtactccaaacctttctagcttgtaggatttctgttgagaaatctgcttttaatctgataggttcctttataaattacctgatactttgcttcacagctcttaaaattcttttctccgtcttgactttagagagcctggtgactatgtgcctaggcgatgatctttctccagggtgttccctgggtgttctttgagcttctcgtatttggatgtctagatctctaggaaagccagggaagttttcctcaattaatccctca

SEQ ID NO: 807949 - DNA, 624 bp, Homo sapiens
gtgtgttcttcatttccagaagttgtgatttttttttatgctctctatttttttggagatttttccatccatatcctgtaacattttttaaatttctttaagttggtattcatccttctctggtgcctccttgggtagtttaataatccaccttctgaattcttttctggcaattcagagatttcttcttgggttggatccactgctggtaaggtagtgtgatcttttggggctgttaaagaaccttgttttgacatattaccaggattgtttttcttcttccttctcatttgggtacactatatcagaggaaacatctgggactcaagggctgctgttaggatwttttttgtcccacagggtgctcccttgatgtggtgctctcccccttctccaaaggatggggcttcctgagagctgaactacagtgattgtcaacacccagcagagctactgtgctccaggctccaggctggtactgggtagtgtctgcaaagagtcctgtgatgtggttcgtcttcaggtctcatccatggatatcagtacctgctcctgtggaggtggcagggcagtgaagtgaactccatgagggtccttggttttaattttgtttattgggataat

SEQ ID NO: 807950 - DNA, 615 bp, Homo sapiens
gtacctggtacttggcaattattttgtgacacttaatcttcatattagttctagaaggttgattgttttctcctctttactcaccctataatatgtgacaaacacggaatagaaaggcaaagtcactttcttaatgacccttagatggtaaattagagagcttgatttagaacccaggctgctcttctcgtttggggtgtgtacgttaggagagggttgtgggratgtggtggaagctgtgaggaatggaatggggaagtctactactgttgcaggaattttcctttgttcagctaaacatgggaatccttatcatggggccatgaaaagttaggctcgcagacaatttgaagtgtgaggagggcagcgtttattgggtgaaaaggaaaagagggaaacggtccttctgcaaagccagactccctgcttgtgggcttcccacctggcagtttgaatttcaggttccacccaggaagaggaggggctgggctcttccccactggaaatggcgcaaacttctgtggcttcaccccagtgcacactcctcccagtgtgcaggctggagtttctctggggaccccttcccacctggctgtctcattgccccctctaaag

SEQ ID NO: 807951 - DNA, 368 bp, Homo sapiens
tgtctagcggcagggaacatagggctcaagagcaagggctctgaataagacagatctgatttgaatcctggatttaagaagcactagttggctgatattggggaaacagtttcattggtcctctaaaataatggaagtctccacttcattgggwtggtttaaacattcagacaatgtatacatattaattatctcacaacctggcacatcataataaactgatctgtggtagatagttttatttttaggaaggtaaagcattggagggacttttaggcaaaggaaatgatacatgaaaattccaaaagtgtgacatagcgtaatgagttctgtacaactgaaattcagtagatgcagaagactgtggg

SEQ ID NO: 807952 - DNA, 653 bp, Homo sapiens
ttgacaaaattcaacatcctttcatggtaaaacttatagacaaattagataaagaagtaatgtacctcaacacaataaaggccaattatcacaagtacatagctaacatcacactcaatgataaaaagttgaaagtgtttcctctaaaattaggaacaagacaaggatgcccattcttaccacttctattcagcatagtgacagaagtcctagccagagcaatcaggcaagagagagaagtaaaggcatctgaataagagaagaagaaatcaaattatctctctttgctgatgatatgattctatacttagaaaattctagagactaygtcaaaatgctactaaaactgataaaatattttagtaagctttcagggtacaaaattaacatacaaaaattaatagcatttctatacaccaataatacccaggctgagagtcaaatcaagaacacaatcccatttacaatagccacaaagaaaaggaaatatctgggaatacagctaaccagggaggtgaaaaatctctacaagaactacaaagcactgctgaaagaaatcagagatgacagaaataaatgaaaaaatatttcatgctcatggattggaagaatcaatattgttaaaatgactatactgcccaaagcaatttaca

SEQ ID NO: 807953 - DNA, 475 bp, Homo sapiens
ctttataataaattatctacataaaataagtagttcaatttctctaactaaaagtatcaaaatctaaraacattgatgggacaagtctcagaattgttccatcatttcggtctccctacagcatagtacagtatgaggatcaccactagcaaagtttttaagtgagccaagccaatgccattttttattgttacctttcaaaatactttttttattgttatctttcaaaatacttccactttcttagcctttcacaatattataacatccttcagttcagtctttagatggttgtaatgatttaccattccatttgcacaaaacaaacagctattcctacatttcttgaaaaaaaagtcaaggtctagattactgtggaagaaattctagtgatgtgacacctgtagggatttgtagagaaagatttgggaactcctttgttaaccacaaaattacagaagaattttctcctaac

SEQ ID NO: 807954 - DNA, 496 bp, Homo sapiens
aagcgatggggcccttggggcgccctcctgatgccattgacattgctgaacatgggatgtccagtccctcaggtgttcaggccacctaccaaagataaaataactcactgagaatttcccacccagtccagcccagcccagcccaaaaattctttgaccaaagaagggagttggagaatcctgtgcctctgttaccatgggcaagttcagattgcctcgacactcaggtcaaagcagttcaccttccgaagcgctgacatcatacagagctttstgacttaaagaattaccctgagggcggggaccccaggcagggtagacagtgacctaagggaccaaatttaaagtcacttcagttgtgggcaacaaagtcacttgtacaacctgccatccacatctgccttcccctcccatgttcctgtaggtcacctcatgtcacactgctcctgttctattcctccactggtaccgcagagttctccttgttctcagatgg

SEQ ID NO: 807955 - DNA, 615 bp, Homo sapiens
caggataactgcatagatccctcgctgtctgattcacttcttaccatgcactttcctttgatgctgaggagaaatggaagtgggcgaaaaatctcaaggctgcttcatgtggaccttgtcaagctgctccctcccccagcgtcaattgttatcaggtgccaaacactgctagaaaggagggcctagtcagaagcctctttccatacgagttttggttttgtttttaatatttttttctattaaaatactcatgcatttaaccttcccrttattcaaccagtctcttggttgcatccctagcacttctactacaagtgagatggtagtgtttgagtgcttattgagtaaagcataattcggtcataatgaaatcgttcacattccctcatatgcacaagcccaccaaccccttcacaccccccttcacaggggtcgtatgagtaaggggatttggaaactgtcaacttacaaaggcactataacaattacagaatcatgattgccatgggccactttatttacatgaagacaactggagaacgactaagaccaaattatggaaaataagaaaaagctgttgctggcaagaccatcaagactgttctgacaccctgt

SEQ ID NO: 807956 - DNA, 607 bp, Homo sapiens
agaattctagcatccttgaataccatactaagtttctgagggagaaaacggtgggattttaaagatattatttggaggaagttaatacgctacttaattaacagaagtggcaggtggttggaaatgtgctaaagaggtatgacacattaaaaatgataatataaggatgtttgaccagataatttaggaataaccaaggaatatttaacctcttcaccacaaagtccgaggagaaataaatgcccaagagatcaagccaaaatacatttttattatctgggacttaggcctcatattccggagcagaatccggtaaactcagatgaactccatggagaatttcataaatcagattaacatcaaggtactaaaatcaaaacccactaagaaacctgttgcccccttcaaagcacaactgaagtaatggatmtaatagaagatacattgtttgcactgagcagtagagtagtagaggagaaaagcccagagatggcacagacaagttgttccagtccccttcagtcaaggcctctggaccaccaccctgccacaggcgaaaaatgggatatttaataaataaaaaattttgattcaccagactggctga

SEQ ID NO: 807957 - DNA, 529 bp, Homo sapiens
gggtgacagtgaatctcaaaacaaaagaaaatattttagtataataccagcagccataccaagaacgatgtgtgttttaaatgtattatctctgaaacactgaggcttggagtgacagatggggcataaggccacacagttggtaaacagtgatgctatactttgtactcaggtctgactccaaaatttatccattccagttgatcaggcggcctccctccctcccgtgagaaggtggatggctgcgtgtgtgcgtgtgtgtgtgcgtgtgtgtctayaagcgtgcctacaaacacatgccttcaggacttgctgtgagcctacttgggaagaccagaaacatctgaggtgacgagcattcatagatcaagcaataaacacgcacaccatttattattgtagttcaatacttttttctttttaattcatactgtacttccatggctctagctactttacattaagatttggctgggcagccttgtgtgtttctaggtactagcagtaagttttctgaccttgcgcacag

SEQ ID NO: 807958 - DNA, 630 bp, Homo sapiens
aactttagaggtatatgtgcaggtttgttatgcagttaaactcatgtcatgaggatatgttgtacagattcttttgttacccaggtattaagcctagtactcattagctatttttcctgaacctctgctccttcctaccctcaccctccagtgggtcctagtgtgtgttgttcctctctacatrtccatgtcttctcatcatttagctctcacttataagtgagaacatgtggtattttgttcctgcattactttgctaaggaaagtggcctccagctccacccatgttcctacaaaggacatgatctcatttgtttttatggctgtatagtactccatggtgtatatgtaccacattttctttatccagtctataattgatgggcatttgggttgattccatgtctttgttattgtgaatagtgctgcagtgaacacatatgtgcatgtgtctttagtatggaatgatttatattgctttggatatatacccagtaatgggattgctgggtcgaatggtatttctgtctttagctctttgaggaatcaccacactgttttccacagtggttgaactaatttgcactctcaccaacagtgtataagtgtagttttatcatttgtaagaag

SEQ ID NO: 807959 - DNA, 623 bp, Homo sapiens
gggttttgcagtcttctgctattattttctcgtaatttattcctccctttagatctattaatatttgccttatatacttaggtatactgatgttgaatacatatatgtatatatatatatttataattgttatagctcttgacgaattgacccctttatcattatataatgacattctttatctcattttaccatttgacttaaagtctgttttatctgatataagtttagctactcctgctcttttggtttgcacttgcttggrctatctttttccatctctttgctttcagtctatgtgtgtccttacaagtgagatgagtctcttgtaggccacatatagttggtttttaaaaaatctatccagccactctatgtattttaattagattatgagatctgggattgaattcatttttagcaaagcctattttctttttattatggtactcttagttgttttaggacttctatcttctaatatttatggaccattattctgttctttgagacatcttttacataagttgcttttcctaaagatactctaatccttaagccttagagaagccttactttagatcagtgactggatccttaatgcctaaagattttcactggtc

SEQ ID NO: 807960 - DNA, 623 bp, Homo sapiens
gggttttgcagtcttctgctattattttctcgtaatttattcctccctttagatctattaatatttgccttatatacttaggtatactgatgttgaatacatatatgtatatatatatatttataattgttatagctcttgacgaattgacccctttatcattatataatgacattctttatctcattttaccatttgacttaaagtctgttttatctgatataagtttagctactcctgctcttttggtttgcacttgcttggactatctttttccatctctttgctttcagtctatgtgtgtcyttacaagtgagatgagtctcttgtaggccacatatagttggtttttaaaaaatctatccagccactctatgtattttaattagattatgagatctgggattgaattcatttttagcaaagcctattttctttttattatggtactcttagttgttttaggacttctatcttctaatatttatggaccattattctgttctttgagacatcttttacataagttgcttttcctaaagatactctaatccttaagccttagagaagccttactttagatcagtgactggatccttaatgcctaaagattttcactggtc

SEQ ID NO: 807961 - DNA, 564 bp, Homo sapiens
accaattaatattgcatagaatattaatgacctttggtagataatttggaaaccacaaattgagaggtcttcaaagcctgtttcagctctaggaatctggatcagaagctccaggagggtagggaactagatcccactgctttactttatccccagtgcttgacataaagtaaatgatcaataatatttgcaaaatcaatgaatgaactgtgatcgtttaggtctatttctcactccttgcaggaggcatgggctctgtctacccccttctgaagttatgtgcatatcaaatttaagcaactccagctacagaaaggagatarggaccttttgtagtgtaaaaacacaagggaattatgctgagtctttcttggcaatgtacgagtgtgtcgtcttgaagatatttgaccctaataggattgcttttccatttcctcctgttttcataagtcaaagtcttattcagattcatctaggaaaaaagaaaaaaacaaaattagttggaaggaaatgactgacatccccattctgaagatcaaagagaaggaaagaatctcaggggga

SEQ ID NO: 807962 - DNA, 622 bp, Homo sapiens
atttgagataatgaaaatgttaacttattcaactaaatagtaataattttactatacatgtgtatctttaacacgttgtataccttaaatattaatatataccataaaatttattttaaaataaatccatctctggaaaactgaaggccaaaaaaaaaaaggaacaggaatgcgaggagagtgcagaacactgaagagaacacaagtagccaatatcccattctaacatatctttccttccccatcaaaagcttaagagaagcctcatgcagaacagatacttatttcaatctacagtgacacagaagcttttaatatmattttaaactccattttaattttatttgtcatgtaagcttatctaaataagaatgagacttggattttccactaatatgaaatataagcctcaaccattcctttaaaaacgtgtttagaatatcaatccacgcccaaaagactacctataacactcgagagtttatacttctttaatgattcccttaacctggtaagtagtcattcgatgctgagcaattgcagtcagtttttctagaaggcctcgtagtcgttcctgtgttgcttgggagatcaagttcacagcatcagagttaagttctgt

SEQ ID NO: 807963 - DNA, 576 bp, Homo sapiens
cggctgccatagacagtgattcctctgatgaatccgggggcaaagtcaactgaaaaccttctggaaaagattcaccattctagatgccattaagtatatttatgagtcaggcaggagatcaaaatatcaacactaacaggagttcataagaagtggatccccatcctcatggatgactatgaggggttcagaacttcagtggaagaagtcactgcagatatgctagaaatagcaagagaaccacagttgaaagtggagcctgaagatgtgaccgaattgctgcaatctcaggacaaaactgaaagagatgaggagttgcttcttacagatgagcaaagaaactggtttcttgagatggagtctacccctggtcaaatgctataaatgttgttaggatggtaacaaagaatttagaatatgacaacaactagttaacaaamcaatggcagggtatgagagaattgactccaattttgaaagaagttctgctgtgtgtgaaatgctatcagacagcactgcatgctacagagaagtcttttgtgaagggaagaatcaactgatgacacaaattgcact

SEQ ID NO: 807964 - DNA, 477 bp, Homo sapiens
atactcaggatctgaatgtgagggccgaggagggcgaagagcgtgggtggggaggggatgttgctttggggtctcatggtccccagagggcactagggagtcacttttggctccgctggtgcatgaagtcacctgtggccaccatccgttccgcctaaaacactctggagagaatcccacctttcttacaatttgytgggccattgaggtttgagggcctgtgtttggatccttgcaactgtgtggtctcacctctgtgcgtgcattctcattgccagaattggtctattttcacggctggtctttggggaggggggcgggatccagcctttgttttgttgtgttggggtgggggtgttgtttttctaaaagctacctcttatgtttgtccagttgttcttttgttcctttcccgcctcccattctgctgctcttcctccctcttttccccaacctcccccgaccctcctgaatttt

SEQ ID NO: 807965 - DNA, 635 bp, Homo sapiens
atgtaggataacatggctgctgggatccactcttgggccttgggaatagaatggatctcattggctcccccagaaggagaccagtgcagatgaaaaggctgaataccctgccaagacaatgtcctgtgccagattagaatctaaacctcattgtcgaactcaaacacattgcacttggggtgaatagtcctgctgtgcgtgtgtgtatccatatacgagatgtgtgcatatatacacatatgtacaggcatatatatacatatatgtatgtatgcacatgtctgtctgtgtgtatgtaattagagaggactttctggaaaaggaatgtttgagggtggccttgggttcctgttggctgtgaacacactcctaatgagctgccctgtgtctcagtttacacrtggtatttgaaattgagtctaaattcccatttcttgtactttctgaggagcagtcaagaaagagccagatttacagtttgccagtctcttagctctatgttccaaaggaattaagtcactcttcttgacaatggccttaaaatagggttttaataaaatgaaaagaggagcagtggagccacccacccctgtcacctgtggctaaatggatatacgggcgccaggctgctacgg

SEQ ID NO: 807966 - DNA, 608 bp, Homo sapiens
tcatctagatgagtatcactttggccgggtgcggtgactcatgcctgtaatcccagcacttttgcaggccaaggtgggggggatcatctgaggtcaggagttcgagaccagcctgaccaatatagtgaaaccctgtctctgctaaaaatacaaaaattagctgtgtgcggtggcgtgtgactgtagtcccagccacttgggaggctgagacaggagaattgcttgaacccaggaggcagaggttgcagtgagccaagattgcaccactgcrctccagcgtgggtgacagagccagactccttctcaaaagaagagtaaagtatcacttctcacatcatggcactgagagattccgatgcattaggcttctaaaagtggtactgaagaaatttccttagaaccccttttagtgagagtgatagtagttccgtgggggatttaatagctgttatttgaaaaacagttctcatgcttaaattaatggggaaatgaggagctgaacaaaattaaacagatttatttgctgagagttttctcagagcctttgctagctaaggaacattttgaatctctctgtgggagatgtaatgtgccgcattccccaaatt

SEQ ID NO: 807967 - DNA, 584 bp, Homo sapiens
tcccagctacttcggaagctgaggcaggagaatcgcttgaacctgggaggtggagtttgcagtgagctgagagcatgcactgcactccagcatgagtgacagagcaagactccatctgaaaagagaagaaaaaaggcccggatttttatcacctatggaaataatgttaatgaataacagtgaataacctttcactaaaaatgagttgcaattkgtcgaagttgatttaggaaaaaaatccacttcctggaagtagattgaggcatcaggttgtagaaagtattaaaaccatttatcttttttaaatttaagcatttctaagtttacattaagcagattccctttgactgtctataccccagaccaatagagatactgaagccttcagtgtaagagaaatcacccagtctgctatagatttccagaagagcagcccagaagggagagctaactaaagatttttgacaatcctgagaaatgctattcatcatagcttatgagaagttgtgaaaggatgctctgtttaccctccgcaccaaaaaatgctgagttggtgtatcagaaaaacaaattcagagaaaata

SEQ ID NO: 807968 - DNA, 608 bp, Homo sapiens
aacacggcctatcactctaagagcagaaagaggattcaagaatttaaagatttcaacaacaaagggggaatttaagagttccaagattttctcctcagatactcaaaaattccaattaggcagaatacgccattctctgagtacatcattaatcagtttgaacgtgttttccattatttccaactttacagtgctggtttaaagcaggtattatttcagagcaaagattatttcattgttttgggaacatcataaaacatgctatttacatggaagataacatgggggtaggcccagtagcatgatttattctaacataaaacacacacgtgtgcacacacaaacacacacacactgacatatcttccattcaagaaaagtttaatttatagttttttaaggttttagcagttcaggtttccttttatgatagcatggttaccaaatatgctttgttttttcatttctaaaaraaagtcacagatttattatgttcagctccttactaaatgagctgaagggagatttataaagcaaataaatggaaagatttacagtttcttcctcacagcagctaaaaattatggaaaagctcattgacctttcaa

SEQ ID NO: 807969 - DNA, 515 bp, Homo sapiens
cctataactatctgatctttcacaaacgtgacaaaaacaagcaatggaggaaggattcccacttcaataaatggtgctggataactgggaagccatgggcagaagaatgaagctagatcccctccttacaccatatataaaaattaactcaagattarttaaagacttaaatgtaaaacccaaatctataaaaacccgcaaggcaacgtaggcaacaccattctggacataggaatgggcaaaggtttcataatgaagacaccaaaagcaactgcaataaaaacaaaaattgacaaactgaatctaataaaactaaagtgctcaacatcactgatcattaaagaaatgcaaatcaaaaccacaatgagataccatctcatgtcagtcaaaatggctatcattaaaaagtccaaaaaacaacagatgctggcgaggttgtggagaaaaaggaatgcttatacagggttagtagaagttaaatcagtttcaccattgtggaagacagtatggtgatt

SEQ ID NO: 807970 - DNA, 515 bp, Homo sapiens
cctataactatctgatctttcacaaacgtgacaaaaacaagcaatggaggaaggattcccacttcaataaatggtgctggataactgggaagccatgggcagaagaatgaagctagatcccctccttacaccatatataaaaattaactcaagattaattaaagacttaaatgtaaaacccaaatctataaaaacccgcaaggcaacgtaggcaacaccattctggacataggaatgggcaaaggtttcataatgaagacaccaaaagcaactgcaataaaaacaaaaaytgacaaactgaatctaataaaactaaagtgctcaacatcactgatcattaaagaaatgcaaatcaaaaccacaatgagataccatctcatgtcagtcaaaatggctatcattaaaaagtccaaaaaacaacagatgctggcgaggttgtggagaaaaaggaatgcttatacagggttagtagaagttaaatcagtttcaccattgtggaagacagtatggtgatt

SEQ ID NO: 807971 - DNA, 586 bp, Homo sapiens
agaccctcactttcaaataagcaccatacgaaagcctaaccacaataaaagcacctcgtttgcccgcacttgttccaggaaatggccaaccacagaaagtcctccatccctaagattgaacaatccttcctcttttgaaatatccccaaatggctagcttgctccctagccatcaaccaaggactaccaatattcctaaagatgaatgagaaagtctcctctgcgtcctaaaatcgcaccctatagaatgattgccaatcagagactgcctcaatctttcctcttttaattstataaaacttactctcctttctgatatctttgcagcttgcagaaacaaataacggcagatggattaccttgccacaagtttacgaataaacagcctttgttaattttgtcttggtctttgatttgtttccgacaaaatttatatagttagccgtacaaatatgcatcctactgaggggggtttgtttcattatatatagcccaccattgctgtccataagaaaccattcaaagagagaagacatgcaccacaggggagaagacattcatccacaattatttttccttctaatct

SEQ ID NO: 807972 - DNA, 619 bp, Homo sapiens
accctaaggagagataaaagcttgatgctactattgcataattcttatcagaaacccgggattgcctgaaggatattcagtctacccatcattccaaatactgtaaattataccttttaatcttgccagataactggagtaatgtttatagggatcatggtgaccaacacggagggatgtaagagggaacaaccaagtgaaatttgtttgtaggtatatgtttaaggatggatgttgtttagggttccacacagggtactctcctgttttattctaaagacctaagggagaagtatttcccatgtttcagtataaaataaagaaaagctggaacttgctagaaagaacagcatgttcttattttataatgttgtgtatctggtaaccatgtttctcattttcatttgactcttaggaagcttagatctattttttkgttcacatgtaatacctatgcagaactccagggtatacatttctgttgctgatgttactgttggcttgactattctcctacccatattttcctttcaacattaaaatataagatttgatttgtgattttctattctatgatgagctatgctaattggagctttattttgcatgcattctttcc

SEQ ID NO: 807973 - DNA, 619 bp, Homo sapiens
accctaaggagagataaaagcttgatgctactattgcataattcttatcagaaacccgggattgcctgaaggatattcagtctacccatcattccaaatactgtaaattataccttttaatcttgccagataactggagtaatgtttatagggatcatggtgaccaacacggagggatgtaagagggaacaaccaagtgaaatttgtttgtaggtatatgtttaaggatggatgttgtttagggttccacacagggtactctcctgttttattctaaagacctaagggagaagtatttcccatgtttcagtataaaataaagaaaagctggaacttgctagaaagaacagcatgttcttattttataatgttgtgtatctggtaaccatgtttctcattttcatttgactcttaggaagcttagatctatttttttrttcacatgtaatacctatgcagaactccagggtatacatttctgttgctgatgttactgttggcttgactattctcctacccatattttcctttcaacattaaaatataagatttgatttgtgattttctattctatgatgagctatgctaattggagctttattttgcatgcattctttcc

SEQ ID NO: 807974 - DNA, 454 bp, Homo sapiens
tcgtcccagaggggtacccaacatatgccagccagagatctcctgtatgaggtgtctttcagcccctgctgggatgtgtctcccagtcaggagacatgggggtcagggacccacttgaggaggcagtctgacccttagcagagctcgaacgctgtgctgggagatttgctgctctsttcagcagccatcaggcaggcacattgaagtctgttgaagatgcgcccacagccaccccttctcccaggggctctgtcccagggagatgggggttttatctttaagcccacgactggggctgctgcctttttttcagagatgccctgcctagagaggaggaatctaaagaggcagtctggctacagtggctttgctgagctgcagagggctccacccagttggaacttccctgcggctttgtttacaccgtgagggtaaaacctaaaaccacctacca

SEQ ID NO: 807975 - DNA, 579 bp, Homo sapiens
ttgttcatctgcttaccatttggcagacttttgagttgtttctacctttgggccccaaaggtggaaacattcatgtacaagtttttgtagtaatatataatttcaattatctggtgtacatactatgaatggaatcactgtgttatgtgctaaccctgtgtttacctttatgtttaacatgtaaaataataaaaactatctggagggccttgaagtagatttaacctcatccttttctttccagtggcttccargctgctgggtttctccatgattgtaggtggttggatttctatgttgctgtggagctcagatgagaagaattaaaatagcgatagttaaaaccccccaaatctcactgttcttatcaacattgagaattttccttgaataaacactccctagatatctgcaaacttttggttaatcatcagagttctgaaaaagactgaaaatttctgccagtgttctcatggatttttgaagatgagatgtttggaggttgttactctgacatttattactgatatcactttctccctagtttttgcaatgatcagttcttgcaggcaaatgact

SEQ ID NO: 807976 - DNA, 529 bp, Homo sapiens
ttgagagacaaagcaaaaaaaaaaagacattatttggggagaagttgaaatccctggttttctttgtaaagcatttgatcatgggggtatgatttcttctgagttttattatcagataaatgtatttaaatatcagtgagaaactcagtagatttcagccaaactagcctttcagttttttgtcaaattgcttttgagttcagttcagttcctagttmtttcctggtttgggtctttataatcgctgttctgcattttgttaggtctttctagcacataatgatcaaatctgataactttagctgttgctagtttaagaaacagttattgtccatgtccttctctatttttttcctttccaatattatattgcattttgctctaattgttttcctatttcaagaaattgagattagtacttatatcaatatggagaatattcataagataaaaagatctattgctattcactgtattttttattttgaataaaaatcaaaacatttgttaagcgcagatagattgaata

SEQ ID NO: 807977 - DNA, 559 bp, Homo sapiens
atgaaaagagtaaacagataaggaagggaataagaaaggatcttataagcagagaaaacagtgctttcaaattcttggaagtatgagagaatatagaagagtttggaaactaaaaatagattgatacgttaagatgaaaatattcattgatttattcattcaacaacatatcttaggagagaaggaagaaggccagagtggaagcagaagtccagatcaaaarcatctttatataccatgataagaagtttgaaatctcttctttagggaaaaagttttcaacaggagagctatgatcagagttacattctaataagatcactcaggtagtggatgagagagtttttaagaaggaagagacttgttgtagggaatctatttcagtgaaacaggcaaatgtgatgtctgcctaaaataaaacaatgatgagggttagcagtttgtgtgtgtgctgaagggtagatttgagtatttaggaaatagaatgaacaagtcttagtgatttattattagcagcagaaaagagagagaatatagtctgtcatgactcccaaagttc

SEQ ID NO: 807978 - DNA, 559 bp, Homo sapiens
atgaaaagagtaaacagataaggaagggaataagaaaggatcttataagcagagaaaacagtgctttcaaattcttggaagtatgagagaatatagaagagtttggaaactaaaaatagattgatacgttaagatgaaaatattcattgatttattcattcaacaacatatcttaggagagaaggaagaaggccagagtggaagcagaagtccagatcaaaagcatctttatataccatgataagaagtttgaaatctsttctttagggaaaaagttttcaacaggagagctatgatcagagttacattctaataagatcactcaggtagtggatgagagagtttttaagaaggaagagacttgttgtagggaatctatttcagtgaaacaggcaaatgtgatgtctgcctaaaataaaacaatgatgagggttagcagtttgtgtgtgtgctgaagggtagatttgagtatttaggaaatagaatgaacaagtcttagtgatttattattagcagcagaaaagagagagaatatagtctgtcatgactcccaaagttc

SEQ ID NO: 807979 - DNA, 477 bp, Homo sapiens
ctccacccaacaacaacaaaatatacattcttctcatccacacagggtacatactccaatattaactacatgctcgaccataaagcaattctgaccaatatccctgatgaacattgatgcaaaaatcctcagcaaaatactagtaaatcaaattgagcagcacatcaaaaagctaattcacctgattgatatggtttggctgtgtctccacccaaatcttattttgaattgtagcttccataatccccacatgtcacrggagggaccaaatgggaggtaattgaatcatggggatgggcttttccagttctgttcccatgatagtaagtctcatgagatcaaatagttttataaaaggcagttcccctgcacacactctctttcctgccaccatgtaggacatgcctttgctcctccttcaccttctgccatgattgtgagacctccccagccatgtggaactgtgagtccattaaa

SEQ ID NO: 807980 - DNA, 605 bp, Homo sapiens
tctgttattggtgtattgtctgtttttggtgtataggaatgcttgtgttttttgcacgttgtttatatcctgagactttgctgaagttgcttatcagcttaaggaaatttggggctgagacgatgtggtttactaaatatacaatcatgtcatctgcaaacagggacaatttgacttcctcttttcctaattgaataccctttatttctttctcttgcctgaatgccctggccagaacttccaacactgttgaataggartggtgagagagggcatccttgtcttgtgccggttttcaaagaaaatgcttccagtttttgcccattcagtatgatattggctgtgggtttgtcataaatagctcttattattttgagacatgttccatcaatacctaatttattgagagtttttagtatgaagagaggtgttgaattttgtcaaaggccttttctgcatctattgagataatcatgtggtttatgtgattaattacgtttattgatttgcgtatgttgaaccagccttgcatcccagggatgaagccaacttgatagtgatggataagctttttgatgtgctgctggatttggtttgccagtatt

SEQ ID NO: 807981 - DNA, 319 bp, Homo sapiens
gctacttggctttatgtacaacctccacctcattattcctcattctgctgccacgtgcatacaaacatcactagaatgccaggcacatggtaggtggtcagtaaatatttgctgtattaattaataaatacataaataacccagagraagagccctcttaaaagttaattatatttattaaattatgtgcattcatccctccaattgcctgtggagtaaagttatagatatatacaatgtatttatctttctggtttgggtggaatatagtctcattgttttaatgcatcctgttttcatgtaatattttctttctgta

SEQ ID NO: 807982 - DNA, 567 bp, Homo sapiens
tagtcaacagaaaaaattcttaacctggaatccaataaaactttgaatgcaaaagatcaggaaaatacaacccataaggaggagcaaagcatccattagaatcaactcagaactaacacggatattagaattagcacacaataatattaagccagttattatcaccgtagttcatatcttgaaaaactaaacagagatgtagaagttaccccaaaaaaaagatttaaattgaactagtatagataaaaatttccgtatgtacatgaaaaatacaccaaatatgattgagggaagattagacattgcagaagagaagattagtgaacttgaagccatagccataaaaacmaacccaaatgaaacacagaaagaaaagataactgttttaacgtatagagcatcagtaagctgtgggacaacttcaaataccctaatatatgtgtaattggtgtctctgggaaaagagacagaaaaacatatttgaataatggataacaattttccaaatttgatgaaaactatacattgacagatccaagaagctcaatgaaccccaagcgtaagaaa

SEQ ID NO: 807983 - DNA, 567 bp, Homo sapiens
tagtcaacagaaaaaattcttaacctggaatccaataaaactttgaatgcaaaagatcaggaaaatacaacccataaggaggagcaaagcatccattagaatcaactcagaactaacacggatattagaattagcacacaataatattaagccagttattatcaccgtagttcatatcttgaaaaactaaacagagatgtagaagttaccccaaaaaaaagatttaaattgaactagtatagataaaaatttccgtatgtacatgaaaaatacaccaaatatgattgagggaagattagacattgcagaagagaagattagtgaacttgaagccatagccataaaaaccaaccmaaatgaaacacagaaagaaaagataactgttttaacgtatagagcatcagtaagctgtgggacaacttcaaataccctaatatatgtgtaattggtgtctctgggaaaagagacagaaaaacatatttgaataatggataacaattttccaaatttgatgaaaactatacattgacagatccaagaagctcaatgaaccccaagcgtaagaaa

SEQ ID NO: 807984 - DNA, 535 bp, Homo sapiens
cccatgggggactgttcacgagtcctttcctcaattgaaggccaatggagcactgggaggaagtcctgacccaagtggaaagctctaggtccaatactgtgcactgggatggggaccaggcacttggcctgctgggtctgaaatgacatagagtcagggccttccagttcagcccaggtggacacaggactggaggccagcctgacaggcactggccaccgagaatagatgctgggtctaagtcccaccagaacacagatagaagaaaaatgttgggttggtgagcagtaaagrggaaactggctatgtgtctgggtctcatgcaagaagccaagagtctgaaagccaggagaaggcgtaactcatcttgctgaactgtcacagctctttggataaatgtctatcacagtgctcagcaggtggtttcactttttcatagaacatgaacatgatgcctctggagccagagtacctgggttccaatccccagtctgccacttagttcactgtgaccttggagaagttattctctatg

SEQ ID NO: 807985 - DNA, 628 bp, Homo sapiens
gggaaggcacaccaaagatagttattacattcctaagcagaagtgtcatcctccacatcatttttcagagtgaaccagagtttgacagagggcatcaatgaatagaggtagagaagggtcttagcagatgccattagcctcaaattatgatgsagcatttccacataagagaaagaataatgatccagaaacaagtggagaactaggaggactttgagccccagcccctcccttatgtagatgacactaggtgagtgggagaataaaagagtatctcatggagaggacacagaggaagccctgaccaccagggggaagctgagtgtttaattagagcaggaggtctagggcactggcaacaaagttgagtatacaggaatttatttatttatttattgagatggagtctcactctctcacccaggctggagtgcagtggcgtgatctcggctcactgcaacctacacttcctgggttcaagcaattctcctgtttcagcttcccaagtagctgggattacaggtgcatgccaccacacccagctaatttttgtatttttagtagagacagggtttcaccatattggtcaggctggtctcaaactcctgacctcaggtgatggcacccg

SEQ ID NO: 807986 - DNA, 628 bp, Homo sapiens
gggaaggcacaccaaagatagttattacattcctaagcagaagtgtcatcctccacatcatttttcagagtgaaccagagtttgacagagggcatcaatgaatagaggtagagaagggtcttagcagatgccattagcctcaaattatgatgcagcatttccacataagagaaagaataatgatccagaaacaagtggagaactaggaggactttgagccccagcccctcccttatgtagatgacactaggtgagtgggagaataaaagagtatctcatggagaggacacagaggaagccctgaccaccagggggaagctgagtgtttaattagagcaggaggtctagggcactggcaacaaagwtgagtatacaggaatttatttatttatttattgagatggagtctcactctctcacccaggctggagtgcagtggcgtgatctcggctcactgcaacctacacttcctgggttcaagcaattctcctgtttcagcttcccaagtagctgggattacaggtgcatgccaccacacccagctaatttttgtatttttagtagagacagggtttcaccatattggtcaggctggtctcaaactcctgacctcaggtgatggcacccg

SEQ ID NO: 807987 - DNA, 539 bp, Homo sapiens
ctaatggcaaagggtcttgtctgctccaggtgttctgggtggtaattacaaaggattcttatcttgtcctttggatgtttctcagggactggttttggaaatccctgtgtggttctttgttggagggatgagtgtgatggcacccagcgcaggctcagtcctttctctgaggcttgctactctgttggccagacccttgataggatgtttggctcaggggccacagttgacatgggtttgcccttcttcgtgtggctttcctrtgacaggtcagaatatagatgtgttcctgggcctgggagaattggggaggtacaaggctttactttatggaggagcagagggggctcagggttctaactgcagttctgttcttgctgtgtgacattggcctttctctgtgacttaatctccccaatcaggggagataggtggacaaactagtgcctatgtttccatccagctggtactgtgcagatttgggggagcctgcggttttgagttggggactcttggggcctgagttctgccagagcctc

SEQ ID NO: 807988 - DNA, 637 bp, Homo sapiens
atttcatttcttttttgctggagttggatggcaggggagacagaactagggggatgttacccagatgaaccacttgtgacccagagaggagggaggcaagctggaagcctcccagtgaggcaagcagaggctggacacaatcctgagccaayggactctctgttaggtgcttgctccatttttcccctgtaggtacccatctccctgcagcagcgagctgctgattctgattgcatccctgcacctggtagcttctggaaccacagtgagacattacctcatggttagcaaatcggatatcccgagaaaatatggtagccacccagtcacaccctagcttgacgtcaatgttctgggccagtttctctagggtgggtaggtggctggcttggaagtggtaagccagggtcacatgtagctgcttcttatgaggttccacatgcacttctggaaaaaggaagaaaaaggtcagtaattaaaaggtggtgatgatagcaatggtgaagacttaaggaaaggcatagaaaggtaccctgagaaattctgcttcccacataacaaagaagacaaaagacgtttctctccttcacagcagtagaataagggggtaaggggatggcaagagattccgaatcaa

SEQ ID NO: 807989 - DNA, 637 bp, Homo sapiens
atttcatttcttttttgctggagttggatggcaggggagacagaactagggggatgttacccagatgaaccacttgtgacccagagaggagggaggcaagctggaagcctcccagtgaggcaagcagaggctggacacaatcctgagccaacggactctctgttaggtgcttgctccatttttcccctgtaggtacccatctccctgcagcagcgagctgctgattctgattgcatccctgcacctggtagcttctgraaccacagtgagacattacctcatggttagcaaatcggatatcccgagaaaatatggtagccacccagtcacaccctagcttgacgtcaatgttctgggccagtttctctagggtgggtaggtggctggcttggaagtggtaagccagggtcacatgtagctgcttcttatgaggttccacatgcacttctggaaaaaggaagaaaaaggtcagtaattaaaaggtggtgatgatagcaatggtgaagacttaaggaaaggcatagaaaggtaccctgagaaattctgcttcccacataacaaagaagacaaaagacgtttctctccttcacagcagtagaataagggggtaaggggatggcaagagattccgaatcaa

SEQ ID NO: 807990 - DNA, 659 bp, Homo sapiens
cagcttacctgttggttgacattggatcctctgagaacacttggccaacccaacatctctgaaatgtagctgactctggcgtgggggctgcagctgctttcccagccttggatagacagaaagaggaaaaactggaacccacctggagctgaagggctcttataggtgggcagggcaaggaagtctctaatctacctgctgtgactgtgcacccacataacacgcccttctatctgtgttattatacactgtaaaaattgctcttatgtgtattagataccccacagcagtcttgtgaggtaaagcacacaacatatgctttgttttaagatgagactggaggcttagaggagttcaggacgtgtctagagtcacacagttggtatgcagggactgcattgccataagagcctcaggctaaactgcaagtctcctgaactttccaggctacacgaggtcctggttccaaaaaaaaaaaaamcaaaaaaaaaaataccttgatatgctttttttctttttttttttttttttgagacagagtttcgttcttgttgcccaagctggagtgcaatggcagtgatctcagctcactgcaacctctgcctcctaggtgtcaagtgattctcctgccttagcctcccaagtagctaggactacag

SEQ ID NO: 807991 - DNA, 747 bp, Homo sapiens
ttctctctgaggttcttttgggcattgcattttctatcaagtacctactatagtgcttggcatacagtattcttctcacgctctatcctcctcctgacagctccatgctgttggtgggtatccatggtcgggtattggaatgtcttactctcctctgattttcaggagacataaatttkcttcctaactttgcaatactgaaggaaaaaacagtcttctgaaaagtttccttccaagtgcagggctaaattttcatctctgctcactctctgatttgacaaattggcatagctcatttgctgtgtaccaaattgtcttgatgcaagagtttttacatttggggctgggcagtggttcaaaagtatcactttcccattaagctttatgggatttacctacaagatggataacacatccttcagacagatggcacagccctgaagccattgcctaatttcttcttcagtgttctccttttatcctgtcttctatgatagctgatttccttacattcatgtccacccagaaataactagtttctagaaaagctgtaatatggattgtatttctgtaaagccatatgttccatacgtcctgacatcctcgcagatgccatttgattccatttggtcatattcatttaataaatattgagtgtctgcttggtgcctggcatctgcagtgcaaagaggaataatattcagttctacacgctgaaggatcccatattttgtggcaaagcaagat

SEQ ID NO: 807992 - DNA, 634 bp, Homo sapiens
acagctccatgctgttggtgggtatccatggtcgggtattggaatgtcttactctcctctgattttcaggagacataaattttcttcctaactttgcaatactgaaggaaaaaacagtcttctgaaaagtttccttccaagtgcagggctaaattttcatctctgctcactctctgatttgacaaattggcatagctcatttgctgtgtaccaaattgtcttgatgcaagagtttttacatttggggctgggcagtggttcaaaagtatcactttcccattaagctttatgggatttacctacaagatggataacacatccttcrgacagatggcacagccctgaagccattgcctaatttcttcttcagtgttctccttttatcctgtcttctatgatagctgatttccttacattcatgtccacccagaaataactagtttctagaaaagctgtaatatggattgtatttctgtaaagccatatgttccatacgtcctgacatcctcgcagatgccatttgattccatttggtcatattcatttaataaatattgagtgtctgcttggtgcctggcatctgcagtgcaaagaggaataatattcagttctacacgctgaaggatcccatatt

SEQ ID NO: 807993 - DNA, 648 bp, Homo sapiens
tgttcagttacacatccaggaatatatatattccccataggttttctaatttgttggcatataggtgttcctaatagtctctaatgatcatttgtttttctatagtatcatttgtaatgtctcttatttcatttctgattttatttatttgggtcttctctctttttttcttagcttaactaatgatttgtcaaatttatcttttcaaaaacacaaattttcattttgtttatttttaaatatattttaagtatctatttagtttatttctgctctgatattcattatttttcytctacctattttgggtcagatttgttcttgcttttctggttccttgaggtgcattgctaggttatttgaaatctttcaacttttataaaatagacagttattgctattagtgctgctttttctgtgtcccattggttttggtatgttatgtttccatttttattgatttcaagaattttttttgcttcttaattttttcactgagccactagttgtttggaagcatattatttaatttccctttatttgcacagttttcagagttactctttcattgatttctagttttattccatgatgatctgagaaggtacttgatatgatttaaattttttaaaaattttaagtcttgtt

SEQ ID NO: 807994 - DNA, 592 bp, Homo sapiens
ttcaaagctcctgtcctacgagattagtgccctgtagattttttactttaggagaaaggtaacaatgtaagtgatgagcaagttcacagggtatggtttactcaattattgatgctttgatgacaaggcattggggcaaaaattcatttatttgatgaaggaagttccattgccaggtatatagaagtgaaaactgcctcagccagaagttgcaaccacttgctactggaattgaagaaggtattgacattttaagtctgcatgaattgacttggtctctctaggttacatgtcatcccagctaatgttgatctttttttgtttttttgtttgttttatttttctaatcaataaattctcamacttggttgattttttttggattgatgttgcttttttgttatttttttcaggctccatctttgagacacaatcgaggagtttttttcagagaggccaatgtaatttccactgatgtcaaaaagtagaattatgcttttaatatttaatgtttctcaaggttctacactctgtggcataacttgtgttatttcctgtatactagtaaataatagagaaattactattacta

SEQ ID NO: 807995 - DNA, 611 bp, Homo sapiens
tttcagccagtctggtgaatcaaaattttttatttattaaatatcccatttttcgcctgtggcagggtggtggtccagaggccttgactgaaggggactggaacaacttgtctgtgccatctctgggcttttctcctctactactctactgctcagtgcaaacaatgtatcttctattakatccattacttcagttgtgctttgaagggggcaacaggtttcttagtgggttttgattttagtaccttgatgttaatctgatttatgaaattctccatggagttcatctgagtttaccggattctgctccggaatatgaggcctaagtcccagataataaaaatgtattttggcttgatctcttgggcatttatttctcctcggactttgtggtgaagaggttaaatattccttggttattcctaaattatctggtcaaacatccttatattatcatttttaatgtgtcatacctctttagcacatttccaaccacctgccacttctgttaattaagtagcgtattaacttcctccaaataatatctttaaaatcccaccgttttctccctcagaaacttagtatggtattcaaggatgctagaattctac

SEQ ID NO: 807996 - DNA, 502 bp, Homo sapiens
aagcgatggggcccttggggcgccctcctgatgccattgacattgctgaacatgggatgtccagtccctcaggtgttcaggccacctaccaaagataaaataactcactgagaatttcccacccagtccagcccagcccagcccaaaaattctttgaccaaagaagggagttggagaatcctgtgcctctgttaccatgggcaagttcagattgcctcgacactcaggtcaaagcagttcaccttccgaagcgctgacatcatacagagctttstgacttaaagaattaccctgagggcggggaccccaggcagggtagacagtgacctaagggaccaaatttaaagtcacttcagttgtgggcaacaaagtcacttgtacaacctgccatccacatctgccttcccctcccatgttcctgtaggtcacctcatgtcacactgctcctgttctattcctccactggtaccgcagagttctccttgttctcagatgggatggc

SEQ ID NO: 807997 - DNA, 630 bp, Homo sapiens
cctcaaacagccttgcttttctgatgcggccacactggctttcttctagtcccgcatagtcaccaggcaccctcatatcacaggacctttgcctgtatctattctcactcctttttcactcagttaacttctactcatcagatcagagaagccttctgacctcactgactcctctatgaggaccatttatttctcttctgtggcacctgcaaagctgcagttttatttcggtttactttatcatttgattaaggtgtgctcctccaaggctgaaactccacgaggacgggaaccatgtctggcgagcattgtgctccaagaarctaacacagtaaacacttcagtttgtaaatatttgctgaaccaatgaatagttattcactaccaaaaaaaggcgaactattgacaagtgcaacaaaaaataatgagttaatacacatgaaagcattttgtgaatctaaactgctgttcaacgccaggcacaatggctcatgcctgtaatcccagcactttcggaggccaaggtgggaggataacttgaggacaggagttcaagaccagcctgggcaacacggcgaaacctgtctctacaagaaacaaaaacttagccggttgtggtggcatgcgcct

SEQ ID NO: 807998 - DNA, 630 bp, Homo sapiens
cctcaaacagccttgcttttctgatgcggccacactggctttcttctagtcccgcatagtcaccaggcaccctcatatcacaggacctttgcctgtatctattctcactcctttttcactcagttaacttctactcatcagatcagagaagccttctgacctcactgactcctctatgaggaccatttatttctcttctgtggcacctgcaaagctgcagttttatttcggtttactttatcatttgattaaggtgtgctcctccaaggctgaaactccacgaggacgggaaccatgtctggcgagcattgtgctccaagaaactaacacagtaaacacttcagtttgtaaatatttgctgaaccaatgaatagttattcactaccaaaaaaaggsgaactattgacaagtgcaacaaaaaataatgagttaatacacatgaaagcattttgtgaatctaaactgctgttcaacgccaggcacaatggctcatgcctgtaatcccagcactttcggaggccaaggtgggaggataacttgaggacaggagttcaagaccagcctgggcaacacggcgaaacctgtctctacaagaaacaaaaacttagccggttgtggtggcatgcgcct

SEQ ID NO: 807999 - DNA, 431 bp, Homo sapiens
caggcaaagcatgagatgctaactttatttatttatttatttactttttgagatagggtcttgctgtgtcatccaggctggaatgcagtcgagcaatcacggctaactgcagcctagacttcccaggttcaagcgatcctyctgcctcagcctctcaagtagctgggactacaggcgtgcaacatcatgcctggctaatttttttattttttgtggagataaggtctcaactatgatggccaggctagtctcaaactcctgtgctcaagcgatcttcctgcctcagcaccccccaaagtgctggaattacaggtgtcagccagcatgcacggcccaagacgctaactttaaatcacttgttgctcaagtccaatatccctgtgattctgcagaaaaatgtaaaacagctacaggtagttttagtatcaaat

SEQ ID NO: 808000 - DNA, 431 bp, Homo sapiens
caggcaaagcatgagatgctaactttatttatttatttatttactttttgagatagggtcttgctgtgtcatccaggctggaatgcagtcgagcaatcacggctaactgcagcctagacttcccaggttcaagcgatccttctgcctcagcctctcaagtagctgggactacaggcgtgcaacatcaygcctggctaatttttttattttttgtggagataaggtctcaactatgatggccaggctagtctcaaactcctgtgctcaagcgatcttcctgcctcagcaccccccaaagtgctggaattacaggtgtcagccagcatgcacggcccaagacgctaactttaaatcacttgttgctcaagtccaatatccctgtgattctgcagaaaaatgtaaaacagctacaggtagttttagtatcaaat

SEQ ID NO: 808001 - DNA, 650 bp, Homo sapiens
ttgtcttcttggccttgactgcaaggatttatccttaatttccatggcctaattatctttccagtgtttcctctttctacctttattaattggttctcgtccttttattcttcattcacttttttgtttcattgaatctataaattaaatatggtctcgtttgtttttagaagtaggtggagtacaactaaatattagctaatggtagcacaagtagaacctgtttaaaatttttaaaaaacaamctgttcactgtaagaatgagatacccaaggaaagaacaggaaagaggtgtatttttaatcctgccttttgtatttagtgtgcctcatgactagctgttcatctaacatgcttcttggttctcggcaggtgaatggctatgtggtgaaccttttctgggcatttgacacccacaagcaagagaggagaactttgaacttccgaggaagcatattgtcacacaaaggtaacactttggtgctggtcagtgtgtgtgcaggaaggggtaaggctggaccaatgctttcccgctgtagagcttgactgggggtgccagggaaggggaggtattctctagaagctgttctgtgttgacaggttcttgtgcattgaggatcctataagtgtgctgctgattctaggcagag

SEQ ID NO: 808002 - DNA, 669 bp, Homo sapiens
agactcagaattcattttccacacttaatgtaaatgtaacccataaaagttccattttctaagaagcccagcttaaaaggaagcatttggcttcccctcccatctcccagagcctcctgtgagtggtaatgacaatggtaattaggcggatgaaccaggaatggaatccttgaacaaggggctcccagctctggctgtgactccccctgccctcactgctcccccagcctgctggctgctgcctcagcttgggcgtgctcttcagcgtgtgggctgtccctgcttctgagagggctcargcctctccctgacgacacaggcacagttcttcacaggaatcatgccagcctggcctcccagatctacgggcacccaccttgggaactgccctgctcctggtggggttgtatgatatgggcaggccacaccacatcagctcttccctcctttcttcctgtcactaaaaaacacattgggtgggcttctctagaggggaagctgtttcagaacttcaggaatttcctggaagcccagcctgccccagtccagctctgcgatcagctggtacatggaggcagatgggactttgggaactggttagaaggatgcttagcttatgccttcctctctttggctggctttttttgttaagcatttttccagaatcaa

SEQ ID NO: 808003 - DNA, 575 bp, Homo sapiens
tactaaactgcctcatgaagctaaaggtagaaaattcactagattaatggttcattggcaaaatctgtccaaatccttgttaagaaacaccataatgaaatatctgtacacctctaattctagacagcctcatagtttgcaaagtttttttactttcagtatttatttagttttttagtcctcataatagcccagaaatggggtagggcaggggattatttctgtctggttgagacttgggtctggaggccagctagcctgtccctgagtcacatggctcgcagccagtgaaaataggtgtctggcacccttgcttcattctcagcctgagctggaccattttgccttgggtggctctgcgtgttattttccagccgactttggatattctcagggatctgacttctttcttagttcatttcttgatctctcatayttgattctgctcttctcacctgacctctgattcctacctacctcaattaaaacttttgtctactcttttgattagtttacttgcagttgctcctgggaaatacctttcacacccaaacaacacttctgcaattactggt

SEQ ID NO: 808004 - DNA, 556 bp, Homo sapiens
ttgaaatgaatgtgcagatggaggtaaaactggtttcttccacagtgggggagaactcagttgaatctctacaagataggacagaatttgcacagctatagctaaaaatgattttgcatcccatcaattatgtatggtttacagagttgtacaatagctcccatagagtcacataactcagagggctgtctttagacaatgcatagttttcccctgaagcccacatttttccttgcagcaggttaactccaagatgcctgacttgsacaccaatgtggatgttgtgacattcactctacagggaatgtagggagagagcgctgaggagctgagggagaaacaaggatgattaatcgacttggtcatatttcggtagtgaacacttccacctgatagggggttggttctgttatgatttcaaggatacagtggatcagactcaatggcttcaattttggagaggcattgctttaaaagcctctccctaccgtcagacacatttgatatttattgagcaccatttctaccgagggttctggacatggcactatggtac

SEQ ID NO: 808005 - DNA, 641 bp, Homo sapiens
acacatttacccaattttaatattggactgtaaggtaagatgtttatggaccctttttaaccctttataatttttgttaaagagcaggttagtgctttaagagaaacctgttgtgctcttactttaataatcaatttacagaaaaactggatgatgccccttcaactttagccaatatgtttatacccagcatttcctttacaattaaccttccaaaatgttcttaaactttcatttttattttattcaacttagaacaattctttaamcttttaatctaggtaaaaagtcacactcttatgcctctttataatctttttgccaaaagtatatgcaaactgttttctcaataatcttacatgcatgttacactgttaacttttagcaagctttacttttgttggtaagtttgggattttaattatgtactaggtatagagcctaggacctagacagaagtgcagataaggtctgactcattccagcatttaactccatgtgtcctgggtcttacctagctgtaaaccaggcaagttgtacagctaagggttatagtggcattttataacgcattcaggaggcctaatcacttttaaattgtttaacatgtcttgcataaattcccttttataaaatgtttc

SEQ ID NO: 808006 - DNA, 641 bp, Homo sapiens
acacatttacccaattttaatattggactgtaaggtaagatgtttatggaccctttttaaccctttataatttttgttaaagagcaggttagtgctttaagagaaacctgttgtgctcttactttaataatcaatttacagaaaaactggatgatgccccttcaactttagccaatatgtttatacccagcatttcctttacaattaaccttccaaaatgttcttaaactttcatttttattttattcaacttagaacaattctttaaacttttaatctaggtaaaaagtcacactcttatgcctctttataatctttttgccaaaagtatatgcaaactgttttctcaataatcttacatgcatgttacactgttaacttttagcaagctttacttttgttggtaagtttgggattttaattatgtactaggtatagagcctagracctagacagaagtgcagataaggtctgactcattccagcatttaactccatgtgtcctgggtcttacctagctgtaaaccaggcaagttgtacagctaagggttatagtggcattttataacgcattcaggaggcctaatcacttttaaattgtttaacatgtcttgcataaattcccttttataaaatgtttc

SEQ ID NO: 808007 - DNA, 613 bp, Homo sapiens
tgcccactgcagttgtgcagtgcaggggctgctgggcctattttatattcacagttcctcatctctcctgtcgtcatttcctttggtgtatttgttaccagaaaggggtcctgatccagaccccaacagagggttcttggatctcatgcaagaaagactctggggagagtccacaaagtaaagtgaaagcaagtttattaaaaaagtaaaggaataaagaatggctactccataggcagagcggccctgmgggatgctggttgtctatatttatggttatttcttgattatatgctaaacaaggggtggattattcttgagttttctggaaaagcaggggtggggtggctggggggtggtggtggcaactgctgaaactgagggttctttcctccactttttagaccatatagggtaacttcctgatattgccatggcatttataaactgtcatggcgctgatagtgtcttttagcatgctaatgtgttataattagcatataatgtgggactaccagcggtcacttttactgccatcttggttttggtggaatttggccggcttttttaccacaaactgttttatcagcaaggtctttgtgacctgtacctt

SEQ ID NO: 808008 - DNA, 620 bp, Homo sapiens
ttttatgttgcttttgtaattgactacctcattaaattctcctgttgtgtctgttggttagtctgttgatttttgtagtttttcttttaagttgaacttatataatatacaatgaattttccttttcctttccagtatttgcacctcttggttcattttcttaacttttgttggccagcatttctagaacaatgttctagatcatttctggagcaaaattctttgctaatgggcaatttcgtctttttcctgactttccttggaaagctcttcatgtttctgcatttgatttggggcttatatctatctctagctagtcttacttcaggtttttaaaaattgagaatggatgtygagtttatcccatgtctttttagcatatgttgaggtgaagataaagtaaatctttgctttctaatgtctccagaaaaaaaaagcgccatcttttgatctcctaggctgagcacctacactcagccacttggactttcacttaacatgcccccatcctcagcctctagacctcaagaccacccctttccctgtcccctgtctcctgggcctagtgttctggtgcccagggtctgtctggtgcactctggttcccagtgggatgatgt

SEQ ID NO: 808009 - DNA, 617 bp, Homo sapiens
ggcactgccctctgataaggggcaggcatccagtaccccaggacagggtcagggcaggaatccagtgggcacattcagagaggctgttttcccatgagtagattcaatcctgatacaccccaccctctccaacctcaaccttcgaaagcgaggtgaggcctttctcagaaaccaccctgcttgctgttggctccagcagatctgctttctggtccacatttaacaatcaattgctcagcacatatctctgtcctgggaggagctgcgcagattgcaggcactgtctttgatggcacagctgatttcttgggaaactgaggcctggggtttaaagcaactcaccccaaatgacagaactagcaactggtagaggccaaatttaaacctaaggaggagaggyaaaggggcaatgtaggtcacagagtacaatgtttgggttagacaggagaataagtttctgagatctgtggcacagcatggtgggtgaccatagttcggaatgtattatatatttcaaaattgctaagagtaaattttcagtgttctcactatgcccacaaaaatacacaggtgaagttatggatatgttaattagcttgatttactcattctgcaat

SEQ ID NO: 808010 - DNA, 609 bp, Homo sapiens
cacgatggctcacatctgtaatctgagcactttgggaggctgaggcaggtggatcacctaaagtcaagtgatcgagaccagcctgcccaacatggtgaatccctgtctctactaaaaatacaaaaaattatccaggcgtggtggcaggcacctgtaattccagctactcaggaggctgagacaggaggatcacttgaacccaggaggcagaggttgcagtgacctgagattgtgccattgcactccagcctgggcaacaagagcgaaactccatctcaaaaataaaaataaaaataataaggcaaaaactggtaacactgaaggggaaaatagccaaatgtactattacagttggagtctttaatattcctctatcactaattgatagatcaagcaggcaggaaatcagtagagayattgatgacctgaatagcactagcaaccaacttgatctaattgacatttacagagtactccatcaacagaacacacattcttctcaagctcacatggaacactcaccaaaacaaaccacattctcagtcataaaacatgccttaaaatatttaaaataacagaatccatacaaagtatgatctcagatttcag

SEQ ID NO: 808011 - DNA, 611 bp, Homo sapiens
tggcagaaccatctcggctccttttagctttgatttgagggtgccacagaagagccttgcagttctccgaagggatcggaggaagcttcgtagtaaagtaaaatgcatgattccagagctgcagccgctgcctccatgtgctctgtgtttcataaccgggcagacacacatgtacctcccctctctcctgcaggcctgtaatgcaccgaaacgtccgctacaactgcagagtgatattcctcaacaggtaggccccctgcccccacccygggagggtgactggggcctctccctggctctcagccgagggctgccaggacccgtgctggtgccctggggacccgttgctgggaggctgcttctggaagtgcccgggcttagtgagggccgatgcaccaggcaggtgatccgggtgcctttgcttttctgggtctcagccaccaccgagacaggcatcatcaggtatcagaaggagagagacgcagagggtgggggtgtggggacacaggtccttgtggcctggaagccagtccaggtgagcaagttcccttggagcgcctggtcaccagctgctggggaggcgcacaccttctggggcttagctgcttcat

SEQ ID NO: 808012 - DNA, 622 bp, Homo sapiens
ttggggaaagtaggagacagatgtgggcagtgcagcatctcagttgtgcaaccacttcatgatggggaggacaggccatgtgactcatcccaattcaactagcatctagagactggctctttgtaaaatctttttattcagaaagtgactataataccrtctatgatgaagctcttttccccacttcccccagccttgtaggctcttttcccttctcctgcagcactcgtggcctatccctacatgtggctataccatggtcaagggatttcaagcttggattggcaaccgtgagactaggagtctattgaggacaggggctattgtgtcccagctcttagcctgttacctaacacataagaagtccttctatagatgctggccaacttgaattacaccaaatggaaccagtcacagaagagggccagtagagttcaggcgggtgtgagtagtctctcctggcccagggatggacactgagcttccactctggctccaagaagttgagaacctatggattggtttctactgaggtctgggattgtcaagtggcaggtgtcatcttggaggccttgaccttctgttatggcagatgctcaaggacttcttaaagctaattttg

SEQ ID NO: 808013 - DNA, 622 bp, Homo sapiens
ttggggaaagtaggagacagatgtgggcagtgcagcatctcagttgtgcaaccacttcatgatggggaggacaggccatgtgactcatcccaattcaactagcatctagagactggctctttgtaaaatctttttattcagaaagtgactataataccgtctatgatgaagctcttttccccacttcccccagccttgtaggctcttttcccttctcctgcagcactcgtggcctatccctacatgtggctataccatggtcaagggatttcaagcttggattggcaaccgtgagactaggagtctattgaggacaggggctattgtgtcccagctcttagcctgttacctaacacataagaagtccttctatagatgctggccaacttgaattacaccaaatggaaccagtcacagaagagggccagtagagttcaggcgggtgtgagtagtctctcctggcccagggatggacactgagctyccactctggctccaagaagttgagaacctatggattggtttctactgaggtctgggattgtcaagtggcaggtgtcatcttggaggccttgaccttctgttatggcagatgctcaaggacttcttaaagctaattttg

SEQ ID NO: 808014 - DNA, 521 bp, Homo sapiens
attggtcacctcccacagtcaatcagtctggttgggaccactccttcatttacatagggtgtaaccaagtaaccaatgaggagcctctagaaagcatttaaaccccataaaattctgtaaccagcactcttgagccacttgctggagcccactcccactgkgtggagtgtactttcatttcaataaatgtgtgcttttgttgcttcattctgtcattgcatcgtttgtgtgttttgtccaattatttgttcaaaacaccaataacctggacgatcagcagtcaagaccttccatcagtaacattacaaaaggtcttgaggctgtgagttcttgctctcttacccttctgctttcttccatgggatgagacagcaaagaaggccctcatcagatgcaaacctcttgaccttggactttccatcctccaaagctgcaagaaataaagctcttttctttataaattacctattctcaggtattctgttataggagcacaaaagataatcctgctggcagaaaat

SEQ ID NO: 808015 - DNA, 521 bp, Homo sapiens
attggtcacctcccacagtcaatcagtctggttgggaccactccttcatttacatagggtgtaaccaagtaaccaatgaggagcctctagaaagcatttaaaccccataaaattctgtaaccagcactcttgagccacttgctggagcccactcccactgtgkggagtgtactttcatttcaataaatgtgtgcttttgttgcttcattctgtcattgcatcgtttgtgtgttttgtccaattatttgttcaaaacaccaataacctggacgatcagcagtcaagaccttccatcagtaacattacaaaaggtcttgaggctgtgagttcttgctctcttacccttctgctttcttccatgggatgagacagcaaagaaggccctcatcagatgcaaacctcttgaccttggactttccatcctccaaagctgcaagaaataaagctcttttctttataaattacctattctcaggtattctgttataggagcacaaaagataatcctgctggcagaaaat

SEQ ID NO: 808016 - DNA, 615 bp, Homo sapiens
atttatatagttcaggtggagattgtgagaaaggaattataagatggagaaatacaaagaatctttgtgttttgttggagagccagaagagcttcaagcagatgtaagatgcatgccttacacatctgtgaatgtgggtgattattatgtggaaaagtgactctcttggtagccaagcagaagaactctatttttttctacctctatattaatattattacgactgttattacaattatcagaatgagattaacataccagaccagaccagtatagatacagaaggagttgtgttttattaccagagtctaaggacatatccattcctattggcactcaaaatccaagttactagtactgtgtcagctaatgtgaaataagaacagggcatattatgccaggagccattatcaggagcaggcacaagtaagatgtcagccatgraagcatagaagaaactagaggtggcatttgggcctggggagcgttttcctacttgtttctgcatttctaattcttgagtgatgagagaattaacaaagaagaggatgcctcttctttgaggtccacttctcattactctgcttcctttcatggagtaactgtgttaaaatg

SEQ ID NO: 808017 - DNA, 524 bp, Homo sapiens
aaaatatttgacaatgaataacaatgaaagtactttatatcaaacattagggaatgccaccaaattatattgagagggaaatatgtaactgtacatgcagctattaaatagcagtgaaaattaagactaaatgtgctaggtgtccaagtcaagaataggaagagaatagcacagtaaacctggaaaaagtagaawtcaagaaatcacaaatggaaaagatactaataggaggtaaaacaaagaaacaatagagatgatcaacagaataaaacctaactcttagagcacactgaaagtgggcaacgttctagtacatttgatcaaggggaaaagaaaatacagaagcgattaattttcaaaatgaaaaagggtatatcacatctgacaccaggaagattttttaaagattatttggggaataaaacaggatacacatctgaattggtgttctcatgaaagaaccctagagtaactttatgccaacacatttgcaaagtttgacacagaggacatatttttgtggt

SEQ ID NO: 808018 - DNA, 510 bp, Homo sapiens
gataataggtattgcctcatgggtaaccactgttacccactggataataattattgcctcgtgggtaaccactgttacccgctggaaaataaatattgcctcatgggtaaacactgttacctgctggataataagtattgatttgtgggtaaccagttacctggtggataagtattgcctcatgggtaacacctgttaccctgtggataataagtatggcctcatgggtaaccactgttaacyggtggataataagtactggctcatgggtaaccactgttacccagtggataataagtattccttcatgggtaaccactgttacctggtggataataagtactgcctcatcagtaaccactgttactcggtggataataaatattgcctcatgggtagccactgttacccagtggataataagtattgcctcgtgggtaaccactattacctggtggataataagtgttgcctcctggttaaccactgttatccagtggataataagtg

SEQ ID NO: 808019 - DNA, 607 bp, Homo sapiens
aagacattcgttaccctagtcatgtgacatttgggttttggtgagaggagcaaaaattctgttttggtgacatttctactggtaacagaagctctttcttcctgtttcttacctctttttctctcagtgtcctctctttctgaagttttcagaacttttataccgctttctctcctcagaataaggaataattaaaaataaaaatgtacaggataaaatattgttacccccattagtgagagatttggaaaggccagccttgwtctatagcaataacttcctatgataagatttcagtgagtgaaaccaaaggagaaatatgcagaaaagagctgcttttctgttgcatctccagttgtattgtttggtcttcatggggaagagtggcaaatgggatactcattttatcttgaaaaatagttggggttcttagactagaactctatggaaggtgtcagagatgagataaaacaaatattcacattcaggagcagtggcatttaataaagtgattaagcagtgacattaaatgagttctcaggccatttttaagtgattaatgtgggtggttggaggccaggatttattggggaggaaatatagggct

SEQ ID NO: 808020 - DNA, 612 bp, Homo sapiens
atagaaaacaatcaacagaatgaaaaggcaaccaacagtatgggaagaaataattgcaaatattatatctgataaggtattaatatccagaatatgtaaaaaaacaaatagatttaaaaattggcaaagaagttgaatagatatttcttcacaaaagatatacaagtggccaataaacacataaaaagatgttcaatatcactaatcattagggaactgcaaatcaaaattacaatgaggtatcacctcacatccatcaggatggccgctatcaacagaacacaaaacagcaagtgtttgtgaggatgtgaagaagytggaacctttgtgcactgtgagtgggaatgtaaaatagtgcaaccatacataccgaaaaacagtacggaggttcctcacaaattaaaagtagaattgccatacaatccaacaatcccactgtggctagatattcacaaagcaaagtgaattatttccaaataattcaaggagatacttgcacacccatgttcatcacaagactatttccaatagccaagaggtgaagcacctcaaatgtccatcaacaggtgaatagataatgaaaatgtggcatatacatacagtgaaaaacca

SEQ ID NO: 808021 - DNA, 648 bp, Homo sapiens
caaaatctccttcagctgataagcaacttcagcatagtctcaggatacaaaatcaatgtgcaaaaatcacaagcattcctatatagcaataacagacagaaagccaaatcatgagtgaactcccattcacaattgctacaaagataataaaatacctaggaatacaacttaaaagggatgtgaaggacctcctcaaggagaactacaaaccactgctcagggaaataagaaaggccacaaccaaacgaaaaaacattccatgctcatggataggaagaatcaatayggtgaaaatggccatactgcccaaagtaatttatagattcagtgatgtccctatcaagctaccattgactctcttcacagaattagaaaaccctactttaaatttcatatggaaacaaaaaagggcccacaatcctaatcaaaataacaaagctggaggcatcacactacctgacttcaaattacactacaaggctacagtaaccaaaatagcatagtactggtatcaaaacagatatatagatcaatggaacagaacagaggtctcagcaataacaccacacatctaaaaccacctgatttttgacaaacctgacaaaaacaaggaatggggaaaggatcccctatttaataaatggtgtt

SEQ ID NO: 808022 - DNA, 556 bp, Homo sapiens
gaactttgggagtcatgacagactatattctctctcttttctgctgctaataataaatcactaagacttgttcattctatttcctaaatactcaaatctacccttcagcacacacacaaactgctaaccctcatcattgttttattttaggcagacatcacatttgcctgtttcactgaaatagattccctacaacaagtctcttccttcttaaaaactctctcatccactacctgagtgatcttattagaatgtaactctgatcatagctctcctgttgaaaactttttccctaaagaasagatttcaaacttcttatcatggtatataaagatgcttttgatctggacttctgcttccactctggccttcttccttctctcctaagatatgttgttgaatgaataaatcaatgaatattttcatcttaacgtatcaatctatttttagtttccaaactcttctatattctctcatacttccaagaatttgaaagcactgttttctctgcttataagatcctttcttattcccttccttatctgtttactctttt

SEQ ID NO: 808023 - DNA, 556 bp, Homo sapiens
gaactttgggagtcatgacagactatattctctctcttttctgctgctaataataaatcactaagacttgttcattctatttcctaaatactcaaatctacccttcagcacacacacaaactgctaaccctcatcattgttttattttaggcagacatcacatttgcctgtttcactgaaatagattccctacaacaagtctcttccttcttaaaaactctctcatccactacctgagtgatcttattagaatgtaactctgatcatagctctcctgttgaaaactttttccctaaagaagagatttcaaacttcttatcatggtatataaagatgyttttgatctggacttctgcttccactctggccttcttccttctctcctaagatatgttgttgaatgaataaatcaatgaatattttcatcttaacgtatcaatctatttttagtttccaaactcttctatattctctcatacttccaagaatttgaaagcactgttttctctgcttataagatcctttcttattcccttccttatctgtttactctttt

SEQ ID NO: 808024 - DNA, 532 bp, Homo sapiens
ttcctattcaatctatctgcgcttaacaaatgttttgatttttattcaaaataaaaaatacagtgaatagcaatagatctttttatcttatgaatattctccatattgatataagtactaatctcaatttcttgaaataggaaaacaattagagcaaaatgcaatataatattggaaaggaaaaaaatagagaaggacatggacaataactgtttcttaaactagcaacagctaaagttatcagatttgatcattatgtgctagaaagacctaacaaaatgcagaacagcgattataaagacccaaaccaggaaakaactaggaactgaactgaactcaaaagcaatttgacaaaaaactgaaaggctagtttggctgaaatctactgagtttctcactgatatttaaatacatttatctgataataaaactcagaagaaatcatacccccatgatcaaatgctttacaaagaaaaccagggatttcaacttctccccaaataatgtcttttttttttggcttggtctctca

SEQ ID NO: 808025 - DNA, 469 bp, Homo sapiens
actcacagttccacatggctggggaggtctcacaatcatggcagaaggtgaaggaggagcaaaggcatgtcctacatggtggcaggaaagagagtgtgtgcaggggaactgccttttataaaactatttgatctcatgagacttactatcatgggaacagaactggaaaagcccatccccatgattcaattacctcccatttggtccctccygtgacatgtggggattatggaagctacaattcaaaataagatttgggtggagacacagccaaaccatatcaatcaggtgaattagctttttgatgtgctgctcaatttgatttactagtattttgctgaggatttttgcatcaatgttcatcagggatattggtcagaattgctttatggtcgagcatgtagttaatattggagtatgtaccctgtgtggatgagaagaatgtatattttgttgttgttgggtggag

SEQ ID NO: 808026 - DNA, 575 bp, Homo sapiens
gcaataaagtttaggttatagtgctgaagcctatcagtaaaaattatagccggtccaccttcctgtagcaagtcagggacaatataaactatgaaacaacacagtaaagcctcaatgtacatagctttgataagccacaaatgcatgtaragggcctgatgatgtgggtagaataaaatggtgacaatagaaatatgttcaggcttcctaaaattaactcatctatattctaggacaatactgtgtatgtgaagaagtttagtatttactgtctgagagtcagttatttattgaggttgggataaagtgagaatatttgtcccctaaaggaataaagggtatcataaaaccatctctcaccccatgcaatacctaatttgtccctggtagtcaatgaaaacatagctgagtctactgcattttagttaattcccttagtaaattcaaggtcattgcttgggttatgggaaatatttatttttttactgacaatgtggcacagaataagttcttcactagatgctgcttgaactctttagcaaaagcttcactttggcatcaggactcgggtgctg

SEQ ID NO: 808027 - DNA, 575 bp, Homo sapiens
gcaataaagtttaggttatagtgctgaagcctatcagtaaaaattatagccggtccaccttcctgtagcaagtcagggacaatataaactatgaaacaacacagtaaagcctcaatgtacatagctttgataagccacaaatgcatgtagagggcctgatgatgtgggtaraataaaatggtgacaatagaaatatgttcaggcttcctaaaattaactcatctatattctaggacaatactgtgtatgtgaagaagtttagtatttactgtctgagagtcagttatttattgaggttgggataaagtgagaatatttgtcccctaaaggaataaagggtatcataaaaccatctctcaccccatgcaatacctaatttgtccctggtagtcaatgaaaacatagctgagtctactgcattttagttaattcccttagtaaattcaaggtcattgcttgggttatgggaaatatttatttttttactgacaatgtggcacagaataagttcttcactagatgctgcttgaactctttagcaaaagcttcactttggcatcaggactcgggtgctg

SEQ ID NO: 808028 - DNA, 575 bp, Homo sapiens
gcaataaagtttaggttatagtgctgaagcctatcagtaaaaattatagccggtccaccttcctgtagcaagtcagggacaatataaactatgaaacaacacagtaaagcctcaatgtacatagctttgataagccacaaatgcatgtagagggcctgatgatgtgggtagaataaaatggtgacaataraaatatgttcaggcttcctaaaattaactcatctatattctaggacaatactgtgtatgtgaagaagtttagtatttactgtctgagagtcagttatttattgaggttgggataaagtgagaatatttgtcccctaaaggaataaagggtatcataaaaccatctctcaccccatgcaatacctaatttgtccctggtagtcaatgaaaacatagctgagtctactgcattttagttaattcccttagtaaattcaaggtcattgcttgggttatgggaaatatttatttttttactgacaatgtggcacagaataagttcttcactagatgctgcttgaactctttagcaaaagcttcactttggcatcaggactcgggtgctg

SEQ ID NO: 808029 - DNA, 575 bp, Homo sapiens
gcaataaagtttaggttatagtgctgaagcctatcagtaaaaattatagccggtccaccttcctgtagcaagtcagggacaatataaactatgaaacaacacagtaaagcctcaatgtacatagctttgataagccacaaatgcatgtagagggcctgatgatgtgggtagaataaaatggtgacaatagaaatatgttcaggcttcctaaaattaactcrtctatattctaggacaatactgtgtatgtgaagaagtttagtatttactgtctgagagtcagttatttattgaggttgggataaagtgagaatatttgtcccctaaaggaataaagggtatcataaaaccatctctcaccccatgcaatacctaatttgtccctggtagtcaatgaaaacatagctgagtctactgcattttagttaattcccttagtaaattcaaggtcattgcttgggttatgggaaatatttatttttttactgacaatgtggcacagaataagttcttcactagatgctgcttgaactctttagcaaaagcttcactttggcatcaggactcgggtgctg

SEQ ID NO: 808030 - DNA, 582 bp, Homo sapiens
gaccaaaaaaatttaaaagacataaataaatggaagaccatcccaagttcatggattgaaagaataaatgttgttaaaatgtctatccttcctgtagatttgacaatctgtagatttaactttaatagtattttttacaaaaataggaaaaaatattaaattcacttggaactataaaaatgccccaaatggccaaggcaatttcgagcaagaacaaagctagaggtgtcacacacccgattttaaaacatattataaagctrcagtaattaaactggtatggtactggtataaaataaaatacaatgcaataaaacaaaatgaaccagacatatagactaatggaatagtgggtctggaaataaacctatgtgtgcatataaggtcaactgattttcaagaagtatgtcaagaatacaaaatagtggaaaaacctgtctctttcaaaaatggtgttgagagccaggcactatggcttatacctgtaatcccagctacttgggaggctgaggcaggaggatcattgaagtccaggagttcaagatagcagtgagctatgattgcaccactgtacttcagctt

SEQ ID NO: 808031 - DNA, 607 bp, Homo sapiens
gtatgaaatgggagataatatttgcagaccataatctgataaggagttgatatccaaaacgtaaaagaaactgaaacaactcaatagcaaaaaacaagcaaaatagaaaaacaaccaggttaaaaaaaggcaaagtaactaaatagacatttcttctaaaaaacatacaaatggccaaagggtatattaaaaagtgctcaacatcattaattatcagataaatacatatcatatccacagtgagatatcacttcacatctgttaggttgrctattattttaataaaggacaaatattggagaagatacggaaaaaagagaactcttgcacactgttggtggaaataaattagtgcaactactatatgcaaagtactatatggagtttcctttaaaaattaaagattgaattatgatttgatccagcaatccctcttctcggtatatatccaaaggaattgaaggatggatcttaaaacatatctgcactcctgtgttcattgtaacattattcactagtcaagatatggaaacaacaaatgactaaatgtctattgaagaacaaataaagaaaatatggtatatacatacaatgcaatattattcag

SEQ ID NO: 808032 - DNA, 572 bp, Homo sapiens
agtttggccctagttttgttgcagaacagattataactgggatcagagtatttagcaaaggatctatcccaaggctaaagattaacctaagaagaaaagcacgaacatgttaccacaaattctctctgtagtctgaagatacctaataataccaaagaaaggcaggcaaaaatgactgactttcttgctgcaattaagaaattctgctttctgtgaatgaatgcgtggtaaaaaaaaaaaaaatactcatatgttctgaaccgttcctctccctattcaracatgggagcttacagcgtattaagcaagtactttattcattattctgttaaaggcattcccatggacaacacacggggatgggagatggtggctactacattaagaaacagtaaattttatttgaaggaaagaaaggcatccagggcttattcaatgttctgggaccggcggatgcttggttaaaattgttggctccctgagcagaaattctttgaaatggaacagcaggttaaccttaaccgttgctcctcatcttgtttgtttcttccatgtcagtggtgatgctttct

SEQ ID NO: 808033 - DNA, 630 bp, Homo sapiens; identical to SEQ ID NO: 805929

SEQ ID NO: 808034 - DNA, 660 bp, Homo sapiens
atcatttctttagggaaaacttcgctgagcctctggtataaactagacccctggcacgtgctctcaaagccccttgtactcctctttgttgtacttttcataatcctaagtaaaaaattgatgtattggctgggtgcagtggctcacacctgtaatccctcgtcctcctttgggaggacaaggttagcagatcacaaggtcaagagatcgagaccatcctggccaacatggtgaaaccycatctctactaaaaatacaaaaattagctgggcgtggtgacacacacctgtcatctcagctactcggaggctgaggcaggagaattgcttgaacccaggaggtggaggttacagtgagctgagaatgtgccactgcactccagcctggcgacagagcgagactgtctcaaaacaaactaacaaaaatattgatgtataattgttgatttaatgtctgcttttccctgtaagggaagacactgtgtctgttgtgtttactgctatatccagcacctagcataggaccttacatgaatgaagcaggctaagaaggagcagtcaggaggcaggaaaagaaccaagagaaactgatgtcaaagatgtggacaaagaaaatagcaaatcaggattttcaaataaggcaaaaaggtccagcaacatg

SEQ ID NO: 808035 - DNA, 525 bp, Homo sapiens
tttacaagctggggaggtttcccttcataacggctgagggaacttattctctccacaaccacggttcaatgtgtcaggtactgacataaggaaagaatgtctctgacctaaggaattcataatctaataggggagacggacaaataaataggtaagtttaaaaatgtcaagttccctgtcaaggtagaaaagtatagggtgtcttggagcacagaagagggtgtccagaaaggcaaatgcagatcagatacagaagcaaggcgttggggtccaaaatgcccaggtggatgtcctggtcggatctccagagtcctacagaggacttcctccacacagggcgggtcagtttcaacccatgggaatgaaagrgggggaaaacatggagagcagcttccagcgcagggggaggaaaacattccccaaggaaatactagattcctgaaatatgtccagcccttgtggaaaagatgtagttcgggctgcaattcgagcaaacttcggagaagcttcaaaagctccgacttg

SEQ ID NO: 808036 - DNA, 594 bp, Homo sapiens
caatagataggttagttggcagacgtgaaacatatatatatatagggaattagcagattattagtcaataactataaaggctttactatgtgccaagcagtgttctgagcacataatacattgattatttaatcatcacaacaaatccccaatatcccctttctgcaaataaggagattgaaggacatacaagttaagcaatgttccccaaaatacttgataattttcaattaagagatgatacctatattctgaccaaggtattctggttccagagtccaagtcttaactgcatgtctgtatttattgctctgcatttcaaagactataactgagaaattcaccaacaacacagtgatgaggcattatwcatcttttcatttaacaaatataaattgagtacctgcagtgagtcagccactgttctaggcatttgggatgcattagttgttggggtgggggagggagaaaactgacaaatatctccatttatatggatcttatatcgtttgctagaaagtataaaagatataaaaagggattgaatcattatgttaggtaagaaatcataacttagctgttgtaccaatagtc

SEQ ID NO: 808037 - DNA, 584 bp, Homo sapiens
acatttaattctttaaggaatccccatactgttttccatagtggttgtactagtttacattcccaccggcagtgaagtgttccctttacaccacatccatgccaacatctatttttttaaattatggccattcttgcagggtaaggtagtatctcactgtggttttaatttgcatttccctgataattagtgatgttgaccatctttcacatgtctgttggccatttgtatatcttcttttgagaattgtctatttgctttccttgccaactttttgatgggattatttttttcttgcttatttgtttgarttccttgcagattttggatatttgtcctttgtattatgcatagtttgtgaatattttctcccaatctgtgggttgtctgtttacttgtccaattatttcttttgctgtgcagaagctttttaatgtaataaggtcccatctttttatttttgttttggttgcatttccttttgtgttcttggtcatgaactctgtctaagccaatgtctagaagagtttttccaatgctattttctagaatttttataggttcagatcttagatttaagtctg

SEQ ID NO: 808038 - DNA, 490 bp, Homo sapiens
ttgctgaggtttttaatcataaagggatgctgaattttgccaaattatttgtctgagagttttcagagtttatttagataatcataagatttttctttttaattctgtttaagtgatgtatcacaattgttaaattgtgtatgttaaaccatccctgcatccttggcatgaaacccacttgatcatggtggattayctttctgatttgctgttgaattcggttagctagtattatgtggagggtttttgcatctatgttcatcagggatactggtctgtagttttcttttttgttatgttgtttcctcattttggtattaggatgatattggtttcatagaatgatttagggaggattccctttttctctatctttttgaatagtttcagcaggattggtaccaattgttttttgaatgtctcgtataattcatctgtaaatccatctggttctggaattttggggcaatttttttattactatttcaat

SEQ ID NO: 808039 - DNA, 490 bp, Homo sapiens
ttgctgaggtttttaatcataaagggatgctgaattttgccaaattatttgtctgagagttttcagagtttatttagataatcataagatttttctttttaattctgtttaagtgatgtatcacaattgttaaattgtgtatgttaaaccatccctgcatccttggcatgaaacccacttgatcatggtggattatctttctgatttgctgttgaattcggttagctagtattmtgtggagggtttttgcatctatgttcatcagggatactggtctgtagttttcttttttgttatgttgtttcctcattttggtattaggatgatattggtttcatagaatgatttagggaggattccctttttctctatctttttgaatagtttcagcaggattggtaccaattgttttttgaatgtctcgtataattcatctgtaaatccatctggttctggaattttggggcaatttttttattactatttcaat

SEQ ID NO: 808040 - DNA, 598 bp, Homo sapiens
acaagaggtggaccccctcctgagcctgcccctgtcacactggtctctgtatgtgtggtgctgtgggcaccagaccttatgtcctgtgccctgtgccaggaacaccctcttcctgctcggcctggctggttctacatcccaggcgtcacctcctccaggaagctctccctrcctgaccaccaggcttctcccaggtgtctcctgctctgctctcttgaggccctgtctgggtgtgtggtcacttgtctacctgccctcctcccacaagagcctgtgagcagtgtaaggacttcatctggctccagggctggtgcacagtatgtgctcagagggtgtggaatgaatgaatgagtgaatgaatgaatgaagtcctgcagtggattcctgggagtgtgtccagcttaggagatgcagaggctgagatgctctggccaaatgctgggaaagggaggcagctaagagagagtttccactgttcatcaaatgctgaccccaggaccactttgtcaagaagaccacacctgctcgggcttggaaggagggttcctggtagcactcctggcccagctccagcagcagctgcaccctgggaggtggg

SEQ ID NO: 808041 - DNA, 597 bp, Homo sapiens
ttgtgcagattgttcagatattggcaactttcattatatgatatcaacagacaacttttgttaatatcattatgatctcatctgaaaagtttttaaatattgggaaactatcaagcttgaaagcataaattttgtcattggcaacaaatactgtcagctgtttcccttgaagagacggactcgctttgttcatttttgagaaaatatctgccaaactcctcagtctcaataaccacagtttgtcaattgttctttcaagtaaaggtagtgttccacagaaaaagcaactagttgatactgcaattgaaacaatcacayaagtgcctttctcttgaaactgacacgcattctgctttggcatacagtagaagtgcctgaaatgcagttctcatatcactcagaatagttaaaatggcatgtaccaggggtcagagtttaatacgcttaataattgttactgcttcatcagatattcctaagtggaattggcatttaaaaatttaagtgtgtggcagtgaagaatacaataactgtaagtacaatttggtgccactgccttgatcatattaaggtgcaattttacttaccattgctttt

SEQ ID NO: 808042 - DNA, 638 bp, Homo sapiens
agagttatgagagttctttatatattttggatactaaactcctattaaataaatgatttgcaaagtttttcccattccgtgggctatttttttgccctcttttaaagcacaaaggtttcaatactgatgaagtttactttatgtatatttatttacttatatatattttttgaggatttgcttgtgttttagtatatataagaatccactgtaggctgggcgcggtggctcacgcctgtaatcccagcacttttggaggccgaggtggccggatcacgaggtcaggagattgagaccatcctggctaacacagtggaaccccgtctctactaaaaaatgcaaaaaattagccaggcgtgctggcgggtgcctgtagtccaagctactcgggaagctgaggcgtgaaaatggcrtgaacccaggaggtggagcttgcagtgagccgagatcgtgccactgcactccagcctgggcggcagagcgagactcgtctcaaaaaaaaaaaaaaagaatccattgactaatttaaagccacaaagatttatctatgttttcttctaagagcgtcatagttttagctcttacatttagatctctgatccattttgaattgatttttgtatatagagtgaggtagg

SEQ ID NO: 808043 - DNA, 549 bp, Homo sapiens
agagttaagtgaatgacttagctttgcaatgcagactgacttctttttacactttaagaaaaaaaagacaccctcattatacgatagtagtagaaggtatgcaaatgcagtctgtgtgtccatcttctgtaaggtcttgaaggaacaggaaccctctgctgccccargctgtccctctgggtacctggatgattggtgacactgccatgccttttctcatgcttcttcccgaagagccctttctcagccttcacataggagcaacttacccatcaaaccacagcagaggactcacccccttgttaaaccattctttgactcacccagataaacatgagctacttcttgtgcatgccaaatgcaccatggacatgctttgggtgtcactcccatgatactgaagtgagaatatctctttttttatctgtcacctccatgaggctgtgagcccctggggtcaggacaatgtcatatccagtgttacatgcccagcgctcagaacagagcttagcatagggtgggtgctctgacaatatttgttgggtaaat

SEQ ID NO: 808044 - DNA, 578 bp, Homo sapiens
ctatacttgggaggagcatctgaagacatctttattttttaatgctattattgagcttttactacacactcagcactgtgctaaatgcatagtaaatgcataatgccctaaaaccttccagtagcctcatgtattaggtaccatkacaattccattttgaagcccagaaagaagtgaagtatcttgcccagtgtcacatggttagcagttgggggagccgctattaaaattcagatgtagcatcacatttaggattaagaaaacgaaagaaactcagataactggtttctctacatcacctcttcacttctgatactggctgcttctgagacaggtccagtggtgatgaatcccccaggtaagaggtgatccaaacctaagctggatattgactagatcaaatgttttagagtaaattcaacctggaaaagggtgcagtagttagactgagagttttcaaccgaataatctctgctgagaagcctcctacctctccctgaaaccagatttgtcttctgattgttctagaaaccatacccatgtccgctcatacctccttgcctttacccactctttct

SEQ ID NO: 808045 - DNA, 637 bp, Homo sapiens
aaataaaagtgagttactgtgagttacctttcctgcacagaagtcctaactatctcacacaatgctcttactggcttttaagcctgttttcacttggttgagcttaaagcccaggggacaaccagagtctaaatagtgtgaaaattcagcagagatgtggtccagtcttagtcttacctttttaagatracacttttctgggaaggaaaaaacacctcacccataccaagccaccagcacattactcagtaccaggccacaggggatttcctctttcctaccttgtgatcaaatgcttctgggaggatatatcttgaaggcaggcaatggccaccagcttgggttgacataagatataatgagaagcaggacctcaatgcaatgcctgaaagcccaccattcaagttattctaatcattctttgttgctaagctttaccctccagctttctcctttccaaacatgagtggtcttgggcagcataaaataatttgacttggagtgaattagaagtttcaccaactttgcaatgtggctagaaccctgccctgcattcagatgaggtgcacctctgcagataagaggtgacaaatgattccctgaccacttagcctcacagacccaggcaaggaggcag

SEQ ID NO: 808046 - DNA, 638 bp, Homo sapiens
ttcctcaatctctgttcagattgcctattctgggaggcggaaagacccatggaaggtgcctagacctcctctgaaggtctgtgtcctggtcatgttggtggccgtctaacactgaaccctatagtgaactgctcccctctttatctccatgagaaacaggggcttggagcagaaccttcattcrgggcctcagcttctacatcagtcataattgtctatgtatatttgagctccatgaaaggttttctttggtagaaagggggttttactactaaaagtgtttgaaaacatagaatgggggtattttaaaggctctttgaactctgatgttctagaattttataccatttcacctctggccacacttggcctcccacatcaccaccaaggagtgggggtggtagattaggtggtctctgtaaattcttcccagtacctgagctctaagttacatgatcctctcgtcctcaactcagcttatccctgtctgcattttagcccctaaaccatcacctcttccaggcttatctcttaactgaagctgctttggtttctgttccatgccagcagctgcaggaaggccttccctgatggtttcagccctctggaattgcctccttttcttagaattcatacct

SEQ ID NO: 808047 - DNA, 414 bp, Homo sapiens
cacttttcttctggagaaggtttaccaatttatagaggaggaaaacgaggctgagagaggttcaggaacttaactgaggctccatggtgaaccacagatagaaagtagataggccaggctccaaatccctccctctttctggaatcaagcacaagcctgcctagaggcaggggctagactatatgatctttctagattcttctctgttgtcaggatttctagaattagcttattccctgcaggtgcytcaattctttcaggatagtaaggacccatcgggtaaactgtgaacattaactcaacagagaagagggggatcaggttccatttactcctgtggcctgacagtgttctacccaggaaagcaaaagacctcagggagctcaggttttatcttcaggacacaggctctgg

SEQ ID NO: 808048 - DNA, 595 bp, Homo sapiens
aatttcagcagatacttgaaaatataggtcagtgaatcagaggagattttgtactaaacacagtagattgtgagttatttgtgtatggaatgaaaagtactgtggctctaagattgagggttgagtaacgccaacactaataattctgcgacagagttttagaagtagcagacagagtgggaagaaagttaaaagggcatgttacctaggaggccagtggaaaagtaactcaaaaaggaagacctgagtaaggtaagtacagaaatatgttccttggattgaagcctacagctgtcatcggtaattactttgacaaccgttttagtgaaacaagagaaagaaataaaggtcacccaagtagaaagasaggaagtcaaagtacccctgtttgcagatggcaagatctatatctagacaatgccatagtctcagccccaaagctccttaagctgacaaaaaactttagcaaaatcccaggatacaaaatcaatgtaccaaaattactagcattcttatactccaacaacagtcaaactgagagccaaatccagaatgcaatcccattcactattgccacaaagaataacatacctag

SEQ ID NO: 808049 - DNA, 595 bp, Homo sapiens
aatttcagcagatacttgaaaatataggtcagtgaatcagaggagattttgtactaaacacagtagattgtgagttatttgtgtatggaatgaaaagtactgtggctctaagattgagggttgagtaacgccaacactaataattctgcgacagagttttagaagtagcagacagagtgggaagaaagttaaaagggcatgttacctaggaggccagtggaaaagtaactcaaaaaggaagacctgagtaaggtaagtacagaaatatgttccttggattgaagcctacagctgtcatcggtaattactttgacaaccgttttagtgaaacaagagaaagaaataaaggtcacccaagtagaaagacaggaagtcaaagtacccctgtttgcagatggcawgatctatatctagacaatgccatagtctcagccccaaagctccttaagctgacaaaaaactttagcaaaatcccaggatacaaaatcaatgtaccaaaattactagcattcttatactccaacaacagtcaaactgagagccaaatccagaatgcaatcccattcactattgccacaaagaataacatacctag

SEQ ID NO: 808050 - DNA, 610 bp, Homo sapiens
agcagggatggtggggactatactatatctatttaactttccaggctggctcttgtagaagctagatagatctatgagatggtagaagaaaaacccttcaaagattcatgaactggctgcttcaaattacagagggtctagaagtcaaggtaccctctccaaagtaaaaaaacaaattgctgtatcttgcatgccccacaaaaakgaagaagcatagtgcctggcaggtctctttgagtcatggaggcaatatattcctagaaatattattgacacagaatgttttcagctttgagtgggacctggagagtgaaagggcactgtcataggcagaacgacagtacagtcagtcttccttcttgggacatgtgatctgtgaaattaaatgtttgttagaggggccaaagatagagatgcagtatggagcttgtaaaaaatttctgaaggggagtcacaatacacatcttggaagtttaaataaggccatgccttctgcagcaaggtgctcccagaaacaggtctgtgctctcagggcacagtagagttagatcacttgacgaaggtgcacaaagtgaccatgcattcagaactatcctttactagctttgct

SEQ ID NO: 808051 - DNA, 611 bp, Homo sapiens
ggcaaatgtgtaactatttaactataaaagtggatgtgcaaaaagcatgattctatatactatattcagtatgttataaaacatagatgtatatatattatatttatcataatacagtactttcctcttacccacagtttcagttacctgaagtcaaatgtggtccaatacacagactggaataagagacattggagactccaaaaggtgggcaggtgagaggggggtgagggatgaagtattattaatttggtacaatcacgccrctatactccagtctgggtaacagaatgaccttgtctcaaaaaaataacaatgcacacacaaaaacaaagtccagactcaccactacacaatgactcatgtaacacaacaacacttgtaccccttagtccataaaattttgtaaccctaagtccaaaacaaatgttgaaaaataagtatgtttaaaaagcaaatgtagtcctaaaagattaagtggaaaattccagaaacaagcaattcataagttttaaattgcatgttgttctgagtagtatgatgaaatctcacgttattcagctttgtcctgtctagaatatgaatcatccctttcttcagtgtattcatac

SEQ ID NO: 808052 - DNA, 610 bp, Homo sapiens
agaggatcagcaaaattagtgggtgctaggcttaatacctgggtgatgaaataatctgcataacaaactcccatgacacaagtttacctatgtaacaaaccttccaatgaagcctgaacctaaaataaaagttataaaaagaaatttatcttttatctttcctttgccctytaaaatttcctttctggacattgtgcttactcagatcctgatacaatactgtacaatagtggtaagagagggagctatggacagaatatttgtgttttcccaaattcctatgttgatgcctaatctacaatgtgatgatattttcaggtggggcctttgggaagttattaagatatgatggtagcgactttatgaatgaatgggactaagcccttattacaaaagatagagtttgcgttctctctctctctctcctccccaccccccctgccatgtgcgaatacaaacagaagatggccatctacaaagtacacagaggatacccacctgtcaccggatctgccagcaccttgattgtggactttcttgtctccagaatcgtgagacttgtttctgatctgcgtgggaaagaattcagtatttctccatttaatatgac

SEQ ID NO: 808053 - DNA, 613 bp, Homo sapiens
gtcataagccctgcctttttgctgttgcaaaagaaatatcatgatatttctcttaggattttttgttgctgataaagttacctcctagcataacgtgtataatgcttgtttcaggacaagttgattctgaaatcaccatccagaaatgagtcacttaacatcactgccggggtcttgccctgctctgggttccagaagtgagtactgtaacacaactatttttataagggtattttctgtcctttcaaaaagagatatgacttgggaaatctttcttagcttagggaaacctgcttctcaatgcttcttactcactgttcacatggaggaaaagtcccattaaataaaaaatacccactctctcatttacraggctaagtattcccgtaagtctcacttttcaatgtcagaagatataaaaaagtgttacatagtgtgcacagctggggcccttctgtttgaattatctgtggcaagtatctcaggtggcccacttaaatacaaaataaacacatatttaatcacaggatgcatgcatttcctgatgattcttcaaatatttttcactgtatggaaatgaaaataataaattaagtagtggctatgttactta

SEQ ID NO: 808054 - DNA, 569 bp, Homo sapiens
gcagtgacatggtgtatgctaatataatattgatgtaaatagaaggcacttggtaaatatggtctatcataatctaatgagtcaaaatcatttatttattttgacttaaactaccaattcaattcaatctgacccttttagggttcattcataagtcaagcctaggattaaaacgggaactagcaataagggctgtgctgattattgtgtcaggttgtttgtttgaagggctcatggcaagggtagtagcagagtgatttctaagtcgaagaggagaaatatyatggctactaggaataattttatgaggaagaggaggagggcagaggttattgagtcaaatccgcattcataggtgcttgatttttctatataagtattaagttgtgggagccaaaatgtaactattattagtaatagggccagtagggggtcagttactagggctagtgtcaggttaattactctcttttggatactattgaaactaattgattggaagtcaatggtactgtttatactaaaagagtaggaccctcatcagtagacagagatgtataaaaatagtc

SEQ ID NO: 808055 - DNA, 645 bp, Homo sapiens
ttataaaatgaagatattaatagtggatatgcagatttattataagtgctcagtaagataattttttaaaaaaaacacctagtattccagccaaggtatgacaggtggttgccgaaagtaatatattgttcttaccataaaatgtgtagtttctaaaacacatggcaatgggttaaattttagcacatgaataatgacatattaaaagttaattaagactcagtaacctcctagagcataggtattggtactatcactattygtcagatgaggagactgggctttagagaagtcaattgacttaccagggtcagaatgttaataaattacaggcacaggacttacaccaagatcagtatagaaggattgtgctcttatagttaccaccaggtggcctctatggcaaaagaaaaaaagttattagaaaaaaattaactcagttaaaaaatgtagcctagttcctgttagatgattataatgattattgattacatctcacattgcactcacatatttatattttgtaaagtttttatatacaaaacagccttgtgaagcaggactgaagaaatcaagtatctccattttcaaggtttaaaagtgattctaagaaagtacaggttgagtatccctaatcctaaatga

SEQ ID NO: 808056 - DNA, 625 bp, Homo sapiens
gttaaagaatatgctgtcaacgtaaaataatcttgagttttaaagaatgattttcgcttcagagattctgtagttttccactttttattttacttaaaattaagttaatttctgaggcaaagtatattctccattatggaaatggcttaaccaaggcagataaatgcaagacaaccagtcttagcartcaattcttatctactgagagaaaaatgcctccttaaaatgcagtatcttcccaattcctccaaactctgaaggactatatagtttatcatagctggatccccaactgccatgttctcctaagggtcaaggaataggtctttatttcttgaatcatttaacactgaaatagaaaagtcattgaaaaacatattaggagcaatgctgaaaggttctgtcatgtacttcctttattctttaactttatggagaatacatagaagcctatgtctgtgggtttttaagtcaaggcaagaacttgctgggacatactggcattctaaattatactaaatgttttcatcattgaaaggcaatataatttaaaataactctcaaagtcctagtatgaatttcctacaaaacaatctgatacaaggatttgtttacaagtagttca

SEQ ID NO: 808057 - DNA, 625 bp, Homo sapiens
gttaaagaatatgctgtcaacgtaaaataatcttgagttttaaagaatgattttcgcttcagagattctgtagttttccactttttattttacttaaaattaagttaatttctgaggcaaagtatattctccattatggaaatggcttaaccaaggcagataaatgcaagacaaccagtcttagcaatcaattcttatctactgagagaaaaatgcctccttaaaatgcagtatcttcccaattcctccaaactctgaaggactatatagtttatcatagctggatccccaactgccatgttctcctaagggtcaaggaataggtctttatttcttgaatcatttaacactgaaatagaaaagtcattgaaaaacatattaggagcaatgctgaaaggttctgtcatgtacttcctttattctttaactttatggagaatacatagaagcctaygtctgtgggtttttaagtcaaggcaagaacttgctgggacatactggcattctaaattatactaaatgttttcatcattgaaaggcaatataatttaaaataactctcaaagtcctagtatgaatttcctacaaaacaatctgatacaaggatttgtttacaagtagttca

SEQ ID NO: 808058 - DNA, 591 bp, Homo sapiens
aaagtatattctccattatggaaatggcttaaccaaggcagataaatgcaagacaaccagtcttagcaatcaattcttatctactgagagaaaaatgcctccttaaaatgcagtatcttcccaattcctccaaactctgaaggactatatagtttatcatagctggatccccaactgccatgttctcctaagggtcaaggaataggtctttatttcttgaatcatttaacactgaaatagaaaagtcattgaaaaacatattaggagcaatgctgaaaggttctgtcatgtacttcctttattctttaactttatggagaatacatagaagcctatgtctgtgggtttttaagtcaaggmaagaacttgctgggacatactggcattctaaattatactaaatgttttcatcattgaaaggcaatataatttaaaataactctcaaagtcctagtatgaatttcctacaaaacaatctgatacaaggatttgtttacaagtagttcatttggaaggaaatctcagaaagtagaagtaaagaagcaggatgagtgagaaaaaaatcaattctgtaaccaacgaatggcagtc

SEQ ID NO: 808059 - DNA, 624 bp, Homo sapiens
actaggcacattcaatatttccattgaagaaatgtgtctttaccaggtgatatggtttggctgtatccccccacaaatctcatcttaaattgtaatccccataacccccacgtgtggtgggtgggtcttagtgagagctaattgaatcatgggctggtttcccccatgctgttctcataatagcaagtaacttctcacaagattggatggttttataaatgtctggcatttcccctgctggcattcattctctctcctgccaccctgtgaaggggtccctcccatsacgattataagtctcctgagacctccccagacatgtggaactgtgagtcacttaaatctctttcctttataaactacccagtcttgggtaatcttcatagtagtgtgagaatggactaattaatacaccaggttttcagaatgtatctttctgagaatgtttgtatatatatttagaggctatactaattttgcattcaatcatttaaatcactgttccaaaatctatatacttagtaaacaggtctatgcaaaagagaattttaaagtcaaataaatctgaatataaaatggtattgttaaagactccacatgggaaacatatcaaagttagaaaaa

SEQ ID NO: 808060 - DNA, 651 bp, Homo sapiens
taaacttgttcccacatcagaagaaaaagcatctctgtttcctccattgtcattacactttcccaagcgtctcatcctgagcagtcaaccccatcttgctcacccacaggaatgagctctttttatcatactcataggtgtgtttatgtatgctgttgtatgttgggtatagcagcattttacagggtctcatttttagtaattacccctccagctagagggttttcataagcaygaatacctcagctgacaggtaaacgatcagttataaattcagcagttcatattctcagcgagctggaactggggtgaggcaagttaggtgcaaggatgcaaatttttattttattttattttatttatttattttttattatactttaagttctgggatacatgtgcagaatgtgcaggtttggtacataggtatacacgtaccatggtggtttgctgcacccatcaactcgtcatctacatcaggtatttctcctaatgctatccctcccctagccccccaccccctgaaaggacacaaatttaagcaggcacttgcacaaccctgagaatgagcatctctaaattttgtacccactatgcctccccttggaaaacacgatggtctccaaactggcctctatgtgccagccttgc

SEQ ID NO: 808061 - DNA, 651 bp, Homo sapiens
taaacttgttcccacatcagaagaaaaagcatctctgtttcctccattgtcattacactttcccaagcgtctcatcctgagcagtcaaccccatcttgctcacccacaggaatgagctctttttatcatactcataggtgtgtttatgtatgctgttgtatgttgggtatagcagcattttacagggtctcatttttagtaattacccctccagctagagggttttcataagcatgaatacctcagctgasaggtaaacgatcagttataaattcagcagttcatattctcagcgagctggaactggggtgaggcaagttaggtgcaaggatgcaaatttttattttattttattttatttatttattttttattatactttaagttctgggatacatgtgcagaatgtgcaggtttggtacataggtatacacgtaccatggtggtttgctgcacccatcaactcgtcatctacatcaggtatttctcctaatgctatccctcccctagccccccaccccctgaaaggacacaaatttaagcaggcacttgcacaaccctgagaatgagcatctctaaattttgtacccactatgcctccccttggaaaacacgatggtctccaaactggcctctatgtgccagccttgc

SEQ ID NO: 808062 - DNA, 591 bp, Homo sapiens
aaccagttaacagttcctcaccagtccctaaatctgccagtgccttgatgttggacttcccaatctccagaactgtaagaaataaatttctgtggtttataaattagccagtatattagtctgttctcacactgccaataaagacatayccaagactaggtaatttataaaggaaagaggtttgactgacagttcagcataactggggaggtctcaggaaacttacaatcatggtggaaggggaagcaaacacatccttcttcacatggcagcagcaagaggtgcagagggaattggggggaaagtccctgataaaaccatcagatctcttgcgaactcactcactatcagagtaacagcatggaggtaaccacccccatgattcaattacctcccactgggtccctcccatgacatgtgaggattatgggaactacagatgaactacatttggaactacagatcgcaaatgtcccctcctttgtgagccttctctgtggcccccaggtagtcagaaaatcccattctctgtattgttgtgtcaccttgtttgtatatataaggatccaactccatcgctcttctcttgac

SEQ ID NO: 808063 - DNA, 621 bp, Homo sapiens
cctttctaaatgttatgtgaaaataaaattatttaagttctaaagtagtttaggaaagagatgtgatgacaggaaaaagaagttaacttctgaacagtttggtccaggaagaagatgggcagaatacagtaagcccagggttgaagaatacattcaatttggagagatggagaagacctttgaagaaggtcaaaatgagatcttggaacagaactctcacctgtgtgtctggatatacatgaaaactggacggtgttattgagctactgcttatatggtgagcagaaaattgataaccacaagcctggtaggttctgctatgaagcccacatataatcacaaggcctagatagcttggagttaaaagccaaggatagctgtrtagtttgggttccatagtttgcagtgagattgtgcttctgagcagtcatttgggggcagtggttctgagattacaagccataacccagccaagaacgggctacctgtggaatgaggatgaggaagttgctacatataaaccctagtgtgtgtgtgtgtgtattaagtgaaacttagttaacttttttgctcacagccaaagatgattcatctagagaagccattggaattttagcagag

SEQ ID NO: 808064 - DNA, 597 bp, Homo sapiens
tgccccatcagctaccccctcaaggcctagaggctaaatcaggcccagcacctctgctccctgtggtcagcccacgcctgtgtttatcctggtgataccagtcaacggcttcagcaaaggaggctgaaagaaagccaaggtcatcttgttcgaagacaggggtttataaaagttggtgggagtgggtacttcgcgacttggaggattatgaactgactgattgtctaggagcctcaaacctggaattaaaaaaaaaaaaatcatgccgggggcagtggctcatgcctgtaatcccatcacttkggttaggccaaggcaggaggatcacttaaggtcaggagttcgaaaccagcctggccaaccacatctctactaaaaatacaaacattagataggcatggtggcgtgtgcttgtacttccagcacctcgggaggctgaggcaggagaattgcttgaacccaggaggcagaggctgcaatgagccaagattgcaccactgcactccagcctgggcgacagggtgagaccctgtcattaaaaaaaaaaaaaaaaaaaaaaaatcaataactaatgctcttttacccaaaaggaatcag

SEQ ID NO: 808065 - DNA, 597 bp, Homo sapiens
tgccccatcagctaccccctcaaggcctagaggctaaatcaggcccagcacctctgctccctgtggtcagcccacgcctgtgtttatcctggtgataccagtcaacggcttcagcaaaggaggctgaaagaaagccaaggtcatcttgttcgaagacaggggtttataaaagttggtgggagtgggtacttcgcgacttggaggattatgaactgactgattgtctaggagcctcaaacctggaattaaaaaaaaaaaaatcatgccgggggcagtggctcatgcctgtaatcccatcacttgggttaggccaaggcaggaggatcacttaaggtcaggagttcgaaaccagcctggccaaccacatctytactaaaaatacaaacattagataggcatggtggcgtgtgcttgtacttccagcacctcgggaggctgaggcaggagaattgcttgaacccaggaggcagaggctgcaatgagccaagattgcaccactgcactccagcctgggcgacagggtgagaccctgtcattaaaaaaaaaaaaaaaaaaaaaaaatcaataactaatgctcttttacccaaaaggaatcag

SEQ ID NO: 808066 - DNA, 535 bp, Homo sapiens
tagcatacctctgagatgtttacttttttaaaaaaacaagccctggtcttttgccttctgcaggtaagagcctaacattgatcgcacatggagcaagattaaaagggtgcctcatcatatgttttcttgcctccatattcaacgaggattctgccattaaccacattaccagaactgaattaaaaagcaaaactggccaagtgtggtggctcgtgcctgtaaccccagcactttgggagggtgaggtgggtggatcacttgaggtcagaagttcgagaccagcctggccaacatggtgaaaccctatctatgctaaaaatagaaaaattagccagacatgggggcatggtagcacatgtctgtaattccagctacttgggaagatgaggcaggagaacaggagaatcacttgaacccaggaggcagaggttgcagttagccaagatcactagagacactgtctcaacaacaacaaaaaagcaragctaccatcctaccctaactctaatgcctttgtttgttatctgtagtccac

SEQ ID NO: 808067 - DNA, 635 bp, Homo sapiens
aaagtaccacaagtgatagaagaatttagtaaagtagtagatagaaaaaaaaattatcataaacaaccttcatatatacaaactaaaagtagttagaggatatatagaagatttatttaagatagtagtaatgataaacctaagcataaaaagaaacaaaaattgtacaaaatctatgtgaagaaaactaaaaacactcctgaaaaatgtaaatgttgacttgaagaaatggaaagtcataccacttttgtggatagacaacagtcagttctcctttagttaatttataaatgtaacatcattcaaaaataccatttagaagaaaaaataagctagagtagtcaggaattcttgcaaaagaagagcaacgagtttgggaagggttggctatatcagatatttaagtacattataaagcctttataattaatacagaaggatatacacacacgaatagatagaycaatgaatagaaattccagaaatagacccaattgcatatggaaatttaatacacaataaaggtgacatttcagattggtggtgaaaagatggacttttaaataagtggtgttgggataagtgaatagccatatggaaaaagataaaattggatccatttctcacattgtaag

SEQ ID NO: 808068 - DNA, 679 bp, Homo sapiens
gagcacactagatggatttatagcacttaatattgactgcacagacctatgaggaaatgttttcacagagtttatatgagaaaattcttgagacttttacttcatcacaggttcaacaccatctgacaatgtgatcacttgttagagaagttaatgtaatctttgtttcaagatagaaatgagttttctagatttgtggagtatcttttagaaactattaagtcaagaaaataatatttaattttgaaaacaaggttgagaaactgttatacaatcagttagacaaataaaggcagcatgaagtgtggtgacatggggaagaaataattagaatggatatattggagtaaactataaaataataatttgatagaataaatgtttggtttcttgagaaagaagaatgaaaacaatataaaaaaacaaaatagaaatatatgggttatttctgaggtattttttcttagtgaaaatacagtatttcattatatagtgaatatcccatgctstaaaatatttaaggatacatacatgaattaatcaaccttaataaattcaatagagtaatgcctgaccttgattaaaaaaatgtgcatttctagcctctaaattgtttctaaatagaagagggcccttgatgaataggggttttttaatgaaatagaagtagaaatgcaga

SEQ ID NO: 808069 - DNA, 644 bp, Homo sapiens
tagatatgaagatgtgtataaccagaggcttcagaaaggtaagttgagatccattcaggtactgcagagtttgtccttcacccttgaggaaataggaatgcacccataagaggtattaaaaagaggaataatgtgatctgatttatattttagtaaggtaacttggcagccacatggattgcctggttcagtggcagtgagaatagatggtgagatcaaaactgtctaccttagatagacttttgctataaaggcccaagcaagacaggataagggtctgaacttgggagtttgtgaggatgaagaagagaaaatagaatctgttcaaagatttggaaatagactttgaggggtaagagaaaatgagatatgaagatgacttcarggtttccagaagtaccattaagatacatgaggaatataaaagaagtagaactaagagatcaagataattaggcaggttgggaacatactgaatttgaaacatctatggacaatctagaaacaaatatgtattcagtaactggaaatatatgaactattaatattaaaaactatggcaaatgatacatgcaataaatacttgtgaaataacatagcatgctaaaacagacctttcatttccaactatttctttggaaaat

SEQ ID NO: 808070 - DNA, 620 bp, Homo sapiens
ctaaaaattaagaatgcccctattaatatttaaaacacaaatgtttgacttctttaggacagtttactaataaaacctttaatgatttgagttttaggactattttctcttcacaaccaacaatttagattttagttataatatgacaaggcagttaaaattggagatgtgctaatgaagcagcaattgctgccatgtgctaatgaatacagatatttggttacaaagatatatatgtataagccttgagttatacattgtagatgatgtttgagtatcaggttacctttgctcctctctcttctttgaatgaatggagaccaggctgccatatgggmaatgtgtctttccttatttaatatagtgtagcctcacaagcatgtattttaggagatttggactaaggtaaagtcagctttgatagagactaacaaagtcaaaagagaaccaccaaaaataaaattccccaaacacccccaaatcaaaaagctgataccaaagacccattgtttatcgtaggtgcataatgtaccattttatgaaaatatacaaagatattattataacttctacacagattgtcaggaaatccttttttaaaaaaggaaaagacccacacg

SEQ ID NO: 808071 - DNA, 506 bp, Homo sapiens
tgtgaactatacatgcaagcgatctaggttgcatgatccttatgagaatctaatgcctgatgatctgaggtggaatagtttcatcccaaaaccaaccaccatccccacccctccatttgtccatggaaaaattatcttccacgaaaccagtccctggtaccataaaggttggggactgctgatctaatacctttagaatctattttcatacataktcttcagtttctgctgacacatattcacaaaaccttgtaatttctttaggtgtataacctactaccatccagtttttctggcactataagcatattgacacacagctgtagttatgggactgatggaaacagagggtccttgtgcttgggaacaaaggacatcctttttcaatgcatgctcccctgagattatcacaggaaagctagacatctcaacacaagaaggaaacatacttctactggtaagggaggcttagagtgtctcaggagtcagagattctcaggctaatc

SEQ ID NO: 808072 - DNA, 591 bp, Homo sapiens
ccccagtccctctgggtcggactattaggcataccccgggaggtgatcaggctccctttccgtccttacaggatgggtcctgccttgggccccaaaaccttaccatgattcctgaagtgcgctgtttctagaatcatcctgtagctcctctcaggatctgttgcgctgctgggtaggggtgctgggtcacggagagctgatttcccctctgggctgaagttctcccggcggcacctggggtcacaggtctcccttggcccagggctccagccccctataggcaaaggagacagtaagcctgtcatctccactcctggctggctygccaagaaatgttgcaggaaactgaggaatggcgagaccaatatgagagtacaggaagatatttatttttaggtacgcactggctgagtggatttatatccaaaaacctgagcattaaacaaagacagagcagggtttttataagtggacttacaaaagtaaaacaaaagcagttaatcatatagtgcataacttgtggccttgcatagctggtggccttggagctgtgtcaaaagaaaatcaagaactggctaaatacagacattt

SEQ ID NO: 808073 - DNA, 581 bp, Homo sapiens
aaattgttgggcaggtaggggagggctagccacggaacgaaactgtaagccggaccgggtgtgaggaggggaggtgatagaaggattatagggtggaggagcagaggctgaggaagaattgagatctggcttggcctggcgaggagcagcctggggaatggggaaaggtcagatgggtctgtagaaaagraggattcaaagggctcagagcttggggtggagcctgaaggaacagacaggagagaaagaagaaagatttgggacgagtcatattgggagcagagactagggagggaccaatgtgtaaagaatgcttagacgtcaggcacctcagaccatttgcccaattttcgacaaaaattatctaggtcttgtaggatagacaaatcgaaagtgccattctctggccacttggaactattttcgagtttgtattggggccaagtggtattacagaagaaaataagatgtttaggttttaggtcaggtgttagttgaaggggttttaggtttttaagaacacaggctaagggagaagaagggggaatggagggcagaaagttgcccatagtgaaggaggt

SEQ ID NO: 808074 - DNA, 554 bp, Homo sapiens
atagcactgtccacaatagcaaagacatgaaatcaacctaggtgcccatcaatggtggattagataaagaaaatgccatacatatacactatggaatatgacacagccataaaaaattacaaaatcatgttctctgcagcagcacacatggagctggaggccattatcctaagccaattaatgcagaatggaaagtcaaacaccacatgttctcacttacaagtgggagcgaaacactgggtacacatggacataaagatgggaacaatagacacttcaggctactagacagctgagagagggaaaggggcaagggtggaaaaactacttgttgggtactatgctcactacctgggtgatggggtcagttataccccaaacctcagcatcaygcaatatatccatggaataaacgtgcacatgtacccctgaatctaaaataatagttgaaaaattttttaaaaggttcttatccttaagagatacatactaaaatatataatatctcagatttatgtcaaaataatgcagtggtcaaggagagggaaggatat

SEQ ID NO: 808075 - DNA, 511 bp, Homo sapiens
agagattctggtatgttgtatctttgttttcattaatttcaaaaaaattattgatttctcccttaattttaattttattgtttattaaaatgccactcaggagtaggttgtttaatttccttgtaattttactgttctgagtgatcttcttagtatcgatttctatttttatagtgctgtagtccaaggatgggtcagtatgatttctctttttttttgttagtttgctgagcattgtttaatggccaattgcgtggcagaytttagagtatgtgccatgtacagatgagaagaatatataatctgttgtttgaagtagagagttctgtagatacctgttagacaaatttgttccaatgtcaagttcaggtctcaaatatctcgttagtcttcatctaatactgtcagtggggtgttgaagtgtcctactattattgtgtgattatccaagtctcttcagaagtctctaagaacttgttttatgaatctgagtgctttggtgttgtgtaca

SEQ ID NO: 808076 - DNA, 645 bp, Homo sapiens
tattctctgtaaagggaactgactgtattcatgacagtcattaatctctattggtaggaagaggaaagagggggtttaatttcttattgaagccatcctattttgattttatgagtaatgttttggattcctggcaaaatttcattagctaagaagttcaactttataatttattagtgggagcaattttttaaatgaaatacttcaaacccacataaaactatggaaaaaattaacaaaaatcaatttcaatgttaacattgtgccatatttgctttatrttattacctttaagaaataaaactctatacttattgtagctgaaactttatactcttccttttccactgagaggtagtaactaccctaagtttggtgtgcattgaaaggagtaatgtttgtgaaaaatatgatgtttgaaaggatcattagcttcggaatgagacaggctatgtttacatatgggatctaccacgtcatagctggaggcaagtcatttaacttctttgagctccagttttctcatgtacaaaatgggaaaaatcctatctcacagagttgtgtgagaatcagaaataattgatataaagcttttcacacttaagaaattcaatatatgatggttattaatgctgctgttattgt

SEQ ID NO: 808077 - DNA, 645 bp, Homo sapiens
tattctctgtaaagggaactgactgtattcatgacagtcattaatctctattggtaggaagaggaaagagggggtttaatttcttattgaagccatcctattttgattttatgagtaatgttttggattcctggcaaaatttcattagctaagaagttcaactttataatttattagtgggagcaattttttaaatgaaatacttcaaacccacataaaactatggaaaaaattaacaaaaatcaatttcaatgttaacattgtgccatatttgctttatattattacctttaagaaataaaactctatacttattgtagctgaaactttatactcttccttttccactgagaggtagtaactaccctaagtttggtgtgcattgaaaggagtaatgtttgtgaaaaatatgatgtttgaaaggatcattagcttcggaatgagacaggctatgtttacatatgggatctaccacstcatagctggaggcaagtcatttaacttctttgagctccagttttctcatgtacaaaatgggaaaaatcctatctcacagagttgtgtgagaatcagaaataattgatataaagcttttcacacttaagaaattcaatatatgatggttattaatgctgctgttattgt

SEQ ID NO: 808078 - DNA, 659 bp, Homo sapiens
ccagggactagggactagtgctgacccccagcacagtgcagctgccccacagaagagtggccagactgttctccatgcaggtccctgtcctcacttctcctcctaggcaaaacctcctgacctgggacttcagcatgactaacacgcccctggttaatatttcaatcagaggcagcaagacatttctcaggggaggaaatcccagaatcaattgacaatgcttctgcctttgtagctgcacttgtaccaccctaactgcccttgggctgggaaagaacaaaaggcctagtcactatcctggcacccccatgcagcagccaccaaatggagaggaatccaactcctcttccctggaacccccaccccccaactcgtcaccaggcagggcaacaagctcaggaccacagaacagctgccccacccacggatgaacacmacaactggtagaggctctgagtttccctggagagaggctcccagaggcaataaacagcccctcagccactgccacaggagtggttctgcccctgatgcactcagcctgggaaagaaacaaggcaccggagggcttcatccaagcgaacagcatgccacagccacctaccaacaggatcccagtctctcctctctgtgagcccttaacccctgcttcccaacaa

SEQ ID NO: 808079 - DNA, 659 bp, Homo sapiens
ccagggactagggactagtgctgacccccagcacagtgcagctgccccacagaagagtggccagactgttctccatgcaggtccctgtcctcacttctcctcctaggcaaaacctcctgacctgggacttcagcatgactaacacgcccctggttaatatttcaatcagaggcagcaagacatttctcaggggaggaaatcccagaatcaattgacaatgcttctgcctttgtagctgcacttgtaccaccctaactgcccttgggctgggaaagaacaaaaggcctagtcactatcctggcacccccatgcagcagccaccaaatggagaggaatccaactcctcttccctggaacccccaccccccaactcgtcaccaggcagggcaacaagctcaggaccacagaacagctgccccacccacggatgaacacaacaactggtaraggctctgagtttccctggagagaggctcccagaggcaataaacagcccctcagccactgccacaggagtggttctgcccctgatgcactcagcctgggaaagaaacaaggcaccggagggcttcatccaagcgaacagcatgccacagccacctaccaacaggatcccagtctctcctctctgtgagcccttaacccctgcttcccaacaa

SEQ ID NO: 808080 - DNA, 628 bp, Homo sapiens
caaatgtagataaaataatataacaaaccccatgtcctatcacccagcccttattatcagcaacccatggtcatttatgtctttatctacccacccaatattattttgaagcaaattgaagataccatatcattttgcccataaatataacttctgttaaaagataaactttggcacactttaaaactttgaagagtttatttgagcaaacagcaattcattgatcaggctgctccaaactggaaatggtttgggcttcgaggacggagcaagaggggaaggctctaayagggtaaatgcagaagcagagcaaagaaattatttgattggttaaacttccagaatttccttatttagactatccaataggaagttaaagacaatataactaatgcccagatggccttctgtgattggctaagtttcttttaaattaactgcttacaggaaatgagactgagttaggttttagcttgcttagtaggaacttagttagagcctcctcagtctaatgccccccccatttaattatttaaatacttcaacaccattatcatattttattttatatttttagagatggagtcttgctctgtcacgcaggctggagtgcatggcacaatcaatt

SEQ ID NO: 808081 - DNA, 635 bp, Homo sapiens
catttatcagctacgtgactcagggcaaatgacttaacctctgtgagcctcgtttcctcattggcaagatgggaggcattaaatgcacaataaactgatgagatatgtaaagattaaataaaatgtgtcatgtaaagcccctgacatttgggaagtactcagtaartgttagctcccatcattagtacctgcctcctagagtggtgtggggattcaatgagatagtgtatgtcatgcacttttgacggtgcctagcattagagtaggtactcaataagtatctcgaataaatgagtgagtgaacagacctgttgtaagcctttcatcaaagaattgctccctctccctttcacaatctcaatgccatttttgtaacggattctctgagttcctttgctttactttctgtttctttccacagccaaacaaagcctttctctttttaccccagaactcttcggtctccctctgaggctcccagttctgaagggctagtccctctctctatccatcacaaaagattgtccctctctctcagccttaacaaagattgcccctttcttttctacaagctctcatcctttccaaaaccactgttccctgcataacctaccagtgtgcacgacgctgagccg

SEQ ID NO: 808082 - DNA, 647 bp, Homo sapiens
actccctcttctcccatcccttgtggaggaaggtgccagccattggtcctcgtttctcagtggggtctccttagctttctcttttcatccagatcagtgggagcagatggctgtggcaaggtccagcctgcagggaaggcagatgrccagtctattttggctttcacataggctacgctcttccagcattgtctctacattaataaaagtgatgttttagcctcctgctagctgttatcttatttctcaattggttcagaactcaggcagggaattgggctgttatgaaactgacttcacaggcttcatcccaggagaaacagtaaagttcatatggcctgggtttgagtctcacttagccacttacttggtcaatggctcactttccacatttgtaagataggtataataatgctacctacctaactgggttgttttgaagaataaatgggttaatccttggacagtacttacagcagtgaccactcatagttacacttaagaaatgtagccaataccattctggccagggcgggggtggagactgtttctagggcctctttgaagatagtgtgccaaatttttaatggtctactggaatggacatgtgattactcaacatttaataaagcctagatatgagcaca

SEQ ID NO: 808083 - DNA, 647 bp, Homo sapiens
actccctcttctcccatcccttgtggaggaaggtgccagccattggtcctcgtttctcagtggggtctccttagctttctcttttcatccagatcagtgggagcagatggctgtggcaaggtccagcctgcagggaaggcagatgaccagtctattttggctttcacataggctacgctcttccagcattgtctctacattaataaaagtgatgttttagcctcctgctagctgttatcttatttctcaattggttcagaactcasgcagggaattgggctgttatgaaactgacttcacaggcttcatcccaggagaaacagtaaagttcatatggcctgggtttgagtctcacttagccacttacttggtcaatggctcactttccacatttgtaagataggtataataatgctacctacctaactgggttgttttgaagaataaatgggttaatccttggacagtacttacagcagtgaccactcatagttacacttaagaaatgtagccaataccattctggccagggcgggggtggagactgtttctagggcctctttgaagatagtgtgccaaatttttaatggtctactggaatggacatgtgattactcaacatttaataaagcctagatatgagcaca

SEQ ID NO: 808084 - DNA, 647 bp, Homo sapiens
actccctcttctcccatcccttgtggaggaaggtgccagccattggtcctcgtttctcagtggggtctccttagctttctcttttcatccagatcagtgggagcagatggctgtggcaaggtccagcctgcagggaaggcagatgaccagtctattttggctttcacataggctacgctcttccagcattgtctctacattaataaaagtgatgttttagcctcctgctagctgttatcttatttctcaattggttcagaactcaggcagggaattgggctgttatgaaactgacttcacaggcttcatcccaggagaaacagtaaagttcatatggcctgggtttgagtctcacttrgccacttacttggtcaatggctcactttccacatttgtaagataggtataataatgctacctacctaactgggttgttttgaagaataaatgggttaatccttggacagtacttacagcagtgaccactcatagttacacttaagaaatgtagccaataccattctggccagggcgggggtggagactgtttctagggcctctttgaagatagtgtgccaaatttttaatggtctactggaatggacatgtgattactcaacatttaataaagcctagatatgagcaca

SEQ ID NO: 808085 - DNA, 635 bp, Homo sapiens
tattcaagcactcaacactattaaacccccgttatgagtttgatgctttcgtctctattattctatacccacgaaagagtagtattattaatccatttttcaaatgaagaaactaaatttcaaagagatggaaatgatatattctgagctgctgactctgcatttgccmaaccatgggagcggagcaatatgtgtgcatgtgtatacatacagacaggcagagaagaccagtttaaaggatacataccaaggtcacaaataggcagaggtgggcaggggtgatagtgggtgtttttaaggagttctctgtattttctttttcttttttttttctttttgagacagagtctcactctgtcacccaggctggagtacaatggcgtgatctcagctactgcaacctccccctcccaggttcaagcgattctcctgccccagcctcccgaatagctgggattacagatgtatgccacacacccagctaatttttgtatttttagtagagacagtatttcaccatgttggccaggctgatctcaaactcctgacctcaggtgatctgcccacctcggcctcctaaagtactgggattacaggtgtgagccactgtgcccagcccgtattttctgtaaggg

SEQ ID NO: 808086 - DNA, 635 bp, Homo sapiens
tattcaagcactcaacactattaaacccccgttatgagtttgatgctttcgtctctattattctatacccacgaaagagtagtattattaatccatttttcaaatgaagaaactaaatttcaaagagatggaaatgatatattctgagctgctgactctgcatttgcccaaccatgggagcggagcaatatgtgtgcatgtgtatacatacagacaggcagagaagaccagtttaaaggatacataccaaggtcacaartaggcagaggtgggcaggggtgatagtgggtgtttttaaggagttctctgtattttctttttcttttttttttctttttgagacagagtctcactctgtcacccaggctggagtacaatggcgtgatctcagctactgcaacctccccctcccaggttcaagcgattctcctgccccagcctcccgaatagctgggattacagatgtatgccacacacccagctaatttttgtatttttagtagagacagtatttcaccatgttggccaggctgatctcaaactcctgacctcaggtgatctgcccacctcggcctcctaaagtactgggattacaggtgtgagccactgtgcccagcccgtattttctgtaaggg

SEQ ID NO: 808087 - DNA, 583 bp, Homo sapiens
cagtgtgtgttgttcccctccctgtgtccatgtgttctcattgttcagctcccacttataagtgagaacatgcattgtttggtttcctgttcctgctttagtttgccgaagataatggcttcaagtgccatccatgtccctgcaaaggacatgatctcattcgtttttatggctgcatgatattccatggtgtacgtgtaccacaatttgtttatccagcctgtcaaaagacatgggcttttcagttgattccatgtctttgctgttgtgagtagtgctgcaatgaacacatacatgcatgtatctttgtgatagaatgatttatattccttttggtrtatgcccagtaatggaactgctgggtcaaatggtatttctggttctaggtctttgaggaatcaccatactgtcttccacaatggttgaactaatttacattcccaccaacagtgtaaaagtgttcctatttctccacagccttgccagcatctgccatttctcgactttttaataattgccattctgaatagcgtgagatggtatctcattgtggttttcatttgcatttctctaatgatcagtt

SEQ ID NO: 808088 - DNA, 636 bp, Homo sapiens
taaatgtatgtcctggaatcattttggtagtgtttcagtagtgtcaactgtattttcctacctgttcagattattaccgtgaaccttttcctgcagttcattttatttatttatttttctgaaagtcgcctataaaatacactaaaacttattctgactccctcagcagttctttttaaacacaaattaataaattccaaaaaaattaccacctaaaaaaagaaagaaaatatatacaacatgagagacacagtcactttctacaaaaacaagtattgctgccattaccttaataagtactaactgcagttttaaaccctaagagaaaagacagaagagcagacaatggcaagcctccatttcttgtaacaggaaagcagtcaggatctacctatgttccccaaaagtcatatgtaagaatgctcatggcagtaccaraaacaacccaaatgctctttatacaatgggtaaaaacatggaggtagagttgtacaatgaaatgtgacacagcaatagaacatacacaataacaagcgtattgttgagtacaaaaaagccagaaacaatgttcagtttccattacacatgaataaaaaaacaggctaaacaaatatatagtgtcggaagtcagagtgg

SEQ ID NO: 808089 - DNA, 636 bp, Homo sapiens
taaatgtatgtcctggaatcattttggtagtgtttcagtagtgtcaactgtattttcctacctgttcagattattaccgtgaaccttttcctgcagttcattttatttatttatttttctgaaagtcgcctataaaatacactaaaacttattctgactccctcagcagttctttttaaacacaaattaataaattccaaaaaaattaccacctaaaaaaagaaagaaaatatatacaacatgagagacacagtcactttctacaaaaacaagtattgctgccattaccttaataagtactaactgcagttttaaaccctaagagaaaagacagaagagcagacaatggcaagcctccatttcttgtaacaggaaagcagtcaggatctacctatgttccccaaaagtcatatgtaagaatgctcatggcagtaccagaaacaacccaaatgctctttatacaatgggtaaaaacatggaggtagagttgtacartgaaatgtgacacagcaatagaacatacacaataacaagcgtattgttgagtacaaaaaagccagaaacaatgttcagtttccattacacatgaataaaaaaacaggctaaacaaatatatagtgtcggaagtcagagtgg

SEQ ID NO: 808090 - DNA, 611 bp, Homo sapiens
agggactcttctgggctgtgggtaattttctgtttcttcatcttagagctgattacacaggtgtgtttgtgaaaattcaagttgcacactcatggtttgtgctgttctctgcatgcatgttatacgtcagtaaaaagtttattaaaacaaaccaatagaatcactaggaaatgtctgaggtctgagctctaacttcttagaatcctgctcatagcttctccgtggaatctagagaaggcaggatctagagcttctctgtccagtatggtagccactggccacatgtggtttagagcactggaaatgtacctagtctgaactgagatgtgctgtaagtataaaatgtaaaggctcagtatgaaaaaagaatataaaatatctactttgcaaccgtgatgtgctgaaaaattttttaaataataaaaatgatttttwaaaaaatcttgataattttacattggttacatattgaaatgataatattttagctatattatgttaaagaacacatactagtaaaattaaaattaactttgtttctttttacttttttaatgtgactactaaacttttatatatgtggctgacatttgtggttctagagcctccac

SEQ ID NO: 808091 - DNA, 548 bp, Homo sapiens; identical to SEQ ID NO: 770246

SEQ ID NO: 808092 - DNA, 548 bp, Homo sapiens; identical to SEQ ID NO: 770247

SEQ ID NO: 808093 - DNA, 530 bp, Homo sapiens
cacttcacaactggttgggtagctcagagggaaataagtaaaatgtcttgaggctgtggcagtgcttgattggttctgctgtgtatatataaatggtttctacacacggaaacagagttgtgagtcccatgccttttttggcggggggctatctacttgcctggtgattgccctttcccttacaagctgtacatcctctttaccatccctccttctctccttccacagctccccttccacctctgttggtttctgcctccctttgtttcctcagtccttatacccacacyctccccacggaagggcataaagaaaggtgtgaagtttccaaaggaatttctgttccctgaatagcaggtctgatgaatggaatctgaaggggctctgcagggaggagtatgatctgttgtccgagggagatttggggaaaaagaaatatttttaccagccatgaatgtggcagagaggacacatggcaccaataggttggttaaggggcaggggaggaaagactggtgggaagtgagcag

SEQ ID NO: 808094 - DNA, 594 bp, Homo sapiens
gaggctgaggcatgagaatcgcttgaacctgggaggtggaagttgcagtgaatgccactgcactccagcctgggtgacagagtgagactctgtctcaaaaaaaaaaaaaaaagaaactataagaaaataatctaagagatgtcacaaaacactagagagtctagagagtttaattgctaaatgaatggcataggcagctttatttccattttcaaaaggtgatgatcctagaaacattctaagttgaaaaaaatcatgtttacttttccatagaatgtgatgacagagagaatgaatgaatgaatatgtgattagattcctagcagcaggggctcaagatccatttattacctctaataaatgttgtgggttgaattgtggtccccctcaaaagatagttgaggtcttaactsccagtatctcagaatatgaccttatttggaaatggggtctttacagaggtaatcaagttaaaatgaagtcactagggtgggggataatccaaatatgattggcatccttataaaaagggaaaatttagacacatacacaaagggaagacagtgtgaggacacacagggagaagacggccat

SEQ ID NO: 808095 - DNA, 632 bp, Homo sapiens
gacggccttgtctatcttatctacggcctaatgaatttccagaacccagccctcttacaacactcttgctctctggggaagtagctctgagagagctgagagaacagcagagtctgtgatagtaggatgaacgcctctggtttggctgtaacactcatagattttcaaagaaccacaggtcactggaaagggtcccacaccagccactctggtagggaccaggtctgttaccacacttgggacactgccttccctacctctgagccttcctgggtcatgtttccacaagtrccagaagccccaccaccccaccactcccagcctgtgaagggcagactctgggcctgcacctctgccactgtgaagcagcctgcagacctgtctacagaagtgaagtggctgtgtgacgaaatctaagttttgacctcaaagacccagtgtgatgagaagccctcttcattgtgctgactcttggatatggacatttcatgctctcaaagaatgccaatgactgaaatagggatcataagggcaacaggagcagtggggcaagattcatccgaggaacactccagaactagccttcaacagtgattggagctgtagtgaatgagaagcactggaggaacaga

SEQ ID NO: 808096 - DNA, 632 bp, Homo sapiens
gacggccttgtctatcttatctacggcctaatgaatttccagaacccagccctcttacaacactcttgctctctggggaagtagctctgagagagctgagagaacagcagagtctgtgatagtaggatgaacgcctctggtttggctgtaacactcatagattttcaaagaaccacaggtcactggaaagggtcccacaccagccactctggtagggaccaggtctgttaccacacttgggacactgccttccctacctctgagccttcctgggtcatgtttccacaagtaccagaagccccaccacccyaccactcccagcctgtgaagggcagactctgggcctgcacctctgccactgtgaagcagcctgcagacctgtctacagaagtgaagtggctgtgtgacgaaatctaagttttgacctcaaagacccagtgtgatgagaagccctcttcattgtgctgactcttggatatggacatttcatgctctcaaagaatgccaatgactgaaatagggatcataagggcaacaggagcagtggggcaagattcatccgaggaacactccagaactagccttcaacagtgattggagctgtagtgaatgagaagcactggaggaacaga

SEQ ID NO: 808097 - DNA, 630 bp, Homo sapiens
gccatggaatactatgcaaccataaaaaggaatgagatcatgtcctttagaggggcatggatggaattggagccattatcctcagcaaactaaagcaggatcagaaaaccaaacaccacatgttctcacttataagtgggagctgaacaatgagaacacatggacacatggggaaaaacaacacatactggggcctgtagggggtgaggtgcagggagggagagcaacaggaaaaakagctaatgcattctgggcttttaaaagtgtattcttaagatattttggggtattgtaaatgatatactttctgtcattatattttttagttgactactgcttatatatggacatatatgtatatgctattgatttctatattctgattttaaacttggccatcttatttattgcctaaataaattaattaaaaatttattgcttaaatttatttaagcaatttattaattaattataaattgagcaatttattaattaaatttattgcttaaataaattaaataaataaatttaaaaaatttattgcttaaaataatttttaaattatttcctttggtttatcatcataaatatattttttcttcttttcaattcatcatcagatttacatct

SEQ ID NO: 808098 - DNA, 448 bp, Homo sapiens
tacagtcaaataggcttcatccctggggtaaaagattggttcaacatacacaaaccaataaatgtgattcatcacataaacagaacaaaagacaaaaaccacatgattatctcaatagaggtggaaaagtgtttgataaaattcaacatccctacatgttaaaaactctcaataaactgggtattgaaggaacatacctcaaaataataagagccatatgtgacaaacccacaaccaatatcatactgartgagcaaaagctggaagcattcctattgaaaacaggcacaagacaaggatgccctctctcagcacttctattcaacatggtattagaagttctgccagggaaatcaggcaagagaaagaaataaaaggtattcaagtagaaagagaggaagtcaaaccatcttgtttgcaaaaaaagtgaacctatatttagaaaacc

SEQ ID NO: 808099 - DNA, 516 bp, Homo sapiens
tgtgaaaaattccccttggtcctgatgtattatcctatttatatattattagatttggtgtgctactattttgtttaggaattttgcatctttgttcttggaggatattgatcttttgcttttctcattgtgttcttgtcaggttatattatcagactaaccctggcctcaaaaaatgacttgggatgttttcctttgttctctattttgtggaagagttwgtataagaatggtgttatttcttctttacatatttggtagaatttacaagcaaggccatgtggacatggaattactttgtggagtttttaaacttcacattcaatgttttcaacagatgcaggacgattcaggactatacaagactatacaggactaaacagttttctattccttcttgaataagctttggtagtttgtgtccattgaaaagagtttctatgccaaagaaactgcaacttagatgaaatattacagtatttcatctaagctgcagagtttactagcatagaaatg

SEQ ID NO: 808100 - DNA, 516 bp, Homo sapiens
gcaaaggttttcttctgcaagaacagagtgaccagaacttcagcttgtttgctgcaagtcctacgtcctatgtggcattcctcaggggcagttatctaaagggtagtcagcatttctaggtccatccagtggaagctgctgacctgagtatggtttcttgcatcttsagtttatacagtctccagttcaaatcagaaccaaatgctaaccccgtgtggtgaccacaaccttgtattgcatttggaatcagctctttttccttccacctgcccagtgttctatccgaatgcatctttctctgacttgtttcctctagtggggagctggagggattcaatcctggtgaatccctcgtggaggactcagatgctgcacttagctgccccctcccttacttgcaaactgtgcacagtgcctggggcagaaagaggaaatgtgatgcagtttgctctgttagcatctccagcaggaagagtacaaataaaggcatttttcttactaaagtttgttaagcct

SEQ ID NO: 808101 - DNA, 622 bp, Homo sapiens
cactttgttagaaatttattccaccaaatatcctgttcacaagttctactttccagaaaatactaggacatgaacacaattcagtcaagttctttgctacttttataacaagaactgcttttcctccagtttccaataacatgttctttatttccagctgatatggcatcagaatggcatttaccatctatatttctacaatctgtttacaaccacttagatattctttaagaagattgaaattttccctacagctctccttttctgagtccgcacaaaaatggccattaatggtccatgaatatcaatataggctttttctagcatgaacctccaaactttttggcccctacccattacccagttccaaaagcactaccacatttttaggtatttattataacagcaaacccactctcrgtaccaatttttgctttattctttgtggcctgctgtaacaaaacaccatagatcaggtagtttataaacatcagaagtttatttctcatggctctggaggctaggaagtccaagatcaaagcaccagcagattcagtgtctggtgagagccagctttttcatagatgccagcttctcactctgacctcataaaaaagcaaga

SEQ ID NO: 808102 - DNA, 292 bp, Homo sapiens
tctgctggaagtcccttgggggagggcaggggtggtatctgggtacacagtccccagccacggtcggacaagcccgattcctggtgatggggtaatgcacacgcagctcttgggtggcctagctcagaaatacattgaagagccagttttcaaagaygcagaggccgattgggccctgtgccacagagttgtcagagaactgcccgctctcaggctgcaggagacaaggcctagatttaaggggaaggagattgtttccttggggattcgtgtagggttctttgaagcagtc

SEQ ID NO: 808103 - DNA, 592 bp, Homo sapiens
cctagaatttttatggagccaggtcttagatttaagtctttgatctatctgaagttgatttttgtataggagagagatgaggatccagcttcattcttctacatgtggcttgccatttatcccggcaccatttgttgaatagggtgtcctttccccacttcatatttttgtttgctttatcacacatcagttgacttgtaagtatttggctatatttctgggttctctattctgttccattggtctatatgcctatttttataccagtaccatgctgttttgatgactggctttatagtatagtttgaagttggggaatgtaatgcctccagatttgctctttttgcttaatcttgctttggctatgcaagctgytttttggttccatttgaattttgggatagttttttctatttctgtgaagaatggtggaggtattttgatgggagttgcattgaatttgtagattgcttttggcagtggtattgtttgactctgtgtcccatccaaatctcatcttgaattgtactcccataattcccacatgttgtatgagggacccagtgaaagacgatttgaatcgtgggggcag

SEQ ID NO: 808104 - DNA, 602 bp, Homo sapiens
agggccagacacgtgtgcatgtttgccggtgtatgtgttatacttatcttcaggcaagcaagacttttatcccacttctatgatttgagtcctaaaaagaagactgcagagggccattatcagtagacttaaaggctatctaaaagtatgccctgatataggaactttctcaacaacacccctaagttatgcttaaataccttctgggatggggatttcattacctcaaaaactcgaccctctgcacagctctgatttacactggatgaatatctgtctctccctgccagtcctaatgtcttgccttgggacagaatgggacaagtctaatccctgtccctgaggctacagcctgggccactctatcrgtcaacagccacgctatcggtcaacttcccctcctggctgaacacaccctactcttctgcccatttgcccacaggaagaactctgaatctgttggggctaaccgttcctagtccctttgccacgtgtttactgggaatgtgtcccacttgagaagcagaggcaactgtggttgggatagaggtgactttgccagggccataggggaaagcccctcccatgggatccaaagtagc

SEQ ID NO: 808105 - DNA, 565 bp, Homo sapiens
aagggtcacagaaaagacctaaagcagattttttttttgtcctcaaacttcgcccaggctggggtgcagtggcaagatcagggttcactgcaaccttcacctcccaggctcaagcgattcttgtgcctcagcctccaggttagctgagactatagctctgtgccaccacacctggctaattttkgtatttttagtggagacagggtttcaccatgttggccaggctgttctcaatctcctgacctcaagtgatccacccgcctcggcctcccaaagtgttgggattacaggcatgtgccaccgtgcctggcctaaagcagaatttctaagagttggagatctctaagagaaaataaagtatcacacccatgaaacaattagaagacaaggaaagacaaaagtagatcaagtgcagagacatctaggaagaggtgagaagcaggagatcacccaggcgggtgatctaaagcagggcattgaaggaatgttgatgtggggaggcaagaaggaaaggaaagtgtcatcccaggcaagagtacaccaatagcaggaaagacaacaatgc

SEQ ID NO: 808106 - DNA, 565 bp, Homo sapiens
aagggtcacagaaaagacctaaagcagattttttttttgtcctcaaacttcgcccaggctggggtgcagtggcaagatcagggttcactgcaaccttcacctcccaggctcaagcgattcttgtgcctcagcctccaggttagctgagactatagctctgtgccaccacacctggctaattttggtatttttagtggagacagggtttcaccatgttggccaggctgttctcaatctcctgacctcaagtgatccacccgcctcggcctcccaaagtgttgggattacaggcatgtgccaccgtgcctggcctaaagcagaatttctaagagttkgagatctctaagagaaaataaagtatcacacccatgaaacaattagaagacaaggaaagacaaaagtagatcaagtgcagagacatctaggaagaggtgagaagcaggagatcacccaggcgggtgatctaaagcagggcattgaaggaatgttgatgtggggaggcaagaaggaaaggaaagtgtcatcccaggcaagagtacaccaatagcaggaaagacaacaatgc

SEQ ID NO: 808107 - DNA, 630 bp, Homo sapiens
cagcgtcgtgcacactggtaggttatgcagggaacagtggttttggaaaggatgagagcttgtagaaaagaaaggggcaatctttgttaaggctgagagagagggacaatcttttgtgatggatagagagagggactagcccttcagaactgggagcctcagagggagaccgaagagttctggggtaaaaagagaaaggctttgtttggctgtggaaagaaacagaaagtaaagcaaaggaactcagagaatccgttacaaaaatggcattgagattgtgaaagggagagggagcaattctttgatgaaaggcttacaacaggtctgttcactcactcatttattcgagatacttattgagtacctactctaatgctaggcaccgtcaaaagtgcatgacatacactatctcattgaatccccacaccactctaggaggcaggtactaatgatgggagctaacayttactgagtacttcccaaatgtcaggggctttacatgacacattttatttaatctttacatatctcatcagtttattgtgcatttaatgcctcccatcttgccaatgaggaaacgaggctcacagaggttaagtcatttgccctgagtcacgtagctgataaatg

SEQ ID NO: 808108 - DNA, 615 bp, Homo sapiens
taatgaatttttatgtgccttgaacttgttatgtgtctattcctcttttattttccaaatgggagttttcaatttagttatcctgtccctgttttctgcatcgtacattggataatgaataaatagccaatttgtctttacatttatagtttagcaaatgacaaagagctatatctgacttaatgaagaggactgtgatcacccagaggttcagtctttcagatgagtctcaaatctcattagatatttcctccttttgaggggcaggggactaacatggcaatttatatgtcctatacttgggaagaagggtgcattgggcagttgatggccagggaggcagacyttaataaaggtaccaagctgtctaccaaagatctgagtcccctgccatagagtacagattttttatgagaagcagctgtccagtttagaactgtatctttcagaagatccttgcattaacacagagccatgaactacttttcactaagaaactaaaaacagaagtgatgtgtgtcaattctggtccaaggtgattaagaagtatgtgtgtgccttctgttcttctcttatcttgaaatgtcacatggtaaagagggcagatgctgaagc

SEQ ID NO: 808109 - DNA, 650 bp, Homo sapiens
ctttgattcccttttattttgaggtcttactcaagaaatmtttgccgagaccgatgtcctgcatcatttcctcaatgttttcttctagtatttctaaagtttcagttcttgcatttgagtttttaattcatttttatttaatttatataaatcttgagagaaaggggtctagtttaattctgtacacatgaatatgttttcagagcaccacttgttgaagagactttcctttctccaatgtggagattggtcaaaaaactacaaatagaattaccttgtgatccagcaattccactactgggtatgtattcaaaagaaaggaataaatatatcaaacaaatatctgaattcccatacatatcacagcactgttcacaataaccaagatatggaatcaacccagttgtccatcagtggataaatgattaaagaaaaggtagcatatatactcaatagacttttactccactataaaaataatgaaatcctgtcatttgtgacaatatggatggaaccggagcccattatggcccattatgttaagtaagccaggcaccaaaagacaaatgtcacatattctgactcgtatgtgatagcgaaaacacttgatctcatggaggtattgaatagaatggtggttactagaggct

SEQ ID NO: 808110 - DNA, 598 bp, Homo sapiens
tccctgatgattactgatgttgaacattttctcatacacctcttggctatgtatatgtcttcttgtaaaaaaaatgtcagttcagagcatttgcctaattttctattgggttattattattactatttgctatccacttttttgagctccttatatgttaaggttactaactgtcagatgaatagttttgcacatattttctcccattctgtacgttgtctcttcactttttttattgtttcccttgcactgcagaagctttttagcttgaagtgatcccatttgtccaatattgctttgattcccttttattttgaggtcttactcaagaaatatttgccgagacckatgtcctgcatcatttcctcaatgttttcttctagtatttctaaagtttcagttcttgcatttgagtttttaattcatttttatttaatttatataaatcttgagagaaaggggtctagtttaattctgtacacatgaatatgttttcagagcaccacttgttgaagagactttcctttctccaatgtggagattggtcaaaaaactacaaatagaattaccttgtgatccagcaattccactactgggt

SEQ ID NO: 808111 - DNA, 650 bp, Homo sapiens
ctttgattcccttttattttgaggtcttactcaagaaatatttgccgagaccgatgtcctgcatcatttcctcaatgttttcttctagtatttctaaagtttcagttcttgcatttgagtttttaattcatttttatttaatttatataaatcttgagagaarggggtctagtttaattctgtacacatgaatatgttttcagagcaccacttgttgaagagactttcctttctccaatgtggagattggtcaaaaaactacaaatagaattaccttgtgatccagcaattccactactgggtatgtattcaaaagaaaggaataaatatatcaaacaaatatctgaattcccatacatatcacagcactgttcacaataaccaagatatggaatcaacccagttgtccatcagtggataaatgattaaagaaaaggtagcatatatactcaatagacttttactccactataaaaataatgaaatcctgtcatttgtgacaatatggatggaaccggagcccattatggcccattatgttaagtaagccaggcaccaaaagacaaatgtcacatattctgactcgtatgtgatagcgaaaacacttgatctcatggaggtattgaatagaatggtggttactagaggct

SEQ ID NO: 808112 - DNA, 650 bp, Homo sapiens
ctttgattcccttttattttgaggtcttactcaagaaatatttgccgagaccgatgtcctgcatcatttcctcaatgttttcttctagtatttctaaagtttcagttcttgcatttgagtttttaattcatttttatttaatttatataaatcttgagagaaaggggtctagtttaattctgtacacatgaatatgttttcagagcaccacttgttgaagagactttcctttctccaatgtggagattggtcaaaaaactacaaatagaattaccttgtgatccagcaattccactactgggtatgtattcaaaagaaaggaataaatayatcaaacaaatatctgaattcccatacatatcacagcactgttcacaataaccaagatatggaatcaacccagttgtccatcagtggataaatgattaaagaaaaggtagcatatatactcaatagacttttactccactataaaaataatgaaatcctgtcatttgtgacaatatggatggaaccggagcccattatggcccattatgttaagtaagccaggcaccaaaagacaaatgtcacatattctgactcgtatgtgatagcgaaaacacttgatctcatggaggtattgaatagaatggtggttactagaggct

SEQ ID NO: 808113 - DNA, 465 bp, Homo sapiens
gagttctagtatccttataataactgtaaaataataggaccgtagcaacgttttgtcctacctcagtgacttgatgtatacactgggaacagccctcagtctgaggaaggtcagttgaagttcttactgtacaagcccaaattttaaggaaaatgagtcccgcgatgagttttctcatgctttggccatgtwtggaccagtcagcttccgggtgtgactggagcaaggcttgtctttttcagagtcactttgcaggggttggcgaagctgcttccttccatgtacagctcccagtctactgatgtttaaggatggtctcggaggttgggcctactagaataaactgagtctaatacttctacacagttatgtttaactgggctctctgataccaggagcaaggtggcggggtttagggtgttgcaaacttcaatggttatgtggggattttcacagagcaagctt

SEQ ID NO: 808114 - DNA, 654 bp, Homo sapiens
tttaagttctgggatacatgtgcagaatgtgcaattttgttacataggtgtacacttgccatggtggtttgctgcaagcatcaacccatcatctacattaggtatttctcctaatgctatccctcctctagctccccaccccttgacaggccccgatgtgtgatgctcccctctttgtgtccatgtgttctcattgttcaactcccaccaaacatgtggtgtttggttttctgttcctgtgtagtttgctgagaatgctggtttccagcttcatccatgtccctgcaaaagacataaactcatyctttttatggctgcatagtattccatggtgtatatgtgccacatattctttatccagtctatcattgatgggcatttgggttggttccaagtctttggtattgtgaacagtgctgcagtaaacatatgtgtgcatgtgtctttataatagaatgatttataagcctttgggtgtataccccctagtgggattgctgagtcagatggtatttctgattctagatccttgaggaatcaccacactatcttctacagtggttgaactaatttacactcccaccaacagtgtaaaagcattcctgtttctccacatcctctccagaatctgttgtttcctgactttttaatgat

SEQ ID NO: 808115 - DNA, 654 bp, Homo sapiens
tttaagttctgggatacatgtgcagaatgtgcaattttgttacataggtgtacacttgccatggtggtttgctgcaagcatcaacccatcatctacattaggtatttctcctaatgctatccctcctctagctccccaccccttgacaggccccgatgtgtgatgctcccctctttgtgtccatgtgttctcattgttcaactcccaccaaacatgtggtgtttggttttctgttcctgtgtagtttgctgagaatgctggtttccagcttcatccatgtccctgcaaaagacataaactcattctttttatggctgcatagtattccatggtgtatatgtgccacatattctttatccagtctatcattgatgggcatttgggttggttccaagtctttggtattgtgaacagtgctgcagtaaacatatgtgtgcatgtgtctttataatagaatgatttataagcctttgggtgtataccccctartgggattgctgagtcagatggtatttctgattctagatccttgaggaatcaccacactatcttctacagtggttgaactaatttacactcccaccaacagtgtaaaagcattcctgtttctccacatcctctccagaatctgttgtttcctgactttttaatgat

SEQ ID NO: 808116 - DNA, 626 bp, Homo sapiens
gctttctccaaacttctgaatcccagcagaagttgagtaacccctcttctccttagaggtatgagaacctcccctgagagaaccctcctctgagccctgagttactagcagctgtctagtacttctccctcctcagaaatctcagccatatctccacagctctctaagtttctaggttctaataattccaatctctgctttttgaccctccagctttaggatcaatagctccttctgtggttaaacctttgtataccttggtgtcmccttttcatattttcagtcctgcaataccaggctaattggttccatattttcgctgttcaaatacatagagaggttcctgttctcctccctgtaggctgactaatacatcctacaagagatacaagacagaatgaaactgggtcatgcaggactttataccctgccaagagctttcgactccattttacagatcaggagtggggagccctgtccatctgagaaagagggtggtgatgcagggtgtgttgcagtgagacatgggactagaggaagtgaggactgaggcagggaggtgggtgaggaggaagtttcaatgatccaggcatggcatggtaagaatctggccactgcagagaaca

SEQ ID NO: 808117 - DNA, 626 bp, Homo sapiens
gctttctccaaacttctgaatcccagcagaagttgagtaacccctcttctccttagaggtatgagaacctcccctgagagaaccctcctctgagccctgagttactagcagctgtctagtacttctccctcctcagaaatctcagccatatctccacagctctctaagtttctaggttctaataattccaatctctgctttttgaccctccagctttaggatcaatagctccttctgtggttaaacctttgtataccttggtgtcaccttttcatattttcagtcctgcaataccaggctaattggttccatattttcgctgttcaaatacatagagaggttcctgttctcctccctgtaggctgactaatacatcctrcaagagatacaagacagaatgaaactgggtcatgcaggactttataccctgccaagagctttcgactccattttacagatcaggagtggggagccctgtccatctgagaaagagggtggtgatgcagggtgtgttgcagtgagacatgggactagaggaagtgaggactgaggcagggaggtgggtgaggaggaagtttcaatgatccaggcatggcatggtaagaatctggccactgcagagaaca

SEQ ID NO: 808118 - DNA, 553 bp, Homo sapiens
tcttgtctccagctcgaaactgtggaccaagcctgttccctccttcccctggcctctggatgcccacgcctgcctcggaccacaggcctcagccccgcctccgagcctcatgcccgctctgcagcactcggccctagctccccaactcagatcgcgctcccaggcctacggcctgccccgaggccacaacccgacccaggccaygccatccgatccagaccctttctcgcagactcggtccccagaaccacactctgcttcactgactgtcctgcccccatcccgggccgcaccagcagcatggccaggaaggccactgccatgagcacgctctccaccacaatgaggtttccgctccgcgggagcgtccgcagaaccgtcttgttgaagccgctgaggatcccgtggctgttggtgcctgggaagggtgggggtgagggcaccgtgagcagagagtagggcacacagtcaatccagccaccagggtggagccacgcaggccgcggaggagcggtggagggcgggagagtgagagcaagggcagagttccttc

SEQ ID NO: 808119 - DNA, 578 bp, Homo sapiens
gcaggtgggaggggtgtttcaggatcctgagggtcccctccctggccagggagctgttgaagaatttcccccaactcacaggggccgaacttgtcatgaatgcaggagcaacctgggaggaggcccccgaagaggcctgtcctcccgggacagaactcctagccttccctgggagtgaggctccccccaagggaggccacacacctcccaggagggctgggccctccccactctgggttgggtgcccctcactactcctcaaagctccagaggctcagtagggcctgggagtcccatctttgttgaggagcccagggtaaatggggagccctctgggtagggcaycaggaggactcacttttggagccagctctggggtgaggtctgccaaggcccaggccagccagggggagtgggtggaggggttgctcagggctccgggccagacagctgcggccccgcctgccctgcctcctccttgctgggctgacgcttcgcctctttgggcctcagtgttcccatgtgagaatggggctgactacagtcccgggggcatctgtgggtgaatgagagggttc

SEQ ID NO: 808120 - DNA, 597 bp, Homo sapiens
ctcatgcatgtgcctggcagttggtgctggttgtcagccggggaaccttgttttcctccatgtggcccctcgccctccagagcccctctccaaatggccctttaagcaggatagccaaggttttcttggtgccagcatgcawgagggcaaaaatatggaaactacgagagggctctcaaggcctaagactatttgcaccccaaaaatctgaggtctcagttaattcagaaagtttgttttgccaaggttgaggacgcatgcctgtgacacagcctcaggaggtcctgacaacatgtgcttaaggtggtagggacacagcttggtttgatacattttagagagacatgagacatcaatcaatatgtgtaagttgtacattggttcagtctggaaaggcgggacaactccaggtgaaggtgagacaaggggaaggggcttccaggtcataggtaaagagacaaatggttgcattcttttgagttcctgattagcctctccaaatgaggcaatcagatatacatttatctcagtgagcaaaggggtgactgaatagaatgggaggcaggtttcccctaaacagttcccagcttgactttt

SEQ ID NO: 808121 - DNA, 597 bp, Homo sapiens
ctcatgcatgtgcctggcagttggtgctggttgtcagccggggaaccttgttttcctccatgtggcccctcgccctccagagcccctctccaaatggccctttaagcaggatagccaaggttttcttggtgccagcatgcatgagggcaaaaatatggaaactacgagagggctctcaaggcctaagactatttgcaccccaaaaatctgaggtctcagttaattcagaaagtttgttttgccaaggttgaggacgcatgcctgtgacacagcctcaggaggtcctgacaacatgtgcttaaggtggtagggacacagcttggtttgatacattttagagagacatgagacatcaatcaatatgtgtaagttgtacattggttcagtctggaaaggcgggacaactccaggtgaaggtgagacaaggggaaggggcttccagrtcataggtaaagagacaaatggttgcattcttttgagttcctgattagcctctccaaatgaggcaatcagatatacatttatctcagtgagcaaaggggtgactgaatagaatgggaggcaggtttcccctaaacagttcccagcttgactttt

SEQ ID NO: 808122 - DNA, 588 bp, Homo sapiens
aacacatccttccatatgctttacatcatctctagataacttataatacataatacattgtaaatggtatgtgaatagttgttatttgtttttaagtttacgttatttttattgttattatttttattttaaagatttttccatctgcagttttccatctgttgtttgaatccacatatgcagaatccaccratagggagggcaactgaacttaattatctgcatccattgtttggcatttagtagtagtagtatttttagagacagggtcttgttgtgttgccgagagtagagtgcagtggctattcacagacattatcatcatagtggcgcactacagccttgaaatcctgggctcaggtgagcctcctacctcagtctcccaagtagctgggactgcaggtatgcgccactgtacccagctgtttggcatttttaaccaaagagtagtttaacctttttcttatttatccagggcttcttaaccatatctaaacatacaatatttagctaccagtactagaactgttgtttgcatttgttaaaaaagaggcataataggaccttctggtctcctactttttgggt

SEQ ID NO: 808123 - DNA, 515 bp, Homo sapiens
acagtctttagggttttccatatataaaatgatgtcaactgcagacagggacaattcggtttcttcctttccaatttggatgccttttatttctttcttttgccaaatttctctggctaagacttccagtactgtgttgaatagaagtgagaatggacatccatatcttgttccagttcagcttttcctcattcagcatgatgttagctatgggtttgtcatatatggccattactgttttgaggtacatttcttttacatctaatttgagagttttaaatcatgaagtgatgtggaattttgtcaaatgattttaatgcatttattgaaatgactttgactttwatcatttcttcttctaatgtgatgtatcacatttattgatttacatatagtgaatcatccttgcatccctgggattaattacttgattgtggttgatgatcttttcgatgtggtgttctatttggcttattagtattttgttgaggatatttgcatgtatgttcatcata

SEQ ID NO: 808124 - DNA, 545 bp, Homo sapiens
attttaatcatgttgtcattcattcattaggctacctttaaaaacaggcaatacactcatgattaaaaaaccaaagcacactttgggaggccaaggcagccagatcacttaagcccaggagttcgagaccagcctgaccaacatggcaaaaccctgtctctacaaagaataaaaaaattagccgagtgtggcaacatgagtgtgtagtccagctacttgggaggatgaggtggaaggatcgcttgagcctgggaggtggaggttgcagtgagcaaaatcacgtcactgcattacagcatgggtgacagagcgagaccccgtctaaaaaaaaaataaaataaaataaaataaaaacaakgtaaaaagatctaaaggtaaaagtctcgctcctccctatcattatatataaactaatccccggtacctacaccccccaacctcttttgcatagcctcatatctactctaaataatttctcctgtattctgccactgattatctatgcaaataaaataattacatttttaattttattttgtcccatc

SEQ ID NO: 808125 - DNA, 397 bp, Homo sapiens
ggtacaataagtaacttgccagagatcaaacagctactaattaaatggaaaaggctaaatttaaactccaacaatgtggcttcagaaaaccacgttcttaacgccaacagtggtgctctagtgtaggaattgccagagtcagaataaataacagcctaggtttccagagcaggtgatgtttgacctgcaacctaaagggtraataggagtttgcttgactacatagctacaacaaggaattaatttagccaatgcttcacacatgtgtttaatttaattaattcttacaacatctctgtgcagtaggtattagccttgtttcacgatgaggaaactcatactcgaaggagatcaagtaactttctcaggatcactcagtaagaactggagccagaat

SEQ ID NO: 808126 - DNA, 602 bp, Homo sapiens
atgccaggcatacaaggaagcaggacattattgctatggtggttgctatcactacaaagttattgttaaccaatgcactgctttcaaacaaaaatggcaaacagcatagaatcataagggaaaaatatgtaggagtggcaagctggagaaagggacctggggctacagatgtgccagcaaaagtcatgaacacacagagacagccaggaggaaggtagccagtagtggctgtgggtgtgcccactgtcagcacatggatgtaactgacatagaggtcatgggagaaggggctgctggagggagcctgaactgggtctgtgatctccttttgcaacatgctcatagcacttagttcctaagatccatcaccaactctctgtggggaaggatatctttggatctgtttttgggcrcagttcatctagaatagtggggaacatcagccaaagaggcaaaattaagttgtgcaccttttgacagcagcaagtatctccaggcattaaaggcaagttttgtctaatgtagtagttttcctgacaaatgcagtactctactcatggacctcttttttcttttccttttctttttcttttttctttttc

SEQ ID NO: 808127 - DNA, 626 bp, Homo sapiens
ctgtgattcatgtctcctgcttgttctggttactatgactacactttatatatttcaattatctttgcaaagaaccagcttatggttgcattgtttttctctattatttctgtttttattttattcttttggattttattattagaatttctttttgtctscttactttgtgtttaatttctttttctggtttcttaagatagaagataaaatcattaatatgagaactttcttattttctaatatgagtgtttacaattataatttttcctctaagtactgctcagctccattcaacaaatactgatatatttcattttgattttcatttaattcagaatttcttagttttgcttgtaatttcttctttaatttatggattatacttatggattttggaatgtgttgatttgttttcaaatatctggggactttccagatttcaccttatttatgtctggtatactttcatttggtcagagaacattattttgcataagttcactccattccagttaatatttgctttgcgggtcagaatgtggccttagtaaatgttccatgttaacctaaaaagaaggcatgtttaatgtggtttttgagtgcactattctctaaatataagc

SEQ ID NO: 808128 - DNA, 626 bp, Homo sapiens
ctgtgattcatgtctcctgcttgttctggttactatgactacactttatatatttcaattatctttgcaaagaaccagcttatggttgcattgtttttctctattatttctgtttttattttattcttttggattttattattagaatttctttttgtctccttactttgtgtttaatttctttttctggtttcttaagatagaagataaaatcattaatatgagaactttcttattttctaatatgagtgtttacaattataatttttcctctaagtactgctcagctccattcaacaaatactgatatatttcattttgattttcatttaattcagaatttcttagttttgcttgtaatttcttctttaatttatggattatacttatggattttggaatrtgttgatttgttttcaaatatctggggactttccagatttcaccttatttatgtctggtatactttcatttggtcagagaacattattttgcataagttcactccattccagttaatatttgctttgcgggtcagaatgtggccttagtaaatgttccatgttaacctaaaaagaaggcatgtttaatgtggtttttgagtgcactattctctaaatataagc

SEQ ID NO: 808129 - DNA, 576 bp, Homo sapiens
aaaattgtatggtctggtttactaagacagtgaattcagtgcacagttaagagaacagaaaatctataggagaggcatctttacacatttttaccagagggaatgacaaaatgaaaattgatgtctcatttgcattgggcatagaaagctaatttaaggaaacmggatgtggttaattcttggaacaattaaatactcttggagagtaggtggtcataatttgaagaattaattcaatatgaaggaattcaatatgaagaataaatttacaatgaggaattctggagtcaggaaaataaagagaactcacaaaattaaagtaacaagaccctggtcataagtaaaggcagaaagattaaacagaaactttgccatgaataaattattctaataggtgctggtgaatgaagagggagtgaaattagtagaatctagtatattaatacttgacttcaaaatttgaagtgtgaatgatggacacaagctggtatactacttgtggagagaataaagctaagaaataaagctaagaaaatgattttagtgttagatgttgtagatggttgtagacggtta

SEQ ID NO: 808130 - DNA, 640 bp, Homo sapiens
gctcctgagaaaccaatccaactcaatgtaacaagtaactaataatctggcaaaatacacatattgtcaagttcatagcacaaaatacagtcatttaaagaagaaaattgcttaaatatgaaataaacccagaaacacccaggtcttggtctcagatttgtttttactcctcctggaggaaagcttataacttaagtgatgcagcaccagactcaccaagctttccagcactcctgagaatctagtaggtggaatctctacacgtgtttagctatctgataaatgcatagatttcatgtgggtgatctttactttccaattaaaatatatatatataaccctgttcactaatacttttaaaatttttttaaaaatcaaagaatatgaactyttcggcaatgtggccaaaatattttcacatgttaacagctgaaatgggcttgatacatcatatagttaaaaactcactgttttacagatgaggaaattgaggcatgccaaagtgaagatatgtattgaacctctcactgtttttaaatagaaagccaatattaaggcatttttccaatgctcagtttcaccacactttataattttggctcttgaatatgttgtcagaacacaggcagcctaatcacat

SEQ ID NO: 808131 - DNA, 619 bp, Homo sapiens
caatttcctattataggagtttagtttttatccatttgtcctttttataaaacaaagttatgacaaagattatttacacaaatatcaaattctacattcgtactttttatgtaaaattcctctaagttgaatttgtgggtgttatgtatgcatatttttaaggttttttgatacctgttattaaattgctctgtagaaagtttgttgttgttgttaaarcagtttcccacctgtgttgttagagggtgcctattgttgccaaccttgaaaacactggatattcacacttttaaatatcaattgtgtaggtaaaaatggtgcttcattagaattttttaaatcagcatcacattctttgagataattaaaaaacaaatttaaccacataggctttctctattagtcataggtttatcaaccccattgtaatgacgaatctttgttaaatataatttagacacggtaaccactgagccacactttccctttatgctaacttctatcttacctccttgattaactctggactttctgacttagaacttgtagagtgtctgtgtgtgtgtgtgtgtgtgtgtgtgtgtgtatgtgtgtgtgtgtctttgcagcggtggggtgt

SEQ ID NO: 808132 - DNA, 638 bp, Homo sapiens
cagagaactgattggtccattttacagagagctgattggcccgttctgacaggtaactgattggtgcatttacaatccctgagctagacacagagtgctgattgctgcatttacaatcctccagctagaccgtaaaagttctccaagtccccaccagattagctagacacagagcactgattggtgtgtttacaaacctttagctagatacagagtgctgattggtgcatttacaaaccttgagctagacactgagtgctgattcgtgcatttacaaaccttgagctagacacagggtgctgattggtgcgtttacaaactttgagctagacacagagtgctgattggtgtgtttacaaaccttgagctagacacagaatgctgattggtgtatttacaatcctttagctagacataaaagttctccaagtccccaccagattagctagatacagagtgctgactggtgcatccacgaacccrgagctagacacagagtgctgattggtgcatatacaatcctccagctagacaaaaaagttctccatgtccccacccaactcaggaacctagctggcttcgcctagtggatccggtgccagggccacgggtggagctgcctgccagtcccatgttgt

SEQ ID NO: 808133 - DNA, 613 bp, Homo sapiens
cagggctgtggagggaagctgctctttgcttcttccagcctctggtgggctgcagcattccctcacctgtggccacatcactccagtctgcttcaccttctgtactttgtgaggtgtcaaatctccctctgcctcttataaagtcatttgagtggcatttaaggcttacccagataatctaggataatctcttttatctcaaaattttttataacatcttcaaagaccattttccttataaggtagcattcacaggctccagagattaggagccgatgtctttgggggccgttttccaccatactacagtctgctttagagctgttagctcaacaagtttagtctttttcaaaacttagtgatggtgtctgtggccatcgttttattctgaaagggcagtgggtgaagcattctaccttggtggtaggtaaactgctcagcttcagacgctattcycttggtggcctgagtgagggcattaccacctgagggtacttgggaaagctgttgaattgggtgaagcaaaatgcatccaagcttgaccctatgaaagctagagaaggaaagtaggaatgataatatcatggacatttgtaattattttaggagtata

SEQ ID NO: 808134 - DNA, 643 bp, Homo sapiens
tgggtagtggtgggcttttagtgtactcatcacccaaatagtgaacattgtactgaacaggtaattttcaatccttatccctgtcctccaatcccaccttttatagtctcaaatgtatattactctattctgtatgttcatgtgtacccattaccatctccaacttataagtaagaacacacggtatttgactttgttatttcacttatgataatggcctccagtttcatcatgttgctacaaaatacattattttatgttttatggcagagtagtattccatggtgtgtgtgttgggggtatgtgtgtatatatgagaaaatgtgatatatccaatcatctgtccaatggacatttaggttgattctrtatctttgctattatgaatagtggtgtgataaacatgtaagtgcagatatcttttcgatataatgatttttttcccctttgggtatatacccagtagtgggattgctgggtcaaattatagttcaattttaagtttttggagaaatcttcatagtgtttttcatgaagttgtactaatttacattactacccacagtatataatccttcccttttcccttcaacctcaccaactcttattttctgacttttaagataatagttcttctgactta

SEQ ID NO: 808135 - DNA, 643 bp, Homo sapiens
tgggtagtggtgggcttttagtgtactcatcacccaaatagtgaacattgtactgaacaggtaattttcaatccttatccctgtcctccaatcccaccttttatagtctcaaatgtatattactctattctgtatgttcatgtgtacccattaccatctccaacttataagtaagaacacacggtatttgactttgttatttcacttatgataatggcctccagtttcatcatgttgctacaaaatacattattttatgttttatggcagagtagtattccatggtgtgtgtgttgggggtatgtgtgtatatatgagaaaatgtgatatatccaatcatctgtccaatggacatttaggttgattctatatctttgctattrtgaatagtggtgtgataaacatgtaagtgcagatatcttttcgatataatgatttttttcccctttgggtatatacccagtagtgggattgctgggtcaaattatagttcaattttaagtttttggagaaatcttcatagtgtttttcatgaagttgtactaatttacattactacccacagtatataatccttcccttttcccttcaacctcaccaactcttattttctgacttttaagataatagttcttctgactta

SEQ ID NO: 808136 - DNA, 612 bp, Homo sapiens
tgtattaatttttggtttagtttgtctccttttttttagtatcatgacatgcaatgtgaggttgttcagttgagattattcttcctttttgatgtatgcatttattgctaaaaatgtcaccttataactgctttttgttttttgctgtgccccataggatttagaatgttgtgtttccgtttttgtttatctcaagaaatttctaaatttctattttcttcatttacttattggttgttcagaagaattttgtttaattgttatgtgtttataattttttccaagttcctctyatgattgatttctagttttatacaattgtgttaagaaaatatgcttgatatgacttaaatctatttttgtttaacttttattttaggtctgggggtacatgggaaggtgtgttatataagtgaagttgtatcacagaggtttgtcgtacagattatttcatcagcaaggtattaagcgtagtacccaatagttatcttttctgttcctttcccttgttccactatctactctaaagtggaccccagtgtctgttgtttccattttaaagttcataagttctcattgttgagctgccacttatgagtgaaaacatacggc

SEQ ID NO: 808137 - DNA, 467 bp, Homo sapiens
caagctcaggggcacaggtggttttctgtggctgcagagtcccaggggacagcagatgaaggcgaagctagagtgctcagcagacaccaaaggggccttgagtgccaggctcaatgtcgacctgagcccagtggtttcatcagcctccaagtgccccgctgggtggtgcagccttcctgccccatctgtcacccatcctcacgastgcctcctccccgactcacattctgtctccctctggcccagcagagatcagcgatggtgtagaggtctccgatgtgctctccgtatgttcagacaacagttatgacacatatgccaacagcaccgccacccctgtgggcccccgagggggtggcagccacaccaagaccctcatagagcggagtgggcgttagctgaagacatgtctgtcccacctgtacctgacacagaagctggggagcctaggagagctggtggaagtg

SEQ ID NO: 808138 - DNA, 599 bp, Homo sapiens
aatagtgttgcctaggttttcttctagggtttttgtggttttaggtctaacatttaagtctttaatccatcttgaattaatttttgtataaggtgtaagggagggttccagtttcagctttctacatatggctagccagttttcccagcaccatttattaaatagggaatcctttccccattgcttgtttttctcaggtttgtcaaagatcacatagttgtagatatgcggcgttatttctgagggctctgttctgttccattgatctatatctctgttttggtaccagtaccatgctgttttggttactgtagccttgtagtatagtttgaagtcaggtagtgtgatgcctccagctttcttcttttggctcargattgacttggtgatgtgggctcttttttggttctatatgaaccttaaagtagttttttccaattctgtgaggaaagtcattggtagcttgatggggatggcattgaatctgtaaattaccttgggcagtatggacattttcacgatattgattcttcctacccatgagcatggaatgttcttccattggtttgtatcctcttttatttcattgagcagtggtt

SEQ ID NO: 808139 - DNA, 562 bp, Homo sapiens
ctgcaaagggcctcttgctccacagagagggcaggatccctggcttctccccccaaccctgtgcagctgcaaccacccaaaccacagctgcagactcaggcatccctccactcttgaggtcccaggaaggccccactgaccccacaggcttggaaatgcctgctctcactgcctggcttttccctgctgtgggtgcccactctgatctcagagcaaagtcagtaccaagtccaggggctatgaatggcagcaggatgtagccagattcctgggcagaagggtgcaccccatgttcaggccagggagggccagaagacttgggcttggctgcgattcccactgaccagagggagatcttgtggcgtmttttctgggcctacccatggctgctcatggaccaatcaccatgcgctttctcccatctgaggcccataaaagccccgtgctcagagagagcttggcagatgatgggacgactaggtgcatagagcagctaccctctctgctgatagcaggagacatcaggatgaccaccaggagagagaagttacccactcaaggg

SEQ ID NO: 808140 - DNA, 647 bp, Homo sapiens
atttctcagtagaaatcttacacgataggagaggatggcctgaaagaaaacaaagaccaaatggacctaacagatatatacagaacattttatccaacaattacagaatacacattcttcccatcggcacataaaacattctccaggatagactacatgttaggtcacaaaacaagtctaaacaaattgtaaaaatctaaatcacattaagtatcttttctgaccacaatggaaaaaaagtagaaatcaataacaagagaaatttttgaaactgtaaaaatacatggaaattattttaacaacttggtcctgattgaccattggtcaatgaagaaattaagaagaaaaaaaaattattgaaacaaatgaaattaaaaaacacatactaaaacctatgtgatacagcaagaggaatgttgagagggaagcttataccaataaacatttacatcaaaagtagaaagatttcaaataaataattatgcayctcaaggaactggaaaaccaagaacaaaccaaagcccttctatttctcaacagaagacatacaaatagccaacaggtatatgaaaaaatgttcaatatcactaataattagggaaatgcaaatcaacaccacagtgagacattatcttacccctgttaga

SEQ ID NO: 808141 - DNA, 535 bp, Homo sapiens
attcagtcaacaacggacctcatatatgacagtggccccataagattataatggagctgaaaatttcctatcacctagtgacttcgtagccgtaatattgtagcacaatacattactcgtatgtttatggtgacacttctgtaaacaaacctgtacagccaatcatataaaagtatagcacatacaactacagataatacataatacctgaggatracaataaacaactgttactggtttatatatttactacactacactttttattgttattttagagtatatacattctattatatatttaaaaaattaaatgtaaaacagcctcaggtagtccttcaggaggtattctagaaggcattgttttcataggagatgaccgctccatgcatgttatccctgcagacactgcagtgggacaagatgtgaaggtagaagacagtgatatgaacgatcctgaccctgtgtaagcctaggctaatgtgtgtgcttgtttcttagtttctaacaaaaaagttaaaaaaaaattaaaata

SEQ ID NO: 808142 - DNA, 632 bp, Homo sapiens
taaagtaaagaacgtcagcagtggcatttctattcctctaaagggtattttagacaataattttggatagccccacactgcatgaagcagggaactgcatgcccttcctgctcgggagcccagccctgcctccagcagctccagcttcctttcctctctgtcatggtgctgccttctgatgagcaagaagttagwcccgactggccctcggcaagctggggcttctaagagaagaagggctgggctgccccctgcaaatcctggataatgccactcagggaacgggagaagctgatgcgcaaaatatgccataccccgctgctttcctctcactcagaccccaagtcaggtcggaagcagctcttccagacctcccccaaggcaagttgctagaggataaggcttttatgtgtttcctgataaatgtgtgggagaatccagcctccctggatactggagaagtctcctatctggaattgcagtgttactgctgatccagcctccctggatattggagaagtcccctatctggaactgcagtgttactgctgatccagcctccctggatattggagaagtcccctatctggaattgcagtgttactgctgaaacatgtagtttctgagccttt

SEQ ID NO: 808143 - DNA, 615 bp, Homo sapiens
gtatttctttgctcttaacctaagttcagattttggtattctgttaccatgtctttcctacagaaattgttctacccagatgaagatctgatgttaagtggtaccgacattaaattccagcgtatgtaaaggactagcaacactgcacactytttaaagaccttgctgaaaatccagactcccctaaccaaaagtctttgtatactaaaccagcacagttattctagaggacaacagtagtacctgcggactgttagatgcctgtggtctgcagagccagaatacaatatttgatttggctcttaaagagagtgctaatttccagagcattaaatgggggcctatgtttgttgctaaacaattagacacacgttggcttgcattctcatgcaagccctgcattaatcaaagcctgttgtaatctaactgctgattgttttgaaagatgaggagagtgcatctgtgttccagtgaatcccatgcattcaaattgcccttaaaacaatgaaagtcaagtcatggcagctgaaatgaagcagctttgtacctgggaacactaatatgcataagcatacccctcatatggatgtgcttggtggggaaatgtttttgtct

SEQ ID NO: 808144 - DNA, 591 bp, Homo sapiens
tcccttaacccggcaggtttcctaataggggatctaagtcttaattaccatacaaaggtccaaccagacctaggaggaactcccttcaggacaggacgatagatggttcctctcacataattgaaggaaaaaaaaaaagccatctataccaattctaagttaatttggactaaacaacatctattaatagcaacagataattaaaatctcaaacttaaaaggttttcaacaaaagtaaagtttgctaaaagttaacagtgtaacatgtattatagtaacttctaatcttgtggccttagacagtctagttcacmgatataaaggaagttcgctttggaaaaaaatggttatcaccttcaaaaaaaagggagaaaaaaagggaaaaaaaattggggggcagaatttatgtaaaaagaatgttatatggtaaattcttgttctgaaataaattaactggttgtttaaagaaagaaatgtttgcaatagaaaattgaggcatagtgtagaattgtctgcgaaagtcatgaaagagaaaaaaagttataaaaaaagaatttatgcaagaaatgctgtataatttaaaagtaatta

SEQ ID NO: 808145 - DNA, 503 bp, Homo sapiens
ttctccacgtgtcggagtaggaggaagacagaccgcgaagggggaggtgctacatactttttaacaaccagatctcatgagaacttactcactatcatgagaccagcaagggggaaatttgccccatgatccaatcacctcccatcaggtccctcccccaacactggggattaaagttcaacatgagatttgggtgggcacacagtgccaaaccacattaaccactaacaacagtaatcatagctaccrctcattaagttctttttgccaagtgctattctaagtactttttacttatctaagcctcataagaaccccataagataggtcctattattatatccaatttaaaaatcagaaaactgaggcacacagaggttaatcaacttgtacaatgttagagaactagtcagagagttttatcccagggagtctgctccaaggttgttgcagtaaccttgtctcaagtctttttaagatttctctataaatttttattagct

SEQ ID NO: 808146 - DNA, 503 bp, Homo sapiens
ttctccacgtgtcggagtaggaggaagacagaccgcgaagggggaggtgctacatactttttaacaaccagatctcatgagaacttactcactatcatgagaccagcaagggggaaatttgccccatgatccaatcacctcccatcaggtccctcccccaacactggggattaaagttcaacatgagatttgggtgggcacacagtgccaaaccacattaaccactaacaacagtaatcatagctaccgctcattaagttctwtttgccaagtgctattctaagtactttttacttatctaagcctcataagaaccccataagataggtcctattattatatccaatttaaaaatcagaaaactgaggcacacagaggttaatcaacttgtacaatgttagagaactagtcagagagttttatcccagggagtctgctccaaggttgttgcagtaaccttgtctcaagtctttttaagatttctctataaatttttattagct

SEQ ID NO: 808147 - DNA, 625 bp, Homo sapiens
gtgtaagacaattcttgacctcattctttaaacaatggatcaatttgaaaactagatggcattgctgagcttccatgaatagttaaatacaattaatacatgtgttaaaaataatttgaggaagatattttgaagatccaaaggcaagcacaaatataaatcctaactgttggccttccttcctgcatacagtctagtcttcaaaagttgcccagagttatcccatctcactcacagaagtcagtgtccttttgatagcagacaasgcctgcattgtctgttcctgcctgaattctaaacccattgcccctcactacctaacttctgacttctctggacacctttttctgtcttgtttccttcaggcacacttgctgccctttctcaaaaaaccctttttgcctcaggccatggcacttgctgttccctctgcctgaaactctcttctaccagacatttacctgtataggctattcccttacctcctttaggtctctgttcacatgccaccatatcagaaacgtctttcctatttctaccagttttaacacaacaaatttttaaatattttacctttatatctacagctctacatgctactagtaggaattaagaaacaaaggaa

SEQ ID NO: 808148 - DNA, 625 bp, Homo sapiens
gtgtaagacaattcttgacctcattctttaaacaatggatcaatttgaaaactagatggcattgctgagcttccatgaatagttaaatacaattaatacatgtgttaaaaataatttgaggaagatattttgaagatccaaaggcaagcacaaatataaatcctaactgttggccttccttcctgcatacagtctagtcttcaaaagttgcccagagttatcccatctcactcacagaagtcagtgtccttttgatagcagacaaggcctgcattgtctgttcctgcctgaattctaaacccattgcccctcactacctaacttctgacttctctggacacctttttctgtcttgtttccttcaggcacacttgcygccctttctcaaaaaaccctttttgcctcaggccatggcacttgctgttccctctgcctgaaactctcttctaccagacatttacctgtataggctattcccttacctcctttaggtctctgttcacatgccaccatatcagaaacgtctttcctatttctaccagttttaacacaacaaatttttaaatattttacctttatatctacagctctacatgctactagtaggaattaagaaacaaaggaa

SEQ ID NO: 808149 - DNA, 588 bp, Homo sapiens
ctctcttactttattcaagtctctgtttaaatatcacctccaaagacaggctttccctgaccatacatactaaagtgttaccttccccaacccacttgtctctagcccccttaatctacatcattttgctttacagcatccttatatgtattagaaataaagtttaattcattttcaatatttggccaggatctgttatttgccttttaccttctggtaggcttaacaaacagatgcttactttaacactgttctgacatcccggaaatatataatattaatatttgtataaggacagatgttactaccctatttaataagtgtaacaatgttagtamtgtcaacaaggcatgacatttagatttatttaaaaatattcgctatatgctacttgaatgaaaaccccttatgtgctctataggttgaaattatcttagtctgaatcattactatgtgtttagtatagcaagagaagaatttaaagaataattattataaaaattgttatttttatgttaaagatttcagaacttatggttcaagaaatagattgataattaatataaatattagattataatagcaaga

SEQ ID NO: 808150 - DNA, 588 bp, Homo sapiens
ctctcttactttattcaagtctctgtttaaatatcacctccaaagacaggctttccctgaccatacatactaaagtgttaccttccccaacccacttgtctctagcccccttaatctacatcattttgctttacagcatccttatatgtattagaaataaagtttaattcattttcaatatttggccaggatctgttatttgccttttaccttctggtaggcttaacaaacagatgcttactttaacactgttctgacatcccggaaatatataatattaatatttgtataaggacagatgttactaccctatttaataagtgtaacaatgttagtaatgtcaacaaggcatgacatttagatttatttaaaaatattcrctatatgctacttgaatgaaaaccccttatgtgctctataggttgaaattatcttagtctgaatcattactatgtgtttagtatagcaagagaagaatttaaagaataattattataaaaattgttatttttatgttaaagatttcagaacttatggttcaagaaatagattgataattaatataaatattagattataatagcaaga

SEQ ID NO: 808151 - DNA, 605 bp, Homo sapiens
tattaagcactttctctgaccacaatggaataaaactaggaatcaataacgagaaattttggaaactacaaatacacagaaattaaatatgctcctaaatgactagtgagtgaataaggaaattaagaaggaaattgaaaaaccttttgcaacaaataataacggaaacacaacattctaaaacctatggaatatagtgaaagtagtaataagaggaaaatttatagctataagtgcttacrtcagaaaagaagaaaaacttcaagtaacagaaatgagtagtatcaacatgaacaaaaaagatgtctacccagagaccccatctgaaggtcaccaactccaaagaccaaaggtaggtaaatccacaaaaatgaggagaaactagcgcaaaaagatggaaaattccaaaaaccagaatgctgcttctcctacaaaggatcacaactccttgccagtaaggaaacaaaactggacggagaatgagtttaacaaattgacagaagtaggcttcagaaggtgggtaataacaaactcctctgagataaaggagcatgttctaacccaatgcaaggaagctaagaaccttgaaaaaaggttacatgaat

SEQ ID NO: 808152 - DNA, 605 bp, Homo sapiens
tattaagcactttctctgaccacaatggaataaaactaggaatcaataacgagaaattttggaaactacaaatacacagaaattaaatatgctcctaaatgactagtgagtgaataaggaaattaagaaggaaattgaaaaaccttttgcaacaaataataacggaaacacaacattctaaaacctatggaatatagtgaaagtagtaataagaggaaaatttatagctataagtgcttacgtcagaaaagaagaaaaacttcaagtaacagaaatgagtagtatcaacatgaacaaaaaagatgtctacccagagaccccatctgaaggtcaccaactccaaagaccaaaggtaggtaaatccacaaaaatgaggagaaactagcgcaaaaagatggaaaattccaaaaaccagaatgctgcttctcctacaaaggatcacaactccttgccagyaaggaaacaaaactggacggagaatgagtttaacaaattgacagaagtaggcttcagaaggtgggtaataacaaactcctctgagataaaggagcatgttctaacccaatgcaaggaagctaagaaccttgaaaaaaggttacatgaat

SEQ ID NO: 808153 - DNA, 509 bp, Homo sapiens
taacattattgcttctattaagtaatagattagtccaacgtaatgttaggagttcagtagagtgattaggatttaaaatagttagatgttgatcttgaatgctttcttaattggtggctgcttttgggccaactatggtggtaataatgtttactctctggaggaaggttatttcctagggtctaaagatctgtccctcttcagactagcagttaaacttacaggggactaagtaattctgtgggtacgtagacggctaggcttgatgtggctagtataaatataagscctttattaaaattaattagaggatctggtatagggagttgtctaagattctatcttggacaaccagctatcaccaggctcggtaggtttgtcactgctactcatgaatcttcccactgttttgccacataggtaggtgtgctcttcagctgttcttgggtagcttgtctggtttcaggggacttggctatgggtctctgtgtaaagttatttctagttaa

SEQ ID NO: 808154 - DNA, 610 bp, Homo sapiens
ccttcttactatgcaataggcaagcattcaatgctttctatgcttttctatgccttacctaaatttcagtgatagtatgccctatttgaagaacttcatgtttctatctctcatccaaatgaaacgatatctcagtctgttacaaagaccttactaataaaggagtaagcaaaggtcagagcctccagctacaaatcattgaggcaatgccatgcttgtcacattggatattaaagggtttgcscatagtagacactgagcactttgaggacggggccatgctttcttcatctatatatcaaatctgtactagtctctgaggaaggtttaaacgcaattctttcaatggtccagggattgattcaaagccacgtagtatctgagaggagtgagtgtggaaggctgggtgtggagctcctaattgaactacttcctttattgcaagggctctggaaggtggttccacattcatcttgttttttctaaattctttttcttctccctgcactttgaacaatcctttccctgcttgtgcctgcaaattttgtagcttcctctgatcaaacgttgttgtctttagaagagagaaagggagattctggttttgatg

SEQ ID NO: 808155 - DNA, 610 bp, Homo sapiens
ccttcttactatgcaataggcaagcattcaatgctttctatgcttttctatgccttacctaaatttcagtgatagtatgccctatttgaagaacttcatgtttctatctctcatccaaatgaaacgatatctcagtctgttacaaagaccttactaataaaggagtaagcaaaggtcagagcctccagctacaaatcattgaggcaatgccatgcttgtcacattggatattaaagggtttgcccatagtagacactgagcactttgaggacggggccatgctttcttcatctatatatcaaatctgtactagtctctgaggaaggtttaaacgcamttctttcaatggtccagggattgattcaaagccacgtagtatctgagaggagtgagtgtggaaggctgggtgtggagctcctaattgaactacttcctttattgcaagggctctggaaggtggttccacattcatcttgttttttctaaattctttttcttctccctgcactttgaacaatcctttccctgcttgtgcctgcaaattttgtagcttcctctgatcaaacgttgttgtctttagaagagagaaagggagattctggttttgatg

SEQ ID NO: 808156 - DNA, 692 bp, Homo sapiens
aggtccagaagggtccttgctccaggtagatggtgggggatgcagggacttcagctgggttgcctgcttctgcctctgggcagtcataacggataagccttccagtccaagaaagaacatgaaattgagcaatgccgggtaacggtgcctctctgtggctctgtggggtgtggagggctagactcaagtcctgccaggaaggatgacccaccggaaccaaggaggggtgacgtgggcacctcttggtcatgtgaacactgtggggcaggtagtggggtgagggaggcattgtcacagtggccatgggtacccaggccatcctcaggtgctttctcccaagagggagtggaacttagaagctgtcagcagtgatagggtcctcaggcagccgggcctgggtgctgggatgctggctggggaaggcagcttaytctgcacctcgcatcctcagtgagaggacgcagtgtcattttagaagggttttccagggaaaacaagaccccttccacatggaatgtacacatggatcacaagaggtgtccttgtttcagaaatattcaaatgagtagttcaggaagtagggaaggcaaatcccgcagacaggcacttaggggaaggcagaggcggcagccctcagccagctgtgcatgcccaggactgcagaggatcctggcgggcaggcagagaacccc

SEQ ID NO: 808157 - DNA, 639 bp, Homo sapiens
ggccacctttgattggccaaaaacccagtgattggcacaagagtaggctacagtctctttacagttttatctaggttatagttcacaatgcacagagaaatctttaggctgaacttaaaatatataaggaggcagctttaggctaaacttgattatttaacaatgtattgatttgctggctggatggatagaaaggtggaaagataagttggcaagctggatttctggttccatgtcttgtgctcttcctagggcaccttgctcttgtgggctcagaaactatgtgttcctatgacagaccttcagatacccctcagggagcacttgctgtcctccatgggtgcagcacttcctgtctgtggctactcgggtgtctctctctcatttttccctgccagactctcaacccttaaagattttwgtccttctctttaggaagaccaaaaatgaatgagagtggcatggatttgaaggatgagatgactgaaaggaagagctgactgatttgtttagattgagtagtgcattgaggacactggtccccaggtgttggtaaatagaagccccttaagcagaggagcagcaggcttttcctcctctttcattatggtgatgattattatttttgtggttcccatg

SEQ ID NO: 808158 - DNA, 630 bp, Homo sapiens
ttcccactttacctccattctagttaatggccattcttgctagggcccatttcccagactagtaaactgagatacaaacagaaataataataagcaactataatatttaaagtggctcacgtctgtaatcctactactttgggaggcagaggcgggtggaatcctactactttgggaggcagaactctgcctgagctcagagttcgagaccagccggggcaacatggtgaaacccccatctcgtctctaataaaaacacaaaaaattagctggacgtggtagcatgcatctgtagtcccagctactccagagggaggctgaggcaggataattgcttgaacctgggaggcagaggctgcagtgagccaagatcacgccactgcactccagcctgggtgacagagcgagactctgtctccaaaaaaaaaagtaatatctgctttgggaatgacttycaggtggttatcttagttgacgctcacaaattctcgatgaggtgaatatggtagatttcatggtgatttactggtgcggaaactgcgccgcagagagagaaagtaagtcacttggttacatctgcaatatgagcatggagttgactcgcacattcctgctgctgtcttattccca

SEQ ID NO: 808159 - DNA, 639 bp, Homo sapiens
agtagcaatttttgcaaatatcatccattctaaatgcaactattaaaactgtcagcaatttcatatttcaaacatctctccatgctgctcaaaggactaccaataatgtcattacttaaaagtccccaaggagagcagttcttttaatcttactgtccacagctccttgaaagctgaatcaatcccctaggtaccatgaacatcagaagctctgaatgattgtgatcctaccacacatatgctgatgttccagctgatacaatgcacctgtgtatgtgtctatgtgtgtgtgtgtgtgttgtgtgtgtgtgtgtgtgwgagagagagagagagagagagagagagagaaagagagaaagagagagaaacttctttggaaccatataagatttctgctaacctattacagaggacactaataaagggaaatcaggtttccaagtggacaataaagtagcacaaagatatcaatggtcattgaggaagttaaccagacaagagaagagagatctttcaaagatgaaccacaggaaaatgcatttgcacagggatcaggctataataaagaaagaggtgctggaaaccagcttctactttttacttagtaaatgagacatattttgacagatgtaatgagat

SEQ ID NO: 808160 - DNA, 569 bp, Homo sapiens
aattttaggtaaatattgaacctggttaacctgttagtttggatatttcactttttgctattttcagagaagggtataggcttacatgtgttaggggctcattctagattcaccccgcctcaacttttaacctcaagtggaccagaaaaaaagtcaaggaggtgcccaccagcaagtcaagaaggtgctgctaaccacacccagtgggataaagggttccaggttgacgcaaggctgtgtatgcccagatatgagagcgctgtggagttcaggcatctcacttcctgcactgcttcaaattaaacccctgaatgcaccgttaagtgctacagcagacctcttgctatgtgtgtgtgcrtgagacaggagatgctaaggaaatagggaaagacagcctctgtttgttttacacaaatagctaaaaattggacttgacttatgcaattttgtgaatcgccctataaggaaaataccgcaaacctttaatgcacatactgctttttttccggatttgtgcttggtgaaaggggaaaataaaacaaaaccaaaaacaatgaaatctgactaca

SEQ ID NO: 808161 - DNA, 570 bp, Homo sapiens
agatggggttgcactatattggccaggctagtctcaaactcctgaactcgggtgatccacccgccttggcctcataaagtgctgggattacaggtgtgagccactgtgcctggccagcaatgaacttctaagagaaatcagatcaagccctcaaacattaatttacagtcaagagacaatctctgaattcagccctccccgtcccccagcactggtattgacatactgcagaccttctattgttggtggcaaatatgagcaggttaaggcacttttcgggattagagaatcttcaaactcaatatgcataagaacaatttatcctgatgaccagatakaatagattctgttcattaaggaaactgcttgccatttgctactatttaacccattctttctattgtgatcataagaagaagaaggccaaaggatcattaatttccttactttggaactttggggtccttaggatagcgctgtgtatatggcaggcactcattactattgttttgtagatgtggctggtgataataatgagaaggactgggggaaaacgaagtatgctctcca

SEQ ID NO: 808162 - DNA, 642 bp, Homo sapiens
acctgtagattgttctggatttgttagcatctctcaaaataagatcaacttgatgctgattaaagctgaaacaccccacaagcctagcatgctgagtgtctgactctagggcccctgaacaaattgttttcccttttcatgmtgatctttgtgaactctttggttcagcgtggctcgcccatggggacagggctggaaatggaagcacaggtttcctcttggcacctagctgtcagaactgtccccaggcatcccagcaggagggagacaaacaagcattctcatccggcaagctgatgtctgcatatgcaaatggactgaaggaccctcagccttgaatcctattcagaaacagtctacagagtgcctacctgtgccaggtgcattcacagaaatgatttcatttcatacaacagctctgtgaagcagctaggtattatttacctaagatttgttataaggacgctcaagttcagggagggtaaacaactcacccaacgtcacacatctagctgtggctgagacaggtctcaatcgatccagaaagtttatttaaggatgcatgcccaggaagtaggtctgtgcctttttccaaagatgattttgagggcttcaatatttaatggggaaagggacgatgtt

SEQ ID NO: 808163 - DNA, 510 bp, Homo sapiens
tctcacccatagctctttgtttgtttatctgagaacaaagtcaaaggccaaggaggccccactctcctgccacgggggaaccagtgtgcaagctctaggcacctactagagggtacagaggtggcctccacagtggactcggagttctttcccccttcttcggcaatgaggggtttcttcctagggcctattttcctgcagggttagagttaggttttagagcccttttccttaaccctcttctytacttcctatcccaattcatttatttaaaaaaaaaaaaaaaaaaagctttactctctacttatttatgttgacatgaagattaaatacaagctcctacatgcaagtatccaacagagtggcagccacaaagaggtatttctcctccctcctttccttcagcccttggcgttcactcactttaccccagggaccccatcacttttttctccagccggagactcttaccctgtccctggctttgttcctatttgataagatattcaa

SEQ ID NO: 808164 - DNA, 549 bp, Homo sapiens
gccgttgccaagagcccctgcatttcaggctctgggtgcactcctatgagttaccctgcttcaaggagcagaaccattgaataaaagattgctgtctaacaccattggctgacccttgaattcttttcttgggaaagcactaatttgggagctcacctccaggcaggaggatggggtctggagccaggaaacctaaggccgatttacactgacttcctagaactaaatcaaaaggaaaaccccaactttccgtgcccaagtaacaaaaagaccagaggctacsccctttgcaaccctctccttttctgcatggcagatgaaaaactgaaagtatctctgattgctcccctcccacaatcaggctggttgtgggccaggtcttcatttgcatagagatataactttataacttcacttcagcctctgattggtcactttccgcaaccaatcagactgatcatgagccactacttcatttacatagggtatataccaagtaaccaatgggaaacccctagagggtatttaaaccccagaaaattctgtaac

SEQ ID NO: 808165 - DNA, 625 bp, Homo sapiens
gggagttattgtttaatggtagaattttagttttgtgaaatgaaaaaagtcctggaaacggatgatggcagttgttgcacaccaatgtgaatgtccttcataaggctgagctgtacattcagagatggttaatatggggaattgtatgttactttattttaccagagttaaaaataataaaaagaagtctatataaatatatattcacttctcttaacttcttttmtaagattacataaagcagttattataacattgtattattggatttacaacataatatagctttaatacatatgataattgtacaaaggaagctgaggggatgaaggtgtactggaacagggtttccataatttaccagaattaagttattttgatgtagactgtaattactttgatgtagtctgtaattaattaagatgtatattgtaatcccttagcctgacactaccaaaagtacaaatatacagtttaaaaaatcaagaggaattaaatattacactaaaagtacctgtttgatacaaaagaatataataaataaagaacgaggaacaaaaaactcatgagacatatagaaaacacatagtaaaacagcaaatgtaaatttaaccatgtcaataat

SEQ ID NO: 808166 - DNA, 672 bp, Homo sapiens
attttggggaaagcaggacatgatttatcaggaaaaggagctgcggtaaataggccattagtgtgaggctgtatgtttacctggctgggaggctgtgtttatggttttgtagcatgtcagaggttaaggtttcctctggcatccttgtctttgtctttcttgttgtctttgagtgtccctagaggctccttcttaaatagagtctgaggtttacagttatttctgctgtaatcccgttattatataaccagggattacataattatataataatttaacacaatatgggaagcctatattgtggtgataagtgcgtgggaggggaagtgttctatatttgcaagattagttctcagtgtttagtgagcctttccctctgggctgtgacctttctgtgtgattctcagcttcccccctcattgaccttaggaaagacaggaaggctagaggggagggtctggagttgggtattycccttctcccaggctggcttggccctggcaaaatagtttcccttgagggtgggctcttgttaaggagaacagaatgctctggacatatttaaaaatggctactttccccttctcttttcattgtgaggagctagtagagctcctaaaggcaaaactcatgaaagtgtggggatccccccaatgactgggccctggactt

SEQ ID NO: 808167 - DNA, 627 bp, Homo sapiens
aaagggatatactggttcatagaacatcttatatttgagaggttctgaagaaagaccactgataggaactgtgggatggagtggccgaatgcccttgaggctttgaagagaggaaaggcaggaccagggcagccaatctccaatttaaagcaaaggagagtcagcatgcctccttggtggccttaaagagactcccatatgcagcaggagggcagaacaagctgaagaccagacccaggacttaactgttagagaagaagaattctggagcaggctgaatctcagaccagatgagtctcatatgccaaagtcagggtctaataggaaaagactgagacccaccatctgggatgggaamagagagagaaatgtgttggaaggctttgagtctccagattccccaaaacttctggtcctgccaaaatggcctttccccgtttctggaagacagaaacccctccttgcttgaagaacaggcagatgcttcaaatgaagcaggtattctacaagaagttcttgacttcctcagcagctttcccatccacagatgccccatttgtcccttcttatcacttagaccaataagagaatcaaagctcagcatatccccctaggcaagcattggtt

SEQ ID NO: 808168 - DNA, 626 bp, Homo sapiens
ctctaagatcaacataaaagtatcaagcaagtaatatttcaaacagagttttcaagagatacatttttttcagcctgtataaattgtcttctgagaaatgtgcatgcagataatagaatacattatgtaacaataaagaagcagccacaatttgccagtcccacccctggatttttaaagagaaggcagaaaataaatagttagatgacatgttagggaaattccctatcagtgaggtgtaacttgtccacaggtctcccggaacacctgatatcrtttggctctgtgtccccacccaaatctcaccttgaattgtaataatccccacatgtcatgggggggacccagtgggaggtaattgaattatgggagtgggtttttcccatgatagtgaatatgactcatcttccaccataattttgaggcccccatagccatgtggaactgtgagtccatcaaacttctttcctttctaaattaccaagtcttgggtatgtctttatttgcagaatgagaaccgactaatacaacatccttttgtgcattgaggagaattgactggccttgtttctcactaaaacctaagcctccccagggggcaacgttgcttatcattgtagccctcc

SEQ ID NO: 808169 - DNA, 626 bp, Homo sapiens
ctctaagatcaacataaaagtatcaagcaagtaatatttcaaacagagttttcaagagatacatttttttcagcctgtataaattgtcttctgagaaatgtgcatgcagataatagaatacattatgtaacaataaagaagcagccacaatttgccagtcccacccctggatttttaaagagaaggcagaaaataaatagttagatgacatgttagggaaattccctatcagtgaggtgtaacttgtccacaggtctcccggaacacctgatatcatttggctctstgtccccacccaaatctcaccttgaattgtaataatccccacatgtcatgggggggacccagtgggaggtaattgaattatgggagtgggtttttcccatgatagtgaatatgactcatcttccaccataattttgaggcccccatagccatgtggaactgtgagtccatcaaacttctttcctttctaaattaccaagtcttgggtatgtctttatttgcagaatgagaaccgactaatacaacatccttttgtgcattgaggagaattgactggccttgtttctcactaaaacctaagcctccccagggggcaacgttgcttatcattgtagccctcc

SEQ ID NO: 808170 - DNA, 626 bp, Homo sapiens
ctctaagatcaacataaaagtatcaagcaagtaatatttcaaacagagttttcaagagatacatttttttcagcctgtataaattgtcttctgagaaatgtgcatgcagataatagaatacattatgtaacaataaagaagcagccacaatttgccagtcccacccctggatttttaaagagaaggcagaaaataaatagttagatgacatgttagggaaattccctatcagtgaggtgtaacttgtccacaggtctcccggaacacctgatatcatttggctctgtgtccccacccaaatctcaccttgaattgtaataatccccacrtgtcatgggggggacccagtgggaggtaattgaattatgggagtgggtttttcccatgatagtgaatatgactcatcttccaccataattttgaggcccccatagccatgtggaactgtgagtccatcaaacttctttcctttctaaattaccaagtcttgggtatgtctttatttgcagaatgagaaccgactaatacaacatccttttgtgcattgaggagaattgactggccttgtttctcactaaaacctaagcctccccagggggcaacgttgcttatcattgtagccctcc

SEQ ID NO: 808171 - DNA, 636 bp, Homo sapiens
gactcatgcgtttgataattcaggtggctgttcagagaggcttttcctaaatgccctcattaaatgcccttacctaaaacttattttgccttacttgaatttattttctcattatcacttatgttctggaattaatgagctacatgttgatattttctgtgtctctgcacttgcacataagctttgtgaaactttatcaccacagcctaaagcaatgcatggcatatggtaggtgctcaatagatagtttttgaatgaatgaggaatataaaaaatatttgtaaagctcttagtagagtgttggtcacatgtacacatgcagagaattcattattkaaaagttatgcaatttgaaatgtaatgtgagatcagaaaaaaatgtgtaatgaaatactactagggtaggatgacctctgctatcaggctaggaaaagtatcaagatgccaataggtagagaagagagtccattgaagatttctccatttatattcattcctatatgaactgattccaccgaggttatacaaaattctaccagacatatgcctttatattcgtagatgttgaccagccctggtgcatgtattaaatttagtaacacagtctgcttatgtacatctaggatgcagcatgca

SEQ ID NO: 808172 - DNA, 636 bp, Homo sapiens
gactcatgcgtttgataattcaggtggctgttcagagaggcttttcctaaatgccctcattaaatgcccttacctaaaacttattttgccttacttgaatttattttctcattatcacttatgttctggaattaatgagctacatgttgatattttctgtgtctctgcacttgcacataagctttgtgaaactttatcaccacagcctaaagcaatgcatggcatatggtaggtgctcaatagatagtttttgaatgaatgaggaatataaaaaatatttgtaaagctcttagtagagtgttggtcacatgtacacatgcagagaattcattatttaaaagttatgcaatttgaaatgtaatgtgagatcagaaaaaaatgtgtaatgaaatactactagggtaggatgacctctgctatcaggctaggaaaagtatcaagatgccaataggtagagaagagagtccattgaagatttctccatttayattcattcctatatgaactgattccaccgaggttatacaaaattctaccagacatatgcctttatattcgtagatgttgaccagccctggtgcatgtattaaatttagtaacacagtctgcttatgtacatctaggatgcagcatgca

SEQ ID NO: 808173 - DNA, 640 bp, Homo sapiens
gcactctttatagattttcattctttccttttttctaatacatccatttggaaaattatttttaatgttttcagtatatatgtgtatatatgtataaatatacattaaaaacttaagagttgcacaaaaagtgaacatagaaacatgaaaggcataaaattattaagataatagttaaatttttcaaaaatgaaacatatcagtttttagatagaaggaatcatcaagtacctaactcagtgactaaaacaggctcacactaagctacatcatagagaaatttcagaacactggggacaaagaaaccatcctgtagatttccggaagaaaataaaagatcatcaaaagaaatgctgrcaactcaaaggcaacagataagcaccttcaaaaatctaaagggaaattattttcatcttcatatttgatactgagccagactattaaacatcaggatagaataaaaacatttttgacatattaaatgtcagtaaatttattttccatgtaaccttttcctaaaaactacttgagaatgtacttcacaaaagctaccaagaaaatctgggggaaagcatacaacagatacagtaaacagaagatcacgcatgaaatagacatgaagagaacccctgggacgatc

SEQ ID NO: 808174 - DNA, 653 bp, Homo sapiens
ctcccagcccaacttgttgaaaggagtattctttttcagttaaattatctgaaactttctccaaaatcgattttcttttctactgatctatattactatgcttgtgtccctaccacaatcttttaactactatagttttataataagtcttaacattaggaagtgtaagtcctcctacattgttatttctcaaaattattttggcttttctatggtcttttgcaaatctaatcaaattttctaattggctagttaacttctaaacaaaaaaagcctgctgaaattgttattgatacagcaatttgagtagaatggaccttttaacatagtgtattttatgatccatatacatcatatatttcttcctttatttaagtattctttcatttctcctagcagtgttctgttgyattcagtttatgaatcttgtgtaatttttgttaaacttatccttaagtgtttcatagtattccaattatctcttcataggatatggaaatacaattgatttttgtacatctagttacctttcatttaattgctaaactcatgaagtagttctagtaacttctggtagattattggaattttctgctctctgtgaataaagacatttttacttctttctttccaatctgtatgccttttgttgc

SEQ ID NO: 808175 - DNA, 619 bp, Homo sapiens
ttcaacaagagaggcactgtctaagtggggcaactgaagaagtcaccataggtaggatcagggaaggggagatacagaggaatggctgcatccatgcagcgctgcaagaaaaagacaaatccgtatgctgatggggctctatccgtgggaagaacaagcagaggagcacagtccaccaaagccacgggtgcaggatgagaggaaggcagagttgaagggaacatgacctgtaagagaaaatggagcattggagggaaggggaaagtggccccactaactcacagagctgagcaatgttgcaaagaaagcttcccttgcggggaggcccaagcgttggctgcagaagtggycttagctcttgtcatcgccacccctgtgtcagaggtgaggctgatagcaggccaaggagtcaaggaggcaccgaagctaaggggaggcagatggcacagccagctctatgcgtcctggaaggcccttcccgcccccacataaattccatagcttatttgctctttcttccttttatttttgtcttaaatgtaaaatttggtgtcactcttctggggtaaacaacaaactggtctttggaagggatccacttgaatagcaaatattacaa

SEQ ID NO: 808176 - DNA, 643 bp, Homo sapiens
acacaactcatcagctcgcagaggctgactaacagacccctgtttcaccagccatgacaacacctttgattagacagggactgatttcagtaactttctccaggtaagaacactgaccatgcagtggttccggctgatttacagagactgtgcacttgcgtgccttcatgycctgagaccttttgacaaataagacctaattgtaatacatttaaatgctccgtctccaccccaaagtgaacatgggtcatatgttacatgcatgtttgttcagtacgtgtgtgtcgggatcaccttcgtgaatattcatagctcctcctgtcacctgttaaacaggtatgtttagccaacccattcagcataaagctgttagtccagcaaatcctcctgtgaagtgcctgcctgggtttggccgaggcaggtctctcagcccaggggatggccctcttgcaggctgtaaccctctataagaaataaagtctctccctttccttttctaaatttataaatttggattttttttaaagttaccagtggtgtgggagcttttatgtattctctaagcagagtaggaagagaatcccagaattagaaaatatggaataatcagattctgtttaacgtctttcctggcatccaggga

SEQ ID NO: 808177 - DNA, 643 bp, Homo sapiens
acacaactcatcagctcgcagaggctgactaacagacccctgtttcaccagccatgacaacacctttgattagacagggactgatttcagtaactttctccaggtaagaacactgaccatgcagtggttccggctgatttacagagactgtgcacttgcgtgccttcatgccctgagaccttttgacaaataagacctaattgtaatacatttaaatgctccgtctccaccccaaagtgaacatgggtcatatgttacatgcatgtttgttcagtacktgtgtgtcgggatcaccttcgtgaatattcatagctcctcctgtcacctgttaaacaggtatgtttagccaacccattcagcataaagctgttagtccagcaaatcctcctgtgaagtgcctgcctgggtttggccgaggcaggtctctcagcccaggggatggccctcttgcaggctgtaaccctctataagaaataaagtctctccctttccttttctaaatttataaatttggattttttttaaagttaccagtggtgtgggagcttttatgtattctctaagcagagtaggaagagaatcccagaattagaaaatatggaataatcagattctgtttaacgtctttcctggcatccaggga

SEQ ID NO: 808178 - DNA, 699 bp, Homo sapiens
agggatccagcacttccccagcaccagaggtgaatgtatgagctgcagttttccttcctgatttagggagaggcaggtggctggtctctgtgacaggtgtatgcttttcttggtctaaatggcttctctcaatcccaacsccttaatgagatattaattaggtattattgtccatcatattttagaaagtggggaactatgagagcacttagatgttcgaagtatttcggcaaatcagctcttggaagaagggttgagatagaactgcctggttctgttcatattcttgttgaaaacgactcatttccagaagttagataagctttctttttttatttttaattgtggtgaaatacatgtaacataaaatttttcatattaactatttttaagtgtagaattcaatagtgttaagtacactcacattgttgtgtaaccaatctccagaagtcttttcatcttacaaagctgaaagccattaatcacccattaatcaactccccattcccccttcccccagctcctagcaaccactcttctttctgtctctgtgacttcagctgctttaggtacctcatgtctctgacttcaactgctttaggcacctcatgtaagtggactcatacagtagttatcttattgtgattggcttttttttcatgttgcataatgtcctcaatgctgtaatgtgtattcaca

SEQ ID NO: 808179 - DNA, 637 bp, Homo sapiens
ccgttctagcactacggatacagctcagaacagagcagacaacacttctgaggaggcaggcagtaaggaagatagctgaaatacgtcagcttgtgagagggtcaaggagagacatgaagtggaaggggatagaatgcrttggaggcacggcagtgccacgtgggtgtctggaagggacttgccgagctggcaggtgaagacacaactgcaagaaatgagtgagtgagccatgcgttcaccaagggaagagcctccggcaccagcagacggcaagggtccgggccctgggtgggagcacacctggccaataggacaaaggaggtgcaggtgcccagagcggaaggaatggcgggagagaagacaaggcaggaggggtacggagcaggggagctgtcagtcatgcaggcttgaaggggattttgaggacttcggtttctactgagtgagatggggagttatgggggattttgactgggcatgtgttaataggatctctgcattccagagaataacatgaaggagggggaggggagaagccacaagacccaccaggaggccaccgcgacactctcactgagaaacactagcagtgaagtccacagtcctggcagtggaggtgctgaatcctaaaggacag

SEQ ID NO: 808180 - DNA, 637 bp, Homo sapiens
ccgttctagcactacggatacagctcagaacagagcagacaacacttctgaggaggcaggcagtaaggaagatagctgaaatacgtcagcttgtgagagggtcaaggagagacatgaagtggaaggggatagaatgcattggaggcacggcagtgccacgtgggtgtctggaagggacttgccgagctggcaggtgaagacacaactgcaagaaatgagtgagtgagccatgcgttcaccaagggaagagcctccrgcaccagcagacggcaagggtccgggccctgggtgggagcacacctggccaataggacaaaggaggtgcaggtgcccagagcggaaggaatggcgggagagaagacaaggcaggaggggtacggagcaggggagctgtcagtcatgcaggcttgaaggggattttgaggacttcggtttctactgagtgagatggggagttatgggggattttgactgggcatgtgttaataggatctctgcattccagagaataacatgaaggagggggaggggagaagccacaagacccaccaggaggccaccgcgacactctcactgagaaacactagcagtgaagtccacagtcctggcagtggaggtgctgaatcctaaaggacag

SEQ ID NO: 808181 - DNA, 637 bp, Homo sapiens
ccgttctagcactacggatacagctcagaacagagcagacaacacttctgaggaggcaggcagtaaggaagatagctgaaatacgtcagcttgtgagagggtcaaggagagacatgaagtggaaggggatagaatgcattggaggcacggcagtgccacgtgggtgtctggaagggacttgccgagctggcaggtgaagacacaactgcaagaaatgagtgagtgagccatgcgttcaccaagggaagagcctccggcaccagcagacggcaagggtccgggccctgggtgggagcacacctggccaataggacaaaggaggtgcaggtgcccagagcggaaggaatggcgggagagaagacaaggcaggaggggtacggagcaggggagctgtcagtcatgcaggcttgaaggggattttgaggacttcggtttctactgagtgagatggggagytatgggggattttgactgggcatgtgttaataggatctctgcattccagagaataacatgaaggagggggaggggagaagccacaagacccaccaggaggccaccgcgacactctcactgagaaacactagcagtgaagtccacagtcctggcagtggaggtgctgaatcctaaaggacag

SEQ ID NO: 808182 - DNA, 603 bp, Homo sapiens
taacttggctgtgttatgaactgaatgtttgtgtctccctcaaaattcatgtgttgaattatgacctccagtgtgatggaggtggggcctttgggaggtgattagagcatgagggtggagaacttaggaataggattagtccccttataaaagagaccccagaaagctctctgatcctcttttgccaggtaaggatgcygtgagaagacggatgtctaaaccaagaagcaagaaatggaccctcatcagaacagagtctgctggccccttgatcttggacttccagccttcagaagtgtgagagataactgttagttgttcataagccacccagtttatggtacttcgttatgacagcttgcaatgactggcagctgccttcccttttcctccccttacttcatacttagcttgacgaagttgggtgtggcaaataatttgggagtggggatttttatcttgaacttccctgaccctccaagtcccattatggtaactgagcagaaggctacccagtctccttttttggaatatctactttaagatttcatttgtgaagactgaaaagagtgagctgcagatttcattttgctgttattttag

SEQ ID NO: 808183 - DNA, 680 bp, Homo sapiens
ttataatttcagagtttattttccagttcaagaatttctgttagagataggtgtagaaattgcattctccagtgaaattcttcatcttgtcattcattttactgaacatattaattacaactattttacgttcagttttgaaaagcccaatctgtatcatatgtgacttttttctgttactatttttatttttattttgtcaattaatatgtttggtattttaaaaaaatatcagacatttcatataaataattaaatggctctggctaatgttgtctttctacagagcagtttacyttactctctgacagccattagaatagaaacaaaacacatcaatccaatcacaaagtgagctaacaaaggcaaggttccccactgcaaagccacctctgggtctttcttactcctaggatctagcccttcaaagatactgactgagatccagaatatagcaagtgcctccaacacattattaaatgaatgaataagtaaatgaatgttggtaataaaggaggagggtaactctgaaaagaacgatgagaaaataaacatttccaagtgataaatatggttcaagaataaaggagaggagggatcacccatggtaaaaagtttctagcctgtgagtactcgtactactgatagcagagtcagtcactggaagcataatggaggta

SEQ ID NO: 808184 - DNA, 614 bp, Homo sapiens
tatttgagtggatctttctttccatttcttggtggttgggtcattatccatatcagtcattgtaacctacactaatgcctttaaattcttactgtatgtcagatattaatacatttccaaatgctttaaatgaatcgtctaatgtaatactcacgggaatttgattccttgtttttggatgaagatatggaggctttggaggtactacactgactgtccccacaggaggttaatggcacagctgtgagggaggcacacccagtcttttctctattttcctgcttgcagagagactgtagtaaatccctcaactttgatgtgcctgtgagttttattacaatgcagattctgggatctgggatgggctgagagtctacatttttaacacactctgtggggaggatggcgtcactggtcctggatcacctctgactgcccaaggccaagagggaattctttcttycttcaggaatggggtggggggaatggagggtaggaaaatttgcctcacatcaactaaaatccgaaagtttctttctagtcctaccctattgcattttctaaatccttaaggggtaataaatttagtcttttttttttcccctctctgcctc

SEQ ID NO: 808185 - DNA, 604 bp, Homo sapiens
tactatgcaataggcaagcattcaatgctttctatgcttttctatgccttacctaaatttcagtgatagtatgccctatttgaagaacttcatgtttctatctctcatccaaatgaaacgatatctcagtctgttacaaagaccttactaataaaggagtaagcaaaggtcagagcctccagctacaaatcattgaggcaatgccatgcttgtcacattggatattaaagggtttgcscatagtagacactgagcactttgaggacggggccatgctttcttcatctatatatcaaatctgtactagtctctgaggaaggtttaaacgcaattctttcaatggtccagggattgattcaaagccacgtagtatctgagaggagtgagtgtggaaggctgggtgtggagctcctaattgaactacttcctttattgcaagggctctggaaggtggttccacattcatcttgttttttctaaattctttttcttctccctgcactttgaacaatcctttccctgcttgtgcctgcaaattttgtagcttcctctgatcaaacgttgttgtctttagaagagagaaagggagattctggttttgatg

SEQ ID NO: 808186 - DNA, 604 bp, Homo sapiens
tactatgcaataggcaagcattcaatgctttctatgcttttctatgccttacctaaatttcagtgatagtatgccctatttgaagaacttcatgtttctatctctcatccaaatgaaacgatatctcagtctgttacaaagaccttactaataaaggagtaagcaaaggtcagagcctccagctacaaatcattgaggcaatgccatgcttgtcacattggatattaaagggtttgcccatagtagacactgagcactttgaggacggggccatgctttcttcatctatatatcaaatctgtactagtctctgaggaaggtttaaacgcamttctttcaatggtccagggattgattcaaagccacgtagtatctgagaggagtgagtgtggaaggctgggtgtggagctcctaattgaactacttcctttattgcaagggctctggaaggtggttccacattcatcttgttttttctaaattctttttcttctccctgcactttgaacaatcctttccctgcttgtgcctgcaaattttgtagcttcctctgatcaaacgttgttgtctttagaagagagaaagggagattctggttttgatg

SEQ ID NO: 808187 - DNA, 711 bp, Homo sapiens
aatctcctgtttgtgaagattagccctatttctctatccaaaaagaagttatcttgggggcccagcaccccaaaaaattagatctcaggccattgcactatgtctaaggggtatgttgtataagatgtgcacgtagtggaaattggacaaagggcactatatatagaatgtgraagtggagttttcaggacctgtgctttaaatatcaggcatgacatcgtcaccagcacctccaggagcggagccggaggcaggattctctggggagtgcatttcctccagttctgctgatgcaggagagaagggtgaatcagcagtaggcggctgaaagttttgataatcacaatttgctctgggtgatcaagtggggcctggatggagggaaacaattggatatctaactaggctaagcaagagggctcaggggactggcaggagaaggatacagtgcttttacctcctgatcaagcttttcccatctggtcattttatttgtcaatttttcccatttcatttaccaggctgttccctgactgttacctcctctggcaaatagctcagccaatcattctgccttgggaaggatgtctggctaaagtgcccaatgtggccccacctaggccttttcctatgagtacccctctctgtggcccaagatcctctccagctcccccatgatattaggtgtgggatccacaacttgcctgcggc

SEQ ID NO: 808188 - DNA, 711 bp, Homo sapiens
aatctcctgtttgtgaagattagccctatttctctatccaaaaagaagttatcttgggggcccagcaccccaaaaaattagatctcaggccattgcactatgtctaaggggtatgttgtataagatgtgcacgtagtggaaattggacaaagggcactatatatagaatgtgaaagtggagttttcaggacctgtgctttaaatatcaggcatgacatcgtcaccagcacctccaggagcggagccggaggcaggattctctggggagtgcatttcctccagttctgctgatgcaggagagaagggtgaatcagcagtaggcggctgaaagttttgataatcacaatttgctctgggtgatcaagtggggcctggatggagggaaacaattggatatctaactaggctaagcaagagggctcaggggactggcaggagaaggatacagtgcttttacctcctgatcamgcttttcccatctggtcattttatttgtcaatttttcccatttcatttaccaggctgttccctgactgttacctcctctggcaaatagctcagccaatcattctgccttgggaaggatgtctggctaaagtgcccaatgtggccccacctaggccttttcctatgagtacccctctctgtggcccaagatcctctccagctcccccatgatattaggtgtgggatccacaacttgcctgcggc

SEQ ID NO: 808189 - DNA, 524 bp, Homo sapiens
attcttaatgtcaagctgagggagaagtctaagaagttttatataagtctgacacccagggtgcctgtaattaaaggtggaatgaaattttaatttgcgagttgatccttctgttttttagttcagtacttcctcctttttagaatgtatgctttccagataattagtgagataaagatttgattttcacttttagcatttctaaaagctgtaatatgctacytaacttgtttttaattcttgctctaacttctgatattttatagttgtgtattttgaattatattttaaaggattaagtggattattgcacatgatatttagtaaagtgtttgggagcatttagcacagcctccaaaaattagaattccactagccccctgatcctacatatctggcatcttaagagtcaataatagcaaagttgagagaggcagcttggtgtggtggaaagaacatgggtattggatccgatagccttaggttcaaatcctggcttcttcagtaattatcttctgtaattt

SEQ ID NO: 808190 - DNA, 622 bp, Homo sapiens
cgctgttttctacaaggactggggaaagaaagggtggaattaattaaacctggaggaagggactttgaagggcggagctaaggtcaaagaaagaaccctttaaataaagggcccacactggctgccagggagtgcgcaggactggcaagagggaagccgggctgctccacgcctttcacgccttccacctcctgcgtgtccatctgtgagaaggagccagagcccaagggagatgatggagcctgaggagtacagagagagaggtgagcaacgggcatccctggccctcttccctgctgctactcctgcaggaacggctgctggtgggtggcccttagattstggggtgacatttgatgggagcattagaattgccttctgagagttggcaccagcaacatttttttttctgcgaaaggaatgtgggatcagagtgtaaaacttttctcaaccactctttcattctccctctcatatacccactctcacatatgtccacactaccgtgccttgcttttcctccccactttcccacaaaattgaggatttggatccctgagccactagatgggaaaaggggattgttcatattctgaaatagaaaaaaattttctcaatattc

SEQ ID NO: 808191 - DNA, 527 bp, Homo sapiens
taagggcactaatcccattcatgaggggacagcctcatgacctaattcctcccaaaggttccacttcctattaccatcgccttgaggatttggttttcaacatgtgaatcttgtcggggacacagatatccagaccataacagtgctgtaggctaagtctcatttgttttwagttgtgtgtgctcagtgcatgtatttatttacatatctagtaaacacagacaccgcagaacctcattacttggcatcatttggagatgaaggttctggagaagtgaatatttttgtgcttcatttatttctgaatcttaataccaccagagtttgatgaaaatcctctaaagtatattacatgcttccctgccttttaacacggaatttaggaaaatacaggttttcttgatggcttaaggttgtggtcacacataacagtgactgacctcaagcctggtggtgttcctcccaggattcttcaggtgagattgttgattttttagttagtgatcctctcttttcccttgtcttgt

SEQ ID NO: 808192 - DNA, 620 bp, Homo sapiens
cctgcagtcccttctctaaggcctcctccaggaatacactgttaacagtttcatgactattgggaaacttactctgcatacgcagacatgggtatgcatatttcagatgcccttttgagtaattattgttagaggaaaatctttcctaatgaattctgactacttctaaaatgaattctatcaaacatccccatgaaaattaacagtaattaattgcctcctatctttttttttgtttttttgagatagggtcttgctctatcacttaggctgcggtgcagtggtgtaaccctagctcactgcagscttgaactcctagactctagtgattctttttgcctcagctcccaagtagccaggactactactgctactatggtgcacgtcaccatgactggataactaaaactaaatgttttttagagacagggtcttgctctgttgcccaggctggtcttgaactcctggcctcaagtgatccttctgccttggcctcccagagtgctgggattgcaggcgtgtgcctggccttgcctcctgtctttattgttaacaccccattgacaacaagatataaattgattacaatgtgaaattgtaaatcttttaatacagaagtt

SEQ ID NO: 808193 - DNA, 625 bp, Homo sapiens
tgactctttttagtattagccagcacacgccaggcccttagtgcgtactagtaaatgcttataggttgattgtctgatgtgttcagcaggattggtttggttgtgtctctgactatccatatgatcagaaatttatataattcctaagaaagtgaaacacagaggtataattttgccacaggaatttggggatatgcagttgttattttaatattataaaaaaaatcaacctttagataaaatttatttcagtatttctctttgtatgtaagtgatcattgttttcactgctattcaaggaattatctgaagccgaaaaccagtttaagaggattattgaacactaccccagtgagggccttgattgcttggcctactgtggaattggaaaagtrtatttgaaaaaaaacaggttagtagaaatgacactactttaagctctaggctggtaactcatttaaaatccaatgtgataatgatccattttctagaattattttgatatctcctctgtagcacactatcataattgtgatttactttgaggacctgaaatttcactatcagtattaattgttaaagcaaggccagtcattgcagttcttggtacttcctgattttaaat

SEQ ID NO: 808194 - DNA, 575 bp, Homo sapiens
acacacatacatgcatttctattggttgataactaagactgctattgctgggtcataggtgagtagatgcttggcttagtctctcaaaaagcaagtttctagtagtaaacaaacagtacaggagggtgaatctcttacttagaaattattcagataataaatgaggaaggaatgagagactgagactataataactsttttgcaacccatcaagaattaacagatttaaccattgaacagcaatagcgattaacaacacaataaaaaaaaccaatgtgaggttcttcctcttgatggaagaacacaatacagcaccatcaaacaaatacaagtgagaaagaaatcaagcctgaatagaagctaacctccatagccaattaccaatttagaggcaatacagataataaaaacacatattcaaacaatggcttggggagcaatcagcaaaatgcacactatgggaagctctaccacacaatataaatttcaagaaagaatctatagaataaaagagaacaaaagcatgtttctaaaggtaaaactaaatcatagttttggatgataaaaatataaaa

SEQ ID NO: 808195 - DNA, 510 bp, Homo sapiens
tcatgggctgtggtcactcatttttggctcagaataaatctctttaaatatgttactgcgtttgactcttttcattgacagtgtggaattctgatgtagtaagagggttcaagtgctggagtgtgaggggtggggaaaagtgacaaattttaattcttggagcagtgatccaggacgagaactttatctrgtacccagtaggcacgaagagtggctgaatgaaccagtgactaataaataacatatttccacccattcccttgaggataggtttacatcaagtttttgtctatcccagtttatagtctagattattggagtggcattctgtaatgatgaaatgattattcaaacatcttccctcagcatgactcttactaggattaaaactcccaggtttgtaagatatcagaggttctgggtccacacgatgttttatattaatatttatattttcttgtgtgtggaaatgtctctggggagagaatctctaacatttattagttttta

SEQ ID NO: 808196 - DNA, 580 bp, Homo sapiens
gttgagggctgccaggcaaggacagggccctcagagttaggccttgcctgggcaggggtctcctgggggaaccttccctcagggccctgaggctctgggctccagagctcagcttccgcgttcagatacatggtctgctctgctttggagactgagaagcctgagaggtaaaatcgtgctgggtggtaggtagggtaagggagagggagcttccccccatctccctcacccackgcagaaaggcttctctgtttccttccccagcccagtcccacctcctctgtgaggccgctcctcacctccctactggcctgcagtgatcctcctgcttgggagtcacagagcaccctacacgggccctttgccattctttatagtataaggcaaggccgaacattttgtggggcatcttttcagtgtcctcagccttgtgtgaacatcagaagcacttgggggcttgggaaaatgcaattgctggccccatctccagtttcttaaacagcagatctggggtggggcccaagaatttgcatttctaacaagttcccaggcgatgctgatgctgctagtctgggatcca

SEQ ID NO: 808197 - DNA, 538 bp, Homo sapiens
aagcaaggtggagtcgattaagttagatctatctcactgtctcagtcataattttgtaaaggcgatttcatcaggaattcgagaccagcctgggcaacatggcaaaaaatatttatttaaaaaaaagtatttttttaatagatctattttttttwaaaaaagatatattttttaaaagtatctattaaaaaaatacaaaaaattagctgggtgtggtgatgtgtgcctgtactctcagctacctgggaggttgaggtgggaggatcacctaagcccagaaggtcgaggctgcagtgaaccatgatcgaaccactgcactccagcctgggtgacagataatttaagattaagtttgagactctgtctcataaaaagatgaagaaggaaatagagagagaaagagaaagaaagaaaacggcatatctctgttgttcagatgagaaaaatgaggccccaggaggaaggtgacccacccatacccatgtggttttttaggggcaagaacagacctagagacaactctgtcctctggtcttaa

SEQ ID NO: 808198 - DNA, 508 bp, Homo sapiens
ccggatcctcgccagggtccaccaggagaagagcacatggcggagatgagcctgcggggctgggagagagagaagacacggcgaagctgcaggtgaagacgctgcactaaggccccacccagaggctgaggttccccgaccagaccagcagcagcgaggctgcccagagcggcgccagcaaggtggttctctccaggtcggatcacaggagaagctagccttgcacctggcccaggcaagaagcaggacatgggcttacgcagaagaatcagcaccgattccacatcattccccatggcaacggcctctacggtgctgtcagcaagacccagtgctagacccgagcctgcaccaggagctgyggagcggagggtgcgccccatcccgatcgtctccaccactttagctccctgggtgagggtgacacggggaagcttattatcgcggctgcccaaaacggggcgtggctgggtaccctgtgtacatagggtagatgctgaatgtgaat

SEQ ID NO: 808199 - DNA, 617 bp, Homo sapiens
ccggatcctcgccagggtccaccaggagaagagcacatggcggagatgagcctgcggggctgggagagagagaagacacggcgaagctgcaggtgaagacgctgcactaaggccccacccagaggctgaggttccccgaccagaccagcagcagcgaggctgcccagagcggcgccagcaaggtggttctctccaggtcggatcacaggagaagctagccttgcacctggcccaggcaagaagcaggacatgggcttacgcagaagaatcagcaccgattccacatcattccccatggcaacggcctctacggtgctgtcagcaagacccagtgctagacccgagcctgcaccaggagctgcggagcrgagggtgcgccccatcccgatcgtctccaccactttagctccctgggtgagggtgacacggggaagcttattatcgcggctgcccaaaacggggcgtggctgggtaccctgtgtacatagggtagatgctgaatgtgaatagcactgaactactagagggaggctggagaggcccacagtgtctatctaccatgattcattatttgggcccagaggattgcctaaggcctagtatttggctcagttggc

SEQ ID NO: 808200 - DNA, 617 bp, Homo sapiens
ccggatcctcgccagggtccaccaggagaagagcacatggcggagatgagcctgcggggctgggagagagagaagacacggcgaagctgcaggtgaagacgctgcactaaggccccacccagaggctgaggttccccgaccagaccagcagcagcgaggctgcccagagcggcgccagcaaggtggttctctccaggtcggatcacaggagaagctagccttgcacctggcccaggcaagaagcaggacatgggcttacgcagaagaatcagcaccgattccacatcattccccatggcaacggcctctacggtgctgtcagcaagacccagtgctagacccgagcctgcaccaggagctgcggagcggagggtgcgccccatcccgatcgtctccaycactttagctccctgggtgagggtgacacggggaagcttattatcgcggctgcccaaaacggggcgtggctgggtaccctgtgtacatagggtagatgctgaatgtgaatagcactgaactactagagggaggctggagaggcccacagtgtctatctaccatgattcattatttgggcccagaggattgcctaaggcctagtatttggctcagttggc

SEQ ID NO: 808201 - DNA, 539 bp, Homo sapiens
atattctcctttgaaaagattctcagctcagtgatcatagaacctgtacttgcgtttaattcaatgaggaaagacatagaaatgccacgttaatatcctcatttaggtggtttctcccttcactgatcagcctatgaatgtgtcaatgcagtactccccagtttaggcttaggtacttattgaaaggatgctgcctgagcatttttaataattgctatttcaagatcacattttggccatgaggcaggctgccactcactttaggctctgcctaggcaggaatgggtcctggaagacacatgttctctctctctctctctctctttcacacacacacacacacacacacacacacacacrcacacacacacccctctcttctctctgggtacacattattctggacatcttcagtttccaggattctctatgtctccagctagaagtcagggcttagcctgtggtgatccagccaccctcaggttgaatctcgatgaagtcacaggaaccaccagtggcatggagggtaagggatcctg

SEQ ID NO: 808202 - DNA, 665 bp, Homo sapiens
taaggaaatatttattattccagagttttcttatccattccatttgaagatgctgggatcaagtcaccgagggtgctgctctctggccttgagaatccactcagcagggccaccagcagcccctcccttctgtggcctgctcatgccctgtcttctcattagaatccccttccctgctgtcacagggatccctggactcctccagatccaaatatgtccaatacatttggttgaggcctcctgggccccacattactgtgtaatctcaacacccacacactcaaaacagtgttcccatgcgtrttcttctttcgactcatcactgtcctctaacagccatgggcagtgtgtggagagagcaggtgaagttggagctttggggtacagttgacagagatgttgacattttgagaaaaagaaaacacctatatagctgttttcaggataattttccatcaagataaaaatccacgcatgagagcatcactcttccagtgatgaatgcatggaggatccttctcactctattgttgggtagtgacacctgggaaacttactgtgttatttagtgtgcagacagctggtaaaccactcagctgactctagggaagttgaccaaacagtgtccccactgatgtgtgacttttctccacccatgaggcccc

SEQ ID NO: 808203 - DNA, 439 bp, Homo sapiens
agatctaaaattaatacccttacatcacaattaaaagaactagagaagcaagagcaaacacattcaaaagctagcagaaggcaagaaatgactaagatcagagcagaactgaaggagatagagacataaaaaacccttcgaaaaatcaatgaatccakgagccagttttttgaaatgatcaacaaaattgatagactgctagcaagactaataaagaagacaagagagaagaatcaaatagacacaataaaaaatgataaaggggagatcaccactgatcccacagaaatacagactaccgtcagagaatactataaacacctctatgcaaataaactagaaaatctggaagaaatggataaattcctcgacacatacaccctcccaagactaaaccaggaagaagttgaatctctgaatagaccaataacaggatctg

SEQ ID NO: 808204 - DNA, 527 bp, Homo sapiens
ccaatcaagttgacgctcagtattactcatcacaagtccactccttgtcagcatgaacccatatacaacttgtgatatcgtacataatcttcaaataaagacaataataaagtcataattacgcctaacataatacaattatccttcatacaaccagaacgcacgaatccctaacacaaatactattacatcaagttactgatacttaaatgctgatgtgacgtcaataaatcttatgttatatgayaaaggagaaaggaaataaaatgaagatattttcttagtacgagtttatagatgcgcaaacatgtttttaacaaaagaaggaggaaatactcttgacaattacactcctcgtttctgccgctggccatagctggtattgatgactaccttcttctactacccattctgtattccctttgccttcagcaagcacctcagtaggttgtgttttttttcctggtggagtgacccaaatcttcattcctgaagggtcccattgaccttaatcacagggcatggta

SEQ ID NO: 808205 - DNA, 607 bp, Homo sapiens
gattaaatgtattctgtaatgttcagaatacaaaatcaccatgtaaaaacacctcatggctgggcatggtgactcacgcctataatcctggcactttgagaggctgaggtgggaggattacttgggatcaagagttcaaggacagcctgggctacaaagcaagagcctgtctcaagaagaaaaamgaaagaaagagagaaacaaagaaagagatagaaagaaagaaagaagaaagaaaatctcttatatttcaatacttagaaaatctcttatatttcaatatttaaacaaggacacaggaaaaaacccaaaacaaaattaataaaacaaatcaaattgcaacatcattagagagagtaaaatatggctgggcacagtagctcatgcctgcaatctcagcactttgggaggctgatttggacggatcatctgaggttagaagttcaagaccagcctcaacaatatggtaaagcctcgttcctacaagataaaataaaataaaattgctagctgtggtggcacatgcctgtaatcccagctactcaggggtccaagtcacaagaattgcttcagcctaggagggagaggttgcagtgagccaagatct

SEQ ID NO: 808206 - DNA, 607 bp, Homo sapiens
gattaaatgtattctgtaatgttcagaatacaaaatcaccatgtaaaaacacctcatggctgggcatggtgactcacgcctataatcctggcactttgagaggctgaggtgggaggattacttgggatcaagagttcaaggacagcctgggctacaaagcaagagcctgtctcaagaagaaaaacgaaagaaagagagaaacaaagaaagagatagaaagaaagaaagaagaaagaaaatctcttatatttcaatacttagaaaatctcttatatttcaatatttaaacaaggacacaggaaaaaacccaaaacaaaattaataaaacaaatcaaattgcaacatcattagagagagtaaaatatggctgggcacagtagctcatgcctgcaatctcagcaytttgggaggctgatttggacggatcatctgaggttagaagttcaagaccagcctcaacaatatggtaaagcctcgttcctacaagataaaataaaataaaattgctagctgtggtggcacatgcctgtaatcccagctactcaggggtccaagtcacaagaattgcttcagcctaggagggagaggttgcagtgagccaagatct

SEQ ID NO: 808207 - DNA, 552 bp, Homo sapiens
ctgctgggaccactcctctccttcctgggccctttggggctgagcccttctctaaaaaccacagagctactccagcagcagcccctgactctgctgatttgcatcatggccgctttatccagcaaggggataagagaggcctgggaggaacctgctcagcctgrgtcttgggaagcagcatcgggggtgcctcagccatggcctggacccctttcctcctcggcctcctccctcactgcacaggtgctgcccccagggtctcactcacttgcccagccccaggcctctgggtccagcctggccctaacactgagctcagtagggccctacctgtggtgggcaggatgctcatgaacctgccgcagggcagggggctggtggggcagaaatccccccacactgtgctcctgttctcttggtgccctaagggcacttttattcctggggctcaggtcagttcaggcaagtggcaagatattctttggttaatccccagagtttcaggccttttcgctcctcttttctctccttgcaggctctgtggcctcatat

SEQ ID NO: 808208 - DNA, 552 bp, Homo sapiens
ctgctgggaccactcctctccttcctgggccctttggggctgagcccttctctaaaaaccacagagctactccagcagcagcccctgactctgctgatttgcatcatggccgctttatccagcaaggggataagagaggcctgggaggaacctgctcagcctgggtcttgggaagcagcatcgggggtgcctcagccatggcctggacccctttcctcctcggcctcctccctcactgcacaggtgctgcccccagggtctcactcacttgcccagccccaggcctctgggtccagcctggccctaacactgagctcagtagggccctacctgtggtgggcaggatgctcatgamcctgccgcagggcagggggctggtggggcagaaatccccccacactgtgctcctgttctcttggtgccctaagggcacttttattcctggggctcaggtcagttcaggcaagtggcaagatattctttggttaatccccagagtttcaggccttttcgctcctcttttctctccttgcaggctctgtggcctcatat

SEQ ID NO: 808209 - DNA, 642 bp, Homo sapiens; identical to SEQ ID NO: 729047

SEQ ID NO: 808210 - DNA, 570 bp, Homo sapiens
attaatgcaaataaaaataaattttaaaaagaattattttagtctttgtggcccaagaatcaactttagggatattacataggtacttataacatcatttacaatgtaaccatttaaaaagataaaaatcactgttatctctgggccatgcaaaaacagttgtcaggccaggagtggccacaggatgtggttgaacggtccctggtttgcagagttatctgaatgttgaaaattccaccagcatatgatctaggtggggatctctctgtgagggtcactgtatttcacctcctgtattcggctgaggkctttccttggataagaacatgctcacatcatctatttgatgggctcatgggtttgcccaagacaaccctgtgtcacaatcacataacttttatctgcattgcttgttctgagttttgggagagctttaatatatcaggaatagactcctcctaagggaaaagtctgagggatatggatgggcaaggggtcaagaaagcttctaccaaagctggaatatccagggcaggctcagagagaaggatcctaatatcagcatttgac

SEQ ID NO: 808211 - DNA, 564 bp, Homo sapiens
ttcaaagtcctttctgaggccagatcagaaggtcccactccttttaagccccttattgcccaatcatttttccagtcacgtgtctgaagcagtttatcctgattggattttcagttgttgtccagcttgattgccaaaagttttcctccaattgctactcaaaggaaagaatgagggtggggcttcagggctgcyttccaggttgattgagctgctgatgggcatcctccctcctctctctcttgttcagagtctaccactttctctgcagtgtgcctgggccctcagctattggggatgagaagggatgcggagtgggaggcagtccacatgtctgttccaacaaagctcagaggtgagcgagttaaaaagcagatgtctttccagtaggagccccaggggacagggtgggtctcacagcccttgaagaccgagctcccgtaggagtttccaggtgtccaaacagggtcctcactgtgagtcttcaacagctttctccaagcagcagcccactcccttcttaatccatttccaggggtcaaaggtctatcctggttccctccc

SEQ ID NO: 808212 - DNA, 564 bp, Homo sapiens
ttcaaagtcctttctgaggccagatcagaaggtcccactccttttaagccccttattgcccaatcatttttccagtcacgtgtctgaagcagtttatcctgattggattttcagttgttgtccagcttgattgccaaaagttttcctccaattgctactcaaaggaaagaatgagggtggggcttcagggctgctttccaggttgattgagctgstgatgggcatcctccctcctctctctcttgttcagagtctaccactttctctgcagtgtgcctgggccctcagctattggggatgagaagggatgcggagtgggaggcagtccacatgtctgttccaacaaagctcagaggtgagcgagttaaaaagcagatgtctttccagtaggagccccaggggacagggtgggtctcacagcccttgaagaccgagctcccgtaggagtttccaggtgtccaaacagggtcctcactgtgagtcttcaacagctttctccaagcagcagcccactcccttcttaatccatttccaggggtcaaaggtctatcctggttccctccc

SEQ ID NO: 808213 - DNA, 564 bp, Homo sapiens
ttcaaagtcctttctgaggccagatcagaaggtcccactccttttaagccccttattgcccaatcatttttccagtcacgtgtctgaagcagtttatcctgattggattttcagttgttgtccagcttgattgccaaaagttttcctccaattgctactcaaaggaaagaatgagggtggggcttcagggctgctttccaggttgattgagctgctgatgggcatcctccctcctctctctcttgttcagagtctaccactttctctgcagtgtgcctgggccctcagctattggggatgagaagggatgcggagtgggaggcagtccacatgtctgttccaacaaagctcagaggtgagcgagttraaaagcagatgtctttccagtaggagccccaggggacagggtgggtctcacagcccttgaagaccgagctcccgtaggagtttccaggtgtccaaacagggtcctcactgtgagtcttcaacagctttctccaagcagcagcccactcccttcttaatccatttccaggggtcaaaggtctatcctggttccctccc

SEQ ID NO: 808214 - DNA, 639 bp, Homo sapiens
ttcttttcagatatggactttctggggagtaatactgtagggcttttcttgttgttgcctttaactgtctcaaatgttctcccaaagatgctactgaacacagcctctcctttgagcaagttaaaagtctgggtaygactgtgagaggctcctgcctgccaacactctttctccactttcagtgactgctcttcttctgagggccgtaaaccaacaactgctcatcccaagatccactaagccctctgggaaattggtgctgtactgcataccctgcctgctgggacttgttacattgatgtattttctaaggagtgaataatcttgtccaagtaactaacttatttaaagacattttcttcggtgggcactgactccatggcacccgttttccaaggagttggtgagcttgtttctgagaatgccagaaatcaatgtacattccaaatcattctaaaagtgatttcttttcggtgtgggtttggttttgttattaattttgaaatatatctttgaatactgagatctctgaaactactagatctctagaagtgtaattgggaaagaaggttgcttgcagctttaacaaaatgagaaactcttcccaaatacaacctgttttgaagttaaaaaaaaatg

SEQ ID NO: 808215 - DNA, 639 bp, Homo sapiens
ttcttttcagatatggactttctggggagtaatactgtagggcttttcttgttgttgcctttaactgtctcaaatgttctcccaaagatgctactgaacacagcctctcctttgagcaagttaaaagtctgggtacgactgygagaggctcctgcctgccaacactctttctccactttcagtgactgctcttcttctgagggccgtaaaccaacaactgctcatcccaagatccactaagccctctgggaaattggtgctgtactgcataccctgcctgctgggacttgttacattgatgtattttctaaggagtgaataatcttgtccaagtaactaacttatttaaagacattttcttcggtgggcactgactccatggcacccgttttccaaggagttggtgagcttgtttctgagaatgccagaaatcaatgtacattccaaatcattctaaaagtgatttcttttcggtgtgggtttggttttgttattaattttgaaatatatctttgaatactgagatctctgaaactactagatctctagaagtgtaattgggaaagaaggttgcttgcagctttaacaaaatgagaaactcttcccaaatacaacctgttttgaagttaaaaaaaaatg

SEQ ID NO: 808216 - DNA, 551 bp, Homo sapiens
tgtttattcagccataaaagaaacgacatactgatacatgctacaacagggtaaaccctgaaaatataccatgtaaaagaagtcagtgacaaaagctcatatattgtatgatttcatttacaggaaatatcagaaatagataaatccatagatattaaacaaagatttgtggttgccagaagataggaaagggaaaatggtgagaaactgcttaatgggtaaaggggttttactttggaatgatggaaatgtatcagaactagatagaggcagcacacgtacaatattacaaatgcactaaatatcactaaactgtttattttaaaatgactgatgttatgtgactttcacctcaatgaattattttttaaaaataaagagggtatattactaccaaccacacagaaawaaagagaattataaaggaatactatgaaaaattatctgtcaacaaattagataacctagatgaaacaaattcctagaaagacaggaactaatgaactgactcaagaacaaacagaaaatatgaatggatccaaaacaagcaa

SEQ ID NO: 808217 - DNA, 643 bp, Homo sapiens
aagcaatttgatcatggtagattatctttaagacagctgttggatttgggtagctagtattttgttgaggatttttgcatctagattcatcagaaatattggtctgtagtttatttttgttatgtcctccctggttttggtatcagaatgatactgtcttcacagaatgatttagaaaggattcccattttctctatgctgttgaatagagtcagaaggattggtaccagttcttctttgaatatctaatagaattcagctgtgaatccatctggtcctggattttttgttgtttgcaattttttttattaccatttcaatctagctgcttgttattggtctgttcagagtttctacatcttcctggtttaacctagtagtgttgtatatttccaggagttcatccatctcctttaagatttctagtttaygtacataaaagagttcatagtagcctttaatgatcttttgtatttctgtggtatcaatagtaatatctcccgtttcatttctaattgagcttatgtgggtcttctctcttcttttcttggttaatctcgttaatggtctgccaattttatttatcttttcaaagaaccagctttttgtttcatttatcttttgtatttttttttgttttgac

SEQ ID NO: 808218 - DNA, 645 bp, Homo sapiens
ttcttttcagatatggactttctggggagtaatactgtagggcttttcttgttgttgcctttaactgtctcaaatgttctcccaaagatgctactgaacacagcctctcctttgagcaagttaaaagtctgggtaygactgcgagaggctcctgcctgccaacactctttctccactttcagtgactgctcttcttctgagggccgtaaaccaacaactgctcatcccaagatccactaagccctctgggaaattggtgctgtactgcataccctgcctgctgggacttgttacattgatgtattttctaaggagtgaataatcttgtccaagtaactaacttatttaaagacattttcttcggtgggcactgactccatggcacccgttttccaaggagttggtgagcttgtttctgagaatgccagaaatcaatgtacattccaaatcattctaaaagtgatttctttttggtgtgggtttggttttgttattaattttgaaatatatctttgaatactgagatctctgaaactactagatctctagaagtgtaattgggaaagaaggttgcttgcagctttaacaaaatgagaaactcttcccaaatacaacctgttttgaagttaaaaaaaaatgtgacat

SEQ ID NO: 808219 - DNA, 645 bp, Homo sapiens
ttcttttcagatatggactttctggggagtaatactgtagggcttttcttgttgttgcctttaactgtctcaaatgttctcccaaagatgctactgaacacagcctctcctttgagcaagttaaaagtctgggtacgactgcgagaggctcctgcctgccaacactctttctccactttcagtgactgctcttcttctgagggccgtaaaccaacaactgctcatcccaagatccactaagccctctgggaaattggtgctgtactgcataccctgcctgctgggacttgttacattgatgtattttctaaggagtgaataatcttgtccaagtaactaacttatttaaagacattttcttcggtgggcactgactccatggcacccgttttccaaggagttggtgagcttgtttctgagaatgccagaaatcaatgtacattccaaatcattctaaaagtgatttcttttyggtgtgggtttggttttgttattaattttgaaatatatctttgaatactgagatctctgaaactactagatctctagaagtgtaattgggaaagaaggttgcttgcagctttaacaaaatgagaaactcttcccaaatacaacctgttttgaagttaaaaaaaaatgtgacat

SEQ ID NO: 808220 - DNA, 519 bp, Homo sapiens
ccccgggttcaagcaattctctcacctctgcctcccaagtagctgggactacagtcacgtgcgagcacacccagctcatttttgtatttttagtagagacagggtttcacaatgttggccaggttggtcttgaactcctgacttcaagtgatcccctgcctcagcctcccgaggtgctgtgattacaggcgtgagacaccgcacccggccaaaattcatcyattaattgtaaagtaaatttcccttctgccccagatcacagttacctgtctctattcccaaaataaatggctgtgtagaatttctgatgtgtccttcaatatatattctctgcatctacatacacttaccttcccctacctttttatgtaaatgggtgtttattattcacatactccgtattaaaattgtgatttattaacataattttactgacattttaatttgaatggagataaatttataaaggggattgatgattaagattttatgtttaaatattcggaagcaaacagtaat

SEQ ID NO: 808221 - DNA, 519 bp, Homo sapiens
ccccgggttcaagcaattctctcacctctgcctcccaagtagctgggactacagtcacgtgcgagcacacccagctcatttttgtatttttagtagagacagggtttcacaatgttggccaggttggtcttgaactcctgacttcaagtgatcccctgcctcagcctcccgaggtgctgtgattacaggcgtgagacaccgcacccggccaaaattcatccawtaattgtaaagtaaatttcccttctgccccagatcacagttacctgtctctattcccaaaataaatggctgtgtagaatttctgatgtgtccttcaatatatattctctgcatctacatacacttaccttcccctacctttttatgtaaatgggtgtttattattcacatactccgtattaaaattgtgatttattaacataattttactgacattttaatttgaatggagataaatttataaaggggattgatgattaagattttatgtttaaatattcggaagcaaacagtaat

SEQ ID NO: 808222 - DNA, 519 bp, Homo sapiens
ccccgggttcaagcaattctctcacctctgcctcccaagtagctgggactacagtcacgtgcgagcacacccagctcatttttgtatttttagtagagacagggtttcacaatgttggccaggttggtcttgaactcctgacttcaagtgatcccctgcctcagcctcccgaggtgctgtgattacaggcgtgagacaccgcacccggccaaaattcatccattaattgtaaagtaaatttcccttctgccccagatcacagttacctgtctctattcccaaaataaatggctgtgtagaatttctgatgtgtccttcaatatatattctctgcrtctacatacacttaccttcccctacctttttatgtaaatgggtgtttattattcacatactccgtattaaaattgtgatttattaacataattttactgacattttaatttgaatggagataaatttataaaggggattgatgattaagattttatgtttaaatattcggaagcaaacagtaat

SEQ ID NO: 808223 - DNA, 585 bp, Homo sapiens
gattcacagtttccacggcaatacagtagggaaggagtggtctttttagtaagtggtgctgattgattttgggtatgtatatgaaaaaattagtcttcatgccttatcacaccattaacaaaaaatcagtttgagatgtctcatcaaaacagtaaagcttctagaacatagaaggaatatctttatgtcgtttgtagacaatttcttaaataagactcatgaaagataaaccataaaaccacgatttagatccaaatatgggacatttccagtgccccagcacccttcccagtcgacagcccagtttttaaaaaggtaggagggggcaaaacttgaatagacatttaataaaaagaaatactcacgtggccgataactatataatctcaaggtccattaatcmtcagggaagtgcaaattaaagccacaataaggtaccactacaatttcaagagaagggcacttactaaaaggactgacagtaccaagtgctggatcagtagcaatggaattcgcagtatcggtggtgggaatgtaaatcgtttcaatcactctggaaatgtatttggcagtatctacactaga

SEQ ID NO: 808224 - DNA, 585 bp, Homo sapiens
gattcacagtttccacggcaatacagtagggaaggagtggtctttttagtaagtggtgctgattgattttgggtatgtatatgaaaaaattagtcttcatgccttatcacaccattaacaaaaaatcagtttgagatgtctcatcaaaacagtaaagcttctagaacatagaaggaatatctttatgtcgtttgtagacaatttcttaaataagactcatgaaagataaaccataaaaccacgatttagatccaaatatgggacatttccagtgccccagcacccttcccagtcgacagcccagtttttaaaaaggtaggagggggcaaaacttgaatagacatttaataaaaagaaatactcacgtggccgataactatataatctcaaggtccattaatcatcagggaartgcaaattaaagccacaataaggtaccactacaatttcaagagaagggcacttactaaaaggactgacagtaccaagtgctggatcagtagcaatggaattcgcagtatcggtggtgggaatgtaaatcgtttcaatcactctggaaatgtatttggcagtatctacactaga

SEQ ID NO: 808225 - DNA, 596 bp, Homo sapiens
ccctttgctttgctgccagcttgttactggtaatgccacatgaccctcatgtcactgggccacatggaaccaccctgtcagctactctggcggcagcaggagggcagggatggggtctcactcccggggcagcctgggtgcagactgaggcctgagggagctttctgcagagcacacggtgaatgtgggcagatgcctcactcccgctgattcctggtctggctcggtgctctgtcctgcctgcctggacatgcgctccctcctccagtaatgaggacgaggatgaggatggaggacrgtggtggacgctgactgggggtgcccgctcaccgggtgggtcccccgactgctgcatcctcttgctcactcagctccagagggagcactgcacacctgtgcccaggtcctgagggtggactagggttgcctgctcgattctgacacagagagagggtggcaccactggctgaggcctaagcagtgccccagctacatccagggtctctcgtctcagtgccaatgagtgcaggaaaggccagggtgaggggtcccctcagagtccagcctggtgcaaggcaggggttggcactgaaaag

SEQ ID NO: 808226 - DNA, 594 bp, Homo sapiens
ccacagacgcttctctgcttctctggcaaggctgcacccctggctaggtgggcagggccaggggctccttgagacagtctgcagccactgacctctccagcctccagggcagaggtacagtcccatggagcgtggctgatctgaaggcagttctggcctaaaaggggtcttgtcccttccttgtcctcattgctcccaaggccaggttggcagcagtagcagcggggttggatgctattggatgggagaaggtgaatggactcggagtgcagaatcaagctgcggaagccaagggccttgaaggagggtcacacacaagggacaactgcagaggaaaataaaggaacactttgtgattakccctgcctgtggctgaaagcgcagtgcagaagcatagtaaggaaggactgggtggtctgggtttaagacctaggaaccgtctctgctcctccaagcctgaatgagccctataacctaagggtcctggaggtcttgaaaccttctgcggagaaggctccaggtccactgggccctgtgggtggaagagcagagtcacagccccgcactggggacctaacaggtgtggccttgcta

SEQ ID NO: 808227 - DNA, 631 bp, Homo sapiens
ctgacctgcccctcaaagaaaggtcccactgaacagtctggaaagctgttttgctgagctcccgtcatcactcaatgaggcacgggcggagtgtggagggagtttccaacacacagtggatcccgcacaggtgtctctcctcgggtggctggggaggggagcacaagaaggcactgaggtcagagggcagctgccaccagcacctggcaccacasggcagtctggcctacagggtattttctaaacctggcatgtgaatgggttccatggggcacccagctgcctctaagaccataagggcttgttgtgagaatgggaattgcagcaggtcctgggaagctgccagacgcacacgggcaccatgtacagggcttctcagagatgggagcagggagcaggggacggagaagtgtggggtcaagagcgtggccctgagcagggggctgcagcgaagaccaaggggattcataagccagatccggggagggggtctcccagccccacctgctccactagactcctctcctgccggagccacagctgtcaaggccgccttccttaaggcatcagggccactgcttgtgcacacagctaccatcagcagcacggattgagatggggtgtgagtgca

SEQ ID NO: 808228 - DNA, 631 bp, Homo sapiens
ctgacctgcccctcaaagaaaggtcccactgaacagtctggaaagctgttttgctgagctcccgtcatcactcaatgaggcacgggcggagtgtggagggagtttccaacacacagtggatcccgcacaggtgtctctcctcgggtggctggggaggggagcacaagaaggcactgaggtcagagggcagctgccaccagcacctggcaccacacggcagtctggcctacagggtattttctaaacctggcatgtgaatgggttccatggggcacccagctgcctctaagaccataaggscttgttgtgagaatgggaattgcagcaggtcctgggaagctgccagacgcacacgggcaccatgtacagggcttctcagagatgggagcagggagcaggggacggagaagtgtggggtcaagagcgtggccctgagcagggggctgcagcgaagaccaaggggattcataagccagatccggggagggggtctcccagccccacctgctccactagactcctctcctgccggagccacagctgtcaaggccgccttccttaaggcatcagggccactgcttgtgcacacagctaccatcagcagcacggattgagatggggtgtgagtgca

SEQ ID NO: 808229 - DNA, 631 bp, Homo sapiens
ctgacctgcccctcaaagaaaggtcccactgaacagtctggaaagctgttttgctgagctcccgtcatcactcaatgaggcacgggcggagtgtggagggagtttccaacacacagtggatcccgcacaggtgtctctcctcgggtggctggggaggggagcacaagaaggcactgaggtcagagggcagctgccaccagcacctggcaccacacggcagtctggcctacagggtattttctaaacctggcatgtgaatgggttccatggggcacccagctgcctctaagaccataagggcttgttgtgagaatgggaattgcagcaggtcctgggaagctgccagacgcacacgggcaccatgtacagggcttctcagagatgggagcagggagcaggggacggagaagygtggggtcaagagcgtggccctgagcagggggctgcagcgaagaccaaggggattcataagccagatccggggagggggtctcccagccccacctgctccactagactcctctcctgccggagccacagctgtcaaggccgccttccttaaggcatcagggccactgcttgtgcacacagctaccatcagcagcacggattgagatggggtgtgagtgca

SEQ ID NO: 808230 - DNA, 600 bp, Homo sapiens
gcctcggtctcccaagtgttgggattacaggtgtgagcctttttatttctgagaaatctgttgtaatagctccttttttcattttggattttatttgagtcttctctcttttttcacagtgtagctaaggatttgtcaacttygtttaatttttcagaaaaccatctcttagttttgtttttttctattatctgtttgatttatttctgctgtaatctttattatttcatttttttctgctaagtttgggcttagtttgttcctctttttctagttcgttgagttataattttaggttgcttatttgagatctttcttcttttttaatgtttgcttatctccataaacttcccacttagcactgcttttactgcatcctataggtttggtgtgctgtgttttaattttcatttgaagatatttttaaaattccctttggttttcctctttgacccaatgcttgttcaacatgtgatgtttgatttctgcctatttgtgaatttttccatttttttttactgttattaatttccagattcatttcttgttgtaaaaaaagatttttggaatgatttaattctccttacatttcttaagact

SEQ ID NO: 808231 - DNA, 600 bp, Homo sapiens
gcctcggtctcccaagtgttgggattacaggtgtgagcctttttatttctgagaaatctgttgtaatagctccttttttcattttggattttatttgagtcttctctcttttttcacagtgtagctaaggatttgtcaacttcgtttaatttttcagaaaaccatctcttagttttgtttttttctattatctgtttgatttatttctgctgtaatctttattatttcatttttttctgctaagtttgggcttagtttgttcctctttttctagttcgttgagttataattttaggttkcttatttgagatctttcttcttttttaatgtttgcttatctccataaacttcccacttagcactgcttttactgcatcctataggtttggtgtgctgtgttttaattttcatttgaagatatttttaaaattccctttggttttcctctttgacccaatgcttgttcaacatgtgatgtttgatttctgcctatttgtgaatttttccatttttttttactgttattaatttccagattcatttcttgttgtaaaaaaagatttttggaatgatttaattctccttacatttcttaagact

SEQ ID NO: 808232 - DNA, 600 bp, Homo sapiens
gcctcggtctcccaagtgttgggattacaggtgtgagcctttttatttctgagaaatctgttgtaatagctccttttttcattttggattttatttgagtcttctctcttttttcacagtgtagctaaggatttgtcaacttcgtttaatttttcagaaaaccatctcttagttttgtttttttctattatctgtttgatttatttctgctgtaatctttattatttcatttttttctgctaagtttgggcttagtttgttcctctttttctagttcgttgagttataattttaggttgcttatttgagatctttcttcttttttaatgtttgcttatctccataaacttcccactyagcactgcttttactgcatcctataggtttggtgtgctgtgttttaattttcatttgaagatatttttaaaattccctttggttttcctctttgacccaatgcttgttcaacatgtgatgtttgatttctgcctatttgtgaatttttccatttttttttactgttattaatttccagattcatttcttgttgtaaaaaaagatttttggaatgatttaattctccttacatttcttaagact

SEQ ID NO: 808233 - DNA, 621 bp, Homo sapiens
tgtacatgccaatgctagtaaggaaaaagagctgtctctcccatgatggaagagctctaatgaaattaatatcaagcaggcccctggctgttttccacagagaaggtcatcctatagggatgcctgtgttggtctctgctgttgacagattgtcacccagcagtggcttcagccaggccagctccagttagtggaaattcacaytgatgagcccattatcagcctctatccctgccaccatggccacatttttttggagtctgttggacaatgacaggagtggttgacggaggctgcctggtgtccatagaacaggtcaccctactcacctgattagcaaaatcacttcattttcacagaagacttagtgagtatttatatatggaaaaaaattctcatgctttttgcccactggaggaggtctactcacacatctctccccctgacatatttgtgatcagtattcctgttgtatctctcccaagttcctgaacatccttgaccatattccaggaccctgagtcacagcccatgaattaggaacctctgcccatctctttgcaggtgacatgagccaattacactgcttaaaattctgctttaaggagaatgttcttccac

SEQ ID NO: 808234 - DNA, 621 bp, Homo sapiens
tgtacatgccaatgctagtaaggaaaaagagctgtctctcccatgatggaagagctctaatgaaattaatatcaagcaggcccctggctgttttccacagagaaggtcatcctatagggatgcctgtgttggtctctgctgttgacagattgtcacccagcagtggcttcagccaggccagctccagttagtggaaattcacattgatgagcccattatcagcctctatccctgccaccatggccacatttttttggagtctgttggacaatgacaggagtggttgacggaggctgcctggtgtccatagaacaggtcaccctactcacctgattagcaaaatcacttcattttcacagaagacttagtgagtatttatatatggaaaaaaattctcatgctttttgcccrctggaggaggtctactcacacatctctccccctgacatatttgtgatcagtattcctgttgtatctctcccaagttcctgaacatccttgaccatattccaggaccctgagtcacagcccatgaattaggaacctctgcccatctctttgcaggtgacatgagccaattacactgcttaaaattctgctttaaggagaatgttcttccac

SEQ ID NO: 808235 - DNA, 621 bp, Homo sapiens
tgtacatgccaatgctagtaaggaaaaagagctgtctctcccatgatggaagagctctaatgaaattaatatcaagcaggcccctggctgttttccacagagaaggtcatcctatagggatgcctgtgttggtctctgctgttgacagattgtcacccagcagtggcttcagccaggccagctccagttagtggaaattcacattgatgagcccattatcagcctctatccctgccaccatggccacatttttttggagtctgttggacaatgacaggagtggttgacggaggctgcctggtgtccatagaacaggtcaccctactcacctgattagcaaaatcacttcattttcacagaagacttagtgagtatttatatatggaaaaaaattctcatgctttttgcccactrgaggaggtctactcacacatctctccccctgacatatttgtgatcagtattcctgttgtatctctcccaagttcctgaacatccttgaccatattccaggaccctgagtcacagcccatgaattaggaacctctgcccatctctttgcaggtgacatgagccaattacactgcttaaaattctgctttaaggagaatgttcttccac

SEQ ID NO: 808236 - DNA, 575 bp, Homo sapiens
attaaattaatgcaaataaaaataaattttaaaaagaattattttagtctttgtggcccaagaatcaactttagggatattacataggtacttataacatcatttacaatgtaaccatttaaaaagataaaaatcactgttatctctgggccatgcaaaaacagttgtcaggccaggagtggccacaggatgtggttgaacggtccctggtttgcagagttatctgaatgttgaaaattccaccagcatatgatctaggtggggatctctctgtgagggtcactgtatttcacctcctgtattcggctgaggkctttccttggataagaacatgctcacatcatctatttgatgggctcatgggtttgcccaagacaaccctgtgtcacaatcacataacttttatctgcattgcttgttctgagttttgggagagctttaatatatcaggaatagactcctcctaagggaaaagtctgagggatatggatgggcaaggggtcaagaaagcttctaccaaagctggaatatccagggcaggctcagagagaaggatcctaatatcagcatttgac

SEQ ID NO: 808237 - DNA, 617 bp, Homo sapiens
aggggtcaggcctgggttactgtgggtggggcctgggaggggcccttgtggcatcctggggagtctctcccacggctccttgtttgactttcctgtggctgctggctgttatcacaaatgacccctaatttagtgccttaaaacatcacacactgattctctcccaggtctggaggtcagaagtccaaaatgagtccttgggggctaaaatcagggtcccagcagggccggctccttctggggactctggggagaattcgtttccaggacttttccagcttctagaggacaacctcagctcctggccccttcctccaacttcagagcctgagctcagcatcttcaaatctctctsttgctcttctctccctccctaccttcttctctccctctcttccttctctctctctccgtctccctccatccccacatcttgtcctctcactctgaccctcctgcctccctctttcttctataaagaccccagcttggacccacctggataacccaggagcatttcccacctcaggctcctaattgacatgacatctgcaaagtccctgtggccacacatgacacatagacaggtccaggattgggacacgactgtccccgcg

SEQ ID NO: 808238 - DNA, 644 bp, Homo sapiens
agaggagggagcaactgcaaacaaaaagtttaagcgatttctgcaaagagcaataaaagccatagagcagcttgggacaaggtcaggtcaggatgagcagaagttgggaaggaaagaaggaagccaggatggacttggagagtttttaccagttcctcaggcaggaagaattgtatggtaggtcagagcatatttctaggaagacctcggttgacaaatttctctgccactgagagatgacaatttaccttggtarctaatctctctcctcatgttcccatctatttgatattgatttaatatgagtagctacctcccatgtgtataataggaaatgtatgggagaatgcatattaattcctgaatagaatatctggttccatgaatgatggaagttggttagaatttattattggaaactcaccctgcactacctatagttggtttattttaattatacttatattcattatatagtaactcatatatatttgtcatttcttttcttatattcaaaaagtctctacataaataaactctgcacctatggtcattgctgggtatctgttctatacacagcaaggagccagacgccctatcttacttgttcactttccagcttctccttagaaaaaaaaatacaa

SEQ ID NO: 808239 - DNA, 588 bp, Homo sapiens
actgtagaggttcttttggttttggagtgaatcaggaaacagccatcagctgagtgaaggtgagggtggtggtgggtgtttgaagacaagggaaaagtgtgaaagaattgtttggagaggaaggaaagaagatgtggactggggatgtttccaatgttcgagcacgcagggctccacagttatctacatttgctgtcccttggagcaggagagaagaaaacggttgggacatattctgagcagactgtagaggtaaaatacgtagtttttttttgttttttgagatggaatctcgctctattgcccaggctggagtgcagtggcacgatcttgactcactgcaacctccrtctcccaggttcaagcgattctctcacctctgcctcctgagtagttgggactacaggcacgcaccaccacacccagctgattttggtatttttagtagagccagggtttcaccatgttggcgaggctggtttcaaactcctgacctcatgtgatctgcccgccttggcctcccaaagtgctgggattacaggcatgagccactgtacctggccaaatatgtagtatttttaataggat

SEQ ID NO: 808240 - DNA, 538 bp, Homo sapiens
acgggagcctggagctgcaggatcccaggggaggggtctctctccccatcccaagtcatccagcccttctccctgcactcatgaaaccccaataaatatcctcattgacaaccagaaatcttgttttatctcattttttttctcacataaattgctagcctccccggggttctcagtgtggggtacagggaattctgcacccagtgtgaaaatcacccaagggaggaggctcacagcctccctgagtcatctccccagagggtccttcctctcccagtcaccccttctccaactctccactgtacccctgagcyaccagtctggcatcagttcagaccagtcccacaccctcctaaattttacttctcaataaatacctgatcatgtaaaacgcagcatttctaatgtgcagtctctgtctggtcatgtgtctgggctgaagggtcactgctcagggacagggggcagttccaggtgagatcccatgtctccgtcatcccacaccccacccaacctgccagggaaccgggtgagctcc

SEQ ID NO: 808241 - DNA, 590 bp, Homo sapiens
aactctaaccccacccacgggagcctggagctgcaggatcccaggggaggggtctctctccccatcccaagtcatccagcccttctccctgcactcatgaaaccccaataaatatcctcattgacaaccagaaatcttgttttatctcattttttttctcacataaattgctagcctccccggggttctcagtgtggggtacagggaattctgcacccagtgtgaaaatcacccaagggaggaggctcacagcctccctgagtcatctccccagagggtccttcctctcccagtcaccccttctccaactctccactgtacccctgagctaccagtctggcatcagttcagaccagtcccacaccctcctaaattttacttctcaataaatacctgatcatgtaaaacscagcatttctaatgtgcagtctctgtctggtcatgtgtctgggctgaagggtcactgctcagggacagggggcagttccaggtgagatcccatgtctccgtcatcccacaccccacccaacctgccagggaaccgggtgagctccctgtgccagtgggaactgcaatccaaggcacaaaat

SEQ ID NO: 808242 - DNA, 526 bp, Homo sapiens
ggaaaacaccctgacccctctgcctggcatagaccttcagacacagagcccctgaacaagggcaccccaacacctcatcatatactgaggtcaggggctccccaggtggacaccaggactctgaccccctgcccctcatccaccccgcaggtcagcccaaggctgccccctcggtcactctgttcccgccctcctctgaggagcttcaagccaacaaggccacactggtgtgtctcataagtgacttctacccgggagccgtgacagtggcctggaaggcagatagcagccccgtcaaggcgggagtggagaccaccacaccctccaaacaaagcaacaacaagtacgcggccagcagctayctgagcctgacgcctgagcagtggaagtcccacagaagctacagctgccaggtcacgcatgaagggagcaccgtggagaagacagtggcccctacagaatgttcataggttctcaaccctcaccccccaccacgggagactagagctgcaggatcccaggggag

SEQ ID NO: 808243 - DNA, 662 bp, Homo sapiens
aacttccttcagaccacacactcctcaatttgttcccaagctccaaagtttctaaagtcactgtctaaagggcccacagtgtttttgtggagtggtggaaaagctctggggatggaaagtggtggtggttgcaaagcattctgaatgtacttactgttgctgaatgcacacttacaaatgattgaaatggtttaaaaattgttcattttgccataataaaaatactgcacactctggaggaaagtaaacctagtttaattttgaaattgttcaatggataccaatcaaagaatagtgtagcaagcaccatttcccctstcgctatagcagcaactgatccccttgtgctcttttggactctctcccctgctctctctctctcaataataagcaatgctcttctctccagtccaagctcacacttccccagttgtgcaggaatgcctattgtaactgttaatttatttccaggcagagtcctcaagattcctctgctcatattctgttctcagctgtctggagccagcatgacaagtgagccaagatcacttgtcatgagagacttgtggaaggttttgcaaaaagttccccaagaaaaaacaatgctcattgttgacagcaggtccatttccacacagtagggccatgctgggtgtgcagtg

SEQ ID NO: 808244 - DNA, 586 bp, Homo sapiens
tacaaatggccaaagggtgtattttttaaaatgctcaacatcactaatcatcagggcaatgcgaatcaaaatcacagtgagacatcatctcaccccagctagagtgactaatatcaaaaagacaaaacataacacattctggcaagaacgcagtgtaaaggaactcttatacactgttatatactgttggtgagaaggtaaattttaaattaatayggccattatgaaaaacatgatagtgtttcagaaacactaaaaatagactatcatcatacaatgcaataatcccactactgggtatttaatcacaggaaaaaacgtcagtatatctaaggaattcctgcactcccacgtttactgcagcactattcataatagcaaagctatagaatcaacctgttttcatcaacagatgaatgcataaggaaaatgtggcatgcatacacgatgaaatactttccagtcataaacaaaagaatgaaatcttatcctctgcagcaacatgatggaactggaggtcattatgttaagtgaaattagccaagcacagaaaaacaaatgtcacatgttctctctcatgtgggag

SEQ ID NO: 808245 - DNA, 596 bp, Homo sapiens
atgggctcccagccgggctgtaagtgaggcaagaccccttcttcagtgcacggggctcagtgcagctgcctccctgaccaagtcttcctgggacactaagcttatcagtttctctcccccagggacagtttttggttgtcctaagcctagctcagctctgctatgaactttgcatcctaagagcccattaaacacccccttgtgcctcaatggaataacctggagtaaatagtgtgaggtgcccctgctttctgctcccagggcctcttctcctcggtggcaccagcactgccctattgaccagcaatcctcacctgcccattcaggcctctacactgcctaccgtgaacagtcacagatcacaaactgattgccaaatttgtgcagatcatcttgacagtttctgtggaactgggtgccttctcatagaaccaggaagtcacaagccaggccagctctagagaagcaaytgggggagtaacatgcatcacagcgcctggacacaacaaagggattttgctgtagtcctactaggacacatcctagtgatgtctctgagaaccagtcttggtccctgcaacagaaagcctactaaa

SEQ ID NO: 808246 - DNA, 595 bp, Homo sapiens
ggtgggcccaggagtcatcagcaaaagtggaattcaggactcaatggtgctcagaacccccacaatctattggctgtgcttggccccttttcccaacacacacattctgtctggtgggtggaagttaaacacgcggggaggaggaaaggaataggatagagagtggaatggggtcggtaggggtctcaaggactggctatcctgacagccttccccgcgttcaggttgaccaacatggcctgcagccagagggcacccacctgaccctyaaagagaggacaagttgggtggagtctgtggctgacactctgtgcacaatccttacaacactggtgatggtgagaagggaaagacgacaagccagggggcatgatcccagcatgtgtgggaggagcttccaaattatccattagcacaagcccgtcagtggccccatgcataaatgtacacagaaacaggtggggtcaagcagggagagagaactggccagggtataaaaagggcccacaagagaccggctctaggatcccaaggcccaactccccgaaccactcagggtcctgtggacagctcacctagcggcaatggctgcagg

SEQ ID NO: 808247 - DNA, 526 bp, Homo sapiens
aattcaggactcaatggtgctcagaacccccacaatctattggctgtgcttggccccttttcccaacacacacattctgtctggtgggtggaagttaaacacgcggggaggaggaaaggaataggatagagagtggaatggggtcggtaggggtctcaaggactggctatcctgacagccttccccgcgttcaggttgaccaacatggcctgcagccagagggcacccacctgaccctcaaagagaggacaagttgggtggagtctgtggctgacactctgtgcacaatccttacaacactggtgatggtgagaagggaaagacgacaagccagggggcatgatcccagcatgtgtgggaggagcttcyaaattatccattagcacaagcccgtcagtggccccatgcataaatgtacacagaaacaggtggggtcaagcagggagagagaactggccagggtataaaaagggcccacaagagaccggctctaggatcccaaggcccaactccccgaaccactcag

SEQ ID NO: 808248 - DNA, 526 bp, Homo sapiens
aattcaggactcaatggtgctcagaacccccacaatctattggctgtgcttggccccttttcccaacacacacattctgtctggtgggtggaagttaaacacgcggggaggaggaaaggaataggatagagagtggaatggggtcggtaggggtctcaaggactggctatcctgacagccttccccgcgttcaggttgaccaacatggcctgcagccagagggcacccacctgaccctcaaagagaggacaagttgggtggagtctgtggctgacactctgtgcacaatccttacaacactggtgatggtgagaagggaaagacgacaagccagggggcatgatcccagcatgtgtgggaggagcttccaaattatccaytagcacaagcccgtcagtggccccatgcataaatgtacacagaaacaggtggggtcaagcagggagagagaactggccagggtataaaaagggcccacaagagaccggctctaggatcccaaggcccaactccccgaaccactcag

SEQ ID NO: 808249 - DNA, 619 bp, Homo sapiens
tcttctgttccattgcacccagagatgcaaagcaagacagttcctgatcaccagcctccatggtccgaatggtagcattggcccatgctgtgtccccctcccaggaaaggaaggagctcagctcttggtcttccaggaacatgtggaacataacttctttggctggaaacaccctagccacctcgcagctcacagtctccgccatcccagcctccaaaagggaagagacccagatgtggggactctgagagaattctgccaaaaaaatgaggacaagaagagaaaggagaaaagccatgataaatcacayatcatgcaggacccttcaaggtaggaagggagtggggctaaaatgtctctcttccgcagggtgagtttaaagctcaagcaaaggtggagctcagttactctcacatcctcaccctaaaccccgtgagaacttagtcccaaaggccaaggcaagatgagccccaggattcctcctgcacttgagttctgactcaccaaagatccggactattctgatgggtgagctgccttgaaagagcctcccaccttgcaaactcaagtccagttctgcatggcaggaagaattgcatctgtcattctccttttgggc

SEQ ID NO: 808250 - DNA, 583 bp, Homo sapiens
cacaaatattaactcaaaatggagcatgggcataaatctaaaacttcaaactgtaaaacatttagaaaaaaataggaaaaaaactatcaggatctagtgttagtggaagagttctaaatgtgatccataaaacaaaaacaaataaactggactacatcaaaactaaaaaattctactctgtgaaagacctaattaagaggacaaaagacaagctacaggctggagacaatatatttaatccacgtatctatgaaaggaytcatatctagaatatataaacaaccttaagaatctgacagtaaaaaaaaaaaatcagactaactggaccactcatacattgctgatggaaatgtaaagtggtacagccattttggtaaacatcattgctctctgacaaagatacggtgggtcccactgatgaactgtgctgccacagtaaatgtagccactatgcctatctccattctgaagatgtgtcacttcctgtttcagactcaaatcagccacagtggcagaagcccacgaaatcagaggtgaaatttaataatgaccactgcccattctcttcacttgtcccaagagg

SEQ ID NO: 808251 - DNA, 581 bp, Homo sapiens
ctgaccctgccaagctgctgccttctcctgccccaacctcacccccagccaggcctcactcttgctagttcctttagttcttttagtcaatatatttttgtcttcgcatataagtataaataaacatatttttaaatttcttggctgggcccagtggctcacgcctataatcccagcacttctggaggccaaggtgggcggatcacctgaggttaggagtttcaggccagcctggccaacatggtgaaaccctgtctctactaaaaatagaacaattagctgggcttggtaatgtgcacctataatcccagctactggggaggctgaggcaggagaatcacttgagcctggggagcagggggtgcgggaggttgcagtgagacaagatcgcaccagtgcactccccatcctgggtgacagagtgagactctgtctcaaagaaaataaataaataaatacatttcttgaggcgtttcttgttaaatcattcatggagaggcatcccaaacacyacattcaacaaaacactctgaaaaatgttttcaaatgcaatataacacagcagagatttgatgctctgt

SEQ ID NO: 808252 - DNA, 574 bp, Homo sapiens
tagaaattttcctatacaagataatgcaatctgttggacttcaaatgcatttaaatggctcggggatctgtttgacaaaaacatgtgtgatgatagagacataaataatgatacacatccaatatatcctctccattagattgcataatttgatttcggtttatacagkataacttcagtagtcattaagacgtgtattttgttaggaaacagtgaaagaaaatcacccatgtacagtgttttctggtttaaaatgtactgttttttaattggcaaattataattatatacatttctggggcacaatggaatagtttgatatctatatataatggggaatgataaaatcatcaatgaactcctctaccatctcactgcttatcattttttctgaggcatttgaaatttactcaagttattttgaaatataaaatacatgattaactatagtcaccctgacgcaaaatagatctcaaaacattcctcctgtctaactgaaattttgcactattttcccagcagctcctcattccctccctcctcttctccctgcagcctctagtagccatcattt

SEQ ID NO: 808253 - DNA, 529 bp, Homo sapiens
cccatcaccctctagatttctccagcctgaatcagacacctgtccattacaccccaaattccaagagctccctgtcaagcgctgagtggtttcttgaagcccttgtcactatgtgaaagtgaaaggaaacacttcccaccatcccccagactcaccacactttgtctaaaatattctttgcctgatttccaccttgtccccagctgaattcctagccttcccttagacagccaggagccaagtagcagagcatgggtggyagcactaactctcctgtacctcctttaaagtcctgcattagtggcaccagcccctcaccttggagtggagacagtctccaattatttgtagttctgtttttcttttcaggccttaggtaaaactgagacaataaaagaaggaagggaggaagcagggtgggaaggagggagggaaggagaaaaattctcattttggtatcattataaagataggacctaatagttgccatatcaatagcttctgactcactagttgacatgtatcattg

SEQ ID NO: 808254 - DNA, 522 bp, Homo sapiens
attaccttaattaacctcatagcaatgttgtgtcaaatgtactgagttatcaccacattgcatatgaggaaaatgaaacttagaggggtaaaataaatttcccaaggttacacagctatgaaagctgagtagggatttgattttagagcatgtgtaacaacctgtacctgaccatttcctgaaaatagggctactgcaaaaaccaggagtggaactcatctaattccaatgaatgatctacctatgactctctagacaagtcacagaatttacccagtgctsagttcactcttctgtaaaatgaagatgttggatttcatgtcctacagggcctctctgagctctcaaattacatgcccataaaatatactagttgtaaactattagtagaaggagctttaaaatcactgtagggagtccaagatttgccactaactttttatgattggcagtggtgagccatttaacctctccagttatttgcctcacttcaaaggttatttttcatatatatgtcagtgc

SEQ ID NO: 808255 - DNA, 559 bp, Homo sapiens
agcgtgcgcacatctggctgggctgcagcagcacccaggctcagccctgactttgctccgagattggagtgggcgctggcagcagggagaaaccaggcagtgggagcaggcacttctgagcctgcgagggcggtggcagttggggggtgccttccccggcccccaagtatacagagatgcctgggtccrcagcggtggcttgggcggctgcagctgcactggggagggtgggactcctacctgctccccagcccagagagcacagggatgcctgggtccgcagcggtggcttgggcggctgcagaagcactggggagctcctgtcccaactcggaaggggcggggttcctgcttgtccccggctcctccgggcttcctggagcgtgccgccccatccacgcctctctgctgcagcaggtgtgatgtacatacaaaagtagtgtgttgttgcctactgcagacacatttcctggatattttcaggacatttaagaaggccagtaaccaggtcatgtagcattctctgagtgtgtatatatatggtggggtggggaggttg

SEQ ID NO: 808256 - DNA, 559 bp, Homo sapiens
agcgtgcgcacatctggctgggctgcagcagcacccaggctcagccctgactttgctccgagattggagtgggcgctggcagcagggagaaaccaggcagtgggagcaggcacttctgagcctgcgagggcggtggcagttggggggtgccttccccggcccccaagtatacagagatgcctgggtccgcagcggtggcttgggyggctgcagctgcactggggagggtgggactcctacctgctccccagcccagagagcacagggatgcctgggtccgcagcggtggcttgggcggctgcagaagcactggggagctcctgtcccaactcggaaggggcggggttcctgcttgtccccggctcctccgggcttcctggagcgtgccgccccatccacgcctctctgctgcagcaggtgtgatgtacatacaaaagtagtgtgttgttgcctactgcagacacatttcctggatattttcaggacatttaagaaggccagtaaccaggtcatgtagcattctctgagtgtgtatatatatggtggggtggggaggttg

SEQ ID NO: 808257 - DNA, 559 bp, Homo sapiens
agcgtgcgcacatctggctgggctgcagcagcacccaggctcagccctgactttgctccgagattggagtgggcgctggcagcagggagaaaccaggcagtgggagcaggcacttctgagcctgcgagggcggtggcagttggggggtgccttccccggcccccaagtatacagagatgcctgggtccgcagcggtggcttgggcrgctgcagctgcactggggagggtgggactcctacctgctccccagcccagagagcacagggatgcctgggtccgcagcggtggcttgggcggctgcagaagcactggggagctcctgtcccaactcggaaggggcggggttcctgcttgtccccggctcctccgggcttcctggagcgtgccgccccatccacgcctctctgctgcagcaggtgtgatgtacatacaaaagtagtgtgttgttgcctactgcagacacatttcctggatattttcaggacatttaagaaggccagtaaccaggtcatgtagcattctctgagtgtgtatatatatggtggggtggggaggttg

SEQ ID NO: 808258 - DNA, 625 bp, Homo sapiens
aggaatgcccagatcattttccaaagtggctataccattttacatgcctaccaataatgtatgaggttctaatttctctatatcctcaccaacttttttatcttttttttttaataatagccatcctagtgggtataaaatggcatctcagtgtggtttgatttgcatttctctgatggctagtgatggtgagcaccttttcatgtgtttactggccatgtgtatatcttctttagagaaatgtctatcagaccgtttgcccattttattttttatttatkttttttatttttgacacggagtcttgctctgtcgcccaggctagagtgcagtggcacgatctcggctcacggcaatcttcgccttctgggttcaagcaattcttctgcctcagcctcctgagtagctgggattacaggtgtgtgccaccacacctggctaatttctgtatttttagtagagacggggtttcattatgttggtcaggctggtctcgaactcctgaccttgtgttccacccgccttggcctcccaaagtgctgggattacaggcatgagccaccatgcccagcccattttgttttgagacatggtcttactctgtcacccaggctggagtgcagtg

SEQ ID NO: 808259 - DNA, 593 bp, Homo sapiens
ctcattgtggttttgatttgcatttctctaatgatcagtgatatggagcttttttttcatatgcttattggctgcatgtatgtcttcttttgaaaagtgtctgttcatgtgccttgcccactttttagtggggttggttttttttctcttgcaaatttgtctaaattccttataaatgctggatattaaacctttgtcagatgcatagtttgcaaaatttttccccattctgtaggttgttcatttactctgttgattgtttcttttgcwgagcagaagctcttgagtttaattcaatcccacttgtcaattttttgattttgttgtgattggtgtctttatcatgaagactttgcctgttcctatgtctaggatctattttttttttttgagacagagtctcactctgtcacccaggctggagtgcagtggcacaatctcggctcactgcaacctctgctcccgggtttaagtgattatcttgcctcagcctcctgagtaactgggactacaggtgtgcaccaccatgcccggctaatttttgtatttttactagagatggggttttactatgttggccaggctggtcttga

SEQ ID NO: 808260 - DNA, 593 bp, Homo sapiens
ctcattgtggttttgatttgcatttctctaatgatcagtgatatggagcttttttttcatatgcttattggctgcatgtatgtcttcttttgaaaagtgtctgttcatgtgccttgcccactttttagtggggttggttttttttctcttgcaaatttgtctaaattccttataaatgctggatattaaacctttgtcagatgcatagtttgcaaaatttttccccattctgtaggttgttcatttactctgttgattgtttcttttgcagwgcagaagctcttgagtttaattcaatcccacttgtcaattttttgattttgttgtgattggtgtctttatcatgaagactttgcctgttcctatgtctaggatctattttttttttttgagacagagtctcactctgtcacccaggctggagtgcagtggcacaatctcggctcactgcaacctctgctcccgggtttaagtgattatcttgcctcagcctcctgagtaactgggactacaggtgtgcaccaccatgcccggctaatttttgtatttttactagagatggggttttactatgttggccaggctggtcttga

SEQ ID NO: 808261 - DNA, 601 bp, Homo sapiens
ttatgctatatttttaaaagcttctcatgaattacctaaaataaccatgtatttacttttctttgccagaaagaggaaacattttattttaattttaaaaaattcaattctgaaaacatagctaaagctttaacctttctcactctgacccaatgtattcctaatatagctttgcccttgacttccacagctaaatactagtttctcaagtgatttaggagacttgacttcattattcaaaactgaaattatttagcttgttctaaatgcaactttgcttcccactatgtctatttttccattacttttcaaatcatctgggcttaaatactgagcaytttctccttttctttctcaatagtttgatagagtcctgtaatttttttttaaagctgtctctcatatttattatattattattttaatatacttcattacacttccctagaacagatcatcagctctctttaagtaatttgtctgaggtcacccagttggcatttgaactcatattggtttgattccaaattccatactggtttctagtaaaggtctctgtcactgtactacattatttctgtgaaatcattcatgctgtttt

SEQ ID NO: 808262 - DNA, 649 bp, Homo sapiens
cttgtcttctaagtttgctaagaggctttcttttttttttttcaaatcacaactgaaagtagaattttattaaatatcttttctgcatctagtgaggtgatcatatgattttctgtccttttttcctgttaatatagtaaattataagttaaatgaattaattttccataagcttcatgtggttgtgatatattagcattgttaaatatcactaagttagatttacacacacacacacacacacattattaatgtgatttttatttcttggaatgtcctttacaagttttggttttggtggcttcataaaacaagatgagaagtgttccatgttttctctctctttttttttttttggaagtattcgtgtaagattaatgttatttactctycaagtgttggaaacactttgtcagtgaagccatttaagcctggagttttactttgtggtgaggtttttaataacaggtttcagttctttcatagatctaggactatttatttttgtttcaattttattgagttgtgtttcttaaagaatttgtccactttctctaaggctgcttctaccctaactcccttgctcttcttttcttaggtcccccaactacacttatattagtctttcccactattatatatatatata

SEQ ID NO: 808263 - DNA, 649 bp, Homo sapiens
cttgtcttctaagtttgctaagaggctttcttttttttttttcaaatcacaactgaaagtagaattttattaaatatcttttctgcatctagtgaggtgatcatatgattttctgtccttttttcctgttaatatagtaaattataagttaaatgaattaattttccataagcttcatgtggttgtgatatattagcattgttaaatatcactaagttagatttacacacacacacacacacacattattaatgtgatttttatttcttggaatgtcctttacaagttttggttttggtggcttcataaaacaagatgagaagtgttccatgttttctctctctttttttttttttggaagtattcgtgtaagattaatgttatttactctccaagtgttkgaaacactttgtcagtgaagccatttaagcctggagttttactttgtggtgaggtttttaataacaggtttcagttctttcatagatctaggactatttatttttgtttcaattttattgagttgtgtttcttaaagaatttgtccactttctctaaggctgcttctaccctaactcccttgctcttcttttcttaggtcccccaactacacttatattagtctttcccactattatatatatatata

SEQ ID NO: 808264 - DNA, 554 bp, Homo sapiens
tcacagcagcattagccataacagcccaaatgggaaaccaaccaaatgtcaacagttgaaggacacaatcaatggtgacgtattcatccaggggaatactatgcagcaacattgttacatgcagccacttgaattaatctgccaatgttgagcaaagaatctagacacaaaataatacttcccttcagagtggaggagaaggctgagtgcggtgactcacacctgtaatctcagcactttgggaggccaaggtgggtgggtcacctgaggttaggagttcaagaccagcctgaccaacatggtgaaatcccgtctctactaaatacaaaaaattagccgggcgtggtggcacatgcctgtaatcccagctactcgggaggctgaggcaggagaattgcttgaatccraaggttgcagtgacccgagatggcgctattgcactccagcctgggcaacaagagccaaactctgtctccaaaaaaaaaaaaaaaaaaaagagtggaggagggaaaaatattatactgaataatttcctttatttaaagcctcaaaac

SEQ ID NO: 808265 - DNA, 566 bp, Homo sapiens
cgacttgtccgaatattagtcctgatgcccccaggcagtcctcacacactgtccccacactggtaagcatgactgcccacacccccaagcttgacccgccctcactgcttctctcctcacaccccacttggcagcacgccctgccggctctgccttcaacacacatccagaagctgactatgctttgcacttgccttgcccactttatctgctgtcgctgccccttgcgacatcactgcaccatcctcctctatgcactccctgctccacccttgtccttcactctgtttgtagcatagcagccagaggggttccgctgacccctagaccagatcattttcctcctctgctcaaaatgtccagtctcgcccagagcagaagccagagaagccagagtcctgaygacgacccctgaagtcctgacccgcagaggccaacagctgcctcttcctactgctccccaagcctctctcgctggatggctgtgctccagccaggggctcctgcaccccacaatgctcctcacaggatccttgcacttgccccgctgtcttgttctaagggct

SEQ ID NO: 808266 - DNA, 498 bp, Homo sapiens
gtaaactcagcactttgggaggccaaggcttgcttgcgtgcaggagtttgaggccatcctgggcaacattagcgagaccctctctctagaaaaaaaaatcaaaacttagctaggtttggccactctaggcacgctgcctatggggtagccctgctctgcaaagagcagtaaaacataaagttagccgggcgtggtgacacatgcctgtggtcccagctattcaggaggctgaggtgggaggattgcttgaagccgggagtttgaggctgtagggagctgwgatcgccccacctcgctcagcctgggtgacagagtgagaccctgtatcaaaaaaataaaaatataaatataactagagcacgcagcatcatcactatgttacagaagggaaaatgaggaacagaacgttaacaccaaagtcagaaagttttaaaggcttggtctccatgcttctactttgccactgcaagaccacagtgaattaagtctcatccctgc

SEQ ID NO: 808267 - DNA, 573 bp, Homo sapiens
ttccaccccgcaatctctagccctctctgggcacagcagcaattgggaactagttcctgtactgcctttatctcattttacaaaacaaacttctacaaagaagctggaaaggaaggaggagaaaggattatcatgcaggcacagggagggggcctagagaagagctctggcagattatgtccctcttaaaaaatgcaaccagaatcatcaacaaagtatcacctcaaaaatatgcaggagaaaaagaaaggaatcaatgttggggtggttggagcagaaggagccaaactgcccagaaggtgtcctctgaaggctgcgaggagcagaytaggtcagccccagaggcagatggcacacacagaatggcaggattaccggtagctgcagatttattgacagaagccctagagactgggcctgctgcccagggaatgtgggggctcacttatcaaagactactggaaaatggctgagccggcaaccccttccactacagtgatgcctggttttcttgcacagcctgtaactctgcctgtaacaaggagaaaattaaagcaacgaatctggccaaat

SEQ ID NO: 808268 - DNA, 573 bp, Homo sapiens
ttccaccccgcaatctctagccctctctgggcacagcagcaattgggaactagttcctgtactgcctttatctcattttacaaaacaaacttctacaaagaagctggaaaggaaggaggagaaaggattatcatgcaggcacagggagggggcctagagaagagctctggcagattatgtccctcttaaaaaatgcaaccagaatcatcaacaaagtatcacctcaaaaatatgcaggagaaaaagaaaggaatcaatgttggggtggttggagcagaaggagccaaactgcccagaaggtgtcctctgaaggctgcgaggagcagacwaggtcagccccagaggcagatggcacacacagaatggcaggattaccggtagctgcagatttattgacagaagccctagagactgggcctgctgcccagggaatgtgggggctcacttatcaaagactactggaaaatggctgagccggcaaccccttccactacagtgatgcctggttttcttgcacagcctgtaactctgcctgtaacaaggagaaaattaaagcaacgaatctggccaaat

SEQ ID NO: 808269 - DNA, 586 bp, Homo sapiens
acaggagtatggaggtttggatgctaatagaacagcagtgtcttactgcttggagttctcttgtttcttgtcctatcaccgtagcctttggatcacagcaatttttccatgactccatacttttcagttcttgaatattttttcctttattcctcttgtctctgtaaagacatcaactggagttggactgtaataccaggtatctccagaagatggcactatttaacagattttataaataatttgatgtgagtcactgtcatctgaagcttgttgccttttctttctttcttctttcttttttttccccatcaattctgtatgtttgaaatgctgggwtttaagttagttagaataagggatgtctgtaatttccctaaattgagaagtaatatgcaaaggttgatatcagaagtcatatgctcaccttgcaacaccaaataatactggcccatttgtgatttttgaaagtaacactccataataaatggatgtatatatagaagcataacaaaaatagaagcacataaaagtgaaaagtctcataaacgccattgtcactactcatgtaattgctgttacaaat

SEQ ID NO: 808270 - DNA, 662 bp, Homo sapiens
tgtacacctggctctgtcttctagatagcagtagcagaattagtcaaagtgctaaagtctttgaaatacatagaaaaaataatggcgtcagctgtcctctctctccgccttggctgccaaacagggaagggcccagtggacacgtgacttgcgtgacctgacctatcattggagatggctcacactccttaacctgtccccttgccttgtatccaataagtaacagcgcagccagrcattcggggccattaccgatctctgtgccttggtggtagtggtcccccgggcccagctgtcttttcttctgtctttttcttgtgtctttatttgtacaatctcttgtctatgcacacgaggagaaaaaacccacagacccagtagggctggaccctacaggcaggacaatctcccactgagcaactctaggagatgtagcctaagaccattcagccaggaggcagcagacccacggccaagaccccagcaagcagcggacgccacccaggcagtaacaggctttgcctggcttttggagttacacacccaagtcaagttcacctgaggaggaacatgactgggggacagggtcctgcccagggttggttgcatttggcttctggcctgagcccgcccttattggatccctccttaggccaggagca

SEQ ID NO: 808271 - DNA, 524 bp, Homo sapiens
tgagacggaatcttgctctgttgcccaggctggagtgcagtggcgcaatttcaactccacctctcgggttcaagcgattctcctgcctcagcctccacaggcgcctgccaccacacttggttaattttcgtattttcagtagagatggggttttaccatattggccaggctggtctcgcactgctgatctcgtgatcygtctgtctctgcctcccacagtgctgggattacaggggtgagccaccacgcccaaccatcatggctcactgtagtcttaactcctggcctcaagcaatcctcctacctcaacctcctgagtagctgggaccagcggtgcatgccgccacacctggctaaacttttaaatttttatagagatgggagtctccctatgtcgcccaggctggtcttgaactcctggcctcaagtagtcctcccaaagtactgtgattacaagcgtgagccactgtgcccagcggatagtgatttttttgagaccgagtttcactctagtccaggctgga

SEQ ID NO: 808272 - DNA, 455 bp, Homo sapiens
actgacctgtgtgaggcaggagggaaaaaacaggaataatatagtttttctctagatcccttcatgcacaaagatgcaaaagaaatgtgttggcttaatgagccattctgggtggccctgtaggtggctgtcctacgaataagatttttagacaaaacagagatgacttcaaatgtcacaagaaaagtatcagacaggaattaatattgacttgatctgtcacaggcgtcaatgatttgcatyaagccaacgatcttcattgttaatgtctgggaaattgccagcagcattacgactacttgtgtggattagtgtaacggattcccccactaacattcaggaaatcatgtcaagcacagagtgcctatgtaagagtggttgtgtctattcactacatttcttggactaataacacacttagccttcctgaattgccaacatgtacaaaaccagat

SEQ ID NO: 808273 - DNA, 623 bp, Homo sapiens
ctggggattgttgggaagctctgccttggactctcccccaccgggctcctttttctccaccggcttcagggcagcctggacaacatgacctgcatcctggtctgcttccctggggcccctaggccttctgaggaggcgatcaggagggagctagcactggacgcagccctgggctgcagaatcgctggtgagcagactctgggggcccagctggaggggtggttggccagtgaaggctgtgccataactttttctttttttctttttttttttgagatggagtcttgctctgtctcctaggctggagtgcagtggcgtgatcttggctcactgcaacctctgccttccgggttcaagcgattctcctgcctcagcctcctgagtagctgggattacaggcatgcacaatcacacccagctaatttttgtattgttagtatagacggggtttcacgatgttgtcyaggctggtctcgaacccctggcctcaagtgatccgcccgccttggtctcccaaagtgctgggattacaggcgtgcgccactgtgcccagcctaactcttgactctttctcagaactgtgtgcctctgctcagaagccccccagcctgaacacagttttc

SEQ ID NO: 808274 - DNA, 612 bp, Homo sapiens
ttgtgagatgggatatggtggtccctcaaaggaaaaggaagaggtgccaggagacaagacagaatttctcattaccttctcccacattttgtgttacagaaggggcaggatggggctgggaagtccaaccccacgcatttgggctcagccttggacatggaggcctgacagctgttgtcctttggggatcctttgsttctctggggcctcaacagaactaaagaagaaaaccgaccctttccccaactacatgtaccagcggaaggaaggaaggccaatgtaggaacccaaaatgcttatttcttcttctcttacttccctctcacagaaaagtcttacgaatggggaaattccaccaacatccagaccaaaaagaaaaaagcccaaatcgaaaaaaaaaaaaaaaaaaaaaaaaaacaaaaaaacccaaccaaatgtttttgaaatattcagagccgaacagattctgagagataacccagtccaataacctctttccttcttattactcatctgtttttgaggggaagtagagttttgattattaaactttatttacataagtgattccaaatacattttcttgtaaaaaacaagaagacatgttttgcc

SEQ ID NO: 808275 - DNA, 602 bp, Homo sapiens
ctttggctaggtccctccctcatcacagctcagcatagtccgagctcttatctatatccacacacagtttctgacgctgcccagctatcaccatcccaagtctaaagaaaaaaataatgggtttgcccatctctgttgattagaaaacaaaacaaaataaaataagcccctaagctcccagaaaacatgactaaaccagcaagaagaagaaaatacaataggtatatgaggagactggtgacactagtgtctgaatgaggcttgagtacagaaaagaggctctagcagcatagtggtttagaggagatgtttctttccttcacagatgccttagcctcaataagcttgsggttgtggaagtttactttcagaacaaactcctgtggggctagaattattgatggctaaaagaagcccgggggagggaaaaatcattcagcatcctcacccttagtgacacaaaacagagggggcctggttttccatatttcctcatgatggatgatctcgttaatgaaggtggtctgacgagatcattgcttcttccatttaagccttgctcacttgccaatcctcagttttaaccttctccagagaaatac

SEQ ID NO: 808276 - DNA, 510 bp, Homo sapiens
ggaaaaataaagaagtgaggctacatcaaactaaaaaatttccacacaaaaaagaaaacaatgaacaaatgaaaggtgaaccatgaaatggcatatttgcaaaccaaatatttcttaaatattttggttaatatccaaaatatataagaaacacagatgattcaataacaaacaaaaaattaaaaataggaaaataaaaaaattaaaaagaagaaaatcctgccatttatgsgagaattgatgaacctggaggatgtaaaactaagaaaaataagcctgacacaaaaagacaaatactacacaaccttgctcatatgtgaaacataaaaaagtcactctcatggaaacagacagtagaggtatggtttccaggggttgggggtgggagaatcaggaaactattactcaaagggtataaaatttcagttatgtgggatgaataaattctagatatctaatgtacagcatcgtgactgtagttaattgtactgtaagtatatttaaaatttg

SEQ ID NO: 808277 - DNA, 510 bp, Homo sapiens
ggaaaaataaagaagtgaggctacatcaaactaaaaaatttccacacaaaaaagaaaacaatgaacaaatgaaaggtgaaccatgaaatggcatatttgcaaaccaaatatttcttaaatattttggttaatatccaaaatatataagaaacacagatgattcaataacaaacaaaaaattaaaaataggaaaataaaaaaattaaaaagaagaaaatcctgccatttatgcsagaattgatgaacctggaggatgtaaaactaagaaaaataagcctgacacaaaaagacaaatactacacaaccttgctcatatgtgaaacataaaaaagtcactctcatggaaacagacagtagaggtatggtttccaggggttgggggtgggagaatcaggaaactattactcaaagggtataaaatttcagttatgtgggatgaataaattctagatatctaatgtacagcatcgtgactgtagttaattgtactgtaagtatatttaaaatttg

SEQ ID NO: 808278 - DNA, 701 bp, Homo sapiens
agagagagagagagagagagagtgtgtgtgtgtgtgtgtgtgtgtgtgtcagaagtggtgtatcagctgccacatagtaagagagcaaaggatcttcttttgtcttatggtgttttacctgtgctgattggttcttggcagcctttaaatgcctaggcagagaggaagagagaggttcctaagcttcatggtgaatttctaagtctgtgttgactgcaggaaatgtatgaggaaaggatggtggttgaggcctctccctcacatttaggccaggggttggcaaattgcagcttagtcctgtctgctgcctgtttttgtaaataaaattttattggaacacagcttgctcattggcttatgtataacatttggctgctttcatgctatgatgacaaggttgagtagttgagacagatgccatgtggcttgcaaagctgaagatattcattagctggctctttccaggaaaagtttgacccctgctttaggataaaacagagaaatggagagacatggaatagcagagtatcttttcaactaggttcaatatgaatgaacaggtcccctcarttgcacctgaaaggggccagaagtcctataggtttgggtttgggggagattgaagttagacttgcttggttcagagaccaggccaggatcgagcatttgccattggtgacctggaggtgtctggagcagga

SEQ ID NO: 808279 - DNA, 469 bp, Homo sapiens
gcgcctggaacataataggcattcagtaaatatttgttcaagtgaaccatagaagacaggaatcatctaggaatactattggctaacaacaaaacaccagataaatattctcttgagtaaaatgtaatcttccttgggaagaaggacttaattctaaccaaggaaacattaaatggcaattagaatatgcaggaactttgaaggaatgccaccatgttaccctggaactcaatatagraaagagtgagtcatgctgccagggttacttgcctgttactgttacttgccaagtactgtccctgctcaaggtaatacaactagtaagtgatgagtacagagatttttaaagcccgaggtttttgaaacttactaaaatcaacaacaacaacaacaaaaacattatttgagaaggtgagaggttggttttctaaacaggaatatgagatttttttaaatgggagagacttaa

SEQ ID NO: 808280 - DNA, 617 bp, Homo sapiens
aaagaaagaaacaaagtagaagctattcctcaggcccagagtttttacacacacagggaccccagagcttcccccagcagagccgtgggagggctgcacggagatcacagggccagagccaccagagcgcaccttcctctggggctttgtgcccgcacactggtcccaaccctggctctcaccctgcgccagtcactgggtctccacagtccaggggcagcaggcccagtgccacagaaacagaaacacgcctgacaagcgagccccagctcctggctttctcggcgggggccgcaggcagctccaggcctccaagcccaggtcagcccgggccacggaatctctcgctccacagaacttgagctgatgcccgcgtcccatctgccagtgtgacrtggccaggcaggtgtgggggcaccgcgaggcagacggaacagcacttgtttattgtttaccagagaggactcttctaagaacccctgtcctggattgataaactaggctgtaaggctggacgggaaaggtcacgatgtctgcttctcctggtaaacaggcctgggtcattggcatgaaggaaccagcagatctgtgccaggagtccagaacaaataacaaga

SEQ ID NO: 808281 - DNA, 599 bp, Homo sapiens
gccctgggtcacagtcatttcctgatggtagarcaaacccagagcattttggcagagaccagaggctctgagacccagttccctgaagtgacagggcccaccaagcacctcagaaatgtcacagtatgacttctgtttatgggacaccaactgtgtgcctggtattctgcatacatcacttccttttttttttttttgagacaaggtctctttctgtcacccaggctagaatagagtgcagtagcgcaaacacagttcactgcagcctcaatctcctgagctcaagtgatttccttacctcagcctcctggactcctgagtagctgggaccacagacatgcaccaccttgcctggctaatttttctaatttttttgtagagacgaggtctcactatgttgcccaggctggtctcaaactcctgggctcaagcgattctcctgccttggcctcccagagtgctgtgattacaggcatgagccactgcactcacctacggtgggtatcaacaaccatgttctttcaagtgagcacatgagagttcagtgctagccctggcactaccatgaccctgatcactttagcaatgactccccataa

SEQ ID NO: 808282 - DNA, 545 bp, Homo sapiens
aggcatcagccaccgtgcccaacctcaaaggatattttaaaggatagaaataaacagccatatgaagagatacagacagggcggtctggaagggcccagagcaggagcttctatctccatagagttggggttacatcaccctccaggcacatggatgagttcttcaccttctgtcagcctccacacgttcagctctcagaagcttcccgaaccctgtcctttgggccttttatggagaactccattggctgtccgtgactgaagcatggacaactgtgataatgtgattgggcaaaaagggtctgatctaagcccagcaaggccagtccagattcttygggcctttgtgcagcattcctttctccagggtatggggcaaggacccactctggaatgaggatcctacaacccacaatcagattagagtcctgccttgggcagctgaaaagaggacaggagaaggtcaaagagaggaaaggctgttttttgaggcctgaggcgccccaacatgacaacgaaagactgtaaccatggtcatgtgagtt

SEQ ID NO: 808283 - DNA, 547 bp, Homo sapiens
tgacccaagggttgcaaggatccatgggagaagcatggtttccctgggttgcacattcactcactgcttctctgggcaggggaaattcccttggttccatgtcactcccaggtgggctgttgccctgccttgcttttctccattccctgtgggttgagccgtttccctgatyggtccccgtgtgagtccctgggtgtttcagttgaaggtgccatatttactcgcccttttcattcctctccatgaaagtcacgcaccatagctgcttgtagtcagtcatcttggccccagacagtgattattatattttatatgcctgtatcaaaacatttcatgtatcccataaatatatatacctactatgtacccacaaaaattataaataaaaaattaaagagaaaaagatgttttggacacgttaagtttgagatagcatgttagaatgcacaggtaagtaggtagttagatagcagtctgtattacagggaacaggttgagactgggaatttatttatgaaagtcattaaatgctatttaaaaccataga

SEQ ID NO: 808284 - DNA, 647 bp, Homo sapiens
gtgattttagtgcccattctggcttttgtgtttgcggcaacactgctgccaattagaaatattttaaatatctcaggctaatgagaaaataacagaaatcagcataggatgtggagccaggattgaaatccagatctgtgactctccagtccgtgcttttttttggcagcctatgctcttaagcacagtgccrcaccagacaccaagctgaaggacctgtagtccactagccaccttactagcttcttcacactcttccctgggattaagcctggccaccagaatggtgcctgcttgaaccacattgcctttgctccatcaaagtcacttttggtgtgctcatattgttatgagaaagaactatgtaacaccagccttgtttttgctgttttcaccctggaaagccataggataaacttaacatttcccaccataaaatactttatttcctttgaataaatagtagcatctttcattagaaatatatcaattgtgtaactcagtgtttctcaaactggaaccaaatgacaaattttcagggatcttgaagttttataaaaattatttagttttatattttcatttattattacaaaagtatcactttcatctagtggccaccttgtaactaaatgctaatataactt

SEQ ID NO: 808285 - DNA, 566 bp, Homo sapiens
aaggtcagcagtgtgggccacgtgggaggagaggctgggccctgggaattccctgtctggtggggggaccctagatccagagacagctgggcaaagccgaagctggcttcttgcatgggtgagggtggcagtggttcagggcctgtgctgggccaaggggctcactgtcttggggtgcgtctctccacgcttgcrtccagaaccagctgctaggccctgatgagaacgctaagacctacatcgccagccagggttgtctggaggccacggtcaatgacttctggcagatggcgtggcaggagaacagccgtgtcatcgtcatgaccacccgagaggtggagaaaggccgggtagggcgcccccccttccccgcatccgcccccgtgcttgtggtcatgccattaagtcgaagagcagtcagatgccagggcagaaagggatctcaggggtgagggtccggcccttgttgggaaactgagggctagtgacaaagtctcgactacacaacgtgacccccagatccctgcatgcatccctgggctcttctgagctccagacccaggttc

SEQ ID NO: 808286 - DNA, 566 bp, Homo sapiens
aaggtcagcagtgtgggccacgtgggaggagaggctgggccctgggaattccctgtctggtggggggaccctagatccagagacagctgggcaaagccgaagctggcttcttgcatgggtgagggtggcagtggttcagggcctgtgctgggccaaggggctcactgtcttggggtgcgtctctccacgcttgcgtccagaaccagctgctaggccctgatgagaacgctaagacctacatcgccagccagggytgtctggaggccacggtcaatgacttctggcagatggcgtggcaggagaacagccgtgtcatcgtcatgaccacccgagaggtggagaaaggccgggtagggcgcccccccttccccgcatccgcccccgtgcttgtggtcatgccattaagtcgaagagcagtcagatgccagggcagaaagggatctcaggggtgagggtccggcccttgttgggaaactgagggctagtgacaaagtctcgactacacaacgtgacccccagatccctgcatgcatccctgggctcttctgagctccagacccaggttc

SEQ ID NO: 808287 - DNA, 594 bp, Homo sapiens
ggaaataagacagatgcttgcattaagcaaagacctcaattccgacccctgcaattcagcagctacttaacatggaacacatgcagattagggcaggggtgcagcaatgagtaacacatggtttctgctcgcacttagggatccagagcgctgagcagcagctatgattagaacaaaaggtcagggaacccagaggaatcattcttgayaggaggagtatcggagaagccaattttttatttatttatttttgagacggagtcttgctctgttgctcaggctggagtgcagtggcatgatctcagctcactgcaacttccgcctcctgggttcaagtgattctcctgcctcagcctcctgcgtagctgggaatatagctaaacgccaccacagcgggctcattatcttttgtatttttagtagagatggggtttcaccatgttggccaggctggtctcgaactcctgacctcaggtgatccacccaccttggcctcccaaagtgcggggattacatgcgtgagccaccgcgccggccagagaagccaatctgagtagaaaccggaacaagcaaggttcgaattccctcacctca

SEQ ID NO: 808288 - DNA, 636 bp, Homo sapiens
tgttatttaaatattcctcactctccttcgtcttcttcctgttggacatttgggttgtttctgatgttttgctgttaggaagggtgttatctggagccttcacgtacatttatgcaggtgctcacaggcaagatttctctaaggcttttacaaaggagtacaattattgcatcattgggtgtggtgtgtgcctgttgtaccttcaagataatgtccacaagcttcccagacggccgctaccaaataaactgtcctctgcagcgtgtgagtgttccctccgcacgccgcacatccttgccagttcttcatgctgtgggacttcctgtttttgttgctctggtggatattcctgttgcagtcctcacgttygtttctctggttactcacggagttaagcatctctttgtatatttacggatgtcttctgtctttcccccttctgcgaaatgttcctcctgccttttgcccatttttcttttggtttgtcgattcgctcctttattagttgttgatctttacatggtaagaattctgattctttgtcagtttgtatgttgtaaagatcttctgccctctgcagcttttctcttccttttttcttggtggatcttgatgatcagaagttgttagctctag

SEQ ID NO: 808289 - DNA, 636 bp, Homo sapiens
tgttatttaaatattcctcactctccttcgtcttcttcctgttggacatttgggttgtttctgatgttttgctgttaggaagggtgttatctggagccttcacgtacatttatgcaggtgctcacaggcaagatttctctaaggcttttacaaaggagtacaattattgcatcattgggtgtggtgtgtgcctgttgtaccttcaagataatgtccacaagcttcccagacggccgctaccaaataaactgtcctctgcagcgtgtgagtgttccctccgcacgccgcacatccttgccagttcttcatgctgtgggacttcctgtttttgttgctctggtggatattcctgttgcagtcctcacgtttrtttctctggttactcacggagttaagcatctctttgtatatttacggatgtcttctgtctttcccccttctgcgaaatgttcctcctgccttttgcccatttttcttttggtttgtcgattcgctcctttattagttgttgatctttacatggtaagaattctgattctttgtcagtttgtatgttgtaaagatcttctgccctctgcagcttttctcttccttttttcttggtggatcttgatgatcagaagttgttagctctag

SEQ ID NO: 808290 - DNA, 638 bp, Homo sapiens
ttttttaatgcattttaatttcagaaaagatttccaaaggatgacactagcatctatctgcgagttttaccaagtggaattctgttatgagtgttggaagagaaagttaattacgaacaggttgcatacatctttatttagttactgtgataggtaataaaaaggttccagattattgtgaattcccagactatttctacattaatatagatgagacacgcctgtggcaacgcrgtagtttttcctgtctgcctgatgctttgaggcctcttagaactgcgccttctgcgttctcgccatcgccatttcaggcagagctgggcccggtgggggtttggagaccttggtttctcctttacatccacttgggcgtttgacctgtggactgagcccgaccagccgtctgacccgcagtgggcaatgccacccctgcacactggtggaggcagcaggagtggggtggcctcggcaggtttcccgcttgctttccatcctttcttcatttgatttttatgtgctcactcttctgctgaagatgctgtgtcaaagccacatggagagccacatggagtcagagttaaacgttcatctggtctgtcttttcctccctcagtcagctctcttgtggcctttttctg

SEQ ID NO: 808291 - DNA, 374 bp, Homo sapiens
agaagcagacaggagccgtggagggagcctgggcagtagtggccattcaggggacagaaggacatgaattgtgcagcccccatgcttccctggcaggtgatggcgggcccccggcgcctcacctgtgccattggtcttcacagccatttggtgccggaacatcctctccttaaacaagtggatctcgtagtcagtgtcaggctgcaggtcccactgcgtgtaggagctctggttgtmgctgacatactgtggcgaaagggaagccccacccttctcttctgccagggagagagggtggcagcaggggtgagtcggagtgccaggcaacccctctggcccagagcccccttccccaccacgccccaaggccccct

SEQ ID NO: 808292 - DNA, 565 bp, Homo sapiens
ccctgattgactcggcccctgctcagtgcttccctgctgccaccccataggaaagagcccccccacaaccctctccagtggtattattcccacagctgtcactctcaccaccacctaggtctgcttgcttacactctgctcctcccgcccccamcaccaaaattcgagctctaggagggcagaggcttcttcgttgactgaacgaacagcactggggctccggaaactctcagaccagctgagcgactgtgctcagcgagggggcaagagcgcagccgggccagactccccccattcccccattcagcctctagaggggacaaggaggcagctctcacctggcggaaggtgtactcagccacttggtagaagaggcgcagcagcacagggtccccactgtcactgtaacccatgaggaaggcaatcatggcttcactgtgtggccaccagagcttcatggcccactccagctgaggggagagcaggggcaggcatctcagcaggaaactcccctccgcaactttccagacctggctgcgtctccattggcccaagctactggagg

SEQ ID NO: 808293 - DNA, 542 bp, Homo sapiens
gcccaagcaaagatgtctcaattatatttaagactgacgactttgaagatattctaattttagcatcatttttttttttgagatggagtctcactctgtcacccaggctagagtgcagtagtgcagtctcggctcactgcaacctctacctcccaggttcaagtgattctcctgcctcagcctcctgagtagctaggactacaggcgcatgccaccacgcctggctaatttttgtatttttagtagagacggggtttcaccatgttggccaggatggtctcgatctcttgacmtcgtgatttgcccgcctcagcctcccaaagtgctgggattacaggtgtgagccactgcacccagcagcaacaattttaaaactaagtttatttgccaaagattactagtcacatgaactagaaaagcatctgggtttagttacatcattcatgagcacttatttatttatacgtcaatttgctactatgtacataatatacaaacaggcatgtacacataaaaatacagacacaaatcaagattttata

SEQ ID NO: 808294 - DNA, 542 bp, Homo sapiens
gcccaagcaaagatgtctcaattatatttaagactgacgactttgaagatattctaattttagcatcatttttttttttgagatggagtctcactctgtcacccaggctagagtgcagtagtgcagtctcggctcactgcaacctctacctcccaggttcaagtgattctcctgcctcagcctcctgagtagctaggactacaggcgcatgccaccacgcctggctaatttttgtatttttagtagagacggggtttcaccatgttggccaggatggtctcgatctcttgacctcgtgatttgcccgcctcagcctcccaaagtgctgggattacaggtgtgagccactgcacccagcagcaacaattttaaaactaagtttatttgccaaagattactagtcacrtgaactagaaaagcatctgggtttagttacatcattcatgagcacttatttatttatacgtcaatttgctactatgtacataatatacaaacaggcatgtacacataaaaatacagacacaaatcaagattttata

SEQ ID NO: 808295 - DNA, 587 bp, Homo sapiens
gtgacgctacccaattcttgcacaacccatagctgccagagaaagtcttgaagaccagccaccctgagaaacctcacagcttttctgtcattcgaggtcctctgcacccgttctctaattctgttcactgattcagactttccagttaggtgccccagctcccctctccgcttctcgggtttgatctttctccacccattcacctgcttctgcaaaggggctaaagcccattctccttagagggcaggggtgtaattatctgatcatcagggagattggctcctggcacgtggcaggtgtccccaaactgccaccttcctctcccaccttcctttccctcccatctctgctcagtacccggacggtaactctaggaattatggttcagggaggccttgatcgccccatcaatccactttgtccctggtttgattctygtgagcaccattaacttttctggaggaaggtgaggctttaagaactgtttaaagcccaggcgtggtggatcacgcctgtaatcacagcactctgggaggccaaggtgggcagatcacctgaggtcaggagttcaagaccagcctagccaa

SEQ ID NO: 808296 - DNA, 610 bp, Homo sapiens
ttgcattcagagctcactgcctagcgggaaaaaagacatatgcactcataactctaatttaacacggcgtcctagaaattccatatccatcttcaaagttctctggaagcaaaaagacaggaggaaagacatttttaraaggaggcttcctggaaggagtgacttcagtttcaggccttaaaggagatgtgagtttccacatgcaaggagggaggaaaagcatgttgcagacagacgaagcaagtgtgtgagcaaaggcctgcggggtgacagggaggggtgttgggaggtgtgtatctggatgaaggcaggtatggaaagtgctgggaaaaaaggtctgggaaagggccttgggggccaggtgataaggaagttgaatgcctctttgaagagtggggttttattttatgtgcctttggtggggagttgtgaaggtttttattcaaaagagcagtggggctgggcacagtgactcacacctgtaatcccagcactttgggaggccaaggtgagcagatcacgtgaggccaggagtttgagaccagcctggccaacatggcgaaaccccatctctactaaaaaatacataagtaacaaaaattagctgagc

SEQ ID NO: 808297 - DNA, 673 bp, Homo sapiens
gctttcagagtttatattgtacctgcctaatccacccggcgtgactcatttcaacactaagtactaggggtgttgtcaggagacaaatctgaagtcaggagaggaaaatgcaaaggagccctgccgtgtgatggatgtgcattctcacttgggtcttgaagttctcattcctacatctcaagctagccrggcagtctcctctctatcagaagaaagcactggtaattggctagactggctatgttgaaggtaacatgaactcttaagatcttgacccagggcgacttggttttgcttaaggtggcatcaccaatgttccaaatcctttggggagatgagggcatccccacagaaaaagaggaataatagaccaatggattttctcctttcaccagtatgtttggaaccctctgatccaatgtcttttgatactgatctcttgtccaaatgagaatgtcgctttagctgaaattcaaatggctgtgacaatttaccgaaatgatgaagtaaccaccattcccacctttcaccgcctaggctccaagtctgaatacatttttgaaataggaactcccttttgcaaaaaagaaacctgggtgtcagggaggtgaagtgacttgccctaggagcagacagcatgccaagaatggaattaggctcaggatccagcctg

SEQ ID NO: 808298 - DNA, 594 bp, Homo sapiens
agatgggataatttttagggcacctggatttttattcttcaataattgaagtctttcctgcagtgctatatgtgatgagatttttgtaaatgtaatctggctaagtagttgcctattcagagaaataacttttaaaaatggaaaagtatggatatcacttttgcatgtattacctgtgttgtatgttcgatsgacatccagtatggatatgtattttgagttgtttttaagtccaaggctaattctgctcccttctccctaccgaccttccccactcctagccaagattagagattttgtgggctcaacttctgattgtggcagtagatgacctttcatttgcttattaacatattttaaatatttagcaaaataatacaccttgtttatgtcagtttattcattgaagcaaagatagcaacaaacaagcctgcaaaccttgataaggagcctgtgtggtttggaacatcttgagattcttccctggatccccccgagtcctgttttagaaacctattaggggcacactggtggctgccctccccaacccagggagtcttcggagggaggaggaggtggctgtttgtggtgggc

SEQ ID NO: 808299 - DNA, 594 bp, Homo sapiens
agatgggataatttttagggcacctggatttttattcttcaataattgaagtctttcctgcagtgctatatgtgatgagatttttgtaaatgtaatctggctaagtagttgcctattcagagaaataacttttaaaaatggaaaagtatggatatcacttttgcatgtattacctgtgttgtatgttcgatcsacatccagtatggatatgtattttgagttgtttttaagtccaaggctaattctgctcccttctccctaccgaccttccccactcctagccaagattagagattttgtgggctcaacttctgattgtggcagtagatgacctttcatttgcttattaacatattttaaatatttagcaaaataatacaccttgtttatgtcagtttattcattgaagcaaagatagcaacaaacaagcctgcaaaccttgataaggagcctgtgtggtttggaacatcttgagattcttccctggatccccccgagtcctgttttagaaacctattaggggcacactggtggctgccctccccaacccagggagtcttcggagggaggaggaggtggctgtttgtggtgggc

SEQ ID NO: 808300 - DNA, 598 bp, Homo sapiens
aacagggtctgacacaggaaatgctgtccaagtgtgcaccaggagatagtatctgagaaggctcagtctggcaccatgtgggttgggtgggaacctggaggctggagaatgggctgaagatggccagtggtgtgtggaagagtctgagatgcagggatgaggaagagaaaggagataaggatgacctccaggtctctggctatggtgattgggtgcaggcagtggcagtcactggactcagaccctgaagcaaggcagcagctcatcggagtgtgagcaggctctgagacatttaggtctggccgtgcctcatgtgttgaatgttatgggagatggaggtggcgaggagcatgagaatcatgagcatcmctgcccctagagtatgtgcaaggcactggacttgcagcagattgtgagctctgctgtggaccccaatctgcactgggagctttggcagggtaaaggggaagaagagcaaaagcacaagaattcagttacggcttctaatcctgtctgctttctagtacaggcatacagtcatcactcaagaaatgtttatgttcattcacactttgggccagacactgttctagacatc

SEQ ID NO: 808301 - DNA, 386 bp, Homo sapiens
ggcctgatggatctggactgacagtttctggtccctcccaccctcaggactataccaatctgccgagcagcagcagaagcggtggcagcggcagcagcagcagtgagctggaggaggagagctctagtgagcacctgacctgctgcgagcaaggggatatcgcccagcccttgctgcagcccaacaactatcagttctgctgaggagttgacgacagggagtaccactctcccctccyccaaacttcaactcctccatggatggggcgacacggggagaacatacaaactctgccttcggtcatttcactcaacagctcggcccagctctgaaacttgggaaggtgagggattcaggggaggtcagaggatcccacttcctgagca

SEQ ID NO: 808302 - DNA, 386 bp, Homo sapiens
ggcctgatggatctggactgacagtttctggtccctcccaccctcaggactataccaatctgccgagcagcagcagaagcggtggcagcggcagcagcagcagtgagctggaggaggagagctctagtgagcacctgacctgctgcgagcaaggggatatcgcccagcccttgctgcagcccaacaactatcagttctgctgaggagttgacgacagggagtaccactctcccctcctmcaaacttcaactcctccatggatggggcgacacggggagaacatacaaactctgccttcggtcatttcactcaacagctcggcccagctctgaaacttgggaaggtgagggattcaggggaggtcagaggatcccacttcctgagca

SEQ ID NO: 808303 - DNA, 497 bp, Homo sapiens
ccaaagggacccctagagttaatgaggccacccaggcccctagtcaaaggcaacaggctaagcaattcatcagactgagggggctgaaaccagggctcctcaggggtgggagagacctcagcagccttcccacctagtgctggggctcacgccttagcccacccaggacctccaccctgacccacacagcaggccccacggaacccaccagctaycagcctttccctcagcctcccctccattaaacataccgtgtcccccaagtgctctctcggggccagaagaggtttcctggtaccactcctgacccctggagggttgagaactgaggaccctgggtcccaccatgctcagggaatggaagctctttggtcagtcccagcagtcagaggccctccccacaggagaccccttctgcagttcccctggatagccacttctgcagttcccctggatagctctgcctcaggcaagggccttactatggcttgagagat

SEQ ID NO: 808304 - DNA, 473 bp, Homo sapiens
aaagacatttcttgcaggagctcacttatatgtggaatctaaaatagtcaagcttaaagaagagagtagactactggttgtcaggagcaggagaaaagtggaaatgaagaggtgatagttaaagggtacaaagtttcagttatacaagataaataagttctggaggtttactattaatatatcacatagtacctataagtaacaatactgtattgtatacttaaaattgctaagagggtatatcttatatgttcttaccaataataataataatggtaataattaaggggcaggaggacacttcaaaaggtgatggatatgttwttggccttgatggtggtgatggtttcatgagagtatacttatccccaaactaattgagatgtaaatattaaatatgtacagctttttgtatgtcaatcgtacctcagtaaagtagtttaaaaatggttggactgagaaaaggaggagct

SEQ ID NO: 808305 - DNA, 473 bp, Homo sapiens
aaagacatttcttgcaggagctcacttatatgtggaatctaaaatagtcaagcttaaagaagagagtagactactggttgtcaggagcaggagaaaagtggaaatgaagaggtgatagttaaagggtacaaagtttcagttatacaagataaataagttctggaggtttactattaatatatcacatagtacctataagtaacaatactgtattgtatacttaaaattgctaagagggtatatcttatatgttcttaccaataataataataatggtaataattaaggggcaggaggacacttcaaaaggtgatggatatgttawtggccttgatggtggtgatggtttcatgagagtatacttatccccaaactaattgagatgtaaatattaaatatgtacagctttttgtatgtcaatcgtacctcagtaaagtagtttaaaaatggttggactgagaaaaggaggagct

SEQ ID NO: 808306 - DNA, 611 bp, Homo sapiens
agtgggactgcgattcaggcctagttgaatgtgctgacagagaagcagagaggggcaccagggcacagccgaaggcccagactgatatgggcaaggcctgtctgtgctgacatgtcggagggtcccactctccagggaccttggtttccccgtctgtgacatctgtgacatgagagtcacgataactccttgtgtgccttacagggttgttgtgaaaattaaatgcacagataatagcrtaacagtattccgtgcattgtaaagagcctgaaaaccattatgatttgaaaatggaatcagggctttgtgagaccatcactattgtaaagatgtgatgctgatagaatgacaggactgcttgtgcatgccctctgcagtgtgacatccagcagtgaaatcatgtggggtgacttctccccactctgacctttatgtttgtctgggccgaggctgcaagtcgggctctgtgggtgtatgagtgacaagtctctcccttccagatatggggactgtctgcttccctaggttgcctctccctgctctgatcagctagaagctccaggagatcctcctggaggccccagcaggtgatgtttatccctccagactga

SEQ ID NO: 808307 - DNA, 602 bp, Homo sapiens
tgatacatgtcactcaatcaccttctggaagagttggaacaagagcctattgctggcatcccatttcatagccatctcaccaatgttggaaaatgggcttttcctattttctgctaattcattagttgttaatggcttattttaactattaatcccttgttattgatgaaagttaagcattttctgtatttttattttctgtctaaattctactttttgcacaatttcctttgctcacttcttcactggaatttagatttttctttccaatttgyatgactcaaaatcagtgataaaataagcaaagggtctttcttagaggctaaacaagggaatgaataaggaacaagaacagcaaagggatagtgaataaagatacaaaataataacttatttttatttttgaagctttccccaggcagtaattcttgacctttttaagattataaattattttgagatatgcattcttatcctcaaaatgaattagtacataaaatttaaatgggttgatagatcccctgaagtgtatccacaaaatgctctcaggttaagcaacattgttctataataactgctttaaccaaaatgtttaattattg

SEQ ID NO: 808308 - DNA, 529 bp, Homo sapiens
gtggaaaaacctgagagaccctggagctcttcagaacacagggtgggagacaagtctggcagtggtgactctgggtggattttttttctgggacctcgggctggatggccctagattctggagatctggagggagcgggaaagagaggctgctacctgctccatctttgttatacctgacgcagggaggccccatccataccctcgtgtgaggctctgctgggaagggacatctgtggtgggaagggggttttctgtcaagggattaggttcccctggggcctgtcytgcctcctccatacccaccacttactgcccctgtgagctggtctacgctttggctttgaaccctgtacacagagtcccctgtgagacatttccaaggtctactctggacagagaaatctgtctacagcagggatgcccagcgccaccatctcatctgggcctatggtggcagctcagcctctcttcatctttctcacttttgtgcctgagtctgaggttgagaaccaaggtcaaggtcaaat

SEQ ID NO: 808309 - DNA, 560 bp, Homo sapiens
ctgaatgctgacaaataagagttgtatatgtgtataccatgcaacctgcgtttaaaaatgtatgtacatagtgcaatgactaaatctagctagttaacatatgcagtacctcaatccttatcctttccagtggtgagaatacttaaaatgtactctgttagcattttcccagaatacaawccactgttgctaactctagtcatttgttgtataatagatctttgtaacatcttcgtcttatctgagtgagattttgtatctgttgaccaacatcttcccaacagtccatctctactccagcctttgctaattactgctctagtctttgaatttgaagtaatttccctgaggtctttagctcaacaagatgggggaattttctctataatgatgcttacgttatttttgctttgtttttgtttcgttattttatgtcttgcaatatagtgtttattgtaaatataaataagtatattgtaataaaaatccttcacctctctttgggtaaagctacagttcacatattctaaatttcatgctgtgaccaacgctgacataat

SEQ ID NO: 808310 - DNA, 560 bp, Homo sapiens
ctgaatgctgacaaataagagttgtatatgtgtataccatgcaacctgcgtttaaaaatgtatgtacatagtgcaatgactaaatctagctagttaacatatgcagtacctcaatccttatcctttccagtggtgagaatacttaaaatgtactctgttagcattttcccagaatacaaaccactgttgctaactctagtcatttgttgtataatagatctttgtaacatcttcgtcttatctgagtgagattttgtatctgttgaccaacatcttcccaacagtccatctctactccagcctttgctaattactgctctagtctttgaatttgaagtaatttccctgaggtctttagctcaacaagatgggggaattttctctataatgatgcttacrttatttttgctttgtttttgtttcgttattttatgtcttgcaatatagtgtttattgtaaatataaataagtatattgtaataaaaatccttcacctctctttgggtaaagctacagttcacatattctaaatttcatgctgtgaccaacgctgacataat

SEQ ID NO: 808311 - DNA, 682 bp, Homo sapiens
tttacacatcagaaaaatgctaacactttcctcctggcccagcacatctccaagttaaaaaaatctctaaattatcaacccatagtttaatcatggtaactcccttctacccccaacatagatttttatgtaactgatttgtaactacaaccttaaccgtacaatcacaattgtcattataaaatactaacaaacatgtgctattaacaatggatggttaaaatcacttagggattatgaatcatttcatttttgtgtttatttattatgtcagtttcaasctgatttccctttcccttgttccacacaccttgggttgttctttttcagcatcctgtgtatgttagctctaagcccagccaaggctcatgtccctccacttcagggacagagggtggctcatccctttcgtgctccctcagctccctccccggtgcctggttgctggttggcatcacagccatgcccttgaaagatgggcgctggtccacactgcatccgtggtcatgtagccaccctccctccacagaaccgagcaaaaagggctccaccgcgcttaggcattgagggaatggacattttgaatggtgctgtcttgtgtgatccctcagaggagaaggagatttcttgaatgggagtggtctgttgctgagagggatcctgaaagacacggggacagaga

SEQ ID NO: 808312 - DNA, 682 bp, Homo sapiens
tttacacatcagaaaaatgctaacactttcctcctggcccagcacatctccaagttaaaaaaatctctaaattatcaacccatagtttaatcatggtaactcccttctacccccaacatagatttttatgtaactgatttgtaactacaaccttaaccgtacaatcacaattgtcattataaaatactaacaaacatgtgctattaacaatggatggttaaaatcacttagggattatgaatcatttcatttttgtgtttatttattatgtcagtttcaacctgatttccctttcccttgttccacacaccttgggttgttctttttcagcatcctgtgtatgttagctctaagcccagccaaggctcatgyccctccacttcagggacagagggtggctcatccctttcgtgctccctcagctccctccccggtgcctggttgctggttggcatcacagccatgcccttgaaagatgggcgctggtccacactgcatccgtggtcatgtagccaccctccctccacagaaccgagcaaaaagggctccaccgcgcttaggcattgagggaatggacattttgaatggtgctgtcttgtgtgatccctcagaggagaaggagatttcttgaatgggagtggtctgttgctgagagggatcctgaaagacacggggacagaga

SEQ ID NO: 808313 - DNA, 633 bp, Homo sapiens
ctgtgtttcaagtttatttaggaccctaaggcactttagcccatggtagcgaggctagccagaactcaggttctgactgctgggataagtgattcccctctgactagggctggtctaaatgttcttccatgagtgctggctgagtcctgcctgctgttgctatccactgtgtgaggacagcaacgacttccaacacaaagtcccacagtcactgcactctccctaacccaaatgcacagactgtctctccaagccatatggccactgccaggggatgggggaggcatggtattggcaattcaagagtgtcttttctacctctttagtgcctctttcagtgatatgaagttaaaaccaggtactgtggtcacttagttgatttttggttcttatgaaggtgctattttgtgtggatagttgttcagtttgatgttcttgtttggaggaacagttaacgaaggcttctatttggccatcatgttctaccttcttyttaatcattctattgggtctgtagtgatatctctatgcatttttctataagtaattatatttacatttttttctgttttcattagtaatttctatctccttttttcaagtgtctgcttttaaatttgcctgttttaaaat

SEQ ID NO: 808314 - DNA, 626 bp, Homo sapiens
cagccttcatgagaggaggtggatcctgcctgagaccagtcagaaggccctggaccagctggactccgtaggcatggggggtgacaccacaggcccaccagactattccctagggagcagcctccaagccccagctcacagtcctgaggatcactgcacttagttgggccagcccctcctcactctgaccctaccatgaaccccaaactcttctgtgtgaccctttgtctcctgggagcagataagttctggaaacagctgcaaaaccctgtmatgggtttgcaatgtctgggctacaagccttttttgtcctttcctctgcagagtccccttatttcttaagtcttgtcttcactttctgtctgcctctccagcaggctctattgatgctgggatcacccagatgccaagatatcacattgtacagaagaaagagatgatcctggaatgtgctcaggttaggaacagtgttctgatatcgacaggacccaagacgggggctgaagcttatccactattcaggcagtggtcacagcaggaccaaagttgatgtcacagaggggtactgtgtttcttgaaacaagcttgagcatttccccaatcctggcatccaccagcaccagcca

SEQ ID NO: 808315 - DNA, 589 bp, Homo sapiens
attaattgattaacatttgggttgtttctaccttgtagatattgggaataatggtgcaatgaatattggcctgaaaatatctgtttgatgccctgttttcaattcttttgggtatatacccaggagtgaaacttctgggtcctttggtaattctatgtttctccttttaagtaactaccaaaatggtttttttttggttgcagctgcacaattttagattcctaccagcaatgtcatttcttcacagaattgccagcatttatttcttgtttttcttttcaaaaatattatgatgatgatgattactattttgtatagccatcctagtcagtgtgaatgatatctcattgtggttgtgatttgcatttctctaatgactaaaaatgttaagtgccttttcttatgcctatgatcaatttgcacaccttctttggaggtaatgttttttgtctgatyggcttttttggggtgtctcttgactttagaattatgttggtgtactgcgacaatgctaaaagaaattgagtttgaacttcatttgggaggtttgtggttggtagtgtttttagtgcggtacttcttaaacatt

SEQ ID NO: 808316 - DNA, 589 bp, Homo sapiens
attaattgattaacatttgggttgtttctaccttgtagatattgggaataatggtgcaatgaatattggcctgaaaatatctgtttgatgccctgttttcaattcttttgggtatatacccaggagtgaaacttctgggtcctttggtaattctatgtttctccttttaagtaactaccaaaatggtttttttttggttgcagctgcacaattttagattcctaccagcaatgtcatttcttcacagaattgccagcatttatttcttgtttttcttttcaaaaatattatgatgatgatgattactattttgtatagccatcctagtcagtgtgaatgatatctcattgtggttgtgatttgcatttctctaatgactaaaaatgttaagtgccttttcttatgcctatgatcaatttgcacaccttctttggaggtaatgttttttgtctgattggcttttttggggtstctcttgactttagaattatgttggtgtactgcgacaatgctaaaagaaattgagtttgaacttcatttgggaggtttgtggttggtagtgtttttagtgcggtacttcttaaacatt

SEQ ID NO: 808317 - DNA, 622 bp, Homo sapiens
atgtcaagaggccttttagcaaatatacaggactgttttctctgtatcaagagattctgagtattctacagtttggctgaaaactcaagaactttcaaaggtgactgaatgtaaagagaagagtagtgattttccaaagttagggctggacaatatgtatttgttcaacaaagagggaggctgtctcagtttrtcctctgctgctatagcagaatacctgaggctgggaaaatgtataaagaaatttataaggaaaagggctttatttggcttgcaattctggaggctggaaagaccagtagggcatcaacatctactgaacttcttttgagggctttgtgctgtgtcacaacgtggaagagaagtgggagaaatgagcaggcctgtgcaaggagagccaggatgagcaagaccctcactttataacagcctgcttttatggtaactaatccagatgctggagagagagaactgactcctggcattaatctttgatgagggatctactcccatgacccaaacaattcccataaggctcacactaccccagaaaaatgtgagcaatgtgcctgtagcaacaccactacattgacgaataagcttcaacatgaattttggtggg

SEQ ID NO: 808318 - DNA, 618 bp, Homo sapiens
gcaagtcgcttagccacagcgctgcagaatctccccctccctgtgcagaaactctggtgcttcctcttttcctcacagctcccagcagtcctgagcaaagtctttcctgcctcaccctccccacaagaataattaagtgggtttggggcatggcaaagacataagatgatacaatatcaacatacaaaatcttgtgtaggagataatgtcgaaaatgcattttgcaaatttctcacaaattgtgtatggggtcataactcacacacaggtaggataaaccttaattacccacaccgtaggtttccctgccttcctgtatttgacactcccatccaaacagtgggagctcttsagaatggctatgtcttgtgaactactctgcccacttcattcccttctcactctaagccatgaacagaaatttcccctacaagtactctttattgtaaatgaaagttcttttctatgattgtggacattcctttataatgctaatttcaatttaccatttatatacggatttttacattaaacttaaagagatcttcagtgtggataatacaggcagtttaatacattagaagtaagctacccctcttggcctacagggatccattt

SEQ ID NO: 808319 - DNA, 613 bp, Homo sapiens
caaagaaggccattacataatgttaagagctaactaccataaatatatatgcacccaatacagaagcacccacattcataaggcaagtccttagagacctacaaagagacttagactctcacacaataatagtgggagattttaacacccactgtcaatattagacagaccaacaagacagraaattagcaaggatattcagaacttgaactcagctctggaccaagcagatgtaatagacatctacagaactctccaccctaaatcaacagaatatacattcttctcagcaccaatagcacttattcgaaaatcaaccacataattggaagtaatacgctcctcagaaaatgaaaaagaacagaaatcataacaaagagtctctcagaccgcagtgcaatcaaattagaactcaggattaagaaactcactcaaaaccacacaactacagggaaactgaacaacctgctcctggatgactactgagtaaataatgaaattaaggcagaaataaataagttctttgaaaccaacaaaaacaaagacacaacatatcaaaatctctgggagttttcagagggaaatttatagcactaaatgcccacaggagaaa

SEQ ID NO: 808320 - DNA, 589 bp, Homo sapiens
acaacaaactgagagccaattggaaagttagtcccattcacaattgccatgcacaaacaaaaaaacccccaaaacctaggaatacagctaatcaggggggtgaaagatctccacactgtgaattacaaaacactgctgaaagaattcagacaagacacaaacaaatggagaaacatcccatgctcacagataggaagaatcaatatcattaaaatggctatacttcccaaaacaatttatagattccatgctattcctatcaaactaccartgacattcttcacagaactagaaaaaatattttaaaatttatatggaaccaaaaaaacaagcccaaatagccaaggcaatgctaagcaaaaagaacaaagctgaaggaagcaagttacctgacttcaaactgtactacaagagctacagtgactaaaacagcatggtactggtacaaaaacaggcacatagaccaatggaacagaatagacagcctagaaataaggctgcacttctatgacatctcatctttgacaaagctggcacaaacaagcaatgggacagagcctctctattcaataaatggtgctgggataac

SEQ ID NO: 808321 - DNA, 579 bp, Homo sapiens
tgtgaagactggtggcgaagggaagaatggcaaggccaatggagtcacagtttaataaataactcagagttcaaatggagactctcatgggccagaaattggtaaatgttcctgcattctaaaattaggggaatcttattttctttgaatcagcagagacggaagcacaggcagtggggagggacagttgggaatacrgcagagtggccacagaatgtcgaagaaaaaggacatgtaatgccaaattctaagctgtgaagctgtgatgcaaccctcctccttctcctaatggtttttttaggtctcagatgcgcacctgagggagtaatttctttggaaatgaagaacaaatagctgtgttaaatcttaataacaagtccaccttacaaagcacaactggaaatggaaacaagattatttctaaggccttttctactctaagagtctttaacttggtggcaaggtgagaggtggggggtggggatggtgttgatccacatgcgatgagtaccgtgaggctctaccatgaagaatacatttctgagtgtgaatcagagccctaagaataatgccctttac

SEQ ID NO: 808322 - DNA, 638 bp, Homo sapiens
cctcataactaactaattccttctataacccattaatccatgaatggattaacctttatgagggcagagtccttaagatccagtcaccttccaaaggtcctacctctcaacgctgctgcattgggaaccaagttttcaatatataaattatttaggaacacagtcaaatcatagcagtacacattgcgggttttttttttttttcttttttgagacagggtctcactctgtcacccaggctgaagtgcagtggtgctgtgatcatggctcattgcaaccttgagcgcgtgggttcaagcaatcctcctgcctcagyggcctgagtagctatgactacagggacacatcactacaaggtgtgtccccagttcctcagttcctacaaggtgatgtgtccccttgcctggctaattttttttaatttttatttttgtagagatgaggccttgtcatgttgtccagattagtctcaaactcctcaaatgatcctcctgagtttatgtgttttaatgcaaagatagacattagcatatccactttatacatgtagaagatttcagtgtaccattttatagataggaagctgtggctcatgaacttctccagtatttcatatttccaaggatcaaaggcaggat

SEQ ID NO: 808323 - DNA, 543 bp, Homo sapiens
tggggcctatggaaaaaggggtgggagggaaattctgtgttactggaggtgcatgcaagtaatgagaaaagtttcccaaaggaaggaattcaggaccagagctaggaaggggaagcccagatatgctgaactttctcttcactacccttcaatgtccagctggtgtcttccattggaaagcccagctgaaagcctggatagcaccgtttgctgacatcagtcttcaggggcacagtccagggcagtaaggggcaggcwggcgagagtcggttgtggggaactttgggtgtgcatgtagaacagccagcacagcagctaccaagtgtatgatgtgccatttgcagatgcatgtgcaagtacacggtggacagagaccaacttaattctacatcttttatgtgaacttagagaaaattgccttgttgattgctaataacaagcaacatcgttaatcccattttctctgggccatataccaagtacattatttcaattaatttcttaagaacttcaaaagggagaacaatttactcccatattaca

SEQ ID NO: 808324 - DNA, 641 bp, Homo sapiens
acccatttactccctgtggcaataacagatataatttactcatttagaaaaaattctgaatatatgaactatagttttcatgtggcacattagatctttagacttcttcatcctgcctatctgctatcttgtatcatttggcctaaatrttcccatttcctattccctccccctgccatcctcccattaaccactatttcattctctctgtatatttgagtttttacaaatttcacatataaataatatacactatttctctgtgtctggcttatttcacttagcctaatgtcctccaggttcatctatgtttgttgtggtaaatggcaagatctcattttttttttaggatcaaataatactccattgtatatgtatgccacagtttcttcatccatttgtccatcagtagacacttaggttgtttccatatcttggctattgtaaataatgctgcaatgaacatgggagtgcagatgtctccaaaaggtgggatttcattttctttgtgtatataccaagaaaagagattgctgggtcatataattctatttttaatttctttaggaacatctacactaattttcttaatgagtgcatcaatctacttttccaccaacagtgtataaaagttccttttt

SEQ ID NO: 808325 - DNA, 591 bp, Homo sapiens
cacagttttgtatcctgggtccaacagacctgcaaaaggatagagcccaaaggaaataggccctccagaaacacaagctagtctgcaaactaatgccctttaacattggcaagtgctttcaactgcatgggactcagaagcatgcctctgtgccaagagcaaaaatatgcccttttatggcaagtaagttaattgatcaactcaaaaaacaaacatttctctcagctttccagaacctctgagaggaagtaggtttggagaagtgggattaaggggttggcagggggcggagaaaggtcaacaggggaaaaagycaggtgttaatgatgaaaaaacattgaacttttcttttctaggggtagtaataagatataattcaagactagaacattgtagctgcaaatcttcaaaataagacaatcttatcctctgttttattgagggaatagagaatggagagaagttccattccacgggctttgggaattcaatatggttcaaggataaataaacccaggtttttttactgcagagaagagcttcaaatataatcagttctcagggcatcagctcagttcctctatccctaac

SEQ ID NO: 808326 - DNA, 591 bp, Homo sapiens
cacagttttgtatcctgggtccaacagacctgcaaaaggatagagcccaaaggaaataggccctccagaaacacaagctagtctgcaaactaatgccctttaacattggcaagtgctttcaactgcatgggactcagaagcatgcctctgtgccaagagcaaaaatatgcccttttatggcaagtaagttaattgatcaactcaaaaaacaaacatttctctcagctttccagaacctctgagaggaagtaggtttggagaagtgggattaaggggttggcagggggcggagaaaggtcaacaggggaaaaagccaggtgttaatgatgaaaaaacattgaacttttcttttctaggggtagtaataagatataattcaagactagaacattgtagctgcaaatcttcaaaataagacaatcttatcctctgttttattgwgggaatagagaatggagagaagttccattccacgggctttgggaattcaatatggttcaaggataaataaacccaggtttttttactgcagagaagagcttcaaatataatcagttctcagggcatcagctcagttcctctatccctaac

SEQ ID NO: 808327 - DNA, 605 bp, Homo sapiens
acagagctgcatggagtcttagcagagcagctgctcaggcacacacagagacccaggagttttacacattccagcctcaggatccccagcaaggcaggaaatctgtccacatataaccctaggaagggagctgaatccagggagccaagcagcatcattctgcaggccccacttccatagcacctcacaagttaagacgcactggcttggaattccagatagccaatrgcaacagcctagaatctgcctgagataagtatgaattcctggggaaagggggtggccaccatctctgcagtccagtagacttagctgtttaagcctgccagctttggagaatacaaatggtctggatgaggaaaggttccccataatcagcacagctgccttgccagatcatggccagactgcttctttaagcaggaccttgatccatcccttctcagtgggcaggacctccctgtggaggcttcagccattctagccagtgttctacattgagagctctgatctctccctaggatggagctcctggcagggaggggcagcctccatctctgcagttcagtcaactcagtccttctagcctgttggctttgcagaat

SEQ ID NO: 808328 - DNA, 627 bp, Homo sapiens
cagccaagctgacctcaccatcaaatgtatcgacctcgatgcttaccctcctcagcagtcagagactgtctgtgttcaccaggagctcgtgtgcttttacagagcacactttctcctcggtttagtaaaaaaaataaatgggccattatagggggttccataaacagaagctttctgtactttgcccatttagacactacaaattctgatgtctgacraatagtgtaaacttaaagcttgcatgtggttaagaacttttaataaacaaattaaataatatatataatgaaaatgtcaataatgttctccaatccaatcccaccttccactcataaccaatattaacgctctggtgtgcttcttttcacccctcttttctgtgttcatgcacacctttctacccaagtacacctacagaaaatgggttcacctgtacactttacctgccacatgcatactcttttctgttaatatatcctggtctttattgttccagattggttgatatagatctaacttgctcctattagctgcttcacattgcataatgagggtagacaggtacatttgtgctctattgtctgattcctaaattctgccagatcttttccaaagtgactgaatggc

SEQ ID NO: 808329 - DNA, 627 bp, Homo sapiens
cagccaagctgacctcaccatcaaatgtatcgacctcgatgcttaccctcctcagcagtcagagactgtctgtgttcaccaggagctcgtgtgcttttacagagcacactttctcctcggtttagtaaaaaaaataaatgggccattatagggggttccataaacagaagctttctgtactttgcccatttagacactacaaattctgatgtctgacgaawagtgtaaacttaaagcttgcatgtggttaagaacttttaataaacaaattaaataatatatataatgaaaatgtcaataatgttctccaatccaatcccaccttccactcataaccaatattaacgctctggtgtgcttcttttcacccctcttttctgtgttcatgcacacctttctacccaagtacacctacagaaaatgggttcacctgtacactttacctgccacatgcatactcttttctgttaatatatcctggtctttattgttccagattggttgatatagatctaacttgctcctattagctgcttcacattgcataatgagggtagacaggtacatttgtgctctattgtctgattcctaaattctgccagatcttttccaaagtgactgaatggc

SEQ ID NO: 808330 - DNA, 627 bp, Homo sapiens
cagccaagctgacctcaccatcaaatgtatcgacctcgatgcttaccctcctcagcagtcagagactgtctgtgttcaccaggagctcgtgtgcttttacagagcacactttctcctcggtttagtaaaaaaaataaatgggccattatagggggttccataaacagaagctttctgtactttgcccatttagacactacaaattctgatgtctgacgaatagtgtaaacttaaagcttgcatgtggttaagaacttttaataaacaaattaaataatatatataatgaaaatgtcaataatgytctccaatccaatcccaccttccactcataaccaatattaacgctctggtgtgcttcttttcacccctcttttctgtgttcatgcacacctttctacccaagtacacctacagaaaatgggttcacctgtacactttacctgccacatgcatactcttttctgttaatatatcctggtctttattgttccagattggttgatatagatctaacttgctcctattagctgcttcacattgcataatgagggtagacaggtacatttgtgctctattgtctgattcctaaattctgccagatcttttccaaagtgactgaatggc

SEQ ID NO: 808331 - DNA, 547 bp, Homo sapiens
ataagacttcatttcttctgcctactttaagccacttgtatcctttattttatttccatttgccattgctactgtcctgatagacagaagcatgcattcaccactgctgcctgttcacatcgattccctcaggaaatctgatttttagactctgagtgttttcattgttgtccaactcatttgatttgaaataatkttaccgaggcctttaactcaagaagtgttttatttataatattgaatctattcctttttattttatttttcataatagatagtactatatagtacttgttataaatagaagtacaatgattatattgcaatagaatcttccacctatctgtgggtgctgctgcagtgtgtatctgtgaaagcgaatgcactggtcagagctgatgtgattatggatcgtgggtttctgggagtccttggcgacagaccacttctccaagtgtgggactcagtgtcccagatgcaaccatgatagaggtgccctgagtctttcatagctaggaggggcatcatagtccttccaaattcactg

SEQ ID NO: 808332 - DNA, 538 bp, Homo sapiens
aggagctgataaatatttaaagcagcacccaactgtgttctaatagaaatgctgtgatcctgaggtcctggggattgagagaggaagtgatgtcactgtgggaactgccctgtggagacaaggacatccctcatcctctgctgctgctcacagtgacactgatctggtaaagccctcatcctgtcctgaccctgccatgggcaccagtctcctatgctgggtggtcctgggtttcctagggacaggtgagtcctcagaacacaaagtagtttcatttttttttctgtgtgtaggcgtgtgggcgtgtgtgtgtgtgtgtgtgtgtgtgtgtgtgtgtgtgtgctgacsacaaatgttttccttattctgttgccaaattctatttccacagatcacacaggtgctggagtctcccagtctcccaggtacaaagtcacaaagaggggacaggatgtagctctcaggtgtgatccaatttcgggtcatgtatccctttattggtaccgacaggccctggggcagggcccagagtttctga

SEQ ID NO: 808333 - DNA, 409 bp, Homo sapiens
gtcagcagagtgacaggagcagggggaggaggtggttgagtacagggcaaaattgaagaaggcaggaaggcaccagaccactcagaaccttactggtcaaggtaaatgatacagaatccaacataaagcttaataggagacactgaggttttcaacatttgacttctttagtaatcagattcgtggctgtgtgtgtatctgtgtatttaatcaccctggtcacaaagtgaagaaataatggaccatgcagggaaggcaaaatgttacctcyaccctcttgcagtttttcggctggtcctgagaatggaagattaacaggaaggaaagcatacacatgtatttaatacaagttttacatcacatgaaagcccccataattaaaggaagaactgaatgtgcagttagagtt

SEQ ID NO: 808334 - DNA, 612 bp, Homo sapiens
cacattgaagaaggggaggagtgcaccattggttttccatcctccagatgcactaagcttctacctaaactgtgccccctccttctttgaaacacatcccatccttaagccttggtaggaaggagagccatctggaagccctgaatcctatggaatgctgagtctcccttctccttmccccttagtgttggaattctcattccccaaagtcttggatttgacctttcccgacactgactggagagaagcatcttcatattcacaggaatgagccttagatcagactttgctcctctcctgggagctccaggacactgaaaagccaagcttgttaccaatacttgcccttccttaagtacattaaatacatcccaaatagttaaacagattcctaaacagccaggccattctccctccttctaaccctcatctcctcggcctacgaaagcccagatgtgtgatccagggcttggcttcccctgtcttccccatcccagcatccttgcgggaaagggctgctctctctctctgctttcagaaggcaaatttccttatcacctatgagtcacaaacccagagagtggccaaacatagccaagctgatgcaagacc

SEQ ID NO: 808335 - DNA, 644 bp, Homo sapiens
agtcacaaacccagagagtggccaaacatagccaagctgatgcaagaccctgggaaggggaaagctgcaggtgtgtttgtgctgggaggagtgctgaccctcacctcagagacacctcctctccagatcctcaggaggtataaagacaggtcctccaccaccagtcaggcacactctaccaccatgaatccactcctgatccttgcctttgtgggagctgmtggcgagtttcatgccatgcctcaggccccaaccaccccctttcctggcagacacttgccctgccattcttgccacctttcccattttgactgtgttctgatattctatttcctccatctctccttcccatcctcttcggctctctttaagcctcacctgtttcagcttctccatgatttcactcccaccactgtcattcatccatatctgagctgtggctggagaagctgggaagggagaccaggtggggcgggcccacaaaatgaagcagcagccttcaggcttggctccatagcaccagtatagcaccattatatctgctcttaacctcaaatgcacctggggaggttgaaaaattactcatatcagagactcagctttagaagttctaacttcattctctggggtgcaacctgtgtact

SEQ ID NO: 808336 - DNA, 600 bp, Homo sapiens
agttcatctgatcttgtggcccccactcaggaaccgactcagcacaagaaagcagctggggtttcatctccaacccaacggatcagcactcccgactcactgctttcccctccgcccaccaaattatcctctaaaactcggatcctcgaattcccggggagacggcaagatttgatttgagtaatagtaaaactccagtctcccacacagtctgctctgggtgaattactctttctctatgtcaattcccctgtcttgataaatcggttctgtctatacagcaggcaaggtgaacctattgggcagttacgatatctctctgaaaacaagtcactattttttgtttgtttttgtttttgttttgtttttsagacagagtctctctctgtcgccaggctggagtgcaatggtgcgatctcggctcactgcaacctccgcctcccgggttcaagctattctcctgcctcagcctcccaagtagctgggattacaggcaagcgccaccacgcccggctaattttttgtatttttagtagagacagggtttcaccatgttagccaggctggtctcgaactcctgacctcaggtgatccacccgc

SEQ ID NO: 808337 - DNA, 651 bp, Homo sapiens
agacaatagagctatatgactctaaaatggaaacaacccagtaacgttgacactgggaaatgtaacttttacttccgctctgtttctgtctactccacccattctttcttttctttttttttttttttttttttttktttgttttgatagagtctcaccgtgtcgcccaggctggagtacagtggcgtgatcttggctcactggaacctccgcctcctgggttcaagtgattcttctacctcagcagcctctcaagtagctgggattatagtcacctgccaccacgcccagctaatttttttttttttttttttgtactttcagtgaagatggggttttgccgtgttggtcaggctggtctcgaactcctggcctcaggtgatccgcctgccttggccttccaaagtgctgagattacaggggtgagccaccgcacgtggcctactccactcattcttaataggtcatcactcttgtcagtttctgttgtatctttacagtgtttctgtatacaaaatgtatacaaaatcaagtaaatacaaaagtataattcttcttttcccccctctgttagacaaaggtgtcatctagttatgctattctgagactttctcttttctgggttaataatgtatcttagagaattttcca

SEQ ID NO: 808338 - DNA, 547 bp, Homo sapiens
caaaagcttcttaagctgataagcagcttcagcaaaatctcaggatacaaaatcaaagtacagaagtcacaagcatttcaatacatcaacaacaggcaagcagagaacaaaatcatgaatgaactcccattcacaattgctacagagataataaaatacctaggaacatagctaacaagggaagtgaaggacttcttcaagaataattacaaaccactgctcaaggaaaccagagaagacacaaacaaatggaaaaagatttaatcctcatggataggaagactcaatatcatgaaaactgccatattgyacatagtaatttatagagtcaatgctattcccattaaactaccattgacattcttcacagaattaggaaaaactattttaaaattcatatggaaccaaaaaagagcccaaacagctaagacaatcataagcaaaaagaacaaagctggaggcgtcatgctaccggacttcaaactataaggctacaataaccaaaacagcatagtactggtacaaaaacagacatatagaccaatgg

SEQ ID NO: 808339 - DNA, 543 bp, Homo sapiens
tctttgtcttgtgctggttttctttttatactggctcttcacaaggctatatatattctttagttaaaagtagacatctcgatggaccagtgactatcaccctattaatcagtcatgggagcactgctgtgcatttggtattttaactttcgggtatgctatcacatcacagaaggcctggtcccctccccatcacctgcagccggacctgtctttgattcctaccaatcacctatattaattgtgcctaaattcaatattccgacagggcataactaccctaaggtgctaattaattcatgcttgaaggacataacagtaattaacagacaaacacatacaaccgctccccttattggacttttaaaatgaaaatctgcaacacycccctgccccatctctgacttcatcaacccaggaaaaaagacaccttgccaaacttcaaaaacaagtaagccttaattcaactctgccagagcccaaaatatttgtattttagctttgggtatccccaacagctacccctcaactaatgcaaatttt

SEQ ID NO: 808340 - DNA, 647 bp, Homo sapiens
agtttgtagtttttttgtgatttctttttatttagaatcaaagtaattctgacctgttaggctgaattaggaaattgtggactgaacttggatgaatttaggaataatctcttattctttattttgtggaagttttttcttgtaggagtggtattatttaaatatttgatggaatttaccagtaaagtcagctagtcctgagcttktctctgtgacatggagtgacaaactattgctcacatgttaaagtcaagctatggcctatatttgtattactcataaactaagaataaattttatacttttaaagtgttagaagacggaagaggaggaataggagaaaaagaactgacagaggttgcatatggcccaaaatatttactatctagctccttactgaaaaattttgctgacctctgctctatatggtgttatttactaaaatacttctttacttgtaatatgtctatccagacatgtggctttttttctcgagttactcttatgtctttctaggaatatgtctgcttcacccaagttgtcaaattcattgacatagtgttgttcataacatttccatatatttctatagggttagtaattgtattcttcattttcactcctgactttgcaatttctattttctt

SEQ ID NO: 808341 - DNA, 647 bp, Homo sapiens
agtttgtagtttttttgtgatttctttttatttagaatcaaagtaattctgacctgttaggctgaattaggaaattgtggactgaacttggatgaatttaggaataatctcttattctttattttgtggaagttttttcttgtaggagtggtattatttaaatatttgatggaatttaccagtaaagtcagctagtcctgagcttttctctgtgacatggagtgacaaactattgctcacatgttaaagtcaagctatggcctatatttgtattactcataaactaagaataaattttatacttttaaagtgttagaagacggaagaggaggaataggagaaaaagaactgacagaggttgcatatggcccaaaatatttactatctagctccttactgaaaaattttgctgacctctgctctatatggtgttatttactaaaatacttctttacttgtaatatgtctatccagacatgtggctttttttctygagttactcttatgtctttctaggaatatgtctgcttcacccaagttgtcaaattcattgacatagtgttgttcataacatttccatatatttctatagggttagtaattgtattcttcattttcactcctgactttgcaatttctattttctt

SEQ ID NO: 808342 - DNA, 607 bp, Homo sapiens
cccctttatcctcagttttaaagctgttaacataagtgtctttgcaggggatgttaatggaaaacagggaactaatgatcctcccccagcaaatctgaccctacaggttatacctgtgggttttttatcataggtcaccagaatattaggcactttagagaagttggtcacagagataagcagcagatcagtgtgatcaagtgcagaggagggtttttgatgacatctctaacatttagatagattttgtgaggtaggtagggattgggacatttttatcaagaaattatctttttggccagtcatggtggctcatgcctgtaatcccagcactttgggaggctgaggtgggtggatcacttgaggtcaggagtttgagaccagcctggccaacatggtaaaaccctgtctctactaaaaatacaaaatttagccagatgtgttcacttgaactcaggaggcagaggytgcagtgagcgagatcatgccactgcattgcagcatgcacgacagagtgagactctgtctgaaaaagaaaaaaaaaaaagaaggaaagaaattatccttttatgttgaggtaaggcaagcaaaaggatataatagagga

SEQ ID NO: 808343 - DNA, 633 bp, Homo sapiens
tatgtagaagagttttccaatgttatctactagaaattgtatggtttcaggtcttagatttaagtctttgaaccatcttgagttgatttttgtgcaaagtgagagatgaggatccagtttcattcttctacatgtggcttgccagttatcccagcaccatttgtggaatagggtgtctgttccccactttgtgtttttgtttgctttgttgacrattggttggctgtaagtatttggctttatttctgggttctctattctgctccattcgtctccgtgcctatgtttataccagtaccatgctgttttggtgactatggtcttatagtatagtttgaagttgggtaatgagatgcctccagatttgttctttttgcttagtcttgctttggctttgtgggctcttttttggttccatatgaatttttggattgtttttttctagttctatgaagaatgatggtggtattttgatgaaaattgacttgaatttgaaagaaaaagatttctttaggcaatataggcattttcacaatattgattctatccatccctgaacatgggatatgtttccatttgtttgcgtcatctatgatttccttaagtagtgttttgtagttttccttgtagtgg

SEQ ID NO: 808344 - DNA, 527 bp, Homo sapiens
atcttgagttgatttttgtgcaaagtgagagatgaggatccagtttcattcttctacatgtggcttgccagttatcccagcaccatttgtggaatagggtgtctgttccccactttgtgtttttgtttgctttgttgacgattggttggctgtaagtatttggctttatttctgggttctctattctgctccattcgtctccrtgcctatgtttataccagtaccatgctgttttggtgactatggtcttatagtatagtttgaagttgggtaatgagatgcctccagatttgttctttttgcttagtcttgctttggctttgtgggctcttttttggttccatatgaatttttggattgtttttttctagttctatgaagaatgatggtggtattttgatgaaaattgacttgaatttgaaagaaaaagatttctttaggcaatataggcattttcacaatattgattctatccatccctgaacatgggatatgtttccatttgtttgcgtcatctatgatttcct

SEQ ID NO: 808345 - DNA, 623 bp, Homo sapiens
gaagtgtcacacatctctcactttaaatcaaaaagtagaaacgataaagcttagtaaagaaggcatgccagaagccaaagacaggccaaaagctaggcctcttgggccaaacagccaagctgtgaatgcaaaggacaagttattgaaggaaattaaaagtgctactccagtgaacacacaaacaktaagaaagtaaaacacttattgctgatagggagagtttgagtggtctggatagaagatcaaaccagccacaacattcccttaagccaaagcctaatccagagcaaggtcctaactgtctccaattctatgaagtctgagagaggtgaggaagctacagaaaacaagtctgaagctagcagagattggtcatgaggttcaaggaaagaagccatttccataatataaaatgtcaaggtgaagcagcaagtgctaatacagaagctgcagcaagttttccagaagagctggcaaagataatcaatgaagttgaccatattaaacaatagattttcgatagtgacaaaacagccttctattggaaggcgatgccatcaaggactgtcctagctagagaggagaagttagtgcctggcttcaaagcttcaatgaacaagctg

SEQ ID NO: 808346 - DNA, 623 bp, Homo sapiens
gaagtgtcacacatctctcactttaaatcaaaaagtagaaacgataaagcttagtaaagaaggcatgccagaagccaaagacaggccaaaagctaggcctcttgggccaaacagccaagctgtgaatgcaaaggacaagttattgaaggaaattaaaagtgctactccagtgaacacacaaacagtaagaaagtaaaacacttattgctgatagggagagtttgagtggtctggatagaagatcaaacmagccacaacattcccttaagccaaagcctaatccagagcaaggtcctaactgtctccaattctatgaagtctgagagaggtgaggaagctacagaaaacaagtctgaagctagcagagattggtcatgaggttcaaggaaagaagccatttccataatataaaatgtcaaggtgaagcagcaagtgctaatacagaagctgcagcaagttttccagaagagctggcaaagataatcaatgaagttgaccatattaaacaatagattttcgatagtgacaaaacagccttctattggaaggcgatgccatcaaggactgtcctagctagagaggagaagttagtgcctggcttcaaagcttcaatgaacaagctg

SEQ ID NO: 808347 - DNA, 623 bp, Homo sapiens
gaagtgtcacacatctctcactttaaatcaaaaagtagaaacgataaagcttagtaaagaaggcatgccagaagccaaagacaggccaaaagctaggcctcttgggccaaacagccaagctgtgaatgcaaaggacaagttattgaaggaaattaaaagtgctactccagtgaacacacaaacagtaagaaagtaaaacacttattgctgatagggagagtttgagtggtctggatagaagatcaaaccagccacaacattcccttaagccaaagcctaatccagagcaaggtcctaactstctccaattctatgaagtctgagagaggtgaggaagctacagaaaacaagtctgaagctagcagagattggtcatgaggttcaaggaaagaagccatttccataatataaaatgtcaaggtgaagcagcaagtgctaatacagaagctgcagcaagttttccagaagagctggcaaagataatcaatgaagttgaccatattaaacaatagattttcgatagtgacaaaacagccttctattggaaggcgatgccatcaaggactgtcctagctagagaggagaagttagtgcctggcttcaaagcttcaatgaacaagctg

SEQ ID NO: 808348 - DNA, 532 bp, Homo sapiens
taagaacattcataatgcatgggaggtcaacatgaacatagtttagaagaagttgattccagccctcatggatgactttgaggggttcaagacatcagtggtgaaaaaagcaggaaaactagaattagaagtaaagcctgragacgtgactgtattgctgtaatctcatgatcaaacttgaacagatgagaaattgctttttatgggtgagcaaagaaagtgatttcttgagatgaaatcaactcctagtgaagatgatgtgaacattgttgaaatgacaacaaagaatttggaccattataccaacttggttgataaaacaacagcactgtcaaagacgattaactctaattttaaaataagttctactatgagtaaaatgctattaaatagcattacattctacagagaaacctttcattaaaggaagaatcaatcagtatggcaaacttcatttttattgtaagaaatcgccacaaccacccaactttcagcaaccaccaccatgatcagtcagcagccatcaacattg

SEQ ID NO: 808349 - DNA, 622 bp, Homo sapiens
aaaataagtccatctagaaaaatacattaattcaacgcatatttactccacactcacatgttgcaccacagctccaagtgtgaatgaggcagagaccctgcactcgagttaggaagacacagccaactgaactgatgacttaaacgcaaagggacagagcacaggctatggcaggattacagaaaaagggctcctcatcaagccttgagggaatcagggaaggcttccaggaggaagcaaactgatatgatttccaagaaggattcatccaggggggaaaaatggacagaattagggaaatactaytgcttaatcatagaagttcacctaaaccccatgaaagtcagcaatagtacagtttctacctgaaatacagtcagcccaggattagaatatgttcagctctcatgtcataaaatccctaaagaactttctgaaaagctaagcccactgataagaataaaggaaaagcatagcaccccacaaactaaaacatattttccattacaaatacattttcaccaactctgaaaaaccaagtggacatttaacagatcctagaagactttgctccctaattgcctcccaataaccctcactctcattaaactacagcatgacc

SEQ ID NO: 808350 - DNA, 638 bp, Homo sapiens
caccatgttagtctttttttttttttatacttggctcctgtaaattgcagtgagccatgtattaaagggaaagaacatggaggatcaccaagcatttctgccctaaatatatacatatacatataaatatgtatatatgtgtgtgtgtgtatatatatatggacacacacacatatatatatatgtgtgtgtatatatggacatatgtgtatatatatatacgcacatacgtatrtgtatatacgtgtagatatatgtgtgtatatatatatgtgtgtgtgtgtgtatagtgtgtgtatgtgtgtattttaagagactaggtgtcactcctgttgccagtgccgtcgtgcagttatagctcactgaagcctcaaactcctgggctcaagttattctcctacttcagcctcctaagtagctgtaactacaggcatgcaccgccatgcctggctaatttttttttaagagatggggtcttgctgtgttgcccaggctggtcttgaactcctggccttaagagatcctcccacagcacgggaattataggtgtgagccaccatgcctggtcccataatatattttcctttgcaatacagtctatagttaacatccaaatcccatgcaaagtataataaaac

SEQ ID NO: 808351 - DNA, 638 bp, Homo sapiens
caccatgttagtctttttttttttttatacttggctcctgtaaattgcagtgagccatgtattaaagggaaagaacatggaggatcaccaagcatttctgccctaaatatatacatatacatataaatatgtatatatgtgtgtgtgtgtatatatatatggacacacacacatatatatatatgtgtgtgtatatatggacatatgtgtatatatatatacgcacatacgtatgtgtatatacgtgtagatatatgtgtgtatatatatatgtgtgtgtgtgtgtatagtgtgtgtatgtgtgtattttaagagactaggtgtcactcctgttgccagtgccrtcgtgcagttatagctcactgaagcctcaaactcctgggctcaagttattctcctacttcagcctcctaagtagctgtaactacaggcatgcaccgccatgcctggctaatttttttttaagagatggggtcttgctgtgttgcccaggctggtcttgaactcctggccttaagagatcctcccacagcacgggaattataggtgtgagccaccatgcctggtcccataatatattttcctttgcaatacagtctatagttaacatccaaatcccatgcaaagtataataaaac

SEQ ID NO: 808352 - DNA, 537 bp, Homo sapiens
caaaaattgactcaaaatgaatcacagacctaaatgtaaaatgtaaaaccatagaactcctagaaaataatgtacaagaaagttcagctgatcttgagcatgaaagtgactttttatatataataccaaaggtgcaatccatgaaagaaatcattgataagctagacttcattaaaattgaaaacgtctccttratataagacactgtcaactgagaaagacaagccaaaggctaggagaaaatatttgcaagaaacatgtatgataaagaactgttatccaaaatattttttttaaagtcttaaaactcattaagaaaaataatttaaaaatgggcaaaagacttgaacagacacctcaccaaaaaatacatacagatggaatacaggcatatgaaaagaagctcaacatatattattaggatattgcaaattaaaacaatgataccactatgtacctattagaattgtgaaaattcaaaacaatgacaacaccaagtgctagtgaggatgtggggcaacagaactcacattcact

SEQ ID NO: 808353 - DNA, 651 bp, Homo sapiens
ggtggaattgctgaatcatatggcaattcgtttttcaaccttttggggaaatgatagactgttttccaaagtggctataccatgttacattctcaccagcaatgtatgttcaagttcctctatgtcttcttttcaattatagccatcctatgaggtgatgtggtatctcactatggttttgatttgtattttcttgatgactagtgatgctgagtatctttttatgggcttattggtcatctgtatatcttctttggataaatatctattcagacyttttatccattttttaaattgggtttatacaaatatttatatattctagatacaagtctcttatcagatatatgatatgtaagtattttatcccattctgtggagtttcttttcagcttctggatgttatccatggaaacacaaaagtttttaatgcttgtgtctttttccatttgttgcttgtgttgtctttttccatatgttgttaagacatcatatctaaaatattttgcctaatccaaggccatttgttatgcttatgtttccttctaagagttttatagttttagcttttacatttgaggccaagattcattttgagataatctttgtatatggggtcaggtaaggatccaaattcattcttttgcatgt

SEQ ID NO: 808354 - DNA, 545 bp, Homo sapiens
ccagaaataacttatcatcattagaatcatctgatatttttgggatctggaatctatgttctgtatttgtgagggtaactatgagacttgaacagtccaccagggatcttaaaggcatgttttcaaaacacagcccccatcaaaacagtgtgctgttaccaaatatgtttgggcaatgccactgtgaaatttacaacatacactaacagagagtttgagaaatcccatggctggtagagcttggcaaagggaaatgtgtttccctcacatatstaactaggaaaccgtcatttcaaataattcgtgttactatcctgaaggccatattttaggaaatgctgcactggaggaaagatgttctagaatagacaggtactacaagactgaaaaagagaaaatttaacatgctttcctgctactgaatctattctatatatcctgtttttcttcataggtgtttgccccacaatatttttgttttgtcattatctctaatattaaaatgggagaaaacagtaatacaagcatgttgaaaaactgatacc

SEQ ID NO: 808355 - DNA, 545 bp, Homo sapiens
ccagaaataacttatcatcattagaatcatctgatatttttgggatctggaatctatgttctgtatttgtgagggtaactatgagacttgaacagtccaccagggatcttaaaggcatgttttcaaaacacagcccccatcaaaacagtgtgctgttaccaaatatgtttgggcaatgccactgtgaaatttacaacatacactaacagagagtttgagaaatcccatggctggtagagcttggcaaagggaaatgtgtttccctcacatatgtaactaggaaaccgtcatttcraataattcgtgttactatcctgaaggccatattttaggaaatgctgcactggaggaaagatgttctagaatagacaggtactacaagactgaaaaagagaaaatttaacatgctttcctgctactgaatctattctatatatcctgtttttcttcataggtgtttgccccacaatatttttgttttgtcattatctctaatattaaaatgggagaaaacagtaatacaagcatgttgaaaaactgatacc

SEQ ID NO: 808356 - DNA, 545 bp, Homo sapiens
ccagaaataacttatcatcattagaatcatctgatatttttgggatctggaatctatgttctgtatttgtgagggtaactatgagacttgaacagtccaccagggatcttaaaggcatgttttcaaaacacagcccccatcaaaacagtgtgctgttaccaaatatgtttgggcaatgccactgtgaaatttacaacatacactaacagagagtttgagaaatcccatggctggtagagcttggcaaagggaaatgtgtttccctcacatatgtaactaggaaaccgtcatttcaaataattcgtsttactatcctgaaggccatattttaggaaatgctgcactggaggaaagatgttctagaatagacaggtactacaagactgaaaaagagaaaatttaacatgctttcctgctactgaatctattctatatatcctgtttttcttcataggtgtttgccccacaatatttttgttttgtcattatctctaatattaaaatgggagaaaacagtaatacaagcatgttgaaaaactgatacc

SEQ ID NO: 808357 - DNA, 566 bp, Homo sapiens
aacttccaaatcacctttggtaggcttccaaatgaactcacctgggggaggtcttgtgatttctgttgccatcctgtccctcagtaaagtgtcttatcctgcattccacaaattgtttacatatggattaatatgtaatgtaccaacattgaaaagtttgctgatttatttttaaatcatgaaattttactggttgttttgcacatggacattttagtctgtatgttgcaatttggtacaatgattctaacctccgtattgtatcctctaataaaaaacgacaactgccatataaaaagttctctcttgttctaaactctcataaaacccttccaacttgtaagactctccagaacactcccaactttgttggtttctcctcccaggtcagtcctcacatttggcttccaataaacatttatcctyttatttttgcctaaccagtcttaattttggttgacatggtgataaatactatggaaacaaattgaatctagagaactgaataagtgtttgggatgagttaagagggaggattgcaattttagaaagggtattcacttttt

SEQ ID NO: 808358 - DNA, 527 bp, Homo sapiens
tatccaactaactgaattgcccagtgctcttcattctatggtgaatactttgaggaaggtgcttgaacacccaggatgatccgctcctccctggtctgcctgctcatagctgctcccatcagctgagttgtagtggacttaaaggcacctatgtttgttctcagtccatttatgctagttgcaccaataattgaaattatgtaatttaattraacagttgtaaattaattaaataaatgtgaaaaagagagttggtatttccagaacaactaaggcagatgctttgtaaaagtgaattgctaaaggaaatgcctttgacacggaaagacaaacatcatatgttctcagttctttgtgggatctaaagatcaaaacaatatgaactcatgaacatagagagtagaaagaaggttaccatgagttcatgaggctgggaatggtagttgggggctgggcagggggaggtggggatggttaatgggtacaaaaaaatagaaagaatgaataagatctactattttacaaca

SEQ ID NO: 808359 - DNA, 527 bp, Homo sapiens
tatccaactaactgaattgcccagtgctcttcattctatggtgaatactttgaggaaggtgcttgaacacccaggatgatccgctcctccctggtctgcctgctcatagctgctcccatcagctgagttgtagtggacttaaaggcacctatgtttgttctcagtccatttatgctagttgcaccaataattgaaattatgtaatttaattaaacagttgtaaattaattaaataaatgtgaaaaagagagttggtatttccagaacaactaaggcagatgctttgtaaaagtgaattgctaaaggaaatgcctttgacacggaaagacaaacatcayatgttctcagttctttgtgggatctaaagatcaaaacaatatgaactcatgaacatagagagtagaaagaaggttaccatgagttcatgaggctgggaatggtagttgggggctgggcagggggaggtggggatggttaatgggtacaaaaaaatagaaagaatgaataagatctactattttacaaca

SEQ ID NO: 808360 - DNA, 552 bp, Homo sapiens
gtgctgggtatagaatgcaggtcatctgatttcaagagctgccctcctgccattacctccatggccttccagagaccaggcagaccttggggcaggattgttgcttgctcataaggcacctttgcatgagttagaaatataatgtatttctatattgttataaacattttgggccgggtgcagtagctcatgcctataatcccagcactttgggaggccgaggcaggcggatcacgaggttaagagatcgagaccatcctggccaacatggtgaaaccccgtttctactaaaaatacaaaaatatttttggggggcgttgtggcacgtacctgttgtcccasctactcaggaggctgaggcaggagaactgcttgaacccaggaggcagaggttgcagtgagccaagatcgcaccactgcactccagcctggtgacagagtgagattccatctcaaaaaacaaacaaatgaacaaacaaaaaatatataaacattttgttagaaaaagtctgccagaattatgtcaataaatgcataaatcgacagtgtcag

SEQ ID NO: 808361 - DNA, 631 bp, Homo sapiens
ttcgctcttgttgcccaggctggagtgcagtggcgcgatcttggctcactgcaacctcagccttccagtttcaagcgattctcctacctcagcctcccgagtagctgggattacaggcatgcaccaccacacccagctaattttttgtatttttartagagatggggcttcaccatgctggccaggatggtctcaatcccttgacctcgtgatccgcccgccccggcctcccaaagtgctgggattgcaggcgtgagccactgtgcccagctacccttttactttttacctttctgtatcttactctttaaaatatgtctcttgaatgcagcacagacacatgaagaaatgcacaaataaaaccaacaaattgtttcttttacctggaatgttcagtcccttttcatttaatgtaattactgatatagttgaacttacagcgaccatcttactgtttgttttctatttggcctatctagttccttatttcctctttacttgccttcttttcaactaattatattttttctactttttccttacattgatgttttgttaataattatttgttaaggtaaatttactaaaacaaaatgcacagatttttaagatatagtttgataatttttga

SEQ ID NO: 808362 - DNA, 620 bp, Homo sapiens
atatgcacttggtttttgttgttacatttgtaaggcgttctcaatttattcacaatttaggcacatggaagtattattcacaggaaaatgcttaaaaaaaaaaagcacaacatttcagtaagcagttgaaaaaacacagcatagttatggaagagatgggtagaggactccaaattcttgtatatgtatttatcatcatcatcatcgttttttttttttttttgagacggagtctcgctctgttgcccaggctggagtgcagtggcgtgatctctgctcactgcaaccttcgcctcctgggttcacgccattctcctgcctcagcctcccgagtagctgggactacaggcgcccgccascacgcccggctaattttttgtatttttagtagagacggggtttcaccacgttagccaggatggtctcgatctcctgacctcgtgatcctcccgcctcggcctcccaaagtgctgggattacaggcgtgagccactgcgcccggccctcatcatcatcatttttaaaaagtaatatttgagttagctgaaaagtacctaggattaccactgttgctaaatgttttcagagtaaggcctgggttttatgggatcagaggagag

SEQ ID NO: 808363 - DNA, 601 bp, Homo sapiens
agtgtaaaagtattcctgtttctccatatactctccagcacctgttgtttcctgactttttaatgatcgccattctaattggcatgagatggtatctcattgtggttttgatttgcatttctctgatggccagtgatgatgagcattttttcatgtgtctgttggctgcatacatgtcttcttttgagaaatgtctgttcaaatcctttgcccaccttttgatgggcttgtttggttttttycttgtaaatttgtttgaattctttgtggattctggatattagccctttgtcagttgggtagattgcaaaaattttctcccattctgtaggttggctgttcactctgatggtagtttcttttgccgtgcagaagccctttagtttaattagatctcatttgtcttttttggcttttgttgccattgcttttggtgttttagacatgaagtccttgcccatgcctatgtcctgaatggtattgcctaggttttcttctagcgtttttatggttttaggtctaccatttaagtctttaatccatcttgaaataatttttgtatgagctgtaaggaagggatccagtttcaactttctacgta

SEQ ID NO: 808364 - DNA, 601 bp, Homo sapiens
agtgtaaaagtattcctgtttctccatatactctccagcacctgttgtttcctgactttttaatgatcgccattctaattggcatgagatggtatctcattgtggttttgatttgcatttctctgatggccagtgatgatgagcattttttcatgtgtctgttggctgcatacatgtcttcttttgagaaatgtctgttcaaatcctttgcccaccttttgatgggcttgtttggttttttccttgtaaatttgtttgaattctttgtggattctggatattagccctttgtcagttgggtagattgcaaaaattttctcccattctgtaggttggctgttcactctgatggtagtttcttttgcygtgcagaagccctttagtttaattagatctcatttgtcttttttggcttttgttgccattgcttttggtgttttagacatgaagtccttgcccatgcctatgtcctgaatggtattgcctaggttttcttctagcgtttttatggttttaggtctaccatttaagtctttaatccatcttgaaataatttttgtatgagctgtaaggaagggatccagtttcaactttctacgta

SEQ ID NO: 808365 - DNA, 563 bp, Homo sapiens
gtttttcctatagagttgtttgagctccttatatgttctggttattaattctttgtcagataggtagtctgtaaatattttgtcccattctgtgggttctctcttcactttgttgattgtttcctttgctaggtagaagctttttaactagatgtgatcccatttgtccatttttgttttgtatctctctggttatgggatactacccgagaaatcctggttcagtctaacatcctggagagttttccaaaagatttctcttagtagtttcatagtttgaggtcttagatttaagtctttaattcattttgatttgatttttgtatatggcaaaaaataggagtgaagtttcattcttctgagtatggatatccaatttttccyggagactatcctttattgatggattattatttaagagactatcctttccccattgtatgttcttggcacctttgtcaaaaatgaatttgctctatatgaatggatttgttatttcaggttctctattctgttccatttgtctatgtgtctgtttttatgccagtaccctgccattttgt

SEQ ID NO: 808366 - DNA, 612 bp, Homo sapiens
tgaatccagcacatggcccctcttcctggcacccagggcactatactttccaggctcactctcagttggattggggacatgtgattgagttctaaccaataagatgccagcctaattactgaaagccaatgctactcaaagtgtggtccatgcaccagtgcccattkgcaaactgttaccagtttgcaatgaactaaatacagaaatttaaaagtaagcaattaggtacttttacagctatttgatattgccactacgttcaagcaccattcccttttctagtaattaatttttgttgcattttacaaaagtataggtctgtgatgaatttaaaatgttttaaaatttggtccttgaattgtttaagaagcactgcttgtaagccattccaggcccagcccttaaaaacatactgtgcgatccagaactttcttccccatctgcagcaacttagcagccattggtcctagatgtcatagctacaagatggtaaaggatcacccaaaccacatgagactccaacatgagtgggaaataaaattttactctaaaaagccaccgaaattttggtttactaactgaggcacagcctaggattatttgacttataca

SEQ ID NO: 808367 - DNA, 481 bp, Homo sapiens
tcagtttcctgaaggacccaaactaacacagactggcgcagatctccatctgcttggccaacaactgggtgaaccaatacagttcccgggaaaagaaataagtaactgcatgtttgcctctcaccagagagggtgggccctatgccctatgccccgcstccaccccacccttaccctcaacccccaccagcagccctgtcatttgggtattaaagctgatggtgtgtgttaatccctgtctggatcctatgtctagttctcaaattggttagaacctaaaggaagaaagtattcaagcttccccaaactctaacaaattacttagtagtcacgtcctttatagaaatgtttttaaattgtttatcggaggggatgagtagacataaaatattgaggtgctgttcttctactaagggctaatggcttttcctacagtcattttctttaaatctggtacagtgctgatgaaatagctaacgtt

SEQ ID NO: 808368 - DNA, 634 bp, Homo sapiens
aaaaactggccacatattaggccataaagaagtctcaacaaaatccactatacgattgacattgtccagaccacattttcctgaccataatgcaacaaaattagaagtcaacagcaagaagatagctaaacacaagcatacattaggaaaattraaaatatcctttcatgagttaaatgaaaaatcacaatagaaattactaaacatttacaattgaacgaaaacacaacttcatatatatatatatacatatatatatatatatatatgagtgtcattgcccccagtgagtcttccaactttgttcttcttttacaaagttatttgggaaattctgggtctcctgcaattcctcatacagttttacactgtttgtcaatttctgtggctgggatgaacttatcgtagttctcatagaccagggtttgcatgtcgctgtctagagcccggatctgcggcaccatgtccgtctcactgtctatcagctgggccagagggcactctctaggcagcttgtctaggtaaagttccgggtcgaagtgcgccccgttcagatcagtggagtccagggggtcgggccccgcggggagtcccaccgcctcccctttcgagaggccattgtaaagctttagca

SEQ ID NO: 808369 - DNA, 634 bp, Homo sapiens
aaaaactggccacatattaggccataaagaagtctcaacaaaatccactatacgattgacattgtccagaccacattttcctgaccataatgcaacaaaattagaagtcaacagcaagaagatagctaaacacaagcatacattaggaaaattgaaaatatcctttcatgagttaaatgaaaaatcacaatagaaattactaaacatttacaattgaacgaaaacacaacttcatatatatatatatacatatatatatatatatatatgagtgtcattgcccccagtgagtcttccaactttgttcttcttttacaargttatttgggaaattctgggtctcctgcaattcctcatacagttttacactgtttgtcaatttctgtggctgggatgaacttatcgtagttctcatagaccagggtttgcatgtcgctgtctagagcccggatctgcggcaccatgtccgtctcactgtctatcagctgggccagagggcactctctaggcagcttgtctaggtaaagttccgggtcgaagtgcgccccgttcagatcagtggagtccagggggtcgggccccgcggggagtcccaccgcctcccctttcgagaggccattgtaaagctttagca

SEQ ID NO: 808370 - DNA, 634 bp, Homo sapiens
aaaaactggccacatattaggccataaagaagtctcaacaaaatccactatacgattgacattgtccagaccacattttcctgaccataatgcaacaaaattagaagtcaacagcaagaagatagctaaacacaagcatacattaggaaaattgaaaatatcctttcatgagttaaatgaaaaatcacaatagaaattactaaacatttacaattgaacgaaaacacaacttcatatatatatatatacatatatatatatatatatatgagtgtcattgcccccagtgagtcttccaactttgttcttcttttacaaagttatttgggaaattctgggtctcctgcaattcctcatacagttttacrctgtttgtcaatttctgtggctgggatgaacttatcgtagttctcatagaccagggtttgcatgtcgctgtctagagcccggatctgcggcaccatgtccgtctcactgtctatcagctgggccagagggcactctctaggcagcttgtctaggtaaagttccgggtcgaagtgcgccccgttcagatcagtggagtccagggggtcgggccccgcggggagtcccaccgcctcccctttcgagaggccattgtaaagctttagca

SEQ ID NO: 808371 - DNA, 590 bp, Homo sapiens
  misc_feature 458: n = A,T,C or G
tcatcgtccgtggttccggaccaggcctgcatcagccagcgcttcctgcagggaaccatcattgccctggtggtggtcatggccttcaggtgacttgtcccccgggctctcatggtggctgactaggggagtggagctgcccagtggagtcagctgcccatgggctcaggcctgggggaagaggaggatgtagcttgggagatcaggcagctgaggtctcggtgaggtgggcctttctgcatcttcccytctggggtgacccattttgtaggcatcacgtgggagcccagcctcaggagcaaggaccacagccttgtcctagagagagggcactggatggtggctccagctctaacggtcacccttttctgtggctccagcgtggtgtccatgtccacactgtacgtgctgagcctgcgcacagaggaggacctggtagacactgatgggtaggttcntggaggccaagccaagctgccaggccaggtggggctttggtgggcagtcccaggtcagagagccatgagactgtcttctctaaaggagttcatccttagcttgttagcctgctggggtgctgtggggatcca

SEQ ID NO: 808372 - DNA, 590 bp, Homo sapiens
  misc_feature 458: n = A,T,C or G
tcatcgtccgtggttccggaccaggcctgcatcagccagcgcttcctgcagggaaccatcattgccctggtggtggtcatggccttcaggtgacttgtcccccgggctctcatggtggctgactaggggagtggagctgcccagtggagtcagctgcccatgggctcaggcctgggggaagaggaggatgtagcttgggagatcaggcagctgaggtctcggtgaggtgggcctttctgcatcttcccttctggggtgacccattttgtaggcatcacstgggagcccagcctcaggagcaaggaccacagccttgtcctagagagagggcactggatggtggctccagctctaacggtcacccttttctgtggctccagcgtggtgtccatgtccacactgtacgtgctgagcctgcgcacagaggaggacctggtagacactgatgggtaggttcntggaggccaagccaagctgccaggccaggtggggctttggtgggcagtcccaggtcagagagccatgagactgtcttctctaaaggagttcatccttagcttgttagcctgctggggtgctgtggggatcca

SEQ ID NO: 808373 - DNA, 669 bp, Homo sapiens
aggctacatccaggctcatggaaggagtgtagtattcatttagccatgtctgccatgggtccagaaatgggaaagggaattgctgtccttgccctgtggtatgctgccacctctttgggaagcaggccttgcccctgtcccaccactcattctcagctttgaatgggaggcctttctatagtggaggcctttccttgaagcctatgaactgcaggcccccttttgccattgatctcaaagcacttgtcctcaggatagggaagagcasggggatgcaggaatagcagggatagcttgctcccagccccctccccaatttggttccgttgacataggaattttacgattcccaaaccatgcaggggctgagccttccttatgatgactttgttctccctcccactgggggaatcctccctatgccttaaaactgccgagccccactccatgtaataggattcctgggcttcctcaatgggggttcatgttcttggactgcgggccctcagtccttaactggaaagtgaccgtccactgccccatggagcccatctggacacagcacagccccaaaaccgttagcagctggctctgtttccaagcctggggaggggttcctcagtgcaggagttggggacaggctggggatccaagctgcttgagggggtc

SEQ ID NO: 808374 - DNA, 453 bp, Homo sapiens
caccgcgggagcaggctccccgcagtccggattggggtcaagagttctgtttatcttaccaaaaacatccctggaatgcctcctggggaacaaagggagctggggcctccccgctcaggctggggggctggcccctgagagcccagaagagggactgcctgccggagaggggaacactgggcaggcctgggctgggggtctccggagactccttcctgaggcccagaggaggagcaggcctcagaggagatggggacggagggggacctttagatttgggttggattctcctggtccagcctgggggcaggaggtggytaggatgaggtgaaaggctgcccccccttgggcaggtttgtgcctccctgcccaggcctctagtaggtggctgaccaacggccctcccacctagggtaggtggggggcagcccccgggcttggctcaggacgggg

SEQ ID NO: 808375 - DNA, 475 bp, Homo sapiens
gaggtcaagagatcgagcccatcctggctaacacggtgaaaccccgtctctactaaaaatacaaaaaattagccagccgtggtggcgggtgcctgtaatcccagctactcgggaggctgaggcaggagaatggcgtgaacctgggaggcagaggttgcagtgagccaagatcgcgccactgcaytccagcctgggcgacagagtgagactccatctcaaaaaaaaaaaaaaaaaaaaaagaatactggttacttggggtgaggtgggggacatattatcaactgagaggaggacaaggagcccagtgtactgaaaatgtcctatgtcttgatctgagtgttgatatgggtgcatacctgtacaaaaattcactgagctgaacatttgagccttgagcatttaactgcatatatgtgatacccaatttaaaaacggagctgagatggagatgccctcatcagagctctgtatgcct

SEQ ID NO: 808376 - DNA, 615 bp, Homo sapiens
caacatgaacgggtattattatgattgcattttacatatgaggaaactgaggcccagggcctggagtggcccccaaggacccacagccccgtgtggtgctcagggccgggacccacactggcagccccatctgcccacggcaggtcagcagaagaggcccggtggccttgccaggctctccctgccayacgctgtctggcaagtggactgagggcaccgcctgctcaggatgagtgatacctggcaacacccctgcccagagctcttcctggtagccagagaactgaccaactccccagtcccaccctcctgctgggattctcattatttatttatttatatgtattttttgagatggaatcttgctctgtcaccaggctggagtgcagtggtgcaatcttggctcactgcaacctccgcctcctgggtttaagcgattctcctgcctcagcatccccagtagctaggattacaggcccacgccaccacgcctggctaatacttgtatttttagtagagacggggtttcaccaagttggccaggatggcctcgatttcctgatctcgtaatccgcccacctcagcctcccaaagtgctgggattacaggtgtgag

SEQ ID NO: 808377 - DNA, 615 bp, Homo sapiens
caacatgaacgggtattattatgattgcattttacatatgaggaaactgaggcccagggcctggagtggcccccaaggacccacagccccgtgtggtgctcagggccgggacccacactggcagccccatctgcccacggcaggtcagcagaagaggcccggtggccttgccaggctctccctgccacacgctgtctggcaagtggactgagggcaccgcctgctcaggatgagtgatacctggcaacacccctgcccagagctcttcctggtagccagagaactgaccaactccccagtcccaccctcctgctgggattctcattatttatttatttatatgtattttttgagatggaatcttgctctgtcaccaggctggagtgcagtggtgcaatcttggctcactgcaacctccgcctcctgggtttmagcgattctcctgcctcagcatccccagtagctaggattacaggcccacgccaccacgcctggctaatacttgtatttttagtagagacggggtttcaccaagttggccaggatggcctcgatttcctgatctcgtaatccgcccacctcagcctcccaaagtgctgggattacaggtgtgag

SEQ ID NO: 808378 - DNA, 615 bp, Homo sapiens
caacatgaacgggtattattatgattgcattttacatatgaggaaactgaggcccagggcctggagtggcccccaaggacccacagccccgtgtggtgctcagggccgggacccacactggcagccccatctgcccacggcaggtcagcagaagaggcccggtggccttgccaggctctccctgccacacgctgtctggcaagtggactgagggcaccgcctgctcaggatgagtgatacctggcaacacccctgcccagagctcttcctggtagccagagaactgaccaactccccagtcccaccctcctgctgggattctcattatttatttatttatatgtattttttgagatggaatcttgctctgtcaccaggctggagtgcagtggtgcaatcttggctcactgcaacctccgcctcctgggtttaagcgattctcctgcctcagcrtccccagtagctaggattacaggcccacgccaccacgcctggctaatacttgtatttttagtagagacggggtttcaccaagttggccaggatggcctcgatttcctgatctcgtaatccgcccacctcagcctcccaaagtgctgggattacaggtgtgag

SEQ ID NO: 808379 - DNA, 624 bp, Homo sapiens
ctttagagtcctctgatgaagcctcccgagtcctgccttcgagccagtggggagggggagaggaggatgattacagggcggcccccccaggggcatctcaagacactcccaggacagcatggacaggcatggaccctcctgccctgtggctcctgccaggacccctcccctgagctgcccagtgggtgaaagtgggcagtggagaaagaaagtccagggtcaaacgggaaggtsgcaccccctaccagcagaagcccagaaacacgagcagagccaggggcccctgcagggctgctgtgccccttctctcttcccaaataggagtgagcacacctggacctctgagagggcaggagggtggctcctctccactccacggacaaacaggagtggcctggctacataaatttgtgccatcctcactgctacctttggaatagcaactttgaaagggaaccaccctttgggaaagaccaagggtcccaggcctgccccgcctatcactccaaagctcctccttggcagtacccgccccccacccctctgctacagtgggggtgacctcccactgtcagacagtggaaggggctgcttgtcagaaggacaggccttccgtctccactc

SEQ ID NO: 808380 - DNA, 624 bp, Homo sapiens
ctttagagtcctctgatgaagcctcccgagtcctgccttcgagccagtggggagggggagaggaggatgattacagggcggcccccccaggggcatctcaagacactcccaggacagcatggacaggcatggaccctcctgccctgtggctcctgccaggacccctcccctgagctgcccagtgggtgaaagtgggcagtggagaaagaaagtccagggtcaaacgggaaggtcgcaccccctaccagcagaagcccagaaacacgagcagagccaggggcccctgcagggctgctgtgccccttctctcttcccaaataggagtgagcacacctggacctctgagagggcaggagggtggctcctctccactccacggacaaacaggagtggcctggctacataaatktgtgccatcctcactgctacctttggaatagcaactttgaaagggaaccaccctttgggaaagaccaagggtcccaggcctgccccgcctatcactccaaagctcctccttggcagtacccgccccccacccctctgctacagtgggggtgacctcccactgtcagacagtggaaggggctgcttgtcagaaggacaggccttccgtctccactc

SEQ ID NO: 808381 - DNA, 624 bp, Homo sapiens
ctttagagtcctctgatgaagcctcccgagtcctgccttcgagccagtggggagggggagaggaggatgattacagggcggcccccccaggggcatctcaagacactcccaggacagcatggacaggcatggaccctcctgccctgtggctcctgccaggacccctcccctgagctgcccagtgggtgaaagtgggcagtggagaaagaaagtccagggtcaaacgggaaggtcgcaccccctaccagcagaagcccagaaacacgagcagagccaggggcccctgcagggctgctgtgccccttctctcttcccaaataggagtgagcacacctggacctctgagagggcaggagggtggctcctctccactccacggacaaacaggagtggcctggctacataaatttgtgccatcctcactgctacctttggaatagcaacttygaaagggaaccaccctttgggaaagaccaagggtcccaggcctgccccgcctatcactccaaagctcctccttggcagtacccgccccccacccctctgctacagtgggggtgacctcccactgtcagacagtggaaggggctgcttgtcagaaggacaggccttccgtctccactc

SEQ ID NO: 808382 - DNA, 626 bp, Homo sapiens
caagtcaagacaagtcacatgatttttttaatgttcaacagaccagccaagaattatatgttcaacatatttagtcatccaggaaatgcaaattaaaaccaatccaattgttactgaggatgcggaataaccagaactctcatacatctcttgtggaagtatataattttacaattgtgttgaaaaactttttgacagttataaaatttagtcttcaccctacctcctaacaagcatatatctataattctacaacccatgtgtcttggataaagacctgttaatggcccaaagcaaatccctgtatgggcagatataaacacacatatggtccaatgcagctcagtgtatggcaagatgtagccccaagtgtagacagacacakaactgggtgatatcatatgcaaaacttatataaatacaaacacaactaatcaaatactgatctttgtgttttcacatacagacctgtgtgttcatatatagactttgtgttcagttagatacagacccaggtatcactggatacatacatatatatggtcatacagacatacatgctgctggatacagatccgagtgcacagtcaaatacagactcctatacaatgatattcaaacctgta

SEQ ID NO: 808383 - DNA, 582 bp, Homo sapiens
tcaattttttactttcaaacaatattctcaaatatatttagaaaaaggttttaaggtatagtatttcattaatgctcatcgtttggaaaaaaaacccaactggaatacaagcacatgaatttgtgtttatttttttaactgtggattatcatggtatttaatctacttattacaaacaatttttgaaaatagtaattgatataacttgagacttttcatcaaaatttgaagacatctaacartatgcataatgaatttgagttggaaaaaatgtgtaatacaagtaaaaacaaaaatgcattttccattcctacctggagaaaaaaaagatgaaataacatacaggttgagcaccactaatcaaaatatctaaaaatccaaaatactccaaaatctcaaatgttttgagctgtgaaatgtcaccaaaagtgaaatatcccacacgtgacctcatatgagaagttacagtcaaaacatattctcagtgaacaaaagactctcccagccccttcagttgcaatatatctttctgtgtccacctagatgcccccgagcaagagcactcacaaagggtaataaaat

SEQ ID NO: 808384 - DNA, 617 bp, Homo sapiens
tagttctaatagaaaattattgatgaaaccaccaataagactgcacagtccctttttgcttaaactgacatcttctcccgtgaattatacccttctctctcaagggtgtttcttgcccttggcacagattctttccctcatcctgtgaacatggctgctctgtgaaatacatgaaggagcacaaccctaacaattgttgcaacccataactccttgagcatcacttttctytttgtcatcagccttattacttaacttggatcttgaccttgacctcacccccttgtagtacattttcaaacattactattaacatccaccattttaaaaaagtcaaatggcttttcttcagttcacattttcatcagtcctttttagtattcaatgctcagtcttggaaaccctcagcttggagtttctgcactttatttttctccctgtacctttctgattatttcccctcctttgctggtgtctccttccttcccttcctcttgaattttgccattcaccaatgtcctgttttgagtcttcacttttaatctctggccactatttctccaggacagtctcatctattcccacaacttcacccaacatccccacaaaaatgtctt

SEQ ID NO: 808385 - DNA, 632 bp, Homo sapiens
cttttatgtaatatgaaccagaaaattccttatttttaaatcagttgagattttctgctacctatagccaaaaacaccctaacttgccaacttttctaccagcttcaatcagaattcagctccatcacttcaccaacgctgctgttgtaaagagcatcagtggccctcatgttggagaatccaacaaatagttttcctgctcctgtatctctgctcagccttygaagattagattttccatccaatatacaagtgtgcttaaggatattcactgtagcgttggatatcacagcaaaatattaaaaaataggctactgatacactgaatactgaaaataatctactgatgcacacaattttatttcatttatgttttattatttttatcttaaatatattttaattttaaatattatataaatatattcaaatgttataaaattattttcttttaatatttacacttatttcaaactaattttattttttgttactttaacattttatttatttggtttttgcatttatttaatgtataaatgtatttattgaatcaccaataggggactgaataagctgcgtatttcttcctttgagcgcagctggtgcaataaacaggagctcgcagagtc

SEQ ID NO: 808386 - DNA, 632 bp, Homo sapiens
cttttatgtaatatgaaccagaaaattccttatttttaaatcagttgagattttctgctacctatagccaaaaacaccctaacttgccaacttttctaccagcttcaatcagaattcagctccatcacttcaccaacgctgctgttgtaaagagcatcagtggccctcatgttggagaatccaacaaatagttttcctgctcctgtatctctgctcagcctttgaagattagattttccatccaatatrcaagtgtgcttaaggatattcactgtagcgttggatatcacagcaaaatattaaaaaataggctactgatacactgaatactgaaaataatctactgatgcacacaattttatttcatttatgttttattatttttatcttaaatatattttaattttaaatattatataaatatattcaaatgttataaaattattttcttttaatatttacacttatttcaaactaattttattttttgttactttaacattttatttatttggtttttgcatttatttaatgtataaatgtatttattgaatcaccaataggggactgaataagctgcgtatttcttcctttgagcgcagctggtgcaataaacaggagctcgcagagtc

SEQ ID NO: 808387 - DNA, 608 bp, Homo sapiens
gagataggagttatgctgccataagccaagtaataacctggagccaccagcagctggaagaggaaagcaaggattctcccttggagccttcagagggaggtgtggcccagctgacatcttgctctcagatttctggcctccagaactgtgaacagaaatatttctgttgttttaagccactaagtttgtggtaatttgttacagcagctctcagaatcaaatacattcccacaccccttatttatgtgtatgtgtgtgtatgcatgtttgcatgagcactgagagaagyataccattattaacattggttagttcaggggaatgagactggcttactgaaggctgagagagtatacgtgtgtgtatataaattgagtgtatttaaattaagtatatggaagtaaattaagactacaatgagataccactacctcccaccaatatggttaaagataaaaggactgataatactaatgctggtatggagcaatggaaccttcctttattgctggtggtaaaatggtatggtcattaaaaacaaactaaaacaaaaacaacaaaaatgcaattgtttgatggtacctactaaaaaatgtgtgtatgtgtgt

SEQ ID NO: 808388 - DNA, 580 bp, Homo sapiens
cattataaaattatctatgttactttacccatagctttgaaaactagtggcatagtatattttatagtatgctgttagtgtgattggcattgaacagtgatgggatataatcactctacaatctatatgttattaaagttttccagccttatagatctcccttgactgaaaattagctactaacttacgacttattttttacagcagattgactargtctttccaggaaatctgttgatgtacaaaaacaaagtttaattgctaatgtttttttaaaaaataactttttgatattacggatacctggttatttgggccttgtatattttaacatcaaaattacctattataaatccatataaacagaaaagaaagagagtaagtctttagatcagatctgcaaacaatgatggtacgtactgtagaaaaatctggaacatagacttaccagttcttaggttccattttgcttgctttttaaaaactgtgtcttataagtcttcagcaactggttgggagatttttagaaaaaataaccttttaatgttagaacagtgtagagatttacagaatgattctg

SEQ ID NO: 808389 - DNA, 489 bp, Homo sapiens
tcttgcacaagatccaagaaccctctcctgggggcctggatcaggatccttttcctataacatctttctgattatcacagaagggactatagtgcagaaatacctgacccaaaggttaattttgggtaagtgttgggggtcctataacatctttttggcaaccactgaagtgactataatgcagaaacccccaatccaaaggctaactttgggtaagtggtggggcctgataacatctttctggtgaaactygaagggatgatactgaggagacccccagcacaaaggaaatagactgcagcattactaattggacaactttgggtaagtggtggggtactcaggcaaaggatgggattggttatagctcaacttaggggagttagagtctctcgtaagagagggttaaagcttcctctcaataaaaggcaaggatgcttgactgacactgggttagaggcccaacttaggaggattagagtccctttt

SEQ ID NO: 808390 - DNA, 575 bp, Homo sapiens
cagatatttcatcagaaaactaaaatgtataatgccttttagttcatttgacttaagtaatctttggaaaatagaaaatagttttaaagattactgataaaataaaaatatcttcaaaaatgtaaacatttggtctaaattagtcaggtcagatattaagtttgctaactactttaaggtcataaactgcttccttgacttttgaaaattattcaatgtacctaccttggagacattagattctagataaggtctggggacatgtggagagccaggcaccctagctgtactggaaagagtcagaccttatctgcacttctgcttgatgtgtcctaggctaggctccacactagtacataaataaaatctctttgggcctggattgggacctctttcctgtaacaattctagamctttgggaggccaaggcaggaggattgcttggggccaggagttcaagaccagtttgagcaacatagtgagaccctgtgtctatgaaaataaaaaaaaattaaaaactagctgtgtgtagtggcacacacctgtagtcctaactactcgggaggccgaaatgg

SEQ ID NO: 808391 - DNA, 583 bp, Homo sapiens
caggaggatgcatacctgtccatgcccctggagtcaggtttgcagacctcattctcagctgtggaccctgaagtagccctatgacttggtttcagctcctctcagccatgatatgtggcctgtccttcctgcccagggacctggccagtaaattgataagagccctcccaatgattcagtggaaaccacactcatttataccacctggtaacaagtccactgtctaaagacactgaagtggacactttaaccagagctagctctattgatgaaggtcctgaaggtagttcagtccataggagctagacagaatctacattagtctgagactctgttaacagacacaccaactgcagacctgctgggcacccagcaacagccatgtgactcagctccaagactgtttcactgcaatctagatggcaattccataarcttggggatccaacaggaaaaggtctttacctgccaaagccagtcagtaaagactgaaagagatgtttgtgcattcaaatgtatagacatcaatatgaggctacatggattttaaaaaaatcaggcacacatgacaccaccacaggag

SEQ ID NO: 808392 - DNA, 638 bp, Homo sapiens
gcagtgattgttcattttataccgacatgagtaatttctttagtggcgactggtgagattttgtgacacccatcacctgagcagtatacaccaaacccaatttgtagtcttttatccctcacccccttcccactctttyccccaagaccccaaagtccattgcatccttgttttgttttgttttgttttgagatggacactcaatctgttgcccaggctggaatgcaatggtgcgatcttggctcactgcaagtccccaaagtccattgcatcattcttttgttgttgagacagagtctcgctctgtcgcccaggctggagtgcagtggtgcaatcttggctcattgcaacctccacctgccaggttcaagtgattctcctgcctcagcctcccgagtagctgggattacaggtgcccaccaccatgcccggctaattttttgtatttttagtagagacagggtttcaccatgttagccaggatggtctccatctcctgaccccataatccgtccaccttggcctcccaaagcactgagatgacaggcatgagccactgcacccggcccagtccattgtatcattcttatgctttgcccacttatgagtgaaaacgtacaatgtttggttttccattc

SEQ ID NO: 808393 - DNA, 638 bp, Homo sapiens
gcagtgattgttcattttataccgacatgagtaatttctttagtggcgactggtgagattttgtgacacccatcacctgagcagtatacaccaaacccaatttgtagtcttttatccctcacccccttcccactctttcccccaagaccccaaagtccattgcatccttgttttgttttgttttgttttgagatggacactcaatctgttgcccaggctggaatgcaatggtgcgatcttggctcactgcaagtccccaaagtccattgcatcattcttttgttgttgagacagagtctcgctctgtcgcccaggctggagtgcagtggtgcaatcttggctcattgcaacctccacctgccaggttcaagtgattctcctgcctcagcctcccgagtagctgggattacaggtgcccaccaccatgccyggctaattttttgtatttttagtagagacagggtttcaccatgttagccaggatggtctccatctcctgaccccataatccgtccaccttggcctcccaaagcactgagatgacaggcatgagccactgcacccggcccagtccattgtatcattcttatgctttgcccacttatgagtgaaaacgtacaatgtttggttttccattc

SEQ ID NO: 808394 - DNA, 575 bp, Homo sapiens
aaaaaaacagaggaaaaagccctgatttgaatcaagtcagagctgctaattctccactttctttaattaattaatttatttttttttttgagactgagtctcgctctgtcgcccaggccggaggagtgcaggggcgcgatctcggctcaccgcgacctccgcctcccgggttcaagcgactctcctgcctcagcctcccgagtagctgggatgacagtcacctgcaccaccrcgcccggctcatttttgtatttttagtagcaatggggtttcaccgtgttggtcaggctggtctcgaactcctgacctcgtgatccacccgcgtctgggcccggccggtgatgtgtgtgcttttaacttttattttgttccagttttcgacagtggcacggattttccagcacggtcttgcaaggatgattgagtcatttttgagacaaaaaatataataataataaatggaaaaagaaatcgacttttaaaaatgacaaattttttttttttttttttgcatagatttttctctctttatgtaaaggaaagttcatgattggatttggccggcctgactgctt

SEQ ID NO: 808395 - DNA, 601 bp, Homo sapiens
aacatcacacacacaacacatataaatacacagacagaagaataaccagtagttgttaagatttttcatttgccagtttcttaagtttcttttaaaagatgcagtttgtagggcctattaagcaggcacagctgaaaggcaaaaacagattccccaaaattaaggtcccatttttataccagatcctggatcccaaaaagaggsaattagcccatctcccatgggacccttatctctcagtgggggaatatctccataccttccaggtggccaggagcatgcttttctaatccaaacatgcaaagagccacatattgcctcatgactgccattagccatccataaaagtatatttcctaccttgttattacacagcaaagctctcttataatgtgaagtaatttctgatacctcaaaaagtaaaaaacgtcagataatgcaatgcaaaacagaacagaaccttagatttggaaagggatctatctgctttcaattccttgggttttacaaagaaaacagaggaggttttttcccaaaacagggtctgtggcacctcctctgtttttcctcaagaagtccaggctattagagcttgaatatc

SEQ ID NO: 808396 - DNA, 593 bp, Homo sapiens
aacttttccatattttcctgtcttcttctgagccctccaaagtgttccaatatctgcccattacccagttccaaaggcgtttccacattctcaggtatcttataacaatgccccacactacctcagtaccaatttagtgtattagtccattctcacacttgggtatgaagaaatacctaagactgggtaatttataaaggaaagaggtttaattgactgatagttcccacattactggggaggcctcaggaaacttacaatcatggaggaagtcaaaggagaagccggcagctttacagggtggcaggatggagtgagtgcaagcaagggaaatgccagatgcttataaaaccatcagatctcgtgaaactcactcactgtcatgagaacagccctggggaaactgccctcatgatccaattaccttcagcttgtcctgcccttgacayacggagattatgggaattataattccaggtgagatttgggtggggacacagagccaaaccatatgagctatccaattgttccagacccaattgttgaatacactgccatttctctcctctcaccttcatttgcatctttattaa

SEQ ID NO: 808397 - DNA, 593 bp, Homo sapiens
aacttttccatattttcctgtcttcttctgagccctccaaagtgttccaatatctgcccattacccagttccaaaggcgtttccacattctcaggtatcttataacaatgccccacactacctcagtaccaatttagtgtattagtccattctcacacttgggtatgaagaaatacctaagactgggtaatttataaaggaaagaggtttaattgactgatagttcccacattactggggaggcctcaggaaacttacaatcatggaggaagtcaaaggagaagccggcagctttacagggtggcaggatggagtgagtgcaagcaagggaaatgccagatgcttataaaaccatcagatctcgtgaaactcactcactgtcatgagaacagccctggggaaactgccctcatgatccaattaccttcagcttgtcctgcccttgacacacrgagattatgggaattataattccaggtgagatttgggtggggacacagagccaaaccatatgagctatccaattgttccagacccaattgttgaatacactgccatttctctcctctcaccttcatttgcatctttattaa

SEQ ID NO: 808398 - DNA, 446 bp, Homo sapiens
taaagacaggcataggaaatcacaggggtattgattggggaagtgataagtgtccatgaagtcttcacaatttatgttcagagactgcagtaaagacaggcataagaaattataaaagtattaatttggggaactaataaatgtccatgaaatcttcacaatccacgttcttctgccatggcttcaactggtccctccgttcagggtccctgacttccygcaacaccaggagacttctgaggacactgggaacaggaagtagggtagaaaaattcctggatagtagccaactgagtgggcttcaagatgcataagagaaatttttaggggggaagtaggatgattcacacctccatataaacttaattacagccagattaccttgcagagctttctggtaaggtgtgggaaaactagataatggtgggtggtgggagaaaacagaa

SEQ ID NO: 808399 - DNA, 446 bp, Homo sapiens
taaagacaggcataggaaatcacaggggtattgattggggaagtgataagtgtccatgaagtcttcacaatttatgttcagagactgcagtaaagacaggcataagaaattataaaagtattaatttggggaactaataaatgtccatgaaatcttcacaatccacgttcttctgccatggcttcaactggtccctccgttcagggtccctgacttcccgcaacaccaggagacttctgaggacactgggaacaggaagtagggtagaaaaattcctggatagtagccractgagtgggcttcaagatgcataagagaaatttttaggggggaagtaggatgattcacacctccatataaacttaattacagccagattaccttgcagagctttctggtaaggtgtgggaaaactagataatggtgggtggtgggagaaaacagaa

SEQ ID NO: 808400 - DNA, 565 bp, Homo sapiens
ttacccctgtggaatagtcaggactcttaagagacaccatcaacaggatatagacaaagatacatagacagatcagaggggattgattcggggagttggagggtgaaacgtctaaggtcaggctgtctgcaagctgragaccctgggaggccaggaatgtgactcagtccacatccaaaagcctcagtaccagagaagccaatgctataactctcaatataaggccaaaggcctgagaacctgggcaggccagggaatgggcgtgtaagtcccggagtctgaacgccaaagagccaagagttctggtgtccaatggccagataataagagtcccagcggccaggcgcagtggctcacgcctgtaatcccagcactttgggaggccaaggcaggcggatcacgaggtcaggagtttgagaccagcctggccaatatggtgaaaccccatctctactaaaaatacaaaagttagctggcttggtggcatgcgcctgtagtcccagctcttcgggaggctgagacaggagaatggcttgaacccaggaggcagagattgcagtgagcc

SEQ ID NO: 808401 - DNA, 565 bp, Homo sapiens
ttacccctgtggaatagtcaggactcttaagagacaccatcaacaggatatagacaaagatacatagacagatcagaggggattgattcggggagttggagggtgaaacgtctaaggtcaggctgtctgcaagctgaagaccctgggaggccaggaatgtgactcagtccacatccaaaagcctcagtaccagagaagccaatgctataactctcaatataaggccaaaggcctgagaacctgggcaggccagggaatgggcgtgtaagtcccggagtctgaasgccaaagagccaagagttctggtgtccaatggccagataataagagtcccagcggccaggcgcagtggctcacgcctgtaatcccagcactttgggaggccaaggcaggcggatcacgaggtcaggagtttgagaccagcctggccaatatggtgaaaccccatctctactaaaaatacaaaagttagctggcttggtggcatgcgcctgtagtcccagctcttcgggaggctgagacaggagaatggcttgaacccaggaggcagagattgcagtgagcc

SEQ ID NO: 808402 - DNA, 671 bp, Homo sapiens
tgcaatgagacaagaatgccctctcccaccactgctattcaacatagcactggaagtcctcgccagagcaatcaggcaagagaagtaaataaaagcatccaaataggaagagaggaagtcaaactatctctcttcgcaaatgatataattttaaaccaaggaaactccgtagtctctgcccaaaggctcctagatctgacaaactacttcagcaaagtttcaggatacaataatcagtagtatttctagacatcaataacatccaagctgaaagcccagtgaagaatgcaatcccattcacaattgccacaaaatgaagaaaatgcctatagggatacagctaaccagggaggtgaaagatctctacaaggaaaattacaaaacattgctcaaagatatcagagatgacacaaacaaatggaaagacattccatcctcatgaatrggaagaatcaatatcattaaaatgaccatactgcccaaagcaatttgcagattcaatgctattactatcaaactactaatgtcatttttctcagaattagaaaaaaagcaaaacgaacaaagccagaggtatcacactacccgacttcaaactctactacatttacaaaaccatatggtactgatacaaaacaggcacttagacgaatggaacaggatagggatcc

SEQ ID NO: 808403 - DNA, 584 bp, Homo sapiens
atatgcccattgtttgacagtggatccttagaactttctcatcttctatgactacaactctatgccgattgcaatccaattccccgttttcccctcctcctagcccctggcaatcaccatgctactttctgcttctgwgagtttcactattgtagatatctcataaaagtggaatctgaagcatttgtccttctggaaattgcttgtttaacttaagcataatgttctcaggtccgtcgatgtggctggagtagtttctgacaattctacacagtggggggatcttgaaacttgtcaaacatgcaccaaactggaaagactactatagcgatcactacgttttcatcacacagctccaatcactacaagacagctaattccgtttcgtacatctccctctccaaagctgcacaaatacagaagaaagttcccctctccttcaaaaggaaatattgatgattttgaatggcatgaagccaatttctgtaatgcagcaaaagaatacatttaactgacttattctaaccaaatttgaaacaatttcatttgttagatcaaatgtttccaaaggaagatttcaagtg

SEQ ID NO: 808404 - DNA, 592 bp, Homo sapiens
ctatctgacctgacctggcccggctcacggccccagcatgtggatttggaacctacaagcacactggctctgttggcagccccaactcgcacacccagtctcgtctccccggcggggctcaccgctgctgcgtgggcctgtggggactcctctctgctctcccactggctgcagcgttcataagtcccccttcccccaacacggtgctcggtgctgagtaaaaatatacacacgcacgtggagcccaaaaccatatttgtcctagggattggctcatgctagatgggaagaataatcggagtgtgcacaagcaggagcatttgctatttcttttccagtctacgatgaagcaggaacgtaaactgagttactctagtcggccacaacrtggagttctggtgtttatctagctgaaagcctgtgtaatgtgagcacagagacacattcattcattcaagaagcactttgggagcacccacgctacgccaataagacggctgggagccgggattacaaaacacccccggtcaaggtgtgccacaaaagatgacagccccccagaggggatcccgaaagcagcagctggaagtca

SEQ ID NO: 808405 - DNA, 671 bp, Homo sapiens
catcaggctcaccaacactgtgtgatctgacatttagaatttagcccattgaatcagtaaaaacaaacaaaccaacaaaccaaaagggataatctcagtgtcttttgatgtgcatgtctggggatgtgcatcttttcataggttcaagagcctcttgtatttcctttcttgttcactgtctgttcacgtcctttacccatttttcccactgggtgcttcatccttttctctgtaasagttccttgcgtattgagataggagttggagacagttttccctagtgtgtcatttgtcctttggctttgctgatcgtattagtctgttctcacattgctataaagaaatgcctgagacgactgggtaatttatagagaaaagaggtttaattggctcacggttccgcaggctgtacaggaagcatggtgttggcatctactctgcttctggggaggcctcaggaagcttgcaatcatggcagaaggcaaagggggagcaggcacgtcacctggccagagcgggagcaagagagagagtgtgaggtgccacacactttaaaacagcccgatctcacaagaactcctcactatcacgaggacagcaccagggggatggtgttaaaccattcatggaaaatccacccccaggatccaatcacctcccaccaggcccca

SEQ ID NO: 808406 - DNA, 586 bp, Homo sapiens
aatctaagcggaggctgtcaagccttcttcacccttatactctgtgcacctgcaggcttaacaccatgttgaaactgccaaggcttatggcttgtgccctctggagtggaggcccaaactgtacttgggcccatttgagctggagctagagccagagcagctgggatgcaaggagcagtgtcacaaggctgagcagggcagtggcatcccaggcctgacccttgaaaccattcttmcctcctaagccttttggcctgtgatgggaggggctgcctcagagatctccgaaatgccttcaaggtctttcccccattgtcttggctatcaggacattgtttgcttttaatcaggctaatatctctagaaagtggttacaccacagccttcttggattcttcccctgaaaaagctttttctttctttgccagatggctaggctgcaaattttccaaactttatgctctgcttcttctataaatataattcccaactttaagttatttctttgttcctgcatctgcgcataggctgttacaagcagttagaccacctcttgaacactttgatgcgtaagaattttctctgt

SEQ ID NO: 808407 - DNA, 552 bp, Homo sapiens
cttcaacacactctctaatcgttttctgaatgggctgaggagtctgattcgccatattatctaagggttcttgtgtgatgtcaccctgaagttagagggatttggaaccaccttgatacttgaaatcggactttcacagggcgtccttttggaattcgcctctgaatacatgcacagataaatgatcaaagagcaaaccgtctctcatgagtattagatgagaaaaaccttgggaaaccccagtggaacaaacatctacttactgaggctgaattcctaaatttctggagtcctccaggagtttaaaaactataccttgaaaacaygtcaactctaatgaaagaggaataattaagcagccttctgtttcttgtctgtttacctgctccacaggaaaatactggccttcagcgtgcctacctcgacaggtgtacaggcgtgtggagggtagcagaaattcacaggttaacattttgaccgggaatcaaatggaggaacaattctcagcctactaaggatttaaaggatattacaaaggaaagccttcctgct

SEQ ID NO: 808408 - DNA, 456 bp, Homo sapiens
catatgtaacacacatgtacgttctgcacatgcattccagaacttaaaataaaataataaaaaaatagtatgctgcataaagaaaatgtggtacatatgcaccatggaatactacaagccataaaaagcaacaagattatgtcctttgcagcaatatggatggagctggaggtcattatcctaagcaaactaacacaggaacagaaaactacgtgccacatattctcataagcgggaggtaaacattgagtacacattgacacaaagaaggggacaacatataccagggcctacttgagggtgaaggragggaggaggatgaggatcaaaaagcttcctattgtgtactatgcttatcacctgggtaatgaaataatctgtgcaccaagcctccatgacaggcagtttttctatataacaaacttgcccacatatccctgatcctaaaataaaatt

SEQ ID NO: 808409 - DNA, 520 bp, Homo sapiens
tcctgaaatgtcttcagagctgttggaaggacactagttttcactctgaatgagatgggaggaccattaaagtgcttttcagaagaggagtagatttttgggctgaattgtggaccctctacaaattcttaagttgaagtcctcacccccactacctctgagtgtgactgcatttggagatagggtgtttaaagtggtaattaaggtaaaatgaggtcattagagtgtgcccttatacaatgtgactggtgtcctcataaagaaaaagtgattaggacacagacrcacccagaaggaagaccatgtgaagacacagggagaagacaccatctacaagccaaggagagaggcctcaggagcagttaaccctacctacacctttgtctgtgatgtccagcctccagaactatgagacaatgtatttctgttgtttaagccacccagtctgaggtattttgttatggcagccctagcagactaatacaagtggcatgatcagacttaactttaaaacagcatt

SEQ ID NO: 808410 - DNA, 615 bp, Homo sapiens
ttgcacaaatttttttttctacctaattattgctgtctgggaagcttgaaaggattgctaagcaaacaccatggaactacctctaaccaatagggcctgtgctaaggaggtgcacatgagaattattttggctccattccactaaccttatgagtcaaaattgctggtcatcctccttctacaaaagcaccatggaagcactgtacctagtgcttctcaccatctctgtcccctcctgctccccgaaccttatgggcattgaacctgtatatgtgggaggtctgagtcgacactgtatttsaaggacagagaacatttctttgtttttctgtctctaactcccctcccacccagcaggaactcagcaaagcccaaaggctggaatcgcttaacaactgtgacattctaatgggatacatgaccaagatcatgcaggtgactcgcaatgtctggtgagcagttccaaatagttttaactagagctgtgacctggtaaacagattagatagcaatcagtcgaactatttctttatgattaataatgcagcttgcatatcctcagctataggctagatgatgtgagtgacagttcaagatggctttgtggaggtgggg

SEQ ID NO: 808411 - DNA, 576 bp, Homo sapiens; identical to SEQ ID NO: 781564

SEQ ID NO: 808412 - DNA, 576 bp, Homo sapiens; identical to SEQ ID NO: 781565

SEQ ID NO: 808413 - DNA, 528 bp, Homo sapiens; identical to SEQ ID NO: 781566

SEQ ID NO: 808414 - DNA, 637 bp, Homo sapiens
caattaagaataatctaagctcttgtccttttataacagacctggttatgtcctaaaaaataagagcatttataaataaagaagaaagtttaacagttcaatagatcaacgtgactttccagctcctctctgaacaggtgacatctatttccccatcccttgaatctcagttggccttgtaacttatgtggatcaatagaatgtggccgaagtgacagctgtgcaagttytgagccctcacctcaagagcctttgcactctgtcacctgctctctcagacctcggcttttttccacgtgaataaaccgaggctaaccttctggaagaaaagagaccatatgaaacagaaccacatcagcctgaggccctggacatgtgcgaaaactgaagatcagcaaagctgacctgaaactgagtcacagttgacctcagatgcatgagaatctaaccaaggctgaaaacatttggttgaatcccacctcaatttctgacccagagatagcaactaatgtacaatatcatgattgttatgcagtcattagaaagaatatattagataaatgtgtattggcctggaaaaggtatcatctaagtatgcttaatgattatccatcttaaaaaaaaaaatacagaaata

SEQ ID NO: 808415 - DNA, 630 bp, Homo sapiens
actgccttgatggcacattctgtattggcttccttccttccctgatttacctcttacccatgttttgccaacaaaaaagagttaaactctgtaaaatagttaaagaggttgattctgagccaaatatgagtgaccatggcccatgacacagccctcaggaggttccgagaacatgtgcccaaggtggtcgcagtgcagcttggcttatacattttagggaggcatgggacttcaatcaaatacatttaaaaaatacattggtttgatccaggaaggtgggacaactcaaagcaaggggcaagggggtcagtgggagtgaggagcttccagyttataagtagatttaatatttttctggttgacaattggttgagtttatctaaagacctggaattaataggaaacgtctgtattgcgataagaggttataaagaccagagtttgatcaggcagatgaagcttccaagtagcaggtttcagagagaatggattgtaaatgcttcttatcagacttcaggtctgtgttgatgttaatgccagagaggtatgatgaagcatgtctgacccccacttcccattctggcctgaaccaatctctcaagttgaattttaagagagccctggccaaga

SEQ ID NO: 808416 - DNA, 601 bp, Homo sapiens
caactcaataataaaaagaaatataactcaagcagtgagcaaaatatttaaatagacatttcttcaacaaagatacaagaatgtctaatatgcatatgaaaagttactcatgattagtcatgagacaaatgcaaatcaaaatcacaagatatcacttcgcaaaagtaaaaggctatgactttttwaaaaggacaataatgagtcttatcaaggatgtgagaaattagaaccctcatacattgttggtggggatgtaaaatgatgctatcactttggcaaacagtttggcagcacctcaaaatgtgaaacatagaattagcatatgacccagcaattccagcccgatgtatctacccacaatgcatatgtccccacaaaaacctgtgcatgaatgttcataacagcattgtttatggtagtcaaaagtgtaagtaatccaaatggacaaaccagatgtggtatctctatacaatggaatattattcagccataaaaaggaataaagtactgacacctactacaacatgaagaatcttgaaaacattatgctaagtggaaaaatccagacacaaaatggccatattgtgtatttcatttatat

SEQ ID NO: 808417 - DNA, 535 bp, Homo sapiens
ccctgtggatgtgaaagtgcagaattttaactattaggccacaggtggagtggcctttgtttttccttgaccagaaagcaaacccaagcctctgcaggaattttacctaccagaactggtttaggtcagatttttcactcttaatttagtcaagagaatttttaaggctggccatgacactattatatgtcctttttaaatgtgatctctttgttaatagyttagaataagagatccctaaaatctttaaattaattgcaccgaaagaaaggatgggaaaagggtctcgttgtgtaaatgaaacttctcaggtagtcaaattgttgacctttcttacccagccagggtttttagaagtgaaaattgactttctccagctgcagagtttcattcaacattagagggggccaggagttggtcaagtctaacagaaggtggaccaaaactgaaaagaaaaaccagaaaaagtgatcacagaattcacatataattgcgatctctcagcataagggtaagttatagccaactgacaata

SEQ ID NO: 808418 - DNA, 469 bp, Homo sapiens
ttatacaaaactgaataaagtaggtctcaggctctgagcaggcagttttttttcctagaaatagaggtgccaacatgactgttggcagcatattacgggcactcatggcctctgccttccttggtaaggacagtagctgataggctgaggacagtctaggactgggagaagacagtggggagggaagaggggatgaacaactggtcatatgtgacaaacactcaggtgtaataagaaggaagaggaaaggaaccagattctgactcctgcctttactgaagattyaacccctgccccaaaagttcttggaagctctcttacaggtcagctcaggggaccaatcttgttatttcttctcatttacgggatccagcatgtcacagagggtcattcaatcccaaccagcaatatctacgcaggagggtgagaccgtgaaactggactgtgcatacaaaactaatattgtata

SEQ ID NO: 808419 - DNA, 553 bp, Homo sapiens
caacatagagctcaggccatggcttcagagggtgcaagcctcaagccttggcagcttccacttggtggtgagcctgcaagtgcacagaagtcaagaattgaggtttgggaacctccacctagatttcagaagatgtatggaaacgcctggatgtccaggcagaagtttgctgcaggggcagggctctcgtggagaacttctgctagggcagtgttgamgggaaatgtgggattggacccccacacagagcttctactggagcactgcctagtggagcagttagaagagggccaacatcctccagaccccagaatggtacatccactgacagtttacaccacacacttagaaaagctacagatactcaatgccagcctatgaaagcagccagtagggaggctgtaccctgcaaagccacaggggtggagctgcctaagaccatgggagcccacctcttacatcagtgtgacttggatgtgagacatggagtcaagcgagatcattttggagctttatgatttgactgcaccgctggattttggactcgcatggg

SEQ ID NO: 808420 - DNA, 553 bp, Homo sapiens
caacatagagctcaggccatggcttcagagggtgcaagcctcaagccttggcagcttccacttggtggtgagcctgcaagtgcacagaagtcaagaattgaggtttgggaacctccacctagatttcagaagatgtatggaaacgcctggatgtccaggcagaagtttgctgcaggggcagggctctcgtggagaacttctgctagggcagtgttgaagggaaatgtgggattggacccccacacagagcttctactggagcactgcctagtggagcagttagaagagggccaacatcctccagaccccagaatggtacatccactgacagtttacaccacacacttagaaaagctacagatamtcaatgccagcctatgaaagcagccagtagggaggctgtaccctgcaaagccacaggggtggagctgcctaagaccatgggagcccacctcttacatcagtgtgacttggatgtgagacatggagtcaagcgagatcattttggagctttatgatttgactgcaccgctggattttggactcgcatggg

SEQ ID NO: 808421 - DNA, 487 bp, Homo sapiens
tgattctgggcagcagaaatttccctatgggagaagatgccagcatgacttttcctagtgtgcaatgagcagcgaccagctctgtctacctccttagggatagcccctgataggaatgctggggttgagcaagaggaagagtgagtgattagaagaaagaaggcaggaaccaagtttcttttcctcctgccttgagtgcaaggtttagttccttttctaacagctcttggcaattccattataaatcaggtgaaagaattagtctgatttttgtttgtttrtagggcctagcatgtcatagaaagccactaaattctaatcagcaatatctggacagtaagggagattgtgaacttagttttcttacaggacataggtattataattattattgtggtaaaaatttcctcctagcaggaagataatttttttgtgtgctttgggaatcacccaaaagttttccactgcaaaaatcaatggaataagg

SEQ ID NO: 808422 - DNA, 582 bp, Homo sapiens
aggatgagagaaaatgttttcaaactatcaaccaacaaaggactaatatcctgaatctataaaaaaactcagacaactcaacaagaaaaaaacaaccccattaaaaaatgggcaagggacatgaacagatatttctcataagaagacatacaagcaaccagcaaacatgtgagaaaatgctcaacatcactaatcatcagagaaatgtacatcaaaaccacaatgagataccttctcacaycagtaaaaatggctattattaaaaagtcaaaacacaaacagatgttggcaagaatataggaaaaaaaagaatgcttatacactcttggtgggaatgtaaattagtacatctatggaaaacaatatggagatttctcaagggattacaaatagaactactattcgacccagcaacaccactgctacccaaaggactacaaatagagctaccattcaacccagcaacagcactactacccaaaggaaacaaaattgttatgtcagaaagacacctgctcttgtgtatttatcacagcactatttacaatagtaaagtcatgaaatcaacctaagtgtccatca

SEQ ID NO: 808423 - DNA, 660 bp, Homo sapiens
tctcttcaaatttcccacctcttagttctcctcccactctctcccaccctgagccttacacctccaacaatgatcattctaagaccatttatatctcaataggaaagtgatgtaaaacgggtctccttactctgttttggagggtttttttgttgttgctgttgcttgcttctctgtcccaccccaaactcatgtgtgtctgaaatttagcaccaccttgcgacgtttgtgagcatttttctcagagcagcattttgagactgagcctgaactccactgatgttatgacccttaaaagtgtctggctccaaaagactaaggagttcctgcgtaaatccaggtccagctacttcatcactgtgacttgttattggaaaaggttgagctatcaacatattgctcctgtaaaggctcagaactgaatcttagattcttcaggatatttgagtcctctgrggctcctgggtaaagactccaatgtagcagttctgtggactataaatgggagatatccagatcatacaccttcaatggaagaaaaagcactgtcaccttagacgactccaactctgtagtctacttttgtcttcctaatatcatacctcattctccagtgggtttatggcaagcctcatctactcagaagtaaccaagtacaag

SEQ ID NO: 808424 - DNA, 637 bp, Homo sapiens; identical to SEQ ID NO: 808414

SEQ ID NO: 808425 - DNA, 551 bp, Homo sapiens
gttctcaaagattattttgtgaatgtgtataacactggctgtatgacaaacacctgaggagatttttaacttccaggatcttgattctgaacattttgattttgtaagtgaggagatctccaaatctgtattttaaagatgatcaccaactaactcttacatgaagagaagtgtcatccttgctatgattctatacatcagcagacatgtctctaccaatcctagaagctgagatgggctttttctttggtcttttgaggcaaatccaaattatttaagtatcttatcccgtggtaaaaataactattggtcaatagtattggtggatggacatatgtaggggktatataatcaaggctaaatttccattaaaaggttagtatcacaacactttgcctcatgcacataggccagtcacattatctgggaatcatttcttctcctacaggagaagaaagtgatgccagataattttgtagggatttaatgactttagttactatattttttcattataagagttatatattctttactttttaatcaatata

SEQ ID NO: 808426 - DNA, 640 bp, Homo sapiens
ggagaattcactgcttttatagtaaggagtaaaccaaattgctctttgtctcagagggaaacagtacctcacccctcaaggtttcttgctgcaagcataactctggaaattggtcaggtagagtggtcatggtcgtaaaccactggcatacctagcaagacatttatgagtataagagattaaggatgrtctggttttcaacaatatccactccatattcttacattgtgttattttctagaaacttttctcatgagtgtgccactccagaagccgttctgatcaatttgacggacagagattccgagactaaatacattgaatttgcctcaaacaatgtttaaataaggctactatcagcagaccaatctgcaacattaacttcacccatttagtcagctgtgacaaagtcccaaagtatagataactaggatataatttcttatccattatacatggaagtttagattgatacgctaatctttgttttaattctcaaaaagagtccaaaaagtagccaccattcctaatggaaagatgttctgtcccacctattcccagacataagcataacccaacaggttaatccagtttggaatttattgttaaacttgatttggatcagcattacatcactttt

SEQ ID NO: 808427 - DNA, 623 bp, Homo sapiens
tagcgatacatgagatgtatgaaaaggttaagaaggttaagaaatctcatcatctccatagtatttgagagttgtgaactatgttaaaacatataggctatcactgtatatatttttcataattggacatagcaaagagagagccacaaattcagttactttaatttgttttgcttcttctaaggaattagattttataatggagtctggagcagtaaatgcattataaaccttgtgttatttcttttcagttttgaagataagacattaaaaacaaaattaattcagaattaggtatgagactgtccaaaatatctgttctgggatggacacttcttgagttacagaaatgcaatcataagattcattgattgagaagtgtaatggagttaracgctatgaggagaaattaataatattgtatagttagtccaccaactggtaaaaaaatggttgtttttacagagtagatcatttgtgctgtatgtggcatcataagacttaatggtgatttcagtgaaagatctggagatgcttcaacaaatttagacatagctgaaatcattttaagacaaggaggataggttgtaatcattataataagaaataggctataataggca

SEQ ID NO: 808428 - DNA, 587 bp, Homo sapiens
tagaaaagtgatccctctcaaacctcccttcacccccaggccctgaaaccttcacagagggaacccccggtggcccggctccccactcctaaccttttgccgacccctgcagtctcctggaacagccccatccccgggagccccctctggctcccagactaagaaactgttcttgggctacgttatcttctcccctaactctccacccagccccctcattctctccagatgtggagacctccacaccctctccagagcccctaaagctcctctccactgctcagccagacactaggtgcatcaaagcctcccacctgctcagccccaggaccccttcacacaccctacactgatctccccagttagctcggcacccccagccccactctgccacctcaaactctgactcttctcaaccccagcytctgtctctctccctctgaaacctaccaagtcactttcctttctccatccactcccagattcctcctcctacctttctagaccatctcccaaagcccgcagcctttaacctgctgcctgcatcttccctgtgtctccctgaagctgaggagcttccccatgct

SEQ ID NO: 808429 - DNA, 472 bp, Homo sapiens
tcataattccgtgtaacctctacccacccattcctttccagggcactgaagccaaaggcagaagttgatgaggatggagttgtgatgtgctcaggccctgaggagggagaggaggtgggccaggtgaaagggctggggcaagaatggtctggaggtgatggaagggatsaaagggcaaatcaaccttcactgatccttgctgttacccaaaggctgaagaaacaggcccaccctccacgtgccagctctggtctctgagtggtggctgtggggcgctccctcaggcagccatgctaactcctccccaggaatctgagatggaagcccctgacctggacacccgtggacctggtatgtgagtcaacccagaccaagaaaaaaaaaaaaagtcctttgaccctattagaatcagagagtcctttaatatcagaactagaggaaataattttagactgagtgccttagaacaatg

SEQ ID NO: 808430 - DNA, 559 bp, Homo sapiens
agaatgtcaaataattgatggcttgtaagccctaaacttctaaagcttttgttctcgctcttactgtcaacatctcccttgttttttgcccttctttctgccccctgccccacaccaactctcacccaggctcttggggtaggggaggtgctccatgtgaagacagagtccttggcacccccactgtgtctcctgggagatgacccaacatcctcatttgaaaccgtccagatcaaygttatccccacctctgatgattcctcaggtaataaaacagcctgcccccaatccttggctctactacgggagaatgtgttatgtgtgtgtgtgtatgtgtgtagatggaggggaagtgcaggcagcaggacagggagaaaaaggtggggaggggaaatggcagaaaaccaggagggaaggcaggaaggagaggaaacatttcagggaaccacagcaagggcagtgctgaggagatggatattatttttctctctttttcttgttcctagtattctgtcatgccattcaacttactttttaaaaacttgtgagcagtttaggg

SEQ ID NO: 808431 - DNA, 538 bp, Homo sapiens
tagaaactatactatactagtgaaactcaaccagccttgatttagtaactctctatagccagttaaaataagaaactgcaaacagaatgtgttaaataatcttattataaataactgaagtatgttatcaaccaatagaacccttattcactatagcaaaccatttgttgttttcagtatactctaatagaaatgataaactatgatgcctagcatgttttcccaaaaatgccataaggttacctgaatgtttttcttgtattgaaaatgatcagttatagctatacaaataaaatggagttataatctaaatttacagtatagaagtatgcaatattaaatgaataaatattgatartataaactgctttcagggtacccaaatatttttattaaatcccttaaaaatggacaaagtctttctatgcaatcaagtggcaaactgcttgtacataaacatacagaagtgaaaataatccagtgatctagctcagagtaaaagccaaagggcttaaaatgcttaataaagacttttggt

SEQ ID NO: 808432 - DNA, 580 bp, Homo sapiens
tggagacatcacctctgcggtggtcccagccggggcctgggaagccacagccaggccccagcacaggaggtcatccctatttcacagtgggggaaactgaggctggaggaggcaggaggcccatccaacacggtttatggyggaggagcggtggtcttgccctcgcttctgtctacatagcagcttccaggattacctctcacctccctggctggcactgaatgtgcctgggacctgactcatctcttcaggaagctacccccgagacctgctcctactctccagtccttcagggcctcggaaaacccctgttatcccccacccagcagccgcagcaagcatcctgagatcagcctcgacagccccgctccccacatctggctctcagccaaggggcccgtcctaccctgctccccacattctgcccatcaccaaggatcccgtcctgccttgcccagcacagctggctgcggggccccggggacagtgctcccccgacctgcggtggccggggggctgtgaagcttcctcattcaacccatccattgctcccctgcctctacccttggtgctccccgcc

SEQ ID NO: 808433 - DNA, 494 bp, Homo sapiens
tggccctcagccttggtctgacccccctctggggtcactgcagcagcttcccagctggccttcccttcttaccacgtggccctcagccctggtctgaccccctccgggatcactgcagcagcttcccagctgggctttgcttcttaccacgtggccctcagccctagtctgaccccctctgggatcattgcagcagcttcccagctggccttcccttctcaccacgtggccctcagccctggtctgaccccsctctgggatcactgcagcagcttctcagctggccttcctgtttccgccattgctttgtgtattttccatgaaggagcaaacgatttcttttatcataccattcctcgactgaaaactccagtggctccaggtcggcaccaagcctgtgaagcctcagtctgacatctgctgccccttggacctctctgttggatatgactcttccgtgggcccctgtgccccaggctggactggtgttgcca

SEQ ID NO: 808434 - DNA, 634 bp, Homo sapiens
agacaatctttattttttggtaagtgtgggttttcccaagcataaataatttatgggactgtaagtggttacagccactttggaatgcaattagatagtatctttctgaatttaaagtgcatgtatccaacaattctacttctaggaatggattgttcargaaataaaaataaaactaagtgcctagagatacatatttggggatattccaattgtctcttgtgtaccacaagagtaggtgctgtggtttgtcaaaccctgccttagaatgctatgcagtagttaagaaacaggcagatttctattggctggcagaagagaaccaggataaattgttgaggaagagagcaagttgcagaactgtacatataacatgccatttttatttcacctcctccacccactcaatgaacttgccagtctgtgaacaataatatgtaatgtttataaaatttgtgtgggcatagaaagagttctgggtggggcacggtggctcatgcctctaatcccagcactttgggaggcccaggcatgtggattgcttgagcccagtagtttgagatcagcctgggcaacgtggcaagacccgtctctataaaaaatacagaaatgtagttgggcatggtggtgtgcg

SEQ ID NO: 808435 - DNA, 441 bp, Homo sapiens
aggtcaagctttacaaaagcgaaaacctcgacaatccaatccagacagtttcccttggccagtccctgttcttccatttccccccactgctcagagatggcgaggtaatgcctgtggccggattctaccttctgcctttgttttaataattctgctgtttagtttaaggaagcacagttctctccttttctccctaaataccactctgcagaaatrcgctctctgaatcaaaagaggttgggttctgtagggattattttttcttcattgtttttctgtttacaaaaagaatacatattcatggcaggagattttgggaaaaagaagacataagcccatcatccagaaatagccactgctaacacggtgattggtatcctttgggtcttttttcaggcacgtgtgcgcatgcatgtataaatataaatagacatttatttt

SEQ ID NO: 808436 - DNA, 523 bp, Homo sapiens
tcgcccaggctggagtgcagtggcgcaatctgggctcactgcaagctccgcctcctgggttcacaccattctcctgcctcagcctccgaagtagctgggactacaggcgtgcgccaccacacccggctaattttttttttttgtatttttagtagagacggggtttcaccatgttagccaggatggtcttgatctcctgacctcgtgatccacctgcctcggcctcccaaagtgctgagattacaggcgtgagcccccgtgcctggccaaatctttcatactatgatttttatggacagtagtccataaactaggaaacgcsatgatttatttaaccaaggcctactgttgggcatgatcgactcttgcactttgaacatatcaccccatgctttcctgctaagaagtccacttttaaaaatgccttgtaatttttaaaaattcctctattttaacattccgctattgagtttagggaaatacagtttcctcatgatgggggatcccttgaatgagatgagtt

SEQ ID NO: 808437 - DNA, 462 bp, Homo sapiens
agacctggttagaaagtgctggagagggctaggtgtggtggctcacgcctgtaatcccagcattttaggaggctgaggtgggcagatcatttgaggtcaggagttcgagaccagcctgggcaatgtggtgaaagtgaaamcccatctctgctaacaatacaaacattagccaggcgtggtagcacgcacctgtaatcccagctactcgagaggctgtggcaggagaattgtgaacctgggatgcagagtttgtagtgagctaagatagccccagtgcactccagcctgggcgacagagcaagactgtctcaaaaaaaaaaaaaaaaaagaaagtgccagaaagataagcatatacaagaaccacttacctttgcttggggctgcattgtggcccagttgctgggagaggcttctgtgaaggccgttgatagctgcaggcagtgacattctcaggggccccta

SEQ ID NO: 808438 - DNA, 551 bp, Homo sapiens
ggattacaggcgtgagccactgcacctggcctgaattaaacttttaagtaagtgtttacttcagtggaaaaatgggttgggttctaagagatgtccaaagatacaggagtaggcagttgttgatggaaatctgttcctgcccttattctttcatttatgaaagggcatcccaggtacagcggcscccacagtcactctctagcccagcagttcttggatgggttggttgcaggacccctttatactgttaaaaattattgaggattttaaagagtttgagtttgcatggattatctctgtgtatatttatcatattagtaattaaaaccgagatgttgaaaacgcaagaactcacaagctacacattccgttagctgtgggcgtgatgacatcagggtgcgtagtctctggaaaagtccactgtgcgcttgcgaatgaaagagggcggaaaaggcacatcacatcttactattggctgaaaatagctgtggcctcgggaacctctgcgagaggagtcccggtatcctacactgagaacactgctctggctc

SEQ ID NO: 808439 - DNA, 551 bp, Homo sapiens
ggattacaggcgtgagccactgcacctggcctgaattaaacttttaagtaagtgtttacttcagtggaaaaatgggttgggttctaagagatgtccaaagatacaggagtaggcagttgttgatggaaatctgttcctgcccttattctttcatttatgaaagggcatcccaggtacagcggcgcccacagtcactctctagcccagcagttctyggatgggttggttgcaggacccctttatactgttaaaaattattgaggattttaaagagtttgagtttgcatggattatctctgtgtatatttatcatattagtaattaaaaccgagatgttgaaaacgcaagaactcacaagctacacattccgttagctgtgggcgtgatgacatcagggtgcgtagtctctggaaaagtccactgtgcgcttgcgaatgaaagagggcggaaaaggcacatcacatcttactattggctgaaaatagctgtggcctcgggaacctctgcgagaggagtcccggtatcctacactgagaacactgctctggctc

SEQ ID NO: 808440 - DNA, 503 bp, Homo sapiens
ggtacaaaaaagattcctatgatagttttaactattctcaagccttcgagcaatttttttttttttttttttttgaatacagggtctcgctctgtcacccaggctggagtgcaatggtgcaatcatagctcactgcagcctttatctcttggattcaagcaatcctcctgctttagtctccacagagctactctgtagtgggactacaggcatgcaccaccacactaggctatttttaaaaacctttttgtagagatggggtctcactacattgcctagtctgatctaraacacctgggcacaaacaatcctccttcctcggtctcccaaagtgttgagattacaggcatgatccactgcatctggccccatttgaacatctgtttatatgatgtcagatcagtctcttccacaaaagaattgtttcttgatttcacagactgcttcactgttacctattgtaaatctctcaatctctcatgagcttcttctatggagcactt

SEQ ID NO: 808441 - DNA, 619 bp, Homo sapiens
catcagcagaagtcagagaagagggtaaaatgcagtccggctatttagtctgttggctgtttccctgccaagtcaccatgggtgatttaactgtatctactgaagaccacagtgcctgtcttgcagccttctccatacaattaccttttctggatgccagtaaccacctcttcctcttgcccttgcaggcttagagacgtatcagctgccttctgttattaccccagsggtattcaccatgccatgtgggtttccttaaatcctgtcacccttttctcataacaacagttatgtcattaatagctccattttaaagagaggacactaagtcttaaagagattaagagacacttcgaggccaggtgtggtggctcatgcctgtaatcctagcactttgggaggctgaggcaggaggatcactggagcccaggagttcaagaccagcctgagcaacatggcaagaccccatctctacagaaaagtaaaaaatttagcttggcgtggtggcacatgcctgtagtcccagctactcagaaggctgaggcaggagaaccacttgtgcccaggaagtcaaggctgcaatgagcccttttcatgccactgcattccagccttggca

SEQ ID NO: 808442 - DNA, 621 bp, Homo sapiens
atctctgttgttaagcgatgtatgactgtgtgtgtatatattttttttctcacttgatccctgatatggcttggctgtgtctcaactcaaatctcatcttgaattgtagctcccataattcccacgtgttgtgagagggatccagtgggagataattgaatcatgggtgcagttcccccatactgttctcatggtagtgaataagtctcatgagatctgatgatgttataagtggtttcccctttcacttggctctcattcattccttgccttccaccatgattgtgagayatccccagccatgtggaactgtgagtcaattaaacctgtttcctttataaattacccagtctcaggtatgtctttactagcaccgtgagagcaaacaaatacaatcccccgtgaatgctatgagatagattctattatcttcattacataaatggggaaactgaggcacagagtggttaagtaacattcccaaggtcacagtgcaggtaagtagcagatctgggattggaacaaggaagtcagactccagagcctacatatgtacaccattgcctgtgttgacactgcagtggacagtgtaaaaagaggcatgcatgggataccaggggt

SEQ ID NO: 808443 - DNA, 621 bp, Homo sapiens
atctctgttgttaagcgatgtatgactgtgtgtgtatatattttttttctcacttgatccctgatatggcttggctgtgtctcaactcaaatctcatcttgaattgtagctcccataattcccacgtgttgtgagagggatccagtgggagataattgaatcatgggtgcagttcccccatactgttctcatggtagtgaataagtctcatgagatctgatgatgttataagtggtttcccctttcacttggctctcattcattccttgccttccaccatgattgtgagacatccccagccatgtggaactgtgagtcaattaaacctgtttcctttataaattacccagtctcaggtatgtctttactagcaccgtgagagcaaacaaatacaatcccccgtgaatgctatgagatagattctattatcttcrttacataaatggggaaactgaggcacagagtggttaagtaacattcccaaggtcacagtgcaggtaagtagcagatctgggattggaacaaggaagtcagactccagagcctacatatgtacaccattgcctgtgttgacactgcagtggacagtgtaaaaagaggcatgcatgggataccaggggt

SEQ ID NO: 808444 - DNA, 590 bp, Homo sapiens
ttataataaaaaaacatttatttttgaggaaagcagaatctcaaaggtcacagtgactgtactgtttgtcctctgcacatcaggaagaataaactctttgatttgggcccagggcactttgaacatatgagtgcaaacccacgaaaggtttattctgagacaattcagcacaatttctctgagtcatggagaatgattctcagaccttttgtccttgcgcaggggcagtgcatctatccgtctacttacccaaacaaagaacaatggttgagcaggaacgatgtgcctggtactgtgctcatcttcacacatgcagccctcagaggcttgatcctcaccccaaaggagtgctgcatggcagggacacagacaagcaagcaaatatagcagcgtggtgtgatagatgcttgatgtggcttggctgtgtccccacccaaatctcatcttgaatkgtaatcctcaggtattgaaggagagacctggtgagaggtgactggatcataggggcggtttcccccatgctgttcttgtgatagtgagtgagttctaacaagagctgatggttttacaagaggctcttccccctttgc

SEQ ID NO: 808445 - DNA, 627 bp, Homo sapiens
tcaacacaccagtgagaaccacaatatagttctcaaactatctcaaactttagtgggcatcaaaattataccaggggttgataaaacagaggtttctggccctatcaccgtagtttccaagacgttgattttaggtcagttctaagaatttgcatttctagtaagtttcatgtggtgctgatgatgctagcctgggaaccaccctttgagaaccactgagctaatccattttgttatgtcgtcagagctacacatattattaatcctggaaagggacagtagagatagtgtgaatgaatcggatgccatctttcacttgctaggaaaagaaaggctctgtcttaractttctgtcgaagagtccgggagtggaaaaaagctgcagttacattaaaaagacatgaatttaagcccataacaaaaaactggatgagttatttaaaatctcaaaccctcaatttcctaatctatgaaatagagctaagaacaagtgacattttatttacactggattgttggtggctcaaagaaataatgaaataacaatcccaaactttgatcaccctcaaaacacattacaatttcttaccacatccacccaccacttgaaattaatacttctttaaa

SEQ ID NO: 808446 - DNA, 447 bp, Homo sapiens
aaatactatttggccacataaaaaagagagaaaattcctgttatttgcagcaatgtggatgaatctggagatcattatgttaagtgaaataagccaggcacagaaagacgaataccacacaatctctctcatgtgtagaatgttaaaatgctgatctcatataagtagaaagtaaaataattgttgccagagactgggagtgtagkaggttagggaaatggggagatgtaggtcagtgggtacaaagttagataggaggaaaaagttctggtgtgctattgcacagtaggatgactatggttaacaatattttatataagaaatgataaatgtattaggtgatggatatggtaaatatgatttattcattgcacaatgaatacgggtattgaaacagcacactgtaccccataaatgtgtacaattattatgtgtcaattaaaaaca

SEQ ID NO: 808447 - DNA, 599 bp, Homo sapiens
catcaaaaacacacttcttttggcataatttaaattctaacacatcattcacatttatctatgttacatatataagaacttacccaccatattcctccttgaggaattacagcatgtaattctgtaaaccatgtaattctataaccatttttacaatcgtctaacaatgttataatggattggttgcttactatcaattttttaaaagtcatggyttctccaggcatttcttgctcatcaaaattatttcatgagatgggtctgtccttgtatatttgaaaatgatgtttgcttccttctacttaaaaaacaacttgaacatacctgtttggatcacatggtcttgtcctgattacttggtagaggtttcttcagcattgttattattgttggggtggtaattattaatgtatttcatattctgttttaaaaattaaaattttaaagaccaatgtcttcttttcaattccagtacatttttcagaagtaactaatgctattggcttgcgcattataattccagaccattttatatgtatttagttatatatacagtgtgcatatacatgtgtcaaattattccatttcttctagcatta

SEQ ID NO: 808448 - DNA, 548 bp, Homo sapiens
ttcacttcatcatttcatttcttcatttcatttcatttcctcatttcattgcaccatttcatcacttcatcattttatcattccatttcatcatttcatcatttcatttcatttcatctcatcatttcatttcatttcctcatttcaccattacwtttcatctcatttcatcattttatcatttcatttcatcatttcatttcttcatttcattttgtttcatcatttcatcatttcctttcatttcatcatttcatctcatcatttcatctcatcatttcatctcatttcatttcattcatttcatcatttcatcatttcatctcatgatttcatttcatctcatcatttcacttcatctcatcattacaccatttcatctcatgatttcatctagtcatttcatttcatctcatcatttcatcttttcatctcgtcatttcatttcatcatttcatttcatcttttcatctcgtcatttcatttcatttcattttatcaattcatcaatttatcatttcatttcatttcattatttcatcatttca

SEQ ID NO: 808449 - DNA, 548 bp, Homo sapiens
ttcacttcatcatttcatttcttcatttcatttcatttcctcatttcattgcaccatttcatcacttcatcattttatcattccatttcatcatttcatcatttcatttcatttcatctcatcatttcatttcatttcctcatttcaccattacttttcatctcatttcatcattttatcatttcmtttcatcatttcatttcttcatttcattttgtttcatcatttcatcatttcctttcatttcatcatttcatctcatcatttcatctcatcatttcatctcatttcatttcattcatttcatcatttcatcatttcatctcatgatttcatttcatctcatcatttcacttcatctcatcattacaccatttcatctcatgatttcatctagtcatttcatttcatctcatcatttcatcttttcatctcgtcatttcatttcatcatttcatttcatcttttcatctcgtcatttcatttcatttcattttatcaattcatcaatttatcatttcatttcatttcattatttcatcatttca

SEQ ID NO: 808450 - DNA, 431 bp, Homo sapiens
tctttttttctggatccctctctgcagcagagagctgttctctttttctcacccattaaacttttgctctaacctcacctttggcatatctgtgtccttgatttcctcggtcctgacaccaagaagttcaggtgtaaccccagaagacactatcagtttatcatgacttgtctcattgcctcttgggacatagaaacgtcaatgaaaatgtgtccaaaaggacatttcataaagtgctctctcttccaatcttcaagcaatgtgggactatccatcatgtayaaaaaacttgtggctgaaatgcacaatttctaatacaaaaatgaatgctataaattactctatgtatgtgtattatggccattcagacatcgtcacacattgccacatttagatagaagaacctgtgaacttgtggctgttaggaagct

SEQ ID NO: 808451 - DNA, 637 bp, Homo sapiens
ctttaacccagcattatatatttttatgcacatatgtatatgtaactaaatatttaaatattttcttgtatttctccccagcatatcttagttcatgctgggcacaatacagttgctcagtagcccctgtgcccagtggctgccacattgcaagtgcatctctgagggctctgacttttctgaccttagggaagttaaagggcctgaatcctccttttctgccagataggagtgaatgccccttctctgccaatatcactcctgtttaaaggataagagaggtggtgccctgagagacagtagggcctacaagaaacaagtgttcacaggtagaacactgctgtccacttttgcttggtgtggactcatcaatcctccagagatcatacagcagtccaaaaagtggggccccmgaagagggaaacctcatgtttttagatctgtccataggcttgatctgatgtggagagactagattaaaggcaaactttttatcttgcaacttggccttggcaaattaaatagaaatatgtcactataaaaatcaattaaataaaaaggaaggcagtaagagcagaaaagaggagaaaatacctacaagaaacaaatagaactattaacaaaatggaagtagtcc

SEQ ID NO: 808452 - DNA, 616 bp, Homo sapiens
gcacttcccacctggccattcaaatcccagattccacacagaaagaggaggggccaggctcctcccagctgcaaagtcacaaacttgtgtggctctttccagtgagcaggccagttggagaggttggaggttctctggggayccccctcccacctagctgtctcattcccacctctaaaaaagtacatctaactgccattagattaaggaaaaggacaaagactgatcttaactgcttcctgctgacaggggatgctgttttggggaaatgacagtcagagctccctcagaggtctatctaagggttcccagcagaagggaccatcatcccaggctccagttatatgactgtttggagtttgatggtctgaaggcaagaacagacaaactaggttattagaaaacatgtatcaaaacgaaacaaggggaaggggaaggacagctcaaaaatttcaaagccttttatcagtttgcacagggagagggagaccaaaagcctgactggcaaaaaaactttaccttttgccagcatgttgggcttctgggttcccttcccttgaggccaatcctaagcccaccagtttaaggtttgggaaattaactctttccagtttgg

SEQ ID NO: 808453 - DNA, 466 bp, Homo sapiens
ctctggggatccccctcccacctagctgtctcattcccacctctaaaaaagtacatctaactgccattagattaaggaaaaggacaaagactgatcttaactgcttcctgctgacaggggatgctgttttggggaaatgacagtcagagctccctcagaggtctatctaagggttcccagcagaagggaccatcatcccaggctccagttatatgactgtttggagtttgatggyctgaaggcaagaacagacaaactaggttattagaaaacatgtatcaaaacgaaacaaggggaaggggaaggacagctcaaaaatttcaaagccttttatcagtttgcacagggagagggagaccaaaagcctgactggcaaaaaaactttaccttttgccagcatgttgggcttctgggttcccttcccttgaggccaatcctaagcccaccagtttaaggtttgggaaat

SEQ ID NO: 808454 - DNA, 466 bp, Homo sapiens
ctctggggatccccctcccacctagctgtctcattcccacctctaaaaaagtacatctaactgccattagattaaggaaaaggacaaagactgatcttaactgcttcctgctgacaggggatgctgttttggggaaatgacagtcagagctccctcagaggtctatctaagggttcccagcagaagggaccatcatcccaggctccagttatatgactgtttggagtttgatggtctgaaggcaagaacagacaaactaggttattagaaaacatgtatcaaaacgaaacaaggggaaggggaaggacagctcaaaaatttcaaagccttttaycagtttgcacagggagagggagaccaaaagcctgactggcaaaaaaactttaccttttgccagcatgttgggcttctgggttcccttcccttgaggccaatcctaagcccaccagtttaaggtttgggaaat

SEQ ID NO: 808455 - DNA, 620 bp, Homo sapiens
tgggaccaagaaagatggaatgaatgtctgagttaaatacaaaactagtcagtcatctacagaacaataaaacctttaggctaatccaccatctgttcttgcatggcccatgaactaagaatttttttaaacagttgacaaaagtacagtattttgcggcatatgaaaatgatacggggccargtgtggtggctacgcctgtaatcccagcactttgggaagcagaggtgggaggatcacttgagcccaggagttcaagaccagcttgggcaacatagcaaaaacatgtctctacaaaaacaaacaaacaaacaaaattagccaagcatggtggcgtggacctggagttccaactacttggaggctgaggtgggaggatagcttgagccctcgacaaggaggtaggggctgcagtgagttttgattgtgccactgcactccagcctgggtgacaaagtgagactgttgtctcaaaaaaaaaaaaaaaaggaaaaaggaaagaaaataatatgaaataccagttacagtgttcataaataaagtcttattgagatacagctacactcattcatttatgtgttttctgtggctgctttcacattgtaatggcagaattgaca

SEQ ID NO: 808456 - DNA, 620 bp, Homo sapiens
tgggaccaagaaagatggaatgaatgtctgagttaaatacaaaactagtcagtcatctacagaacaataaaacctttaggctaatccaccatctgttcttgcatggcccatgaactaagaatttttttaaacagttgacaaaagtacagtattttgcggcatatgaaaatgatacggggccaggtgtggtggctacgcctgtaatcccagcactttgggaagcagaggtgggaggatcacttgagcccaggagttcaagaccagcttgggcaacatagcaaaaacatgtctctacaaaaacaaacaaacaaacaaaattagccaagcatggtggcgtggacctggagttccaactacttggaggctgaggtgggaggatagcttgagccctcgacaaggaggtaggggctgcagtgagttktgattgtgccactgcactccagcctgggtgacaaagtgagactgttgtctcaaaaaaaaaaaaaaaaggaaaaaggaaagaaaataatatgaaataccagttacagtgttcataaataaagtcttattgagatacagctacactcattcatttatgtgttttctgtggctgctttcacattgtaatggcagaattgaca

SEQ ID NO: 808457 - DNA, 669 bp, Homo sapiens
cgtaagaagactcagccagtgagagctcagctctgttcagatccagggccagtcgtgaagggcaagaccatttacagcctccatcccagcaccacggaagacctgtgttggcagccgcgggagcagccctttagaaaccccttggatccattttttaaatgatttctctgtggttcacgacaaataataatttatagagttaaccatagyctgggcacagtggctcatgctgtaatcccagcactttgggaggccaaggcaggaggattccttgagcccaggagtttgagaccagcctgggcaaccagcctgggcaaaaatctctctctttttttttttttttttttgagacggagtcttgttctgttgccaggctggagtgcagtggtgcgatctcagctcactgcaacctccacctcctgggttcaagtgaccctcccacctcagtttcccaagcagctgggactataggcacgcgccaccatgcccagccaatttttgtatttttagtagagacagggtttcaccatgttggccaggatggtctcgatgtcttgaccttgtgatcagcccgcctcggcctcctaaagtgctgggattacaggtgtgaaccagcacgccaggccaaaagtccctcttttatagagaccttttctctattaaaaatgg

SEQ ID NO: 808458 - DNA, 669 bp, Homo sapiens
cgtaagaagactcagccagtgagagctcagctctgttcagatccagggccagtcgtgaagggcaagaccatttacagcctccatcccagcaccacggaagacctgtgttggcagccgcgggagcagccctttagaaaccccttggatccattttttaaatgatttctctgtggttcacgacaaataataatttatagagttaaccatagcctgggcacagtggctcrtgctgtaatcccagcactttgggaggccaaggcaggaggattccttgagcccaggagtttgagaccagcctgggcaaccagcctgggcaaaaatctctctctttttttttttttttttttgagacggagtcttgttctgttgccaggctggagtgcagtggtgcgatctcagctcactgcaacctccacctcctgggttcaagtgaccctcccacctcagtttcccaagcagctgggactataggcacgcgccaccatgcccagccaatttttgtatttttagtagagacagggtttcaccatgttggccaggatggtctcgatgtcttgaccttgtgatcagcccgcctcggcctcctaaagtgctgggattacaggtgtgaaccagcacgccaggccaaaagtccctcttttatagagaccttttctctattaaaaatgg

SEQ ID NO: 808459 - DNA, 669 bp, Homo sapiens
cgtaagaagactcagccagtgagagctcagctctgttcagatccagggccagtcgtgaagggcaagaccatttacagcctccatcccagcaccacggaagacctgtgttggcagccgcgggagcagccctttagaaaccccttggatccattttttaaatgatttctctgtggttcacgacaaataataatttatagagttaaccatagcctgggcacagtggctcatgctgtaatcccagcactttgggaggccaaggcaggaggattccttgagcccaggagtttgagaccagcctgggcaaccagcctgggcaaaaatctctctctttttttttttttttttttgagacggagtcttgttctgttgccaggctggagtgcagtggygcgatctcagctcactgcaacctccacctcctgggttcaagtgaccctcccacctcagtttcccaagcagctgggactataggcacgcgccaccatgcccagccaatttttgtatttttagtagagacagggtttcaccatgttggccaggatggtctcgatgtcttgaccttgtgatcagcccgcctcggcctcctaaagtgctgggattacaggtgtgaaccagcacgccaggccaaaagtccctcttttatagagaccttttctctattaaaaatgg

SEQ ID NO: 808460 - DNA, 713 bp, Homo sapiens
tttacgagggatccgcccttgtgatccagtcacttcccacctccccaacaggccccacctccaacactggaggtcacatttcaacataagatgtaaaggggacacacatccaaagtatatcaaccaggaaatataaaagacaagcctgaagaatcttgtagtgccagaaaggaaggaaatgcacgcacgcgcacacacacacacacacacacacaacccacaatggtggggtatgccaaarggagacagatgccaactaaaagggtctcagtaaccaaaactagaataatctgagcaacaaaaagccccccaaaacataaagttatattagattagaactcaaaagaactcctgagtccatactgatacaaataaatgattgatctatttttatcttatttttacttttatttttgacacagggtcttgctttatcacccaggctggagtgcagtggtgcaatcacagctcactgcagcctgaaactcctggactcaagcagtcctctcgcctcagcctcccgatgtgctgggattagaggcatgagccaccaagctcggtttaaataaatgatttcataaacaaataaggaaaactagctcatggttctgcaggctgtacaggaagcatggcactggcatctgctcctggtgagagcctcgggaagcttccaatcatggcagaaggcgaatcacccatgtggaagaatattc

SEQ ID NO: 808461 - DNA, 600 bp, Homo sapiens
ctggcatctgctcctggtgagagcctcgggaagcttccaatcatggcagaaggcgaatcacccatgtggaagaatattccaaataattcatgcagacactttgtcctcaagagttgggggaacataatgcctcattccttaagtgtaggcagcacacggtgtcttccttccaaagagtgcatgcagtatggaaaggggtggaggcagagtgagcgtrcagtggagaaacctggtaagcccagcctcagccaggtgatgaaggtccacattaacagtgacccgtcacgttgatggtaggcaccctcgacatgcgatgagagaggcactttacctctgaggtcttcctcccaaaaccccataacctctgcctaatgataataaagacataagacaaaaccaaattcaggaacattctacaaaataaccgtccagcactcctcaaaactgtcaaaaaggccaagaacaagggaagtctgagcgactgtcaccatgaagaggagcctaaggagatattaggactaagtacaatgtcatgtttctggatgggatccaggatcagaaaaaggacattacagaaaactgaggacttaatgccatttc

SEQ ID NO: 808462 - DNA, 600 bp, Homo sapiens
ctggcatctgctcctggtgagagcctcgggaagcttccaatcatggcagaaggcgaatcacccatgtggaagaatattccaaataattcatgcagacactttgtcctcaagagttgggggaacataatgcctcattccttaagtgtaggcagcacacggtgtcttccttccaaagagtgcatgcagtatggaaaggggtggaggcagagtgagcgtacagtggagaaacctggtaagcccagcctcagccaggtgatgaaggtccacattaacagtgacccgtcacgttgatggtaggcaccctcgacatgcgatgagagaggcactttacctctgaggtcttcctcccaaaaccccataacctctgcctaatgataataaagacataagacaaaaccaaattcaggracattctacaaaataaccgtccagcactcctcaaaactgtcaaaaaggccaagaacaagggaagtctgagcgactgtcaccatgaagaggagcctaaggagatattaggactaagtacaatgtcatgtttctggatgggatccaggatcagaaaaaggacattacagaaaactgaggacttaatgccatttc

SEQ ID NO: 808463 - DNA, 600 bp, Homo sapiens
ctggcatctgctcctggtgagagcctcgggaagcttccaatcatggcagaaggcgaatcacccatgtggaagaatattccaaataattcatgcagacactttgtcctcaagagttgggggaacataatgcctcattccttaagtgtaggcagcacacggtgtcttccttccaaagagtgcatgcagtatggaaaggggtggaggcagagtgagcgtacagtggagaaacctggtaagcccagcctcagccaggtgatgaaggtccacattaacagtgacccgtcacgttgatggtaggcaccctcgacatgcgatgagagaggcactttacctctgaggtcttcctcccaaaaccccataacctctgcctaatgataataaagacataagacaaaaccaaattcaggaacattctacaaaataaccgtccagcactcctcaaaactgtcaaaaargccaagaacaagggaagtctgagcgactgtcaccatgaagaggagcctaaggagatattaggactaagtacaatgtcatgtttctggatgggatccaggatcagaaaaaggacattacagaaaactgaggacttaatgccatttc

SEQ ID NO: 808464 - DNA, 646 bp, Homo sapiens
cagcatgtttttgagattcattaatgttgtatgtatcaatccttctttgttgttgcttagtagtattccagtgtatgagtagatcacagtttatttatccattttccttttagtggactcctggacactttccaatctgaggctagtattaataaagctgctatgaatagtcttgtacaggtatttatttctttgggtatgtatgtgggagaggagttgctgggtgaatatttagttttctaagtctgcatgcccttttcaaaagtggctgcatcattttatactcccataaatgtatgagagttccagttgtgccacattctcaccaatatttggcaaagttagtcttctccattttaaccatttctgtgggtgtgtgttgatatctcattgaagttttgatttgcattttcatgatatctaatgatattgagcactttttaatgtgcttatgagctatttatgtgaaagattttttccaaatmttttgctcattttttccaactttatattatagtaatttttaaatatataggaagttaaagaagtgttacagtgagctctcatgtataccccacttggattctgccattaatattttaacatgctttgttttatctcgtgtactcttacctatccccctccg

SEQ ID NO: 808465 - DNA, 626 bp, Homo sapiens
tgacctcatgctgcagattatcgtaggaaacctacagtgtattagtctggaataatggcggtcctgttagcattttagtttttactttaattttgctctttaatttctaagagaaggtaaatgctacattctagattgtgggacttccttacaggcaagggatggtggtttagaattccgaggtctataccacctgccacttcccctccttttccaattctgtrtacttaataagaatgcagtaaactttatgttgaaatcaaaggcaatatttccacttggtctagagcctaacttttttcaaacactaatttgaatagtttttcagttaacttgatgttgttgctccctttttcatcagaaaatagtcttaatatcaaaattcctgatcaaaatgctgtttgctctttgtagtgtctggggttgatatttatgtgcacactgtggagctctgcttttgtttcagacaggaagtgctggtggaagtttgcttacccagtgcagatagcacagcttttacagaacaaaccaccattttatttctggcctgtttgcattccactttttaaaattccttgaagaagaacccattttataattggcaaattagcacccttgaaatataa

SEQ ID NO: 808466 - DNA, 535 bp, Homo sapiens
caggaagatagcttgagcccaggagatagaggtgacaatgagctacagtggtgccactgcactccagcctgggcaacaaaatgagaccttgtctcaaaaaaaaaaacaaattaaaaaataaaataaaaaaggtactcttgaaatataagcgaggttaagacctttcygaagaagttttgatggcgcagtgttctaagcataatagagggaaaggtaaaatgctatggacctccaaaagaaacccggtgaaaacttgtttgccagccagttaccttacattttatgggcatttaccttttttaagcacgatcacgtttttccttcttacttggttctatctctgagaggtagagctcattattttagagaaggcaactgaggcatgggttggtaatccaccactgaggtgctgatgagacatgctagctttcctcattccactgtcactaattctcgtttctctgtccagtttgaggctgtcctgtgtgcaatacagagtaattgggacaggatccttgccagtgacaaaatctct

SEQ ID NO: 808467 - DNA, 535 bp, Homo sapiens
caggaagatagcttgagcccaggagatagaggtgacaatgagctacagtggtgccactgcactccagcctgggcaacaaaatgagaccttgtctcaaaaaaaaaaacaaattaaaaaataaaataaaaaaggtactcttgaaatataagcgaggttaagacctttccgaagaagttttgatggcscagtgttctaagcataatagagggaaaggtaaaatgctatggacctccaaaagaaacccggtgaaaacttgtttgccagccagttaccttacattttatgggcatttaccttttttaagcacgatcacgtttttccttcttacttggttctatctctgagaggtagagctcattattttagagaaggcaactgaggcatgggttggtaatccaccactgaggtgctgatgagacatgctagctttcctcattccactgtcactaattctcgtttctctgtccagtttgaggctgtcctgtgtgcaatacagagtaattgggacaggatccttgccagtgacaaaatctct

SEQ ID NO: 808468 - DNA, 535 bp, Homo sapiens
caggaagatagcttgagcccaggagatagaggtgacaatgagctacagtggtgccactgcactccagcctgggcaacaaaatgagaccttgtctcaaaaaaaaaaacaaattaaaaaataaaataaaaaaggtactcttgaaatataagcgaggttaagacctttccgaagaagttttgatggcgcagtgttctaagcataatagagggaarggtaaaatgctatggacctccaaaagaaacccggtgaaaacttgtttgccagccagttaccttacattttatgggcatttaccttttttaagcacgatcacgtttttccttcttacttggttctatctctgagaggtagagctcattattttagagaaggcaactgaggcatgggttggtaatccaccactgaggtgctgatgagacatgctagctttcctcattccactgtcactaattctcgtttctctgtccagtttgaggctgtcctgtgtgcaatacagagtaattgggacaggatccttgccagtgacaaaatctct

SEQ ID NO: 808469 - DNA, 535 bp, Homo sapiens
caggaagatagcttgagcccaggagatagaggtgacaatgagctacagtggtgccactgcactccagcctgggcaacaaaatgagaccttgtctcaaaaaaaaaaacaaattaaaaaataaaataaaaaaggtactcttgaaatataagcgaggttaagacctttccgaagaagttttgatggcgcagtgttctaagcataatagagggaaaggtaaaatgctatggacctccaaaagaaacccggtgaaaacttgtttgccagccagttaccttacattttatgggcatttaccttttttaagcacgatcacgtttttccttcttacttggttctatctctgagaggtagagctcattrttttagagaaggcaactgaggcatgggttggtaatccaccactgaggtgctgatgagacatgctagctttcctcattccactgtcactaattctcgtttctctgtccagtttgaggctgtcctgtgtgcaatacagagtaattgggacaggatccttgccagtgacaaaatctct

SEQ ID NO: 808470 - DNA, 597 bp, Homo sapiens
taggaatgggaggagaaaaagagaagtcaaagctggagactgacatgggaagaggaagctcacgttctttaggaacatggtcagtgggagacacccacatagagagatcagttcctaaaagttgtgtccacaaacagaaaaggttttcttcccccccatctaccaccaggtcccaaaggcgaggcaccccctccaggctatcacaaatggaacttgtcctcrgagaaagagaacacgacccttcaggagagtcttggccaaagggaccggctgcagctgccttctgcagggcccctgtggctgcagtggctccatttggccaaggaaccctgaatccgctcctgattggcctgaatcacgaacccatttggaccaggaacccctgagtccactcctgcccaggcctctcccgggtcaccctcatctcctcccaaagccattcaccttgccaccttgcaccctgtcatgtcaccatcctggacctcagtgtccacatccacgaaatggggtgggtggagaggagggccccccaagatctgacatccctttccactctaacactccataaggaagggagagaggaagggtctggaagga

SEQ ID NO: 808471 - DNA, 730 bp, Homo sapiens
cgttctccctttccacggaagccaggctccatcccgccccgcacctgtacaagtgtctgctgctaattaagagagagacagatggaggaaggtatagtttaattttacagccccagtttcttcaaggcaattaggstcattagaaggaaagcaccttttcctttcttcttcttcttttgtaaatgaagaaaagtcaaataggagagggccagtgttgttgaaaggctcacacatctgtttcctggtcagtttgtcggccatctgcccatgaggtaccggggctgattaggttaatgcatttattaatggggcttacaagactgttcaatgaatctgttattcttttgcaagtagctttttaatatactaagacagggactacactgcacaaagccaagagtggctagataagcatttctttcccctcacctggctccaaaccagaggggaacagaaacattatgaaaacaggttttcatgaaaactgcacttccaggtaatggaaatgattcatccatctaacctctaaccacctccttgttgttgaaatagtcttgaaaatatctctttggaggatagtttcatgcaccaggcaccagttcagtgcctacactgtgcttctctaagagaccacctgagtcctagggtgggagaatggttagttaaatgaataggcatgaatgatataatcttgcctataggacattagatggcctgaggatcccttgcc

SEQ ID NO: 808472 - DNA, 730 bp, Homo sapiens
cgttctccctttccacggaagccaggctccatcccgccccgcacctgtacaagtgtctgctgctaattaagagagagacagatggaggaaggtatagtttaattttacagccccagtttcttcaaggcaattaggctcattagaaggaaagcaccttttcctttcttcttcttcttttgtaaatgaagaaaagtcaaataggagagggccagtgttgttgaaaggctcacacatctgtttcctggtcagtttgtcrgccatctgcccatgaggtaccggggctgattaggttaatgcatttattaatggggcttacaagactgttcaatgaatctgttattcttttgcaagtagctttttaatatactaagacagggactacactgcacaaagccaagagtggctagataagcatttctttcccctcacctggctccaaaccagaggggaacagaaacattatgaaaacaggttttcatgaaaactgcacttccaggtaatggaaatgattcatccatctaacctctaaccacctccttgttgttgaaatagtcttgaaaatatctctttggaggatagtttcatgcaccaggcaccagttcagtgcctacactgtgcttctctaagagaccacctgagtcctagggtgggagaatggttagttaaatgaataggcatgaatgatataatcttgcctataggacattagatggcctgaggatcccttgcc

SEQ ID NO: 808473 - DNA, 730 bp, Homo sapiens
cgttctccctttccacggaagccaggctccatcccgccccgcacctgtacaagtgtctgctgctaattaagagagagacagatggaggaaggtatagtttaattttacagccccagtttcttcaaggcaattaggctcattagaaggaaagcaccttttcctttcttcttcttcttttgtaaatgaagaaaagtcaaataggagagggccagtgttgttgaaaggctcacacatctgtttcctggtcagtttgtcggccatctgcccaygaggtaccggggctgattaggttaatgcatttattaatggggcttacaagactgttcaatgaatctgttattcttttgcaagtagctttttaatatactaagacagggactacactgcacaaagccaagagtggctagataagcatttctttcccctcacctggctccaaaccagaggggaacagaaacattatgaaaacaggttttcatgaaaactgcacttccaggtaatggaaatgattcatccatctaacctctaaccacctccttgttgttgaaatagtcttgaaaatatctctttggaggatagtttcatgcaccaggcaccagttcagtgcctacactgtgcttctctaagagaccacctgagtcctagggtgggagaatggttagttaaatgaataggcatgaatgatataatcttgcctataggacattagatggcctgaggatcccttgcc

SEQ ID NO: 808474 - DNA, 730 bp, Homo sapiens
cgttctccctttccacggaagccaggctccatcccgccccgcacctgtacaagtgtctgctgctaattaagagagagacagatggaggaaggtatagtttaattttacagccccagtttcttcaaggcaattaggctcattagaaggaaagcaccttttcctttcttcttcttcttttgtaaatgaagaaaagtcaaataggagagggccagtgttgttgaaaggctcacacatctgtttcctggtcagtttgtcggccatctgcccatgaggtaccggggctgattaggttaatgcatttattaatggggcttacaagactgttcaatgaatctgttattcttttgcaagtagctttttaatatactaagacagggactacactgcacaaagccaagagtggctagataagcatttctttcccctcacctggctccaaaccagaggggaacagaaacattatgaaaacaggttttcatgaaaactgcacttccaggtaatggaaatgattcatccatctaacctctaaccacctccttgttgttgaaatartcttgaaaatatctctttggaggatagtttcatgcaccaggcaccagttcagtgcctacactgtgcttctctaagagaccacctgagtcctagggtgggagaatggttagttaaatgaataggcatgaatgatataatcttgcctataggacattagatggcctgaggatcccttgcc

SEQ ID NO: 808475 - DNA, 538 bp, Homo sapiens
acagttccacgtggctgggaggcctcaggaaactaacaatcatggcggaaggggaaggggaagcaaggaccttcttcacatggtggcaggagacagagagtgagcaaagaggaaatgccacacttgtaaaccatcagatctcttgagaactcactcactatcatgagaacagcatgggggaactgcccccatgatctagtcacctcccaccagtttccttccatgaagggattacaatgagagattaaatttgggtggggacacagagtgaaaccatatcaatcatcttaattaaacttctactctatgctaggacctttacatacctgatctttaatcctctcagtaaccttgaaagggttcataactccattttaaagataagggaamtgagaggttaaatgtcttactcaaggtcacagagcaagtgctggagcgagaatctaaacctggagttttctggttccacaatttctagcaccccacttaaccctctcaaagttcctggtactatctggatccagttactgtggttaaa

SEQ ID NO: 808476 - DNA, 593 bp, Homo sapiens
tgtgaagaacagaatgagtctttcttgtctctgcattctaggtcctttatcccttgactcttagatcttccagcctcttttataggcagggggtcctttgaatacctaccatatgcaagacaaaattataagtgggctgagggtggaaagtttgaactctaccttataagaaaaaccctcgtttttttttcctctatcggtgctagaaatggaaagtttctaaagatttgtttccttaggtactacaacctctctttctagtttgctgaaagttttttattggtgatacacattgcatttcattgcatgatttttctgcatccattgaaatgatcttatggctgttcttttttaggctgttaatattatgaattacttggattgaaattcaagtgrtaaaccaaccttggattaattagaaggggataatgtaatggcagaggtggacctaggatgtggctattaatagaagacaagttagcccatatgaacctcagtattctcaagtaggtaatgtaagacttagtaaaagtagccagaaaggtgggtattcagagggggtgggagacagctttctcctggggacagagtgt

SEQ ID NO: 808477 - DNA, 610 bp, Homo sapiens
tcctgagtggcgggaactacaggcacgtgccaccacgcccagctaatttttttttttgcatttttagtagagacaggattttaccatgttggcagggctggtctcgaactcctgacctcaagtgatctgcccgcctcagcctcccaaagtgctgagattacaggcatgagccactgcgcccggcctgaatgtaagatttaatattgttaagatgacggtactacccagagcaatctacagattcaatgcaatttgtatcaaaatccaaatggtatttttaatattttacagatatacaaaaactcatcctaaaatttatgtggaatcacaaggcatcctaaataacacaaaaaaagacggaaaaaaaggtctgcagaaaaagaagaaaccaggtctctcatttcctgatttcaaaacttaaatactarcctaccacaatgaaaagagtgtggtactggcataaagacaaacatataaggccgcctgtaatctcaacaatttgggagactgaggtgagtggattgcttgagcccaggagttcaaaatcaacctgggcaacatggcaaaacccagtctttacaaaaaatacaattagctaggcgtggtagcc

SEQ ID NO: 808478 - DNA, 542 bp, Homo sapiens
ttcctgctggctgtgggaatgtggggttacctttcccagctggcctcgtttccttcatgtccaatgcaggggttccagtcacatgcgttgggcaccattacatgtccaagctgtgccaggatctagaaaaatggctggactcaggccaaggggccttcctgtctggcagtgaaaataagaggagataccaagggccctgagtctggaggggaagtcatgagcacagggcagtgccagggcccgggagctgccacagaggagcccaycttggtgacagacacctgtaggcacatccgtgatgcccagtgcccaacacagggaactggacaaacgtttcatgcacgactcttttttcccttcttggctaccttgaggaccttgattataatagttatcctttttttctttttctttttttgagactcttgctctgtcgtccaggttggaatgcagtggcaaaatcttggctcactgcaatcttcacctctcaggttcaagtgactctccttcctcagcctccctagtagctgggattaccggtg

SEQ ID NO: 808479 - DNA, 638 bp, Homo sapiens
aaggattgttttgggagagaggatagcttggctccatatggattttttttagggatgctctaactattcttccctgacgtgaaaacatacacaaaagctctaacttaaaagataatgttctgtctgttatagtccacttagtttagaggtatctagggctggtctcacttggtagcaataattctctgtttggttccatggtggagcaaaacagacttgactgtacagccattgtccttcagatgtgtctaaatttctcagtctgtttatgagcatcaacaaacactttgtgcatacttctgccatgggttgaatgcgtctattttcctttaatttagtttaaaactagtaatggaattcctgaggttttgagaggaatagkgttggcaaattaagttttgaaactaaagacatattaagataccaagcaaaacagagagactattgctttagaaagagatcttaaaactccgctgacatttgcaaagccagtgtcttatatttataaaagctttagataggaactgctatttttctaaaattgttggtttaaaaataattgttacatttgtgcattttaaaagttgcttctaacacactttgggtatgcttgagctcagccttttcagcaaagtata

SEQ ID NO: 808480 - DNA, 528 bp, Homo sapiens
gtgtaatgtagctctaatgcatgagcatgaaccttgaaattctgtgacttctccccccgcccccaaatctctggcaaagtttggggtttgttttttttttttgaccttttaatacattggatgtacattaacaacaatatacctttccaaattcttctttcttttttcctaaattttaatctgaaaagatttgcttttttaaactctctttttttttaggttggcagtcarcaatcacctttttaaaaactatgcttgattttgttcatatatatatattttattcattaaaacatagtttcaaccccatatggtaactggctcctgagaatagggaaactagtccccaagcttcagcctccccacaaaccttgtatcaacatttttactgatgagtaataaaattaacagatttgagctgtaacattctgaacactggaaaaagcattactgaactgtaaaatagacctgcagagaaatctggcagaggaggaggagtgtgcgttagcctgtgacaatgaggcactg

SEQ ID NO: 808481 - DNA, 576 bp, Homo sapiens
gcctcagcctcccaagtaactgggattcttgttgcgggtcaccatgcctggctttaagcaaatttttacataaacagcctggatttacatgttattcctatggcacaaatatgggatttgtcgttaataactgtattccagtttactgcagwttataatagtgaacaagacaaactgggatttggaatcctgaggctatctctgatttagacaagttagtaaccaccgtgtgctttaacctttttgattgggaaattctgagaattaactaatgtaaatatggggcacatagaagttgctcaataaaagtttttaatattactagctttctttcaagtggttgaacttgctaaaattctgatttctaaatgagtgggagcatttcggtacaaaaatattcaagggttctctccaactttccaaacaaagcagatttgaacattaaatttcatcatccaacttttggaacccctgctaattgttttctttgtactcttggtttatttttatacctaaggtctgatagacacataacaaatgctttatgtaccttaaagtaagtgaaaatagttgttc

SEQ ID NO: 808482 - DNA, 638 bp, Homo sapiens
tgattggtctatctttaagccagcaacaatcgtgcagtttcaccggctactatattctattccaactctacagatgattatttaagtggtattttattactactattattttattttacttttgctttgttccccaagctggtcttaaacttgggctcaaargatcttcccgcctcagcatccagagtagctgggattacaggggagccccactgcgccggcttggactttaattttttaaacttgtcctcttctacatctggttttcataacctgaaggctgtgtttattttccataaaacaaggcattgattccaaaggtattataattccccaattccgtataaccttcagctctttaggaaaaaaaaaaaaaaaaaaaaaaagagggaatactgctcacctcctctccggaaatgtaccctttacgggaatttctgaaacctttcacaagaattggattcctttgtaatgctttaattgacttaggagtgttattgaaatctacaaagcatctcaaacatagtaggattacactattactcagaaacattttctatgagacgtctttctcttgattatgctctttgaatcctaaacttgcagcgttctgcagcttttgttttctaaagcctagg

SEQ ID NO: 808483 - DNA, 631 bp, Homo sapiens
agttcacagtgtatgataactttaagaatttaggtgaatattattaaattgagtaaattaattctcaatctttggatacctggacaatttctaaattggagggtacaaaatacaaatcacaagaaacagtgtagttttatgcaaataacatttttacacagtttagaataaccattgataaacagataagagaacatatgattgccttagaatagatactgttgctttcgccactttagatttgtaaatcaygtactgtatacgtgtgggcgtagaggaccatgcaggttttggatgactgcctctgttttcgtcatgcctatgcgggaacacaattgcctgctttgtttaagggctatggttaatccaaacagctctgactctatcaagtactatagctacagagaaacacaagtaagcattcgagataatgactaccttgagcctttacttatttaaaaagttgttactgtttgttaatgtggtacattcaatttactatggattgtcactctaaaataagacttcaatctttttcttatttttatatagccatgatttatattcatatcttaatgtaataaccaatcttctctgacaacattataacaatgctggaacctccattttc

SEQ ID NO: 808484 - DNA, 564 bp, Homo sapiens
aaatattaataaagttatggcatagaaaataaaaatgattgtaaaaggcgtaaagatatttctgtggggaaaacatttgttcattagttatcagttaaaattctgtgaaaaataaccactagagaccctaaagtacccaggggctaataataagaagggaggaacaccctctcactccccaccgttacctscccagaagggaagaggaagagggtgactccaggagagctgtggtctcccctccccatatgtccacatatacctgacctcccctccccaaaatatatacccaatatctctcccatatatacatatttatctgacctctccacatatgtatacctaaactttctctatatatccacatatacctaaccctctcacacacatatagctgacctccagtggaggaaaatggggaagagagaagaagttatcaaaggataaatctaggtcatactcagaaatgtgaaaaacaaaaaccacacacagaaaaaaaaaacacacacaaaaaagaaattgataaatttgtttgtgtcaaaattaagaattccggttcaatga

SEQ ID NO: 808485 - DNA, 642 bp, Homo sapiens
atatgagtacacaaaaaaggagaatcttcacattatggtgtgtccagtctctttttacattccattttgtttttattttatagaggtaatatttttatagcctcatgtagattttttcattttagtttgtaaaaaagaacaatgagaacacttggacacaggaaggggaacatcacacacatgggggcctgttgtggggaggggggaggagggagggatagcattaggagatatacttaatgtaaatgatgagttaatgggtgcagcacaccaacatggcacatgtatacatatgtaacaaacctgcacgttgtgtacatgtaccctagaacttaaagtataataaaacatatatattaaaaaaataataaataaataaataagtcagccactgcacctggacaactattctgctcaaaaaaaaaaataaaaaagtaaacttaaagaaaacttgcaataagaatagtattttgtacttatatattttttttyctgaaattgcactcatcagaactctttatccttaagtacttcagtgtgtatttcctaagaaaaggatacattcttgtacataaccagaatatagctaccaacttcattaaatttaattttaataatctaaactgtttgaattctcattgt

SEQ ID NO: 808486 - DNA, 607 bp, Homo sapiens
gtgaatggggatcccgggacaagtctgccggcagcagatataaggtcagtgccctaaagaggtactgggagcagtgccttaaagtagtactgggaatgggaagttttctgaatcagggtaacatggggcagaattggtctgttgaagaaaaacattatgtgcagttgcttaaagttttgttgaaacaaactggtgctcaggttagttctcacattaactacgatgctacaggaagtcattatgcataacccatggtttccacaggcaggsactcttgatgtagaaaattgggatagagcagaaggattaaaacaggctcatcaaaaaggttttcaagttgattcttcagttttctccacttggagtttagttcgtactgtacttctgccattatctccttgttattctgcgggacagcaggctgaatgtaaaaatctgaaagaatctgttgtcccacccacagctccagttgaaaataagtaataggagagggaggataaaaattggcctataccgccccctccagttgcagaaacatctgtaccgcctccttcggtggcagaaacagagaccccaatacaaagaattttacgctctgccgccacgg

SEQ ID NO: 808487 - DNA, 607 bp, Homo sapiens
gtgaatggggatcccgggacaagtctgccggcagcagatataaggtcagtgccctaaagaggtactgggagcagtgccttaaagtagtactgggaatgggaagttttctgaatcagggtaacatggggcagaattggtctgttgaagaaaaacattatgtgcagttgcttaaagttttgttgaaacaaactggtgctcaggttagttctcacattaactacgatgctacaggaagtcattatgcataacccatggtttccacaggcagggactcttgatgtrgaaaattgggatagagcagaaggattaaaacaggctcatcaaaaaggttttcaagttgattcttcagttttctccacttggagtttagttcgtactgtacttctgccattatctccttgttattctgcgggacagcaggctgaatgtaaaaatctgaaagaatctgttgtcccacccacagctccagttgaaaataagtaataggagagggaggataaaaattggcctataccgccccctccagttgcagaaacatctgtaccgcctccttcggtggcagaaacagagaccccaatacaaagaattttacgctctgccgccacgg

SEQ ID NO: 808488 - DNA, 607 bp, Homo sapiens
gtgaatggggatcccgggacaagtctgccggcagcagatataaggtcagtgccctaaagaggtactgggagcagtgccttaaagtagtactgggaatgggaagttttctgaatcagggtaacatggggcagaattggtctgttgaagaaaaacattatgtgcagttgcttaaagttttgttgaaacaaactggtgctcaggttagttctcacattaactacgatgctacaggaagtcattatgcataacccatggtttccacaggcagggactcttgatgtagaaaattgggatagagcagaaggattaaaacaggctcatcaaaaaggttttcaagttgattcttcagttttctccacttggagtttagttcgtactgtacttctgccattatctccttrttattctgcgggacagcaggctgaatgtaaaaatctgaaagaatctgttgtcccacccacagctccagttgaaaataagtaataggagagggaggataaaaattggcctataccgccccctccagttgcagaaacatctgtaccgcctccttcggtggcagaaacagagaccccaatacaaagaattttacgctctgccgccacgg

SEQ ID NO: 808489 - DNA, 619 bp, Homo sapiens
cagtttgtgtttatagatatagatatagatatagatatagatatggatatagatatagatatagttatagatatagatagatatacactttaagttctagggtacatgtgcacaacttgcaggtttgttacataggtatacatgtgccatgttggtttgctgcacccatcaactcatcatttacattaggtatttctcctaatgctctccctcccccagcaccgcctcccaacaggccctggtatgtgatgttccctgccctgtgtccaagtgttctcattgttcaatttccacctatgaatgagaacatgcagtgttttattttctgttcctgtattagtttgctgagaatgatggtttccagcttcatccatgtccctgcaaaggacatgaactcatccttttttatggcygcatagtattccatggtgtatccttatgtctttttgacagctaagaaggaccagctccaggtaaacaatacccaattgacctgtaaatcttaccaattatatcactgcattaatcatagcacattgcaaacacataatatctctactttgatgattttaggccacatccctgggctatgtattcctgttaatctgtccgaggcttg

SEQ ID NO: 808490 - DNA, 569 bp, Homo sapiens
taaaaatctcctaggtagtctcacatcccacagagccccaggtaatgaaatgaggccctgagataatactttatgaacaataaaactccgggttctattgacagtgaagcaagacctgagagagaaggctaaattcccttgtgtctagctgccacaatcttctgagaataatggcctttcttcccgtctgccttctgaatcataggcaaatttttctctttggtgatccctaatacagaaaggggaagtcaaataaaatatatacaagragaaggattctgggagacagagtttcttgattcccttctgcatgctcctcctcaaaagcctttatgagcttaccttacatttaaattcttttaaacaaggcattatgtggtctggtcttttccagctccacacaccttcacactacattccccccagctaattctgctctgggaacactgaccttcttttagttctttgaacacattgatttctggtcaagatgactcagtaacttcaacctttgttgtgcccttggtgctgtgaagatatagatatatattaaccactgcacaccagaa

SEQ ID NO: 808491 - DNA, 635 bp, Homo sapiens
aattcttttaaacaaggcattatgtggtctggtcttttccagctccacacaccttcacactacattccccccagctaattctgctctgggaacactgaccttcttttagttctttgaacacattgatttctggtcaagatgactcagtaacttcaacctttgttgtgcccttggtgctgtgaagatatagatatatattaaccactgcacaccagaaatcagaaatagcacaacagagaataaagtcattgagccatcttctgagctccaaaagacaaattttctccaaaaagacaaattcaggctctaaaacaataccttaaggaaccagaagtggaatagaaaattaaggtggtaagcagggctaaaccacatgcctgttgagcccaggtttggaagaagrcaatggcaggtaggaatgtggtttctgatgggtaataggtactgttttcatttactttctgttgcttataacagaatatctgaaactgggtgctttataaagaaaaggaatttatgtcttgcagttagggaaactgagaagtcaaaagttgagggctgcaattgacaagtgccttcttgctggtggggatactctgaagagtcttgaggtggtatcgggcataccactctca

SEQ ID NO: 808492 - DNA, 635 bp, Homo sapiens
aattcttttaaacaaggcattatgtggtctggtcttttccagctccacacaccttcacactacattccccccagctaattctgctctgggaacactgaccttcttttagttctttgaacacattgatttctggtcaagatgactcagtaacttcaacctttgttgtgcccttggtgctgtgaagatatagatatatattaaccactgcacaccagaaatcagaaatagcacaacagagaataaagtcattgagccatcttctgagctccaaaagacaaattttctccaaaaagacaaattcaggctctaaaacaataccttaaggaaccagaagtggaatagaaaattaaggtggtaagcagggctaaaccacatgcctgttgagcccaggtttggaagaagacaatggcaggtaggaatgtggtttctgatgggtaataggtactgttttcatttaytttctgttgcttataacagaatatctgaaactgggtgctttataaagaaaaggaatttatgtcttgcagttagggaaactgagaagtcaaaagttgagggctgcaattgacaagtgccttcttgctggtggggatactctgaagagtcttgaggtggtatcgggcataccactctca

SEQ ID NO: 808493 - DNA, 604 bp, Homo sapiens
tgctcagtctcaaatatgtctttatcagcaacgtgaaaacagactatctgattttctgtgggatgtggattatgaccatggacagagcataactgggacagagctggaaaaaatattaattaggtgcttaaaaatatttgttagaactatcttcatgaatgagaatcaatcctgtttccatggtgattcaccaggcatcaattccaagcatscatgaatcagaaaagtcctatcttctcttagttatcatccaggactccaaggaaccataattagccaacctgttcacatttccttttcattcactagcctcgaagtttccaggggacagggactctgtcctattcatttctgtaaccttaccacctgacccagaatagctgttccctgaagatttggtggattataaatgtggatgtcttatttctttgaaagtgtgagcttcaggtactgatcacgttattccaattatcaatttagtatctttcttcaccattaaactgtgaaattcttgagggaagaacctatgactgatttatctctgtaaactcatgccaccagtattcaaaatcacacctagcacatagtaaacactcaatgtttg

SEQ ID NO: 808494 - DNA, 610 bp, Homo sapiens
atcatgattgtttattttctcttctgggctccctacaacattgtccttctcctgaacaccttccaggaattctttggcctgaataattgcagtagctctaacaggttggaccaagctatgcaggtgacagagactcttgggatgacgcactgctgcatcaaccccatcatctatgcctttgtcggggagaagttcagaaactacctcttagtcttcttccaaaagcacattgccaaacgcttctgcaaatgctgttctattttccagcaagaggctcccgagcgagcaagctcagtttacacccgatccactggggagcargaaatatctgtgggcttgtgacacggactcaagtgggctggtgacccagtcagagttgtgcacatggcttagttttcatacacagcctgggctgggggtggggtgggagaggtcttttttaaaaggaagttactgttatagagggtctaagattcatccatttatttggcatctgtttaaagtagattagatcttttaagcccatcaattatagaaagccaaatcaaaatatgttgatgaaaaatagcaacctttttatctccccttcacatgcatcaagttattgaca

SEQ ID NO: 808495 - DNA, 644 bp, Homo sapiens
tctttgtccttttaagtataacacatacctcaggcctcaccagcacataactacaaaaggttgtcccacttcctttctgtggctgagttagtagaacacaggctcccacctgccacatcagcagaaggtcacctcaacatgtgarctacctccccggagaccccccagatccgtaaggatgatgcatccttgatcctaaaaacattttcctgttcctggtgttcagaattggactccacactcactggtctctttataatcttgcttctggccctttgaggcctcaaagctaccagggccttgctgccaggggacaatcaccgctcccggctgagtcctgcagacatagggcctgggctggctgcctcctcctgctggcccagcatcttgcttgcactaaagagagctggaggcttggcactgatgcttgctaaaaacctacccaggccgcccactgctgccgcactgcagggcaccagcccacactcctcccctcctggcatcaggcacacgttcacggcactaaaccttacaggaaagcagtggaaccctgtctttccttcacaggaggcactttccttcctaggcaaaaacgatgatacccatgggcacagcatctcacatagggacacatagagatgtct

SEQ ID NO: 808496 - DNA, 644 bp, Homo sapiens
tctttgtccttttaagtataacacatacctcaggcctcaccagcacataactacaaaaggttgtcccacttcctttctgtggctgagttagtagaacacaggctcccacctgccacatcagcagaaggtcacctcaacatgtgagctacctccccggagaccccccagatccgtaaggatgatgcatccttgatcctaaaaacattttcctgttcctggtgttcagaattggactccacactcactggtctctttataatcttgcttctggccctttgaggcctcaaagytaccagggccttgctgccaggggacaatcaccgctcccggctgagtcctgcagacatagggcctgggctggctgcctcctcctgctggcccagcatcttgcttgcactaaagagagctggaggcttggcactgatgcttgctaaaaacctacccaggccgcccactgctgccgcactgcagggcaccagcccacactcctcccctcctggcatcaggcacacgttcacggcactaaaccttacaggaaagcagtggaaccctgtctttccttcacaggaggcactttccttcctaggcaaaaacgatgatacccatgggcacagcatctcacatagggacacatagagatgtct

SEQ ID NO: 808497 - DNA, 588 bp, Homo sapiens
ttcggtttgcacactgtgccactgtgtgttctgtgaacagggccactgatcagctttaggaatggtggtcccattctggtttgggaactgagaaggtgggcaggaaagataaaaaccagtgggtagaaattgcttgtgtttttcctcacaaatattacttaaaactttcagtccagtattagatggaacctgctttcacacacactcttccatttttaaattccatttgacgtgtccatatttcactgtgttctgtaagaggcatcatgacttctaagtaatctgccatctgcacaaatctgagttgaagaatcggsaggttgagtttttcctcccagtctctgtgcctcccgttgcctcccttgctaatgccagctctgaattggaaagtaggccggtgggaagtggggcatttcttttctattttgaactctgtatatcagtgtggcccaggggggaccagagtctactccccaagacaaggaacagatgagtgccagcctcccaacacccacatctttgggaagccccgtgctgtgttcgtcgtctgacatttggggaaggggtggttactaagagacgtgacac

SEQ ID NO: 808498 - DNA, 581 bp, Homo sapiens
agctccaacaccaggcctcagggcagcgcggcctctgcggttctgactgaggtcttcataagagtgtgggctccatgagaaagggtccattggagtaatcgtcgggctagagatgtctgctcagtgcccaagcaccgccggcacacctgccgtctttctccgtgtgggagacgtgctcctaatgagggcctctgtgcccagccaaatgtcctggtctttggagaggtttcctgcacctctgacaccttctctgtggcagcttcttttgcttcttgtcctctgtgtagccagcggctgcactcggttgcctgtagaaagaacgcagattagggaggctttggtttttgttttcggggtttgttttgcttttagcagctcagcaagaaaagtgggtctttggagggcagttgtgtcagttcagggamattggtcacaggttattagggttgaaaaagaagtctggtattctcacctgttaaattcaaaaagcaaattccattcatgggtaaaattcacctgaaggagttccctgcagacgggctgtcggaggacctttgattctgcttttcttggcgttgcca

SEQ ID NO: 808499 - DNA, 703 bp, Homo sapiens
ggaccaaggtcagcaaggtggttgtggttcggggctcagtccctgtaggggcagatggtccattgtaaggactctggatttttctctgacctaatgagaatcagcagaggagagatagaatctgacaaatgaaataggatgacatgagatcactctgctgctctgtgaggaagagattcttagtggggagggaggcagtgaggagagcagttaggaggccactgcaatcatccaggagagagggggccgagactggtatggaggaccaggaggtggctgtggaggtgaagagaagcagtcagttctggagatgttttgaaaaaggaccagtagttttgctgatagatgtgacatgcrgtatgagagcaagacgggtccaccacagctccaggtttttggcctgagttgctttaaccgagatgagggagatggtgagtaggcagctggatgtataagcctggagttcagggaggtgtcgggctgacatgtaaattggggagccatctgcataggaatggcatgtaaaggtccaagggagtgagaaaggacaagaagaggaccaaagacagagcctggggacagctcaagggttactggtcaaggtgccaagaaggaactagcaaagcaaataaaggaggagcagccagggagataggaggagacccaggagaagaggggatcccaggagccaaggggagagaag

SEQ ID NO: 808500 - DNA, 703 bp, Homo sapiens
ggaccaaggtcagcaaggtggttgtggttcggggctcagtccctgtaggggcagatggtccattgtaaggactctggatttttctctgacctaatgagaatcagcagaggagagatagaatctgacaaatgaaataggatgacatgagatcactctgctgctctgtgaggaagagattcttagtggggagggaggcagtgaggagagcagttaggaggccactgcaatcatccaggagagagggggccgagactggtatggaggaccaggaggtggctgtggaggtgaagagaagcagtcagttctggagatgttttgaaaaaggaccagtagttttgctgatagatgtgacatgcggtatgagagcaagacgggtccaccacagctccaggtttttggcctgagtygctttaaccgagatgagggagatggtgagtaggcagctggatgtataagcctggagttcagggaggtgtcgggctgacatgtaaattggggagccatctgcataggaatggcatgtaaaggtccaagggagtgagaaaggacaagaagaggaccaaagacagagcctggggacagctcaagggttactggtcaaggtgccaagaaggaactagcaaagcaaataaaggaggagcagccagggagataggaggagacccaggagaagaggggatcccaggagccaaggggagagaag

SEQ ID NO: 808501 - DNA, 615 bp, Homo sapiens; identical to SEQ ID NO: 793149

SEQ ID NO: 808502 - DNA, 582 bp, Homo sapiens
aatttgagctagaaagccacttaccagataaggtagagggtggggtgtagggggagggaggggggcatcacacagaactataccgagacaaggcctgaccctctgagggagctgagagggtctcagagatcccttagttaatatctcttattctaagatgtgcagaccaaactcagagaagscaagtggcttgtcctgtgtcacacagtgactcagaagcagggtgaggcccagaacccaatccccgtacttctccttggccataatattccccaaaggtcagctctgcatcctgtccagaccctcccacccctcacttttccacttccctgagattctccagagttagtcctgtggccacagccccacagcatgtcctgaagtctctgagaccttgccccactgggctccctagctcttctccaagtgccatcccttcttccatcacagcaagccctccagggtgagtgccatggggacctgctaggacttgggggcctccttctgagctgggctctgaactcaggctctgtgccttttctcccatctcagggatgccctgcttcacccccagtcaggatc

SEQ ID NO: 808503 - DNA, 680 bp, Homo sapiens
tctttccatttccatcctgcctgtttaataatcagaattccctctgagggcaagtccagcccaaaatggaaacaatggaatatgtgtgttggggagtgggggtgggggtgtctgcagtggaaaaagtgtgggccttacaggaaacagggaagttcctgcatctcagctctgccacctgccagctgtattagttgtttattgctgcstaacaaattgttccaaatttaacagcttcaaacaacacctgtttatcatctcacggcttctgtaggtgagaaatgtggacacagcttagctgggctctctgctcagggtctcacgaggctgaaatcgaggtgccttcgaagccctgttctcatttgtaggctcaaatagggaaagatctgcttccaatttcattcaggttgttgacagaattcatttccttgtgattgtaaaatgcatggcagcttgcttcaaagccagtgttgaagaaagtctctatagcgctccgtgtctgaccttctttaaaaggactcacctgattagctctgacccacccagtataacctcccctttgattgatttaaagtccactcattaagagctttgattacatctgcaaaatcccttcaccttgaccacattcaatcagtaaaggaagttatacatcctgtcaacactcaaggaaaaggaattat

SEQ ID NO: 808504 - DNA, 541 bp, Homo sapiens
cttcactgtcctggaaagagcggtgattcaagggaaggtaaaggtcaatcaggaaaaaatttcctttctgaaggcaggagttctctaagctgggggcacaggacttcagataagagaggaggtctgcccaactggggcatcttggaaggcttcctggaggaggtgtgactggagccagaccaagggaaggtgggctaggccatgggctcgtgaacagggaagtgggtggagagagaggtcagtgaggaagataataccacacagagcacacagcatcaggaaaggrtgagccacgtttgaagaacagtgagtgttctggatggctggcagctcagacaggtgggcaggaaagagtagagatggcaagagacaggttagcaagggcctggaggactgggctggaggttggacttgaggctactgagtagtgtccagtgctgagatatcagtcacatttttggaaaagggaaatgactcaaagttaagccaccatttattgagcttatacgatatactaggcaccagccgagcacattgtatg

SEQ ID NO: 808505 - DNA, 621 bp, Homo sapiens
ccaaacctgccaagggtgggccaggcatggagcagtgaggggtgtatgagccagcaggcatggggtctggccactgtgcacagtcacgcatggtggctgctgcagtgggcaggcagctccaggtgctggcataggcgccgactctatgtgaggctgcagctggaccaggcacaccgcaagcagcttccctgtctggtatcaggaaatgcagtggtgcccagaagctcagagacaccaggaaccacagagcctcaaagagggagccacagccctggctcagggagctcccagctctggggtccccagagggccacagcacttctctccctctcttcacctgaaatgtggtgagcaakggggtatgtttcggtgctgtttgtattacagctcttctagccttgccatttggcagcccctgagttcttgtcctgctatccggaagaatgaggtatgcagacaagtggaggatgagcaagatgaagaggagatttatttagaagtaaaacagctcagagacccactgtgggtagctcctttctgcagttagggtgtcctgatgagtgttcagccctcagtagagaggaggaggtcctggggtgggtggcttctctctgcaggcag

SEQ ID NO: 808506 - DNA, 602 bp, Homo sapiens
gcataggatcctgtaacagaaaaaggaaataggtaaaaaccaaaggaagctgaataaagtatgaacttctgttgataataacatgcatatattgactcattactttttaataaatataccctaacagtattagatgttagtaataggggaaatcaggtgcaaactatatggtgattctttgtattatcctcttgatttttggtaaatctaaagctgctctaaatcataagatctgttttataaaaggaaaaatacaacaaaaactttatattttcaacactctgaaaacaactgtgtttgacatttcagcttcattgctttgagcattctttctttttggctcttttgacacagttattattgatctgtatgtataattaaacatgctggtgtgttttttttgtttttgcatttttaactcaacattatggcattaggcaatcgccatgttgycatgagtgtaatcactgtttttattcactgtggaacactctgccaagtggatgaggctgagtttaattaaatgaatcccttctgttgggttgatttggttgttctcaaatgtttgctgttacaagtaaccctagagcccaaagcttctg

SEQ ID NO: 808507 - DNA, 608 bp, Homo sapiens
atcagttctaaggggcaattggggcagtgctataatgagtggtagaaatgaaactcaaacccagatctatctgatcccaatgcccatgctctaaggtcaaaagagctacaaaacagtgtttccaaaactctcaacactgcatagaatttaccccagctacatattctgtactctgtcatataccactcagtatgtcatgacattcacttttttttttttttttttgagacggcgtctcgctctgtcacccargctggagtgcagtggcgtgatcttggctcactgcaagctctgcctcctgaattcacgccattctcctgcctcagcctcccaagtagctgggactacaggcgcccaccaccacaccagcctaattttttgtacttttagtagagacgggtttcaccacgttagccagggtggtctcgatctcctgacctcatgacccacccacctcggcctcccaaagtgctgggattacaggcgtgagccactgcgcttggccgacattgactttttttactcaaactccctaacggaaatgtcccatgacatccacagacaataaatgactcttacttggcataattagaaaatagccatgaaaa

SEQ ID NO: 808508 - DNA, 641 bp, Homo sapiens
gaaggagcctgcagctctaattcaatcaggtggtcagtgatgtagtcaatcatgcctatgtaaagagatctcaataaaaactctgaacactgtggctcaaaggggctccctgattggtgaacatattgctatatcaggaagtagacacactctgacttcacagagacagaagtttcagcactcaggactcttccaaatcttgccaccctatatatctcttcatctgactgtttatttgggtcctttrtattaaaatgataatcataactatgtcactttcctgaattctgggagccattctagcaagtgatcgaatgtgagtgggttgtgggaagccctaaaagtgtggtcagctgagcagaaggtcaggtagtctggagacaccatgtgtggttggtatgtgaactaagtgtagtctcgttgcagaccctaacctttaacttgtgggatctgatgctaactttgggtagttacaattgtattgaattgaactgtaggatatcaagttggtgtcatagagttgattgcagaatgcaaactcaaacaaaggaaccttgcgaagttgttggcataatcacacagggagttattttaagtgaatttcacacaaaatattctgacttgtattccaagtggcataa

SEQ ID NO: 808509 - DNA, 641 bp, Homo sapiens
gaaggagcctgcagctctaattcaatcaggtggtcagtgatgtagtcaatcatgcctatgtaaagagatctcaataaaaactctgaacactgtggctcaaaggggctccctgattggtgaacatattgctatatcaggaagtagacacactctgacttcacagagacagaagtttcagcactcaggactcttccaaatcttgccaccctatatatctcttcatctgactgtttatttgggtcctttatattaaaatgataatcataactatgtcactttcctgaattctgggagccattctagcaagtgatcgaatgtgagtgggttgtgggaagccctaaaagtgtggtcagctgagcagaaggtcaggtagtctggagacaccatgtgtggttggtatstgaactaagtgtagtctcgttgcagaccctaacctttaacttgtgggatctgatgctaactttgggtagttacaattgtattgaattgaactgtaggatatcaagttggtgtcatagagttgattgcagaatgcaaactcaaacaaaggaaccttgcgaagttgttggcataatcacacagggagttattttaagtgaatttcacacaaaatattctgacttgtattccaagtggcataa

SEQ ID NO: 808510 - DNA, 626 bp, Homo sapiens
aaacaagacccagagtcttataacgcagtattcaaaatgtccagaatagaattcaaaattacttgatacatgaagagccaataaaatttcaatagcttgcaagtgaagaggcaattaacagatgctaaccctcaataacacagatgctgaatgtcagaattatcaaatactttaaagcaactatttatctatgctscaagaagtaagcagggacatacttaaacagaaagtctcagtaggaaaataaataatctaaacaaagaaaccagtggaaatttaagaactgaaaaatctaccaccaaaaacaaaaaattcactagaaggactcaatagtagaacgaatgtaacaaagaaaaagtcagtgaacttgaagaaagaccaatagaaatggtccaacgtgaacaaaaaggagaaaaactattgattaaaagaatgaatagactcagagtcaatcagacaaccccaaaaggtctaatgtttatttcatcagattctcagaaggagaggagaaagtgtggtgcagaaatatttttgaagaaataatgactgaaaacttcacaatttggcaagtttttatagttaagaaatttcagctcctccaaacatggatccctaaacctgtacaa

SEQ ID NO: 808511 - DNA, 626 bp, Homo sapiens
aaacaagacccagagtcttataacgcagtattcaaaatgtccagaatagaattcaaaattacttgatacatgaagagccaataaaatttcaatagcttgcaagtgaagaggcaattaacagatgctaaccctcaataacacagatgctgaatgtcagaattatcaaatactttaaagcaactatttatctatgctgcaagaagtaagcagggacatacttaaacagaaagtctcagtaggaaaataaataatctaaacaaagaaaccagtggaaatttaagaactgaaaaatctaccaccaaaaacaaaaaattcactagaaggactcaatagtagaackaatgtaacaaagaaaaagtcagtgaacttgaagaaagaccaatagaaatggtccaacgtgaacaaaaaggagaaaaactattgattaaaagaatgaatagactcagagtcaatcagacaaccccaaaaggtctaatgtttatttcatcagattctcagaaggagaggagaaagtgtggtgcagaaatatttttgaagaaataatgactgaaaacttcacaatttggcaagtttttatagttaagaaatttcagctcctccaaacatggatccctaaacctgtacaa

SEQ ID NO: 808512 - DNA, 645 bp, Homo sapiens
cccccagtacttcagtagtgaccttggaggatgtgggaaggtgataagaacaggttctgatgatagcagcccgggagggatgcttctgattgagccacagttgtggatgaaactgtgaggggaactcatctcactttttagataaccattgagatccaacgtgataccttttagggcacattcctgaagatggaaccccagcagtagtccaatatggtcctcatgtatctcaaagaagaacacataggccattgcaataccctgaccttgtatcagaggcgtttaaaccagagggactccatcttgagtaggggctgggtaaaataaggctgaggcttaatcggctgcattcccaggaggttaagaattctaagtcacaggatgagataggaggttggcacargatacaggtcacaaagacctggccgataaaccagcatgcagtaaagaagccaaccaaatcccaacaaaaccaagatggcgataaaagtgacctctgatcatcctcactgctcattatacactaattataacgcattagcatgctaaaagacactcctaccagcgccatgacagtttacaaatgccatagcaacatcaggaagttaccctatatggtctaaaaaggggaggaaccctcagttc

SEQ ID NO: 808513 - DNA, 645 bp, Homo sapiens
cccccagtacttcagtagtgaccttggaggatgtgggaaggtgataagaacaggttctgatgatagcagcccgggagggatgcttctgattgagccacagttgtggatgaaactgtgaggggaactcatctcactttttagataaccattgagatccaacgtgataccttttagggcacattcctgaagatggaaccccagcagtagtccaatatggtcctcatgtatctcaaagaagaacacataggccattgcaataccctgaccttgtatcagaggcgtttaaaccagagggactccatcttgagtaggggctgggtaaaataaggctgaggcttaatcggctgcattcccaggaggttaagaattctaagtcacaggatgagataggaggttggcacaagatacaggtcacaaagacctggccgataaaccagcatgcagtaaagaagccaaccaaatcccamcaaaaccaagatggcgataaaagtgacctctgatcatcctcactgctcattatacactaattataacgcattagcatgctaaaagacactcctaccagcgccatgacagtttacaaatgccatagcaacatcaggaagttaccctatatggtctaaaaaggggaggaaccctcagttc

SEQ ID NO: 808514 - DNA, 619 bp, Homo sapiens
aagcttctcaggatccaccagacatccaaaggacggcaatgtttctaacatctctatagttcatcactcaattttcagaccatttatgacagatccctgtaacatcttcccttggaattacacaaggcataggaattgctcagatttcctgatttgtattctgagcactgccctatatgagattagaaaaaaacattcacaaagtgaacctgtatcttctccctttacatggaaataaatgaaaatctctgtgctagaaagatttttctctctcctcttcctggggaatttgactgtatctgcagcactcatttcattacatactttgcaagtgtctcatagtkataatcactcagggcacctcaggttaacacactactggtttttctctttttccaagtcttccagctacctgtgctaggaggattctacccttgtcatgaactctttggctgcaacctaatttttccatcttataatggacgaagaactatcctctatgaatgctcctgcctaaaatgtgtaataaaaacacatgtcatatgtgtcaattgcatacaagagaagaatttgcacttgtttttagtagaagtttcagtggaagggaaaatgaagcaca

SEQ ID NO: 808515 - DNA, 605 bp, Homo sapiens
tatcgcccaggctggagtgcagtgcagtggtgtgatcttggctcactgcaacctccgcctcctgggttcaaatgattctcctgcctcagcctcccaagtagctgggattacaggcatgcaccaccacgtctggctaatttttttgtatttttagtagagatgaggtttcaccatgttggtcaggctggtcttgaactcctgaccttgtgatccgcctgctttggcctcgcaaagtgctgggattataggcctgagccaccgtgcccggccattttttattttttkttttttttgttttttttttttttttgagaaagggtctccctgttgtttaggctggagggcagttgtgtaatcatggctcactgcagcctcaacctcatggactcaggcagtcctcccaactcagcttcccaaagtgctgagattacaggcatgagccatcacacctggcctgattttttgttttttttagagacagggtcttgctcttaaacacaggctagagtgcagtggtggaatcatagcttactgtaacctcacactcctgggctcaggtgatcctctcacttcagcctcccaagtagctaggaatacaggcatgc

SEQ ID NO: 808516 - DNA, 650 bp, Homo sapiens
acattcggccaattttttttttttttttttttttttttttttttttttttttgagacagagtctcactctgtcacccaggctagagtgcagtggcatgatcttggctcactgcaacctccacctcccaggttcaagcgattcttatccctcagcctcttgagtagctgggactacaggcatatgccaccatgcccagataatttttgtatttttagtagaggcggggtttcaccatattggccaagctggtctagaactcctgacatcatgatccgcacacctcggcctcccaatgtgctgagattacagrcatgagccaccgttcccagcccaatttttgcatttttagtagagacaggggttcaccatgttggccaggctagtcttgaactcctgacctcaggtgatctgcctacctcagcctcccagtgtgagccaccgcacccagcctggattgttgaattcaatgcttgggtcacctccagattcattttcacagtctttcatgttttggtcatattacattgtattttgctgccatatgactgatctttttttgttaaatgtgagatacttgttaaaaaatatttagcaatgaattgaggcctagtagcatgttatcttgctgcagaagagatgggagtctact

SEQ ID NO: 808517 - DNA, 659 bp, Homo sapiens
ggatccaaaaagtactttgggatttttcaaaacctggaccatggacagaaatctgattttttaatgtcaaggggctgacttagggcatatcgttttactctcttggagacaagagttgctgcttttgaatgagtcccaaaggaggctggtttcatcagtcattttccatgaaaatggaataaattcatatcataatatttttaaaattctagttatttattctttaattaaaaagacatttatacaacaatgactaaaaggaattatgtcaaattgttaactggggttatcttttagtcataatttttacagtcctttttacatttttgttctttaagtatttgtgcaataagcagttatttactgttataaactttctataaacatcaggggtttttttgttttaaattccagttctttgaactttctgtatcagatttatttattcaacatatatttttgaagcacctactatgtgctgtatccaagttarcaaacaacagtctaaaagctatgactgctttgtataaataaagttttattggaacacagccatatcactttatgtattatctgtgactggttttgcactaccaagggcagagttgagtagctgcaacagagaccaaatggcccataaaaccagaaatatttactct

SEQ ID NO: 808518 - DNA, 746 bp, Homo sapiens
aaggcccacgtgtcatgggagggatccagtgggaggtaattgaatcacggggcagttacccccatgctgctgttctcatggtagtgagtgaattctcccgagatctggtggttttataagaggctttcccccttttgctcagcrcttctccttgctgccaccacgtgaagaaggatatgtttgtctcccattccaccatgattataagtttcctgtggcctccccagccatgctgaactgtgaatcaattaaacctctttcctttacaaattacccagtctcgggtatgtctttattggcagcgtgagaacggactaatggaactttaaaacctaaattggaatatttcagttccccgtttatgactctgtaaaggggactcatcaaatttagaatagaattcagatcccaagccacaatctactgctttccgcatgatctagcccctgcctatcctccaaatctattatccaccactgtccccataagttgcccaaagttacaaagcaactaggtagatacatctggaattggaacccaggtctgattccaaagcccatgtttttccatgtggatattaatctctgagtacctgtgatgggcaagtctctgcaaattgttttaccacgtttcacttagagtactctggccacactggtgtttattctggctccagcacacaccaatggtgttcctgcctgaagtactttacacttatggtcctctctgcctggaagactcttttc

SEQ ID NO: 808519 - DNA, 631 bp, Homo sapiens
gaattaaacaagacccagagtcttataacgcagtattcaaaatgtccagaatagaattcaaaattacttgatacatgaagagccaataaaatttcaatagcttgcaagtgaagaggcaattaacagatgctaaccctcaataacacagatgctgaatgtcagaattatcaaatactttaaagcaactatttatctatgctscaagaagtaagcagggacatacttaaacagaaagtctcagtaggaaaataaataatctaaacaaagaaaccagtggaaatttaagaactgaaaaatctaccaccaaaaacaaaaaattcactagaaggactcaatagtagaacgaatgtaacaaagaaaaagtcagtgaacttgaagaaagaccaatagaaatggtccaacgtgaacaaaaaggagaaaaactattgattaaaagaatgaatagactcagagtcaatcagacaaccccaaaaggtctaatgtttatttcatcagattctcagaaggagaggagaaagtgtggtgcagaaatatttttgaagaaataatgactgaaaacttcacaatttggcaagtttttatagttaagaaatttcagctcctccaaacatggatccctaaacctgtacaa

SEQ ID NO: 808520 - DNA, 631 bp, Homo sapiens
gaattaaacaagacccagagtcttataacgcagtattcaaaatgtccagaatagaattcaaaattacttgatacatgaagagccaataaaatttcaatagcttgcaagtgaagaggcaattaacagatgctaaccctcaataacacagatgctgaatgtcagaattatcaaatactttaaagcaactatttatctatgctgcaagaagtaagcagggacatacttaaacagaaagtctcagtaggaaaataaataatctaaacaaagaaaccagtggaaatttaagaactgaaaaatctaccaccaaaaacaaaaaattcactagaaggactcaatagtagaackaatgtaacaaagaaaaagtcagtgaacttgaagaaagaccaatagaaatggtccaacgtgaacaaaaaggagaaaaactattgattaaaagaatgaatagactcagagtcaatcagacaaccccaaaaggtctaatgtttatttcatcagattctcagaaggagaggagaaagtgtggtgcagaaatatttttgaagaaataatgactgaaaacttcacaatttggcaagtttttatagttaagaaatttcagctcctccaaacatggatccctaaacctgtacaa

SEQ ID NO: 808521 - DNA, 604 bp, Homo sapiens
gactcaggaatggaaaaccaaattccatatgttctcattcataagtggaagctaagctgtagggtacatggaggcatacagagtaatataatggacattggagactcagaaatggggagggtggaaaagggatgagggatcaaaaaccatatttgggtacaatgtagactacktgggtgatgagtacactaaaatctcagacttcaccactatacaattcatccatgtaaccagaaaccgcttgtacccctaaagctattgaaattttttaaaaaatggacattgagcttatactgagtggtcttaggagtgattttttaaaagcttgtgcaaaataacccccagtacttcagtagtgaccttggaggatgtgggaaggtgataagaacaggttctgatgatagcagcccgggagggatgcttctgattgagccacagttgtggatgaaactgtgaggggaactcatctcactttttagataaccattgagatccaacgtgataccttttagggcacattcctgaagatggaaccccagcagtagtccaatatggtcctcatgtatctcaaagaagaacacataggccattgcaataccctgac

SEQ ID NO: 808522 - DNA, 604 bp, Homo sapiens
gactcaggaatggaaaaccaaattccatatgttctcattcataagtggaagctaagctgtagggtacatggaggcatacagagtaatataatggacattggagactcagaaatggggagggtggaaaagggatgagggatcaaaaaccatatttgggtacaatgtagactacttgggtgatgrgtacactaaaatctcagacttcaccactatacaattcatccatgtaaccagaaaccgcttgtacccctaaagctattgaaattttttaaaaaatggacattgagcttatactgagtggtcttaggagtgattttttaaaagcttgtgcaaaataacccccagtacttcagtagtgaccttggaggatgtgggaaggtgataagaacaggttctgatgatagcagcccgggagggatgcttctgattgagccacagttgtggatgaaactgtgaggggaactcatctcactttttagataaccattgagatccaacgtgataccttttagggcacattcctgaagatggaaccccagcagtagtccaatatggtcctcatgtatctcaaagaagaacacataggccattgcaataccctgac

SEQ ID NO: 808523 - DNA, 640 bp, Homo sapiens
agcttctcaggatccaccagacatccaaaggacggcaatgtttctaacatctctatagttcatcactcaattttcagaccatttatgacagatccctgtaacatcttcccttggaattacacaaggcataggaattgctcagatttcctgatttgtattctgagcactgccctatatgagattagaaaaaaacattcacaaagtgaacctgtatcttctccctttacatggaaataaatgaaaatctctgtgctagaaagatttttctctctcctcttcctggggaatttgactgtatctgcagcactcatttcattacatactttgcaagtgtctcatagtkataatcactcagggcacctcaggttaacacactactggtttttctctttttccaagtcttccagctacctgtgctaggaggattctacccttgtcatgaactctttggctgcaacctaatttttccatcttataatggacgaagaactatcctctatgaatgctcctgcctaaaatgtgtaataaaaacacatgtcatatgtgtcaattgcatacaagagaagaatttgcacttgtttttagtagaagtttcagtggaagggaaaatgaagcacagagcaaagaagccaccatataa

SEQ ID NO: 808524 - DNA, 553 bp, Homo sapiens
actgagttccagacttcagtccttatgaacatgcatttctcagtgcatgtgtaccactgaggtgttgtcagtgacatttaccctagtataaataagtaaaagtccaatctttttaaagaaaaacaaaaatgagttccaacatgtggtacaggagaactgagggtggcaataaggacaactcccacacacaacttcccagagacactgaatgaatagctttatagtggggcaggacgaaaaatgcagccattgaaaactggtcttgatatcaaccaaaaaatctctaactaatagaaactggtaccaggagtggggtttaattttgactccagtctttgtaccagggctgccacctaatagaacatgaaagtmatgcttaactatttcctcgccttcactcctcctgtccaattagctcccatgttatcaattctacttttcacatatttttcaaattgtcctccactctcaattatcccctttacttaattcagactcgttgactcctgtctggcacctctctcatttcctctgaccatcttccctatgggag

SEQ ID NO: 808525 - DNA, 641 bp, Homo sapiens
caatagttagtagcagttactctttattccaatattataataatcctcgctctacaatcataacctaggaaaaaccaggccacacagagataggagctgaagggacatagtgagaactgaccagaagacaagagtgcgagccttctgttatgcctggacagggccaccagagggctccttggtctagcggtaacgccagcatctgggaagacacctgttgccaagcgaaccgtggtctagcggtagcatcagtgtcaaggaaaaacacccgctacttagcagactgggaaagggagtctccctttccccgggggagtttacagaagactgtactactccacctcttgtggagagcctgacatcagtcaggcccgcccgcagttatccagaagcctaaccatctgcctgtgatgctgtgcttcagtggtcacgctgctagtcygccttcatgttccatcctgtacacctggctctgccttttagatagcagtagcaaattagtgaaagtactaaaagtctctgataagcagaaataatggtgtaagctgtccctctctcctctctctctctgcctcggctgctaggtaaggaagggtccccatccagtggacacgtgactcacgtgaccttacctatcattg

SEQ ID NO: 808526 - DNA, 523 bp, Homo sapiens
tctcaattataagtgaacagaaaacctatagaatgagcgaaaattttgcaaactatgcatctgacaaaggtctaatatctagcatctataaggaagctaaacaaacttacaaaaaaaaaggagtaaaagataagattcttgcttgtgtcctttgcctgctttttaatggggaaaggaattccaggctaggcgcagtggctcmcgatctctccagtcttaactcttaactcctttgctccatcctaacaagttttctttcagttctccaaataaaacaaattcctttctgccgcagggcctttgcatgtgttgctcttatcacctagaactctcctacaaatccccaaccccaatactcttcatagaactgaatcctcatttctctgtctcggtttggttgacctgaccccactattagaaatttggtgcttcccttttttattctttaccatggcacaccatttccctcagaatactcctcacatttgtaaccatgtaaaatcatttgttttgttcacaactg

SEQ ID NO: 808527 - DNA, 614 bp, Homo sapiens
caagactaaattgttatgtttcttctaggggattagaaagacattaagataaggtacagtctagaaagggtgaattaattccttgctcgatgtcaaggaaggtctcatggagttggtttgttgagctgtttctttgtaagcctaaacactttcagcaacaatggcaaggtcagtctaggaacatttttaacacctctgataagttactataataaaamtggtgctcaggaggtggagaaaaagggtttgtcatggagattgggcatcgtctgtgactctttcttcatttatacgtgataaaaattacagccttagaaatgtttaaaatcatcatctactttcttcactgcaaaagtcctgtgaggagtatttcctggggcaggcctgtgggtcagtgctgggggaagtgtcatccaagcaatgtgcttctctgttaatgggtacatttggcaaaatcaccaccagagccagactgtgctgctccactcctctggcagcattcatgagcttctcgtctctatggctcacctgacacacctcatcagtcagtgaacaaaccattctatttccatccacacaaccacactggttggggctctgaacatcaagacaga

SEQ ID NO: 808528 - DNA, 614 bp, Homo sapiens
caagactaaattgttatgtttcttctaggggattagaaagacattaagataaggtacagtctagaaagggtgaattaattccttgctcgatgtcaaggaaggtctcatggagttggtttgttgagctgtttctttgtaagcctaaacactttcagcaacaatggcaaggtcagtctaggaacatttttaacacctctgataagttactataataaaaatggtgctcaggaggtggagaaaaagggtttgtcatggagattgggcatcgtctgtgactctttcttcatttatacgtgataaaaattacagccttagaaatgtttaaaatcatcatctactttcttcactgcaaaagtcctgtgaggagtatttcctggggcaggcctgtgggtcagtgctgggggaagtgtcatccaagcaatgtgcttctctgytaatgggtacatttggcaaaatcaccaccagagccagactgtgctgctccactcctctggcagcattcatgagcttctcgtctctatggctcacctgacacacctcatcagtcagtgaacaaaccattctatttccatccacacaaccacactggttggggctctgaacatcaagacaga

SEQ ID NO: 808529 - DNA, 630 bp, Homo sapiens
atgggatctatgcagtgtgggggagagtcaattttcctctcatcatggcatctctcagcaggtaaatattgattacattctcctagtgcctcaagccattatttctgatacaactgcttgcttccagatatgaatttccccccctcgtctccatggggatatcagacagaatgagggggaaattttccctaaagaagtttggcagaaaaacaccttctaattatgagcatttaattcacatccccaatactgatatcctttggaaataacagcaagtatccaccttgaagataattcttcactcaataccacctgctgttcaggaaaacagagtaccagccctgacccagaaggtagagaaaagtccagaaacccgttgactgttgaaaaacatgcctgaggtctggtgctatcggtttttatatgaattattgatgcaactttgggatcttttgggtagtgaaggtatcaggtgtgagaagrtggcaggcatgttatagtggaattgacaagagctggtgattaaacctgtaaccccatgcatggtgctaacactattttgctgatatcctagaaggtgctcactgtcaaatcctgtcttgagcagaaatgcatcccaggcaaggttta

SEQ ID NO: 808530 - DNA, 526 bp, Homo sapiens
agacaacatggcgccgcccaagtggaaagtccatttgcataataagattacggtggggtggccagccttccccaagcgctatgtaaatttcacacctgatccaaccaatctgtgggccctacgtaaatcagacaccacttcctcaagcgtgtctataaaatccagtgaacaccacagcggttttctctttccagcacccctctctcgcgcgagagagagagctgttctcctttccgtttcttttgcctattaaccttccactcctaaactcactccttgtgtgtgtgtctgtatgtttaattttggcgtgagacgactaaccttgggtattaccccagrcagtgatgctgcttcacaatgatcctgtttccaaatcgagcctcatttgaaggtattggaagtcaggatttcaacatacgaattcattgcagggttttggaggaaaggggcacataattcaatctatagtagtgagcaattactttttctccctatgtctcatcgtattcatctgtcaagtaggatt

SEQ ID NO: 808531 - DNA, 560 bp, Homo sapiens
atggaagccactgacaaaaagtcaaaagagcaggaaactctgacatggagtcaaagatcaaggctggaatttccagaaccatgacaggagtacagaacagtggtcatgagctaatcagtcagcctttcttgcagctgttgccatgttatatgtgtgtgtttgttgcagataaagtaaatattaataagtttatatgcatagtatgctttatagaaatcatatgattgctcttccaaaaaaaataacaagttttttaagcaaaataagtcctttaactggcagtttccacatatgactctgggaagtgatgttaattttattaggagatctgaatgtgaggttattcgtatattacccaataatatttgtcagcatttttcagtgtttgaatatttkttataaaacataattcttggtaaaaaaaaatagtaaactgaaaattcctttttattacatcattttaatgtccataataataagatatgaagaatggtggaagtatttaaagaataacatatgacttagaataatttgtgaaatttccaagaattccagtatct

SEQ ID NO: 808532 - DNA, 631 bp, Homo sapiens
agatcacaaggtcaggagttcaagaccccaacatggtgaaaccccatctctactaaaaatacaaaaattaaccggtgtgatggtgctcacctgtaatcccaaatactcgggaggctgaggcaggagaatcgcttgaacccaggaggtggaggttgcagtgagccgagatcgcactattacacttcagccagggcaacagagagagactccgtctcaaaaaaaaaaaaaaaatctaaataaagggctgagggccaaagactgatccatagggaacttttaccaacagacagtggaagaaagaaaaatagtcttgtgtaagaatggatggagagttaaaggaaaattgaggccaaagagtgcaacctcccaaagggagaaggaagagaactagcctttactgagcatgaggtctcagtattaattttttaattgayttgatatttagcaaccatgctgaattctcttaattctaataatctattgatattatcttgccaaagaagtaacagttttctcacctctcttctaacctttgtatcttttatttttcttatcttgtgactgagccctataatactacgttgcacagcaatgatgatagtggacatccttgtcttgtataaggctgtaa

SEQ ID NO: 808533 - DNA, 597 bp, Homo sapiens
caacccgttctgagtcattttcctcttcctcgtatttctttagcatccaaggggcatagctgtgtctctttctcttttctccttttcctctgtctcttctcacctttaatttccaaataggtaactcaggtattagtgtccctgatggtttgccaacccgtgtgacatctcttgtccatgtatccacagttgctggaagtgcaggtgcgggaatctctggcaaagtccagccaggtggccattgaggytctgtcggccatgcctacagttcgaagctttgccaacgaggagggcgaagcccagaagtttagggaaaagctgcaagaaataaagacactcaaccagaaggaggctgtggcctatgcagtcaactcctggaccactagtgtgagcacctgaagatgaatacccattcccttgtccttaagatgccgtgactccattcccattcctatgaccctgctcccactccttctttactgggaaatggttggttcagtattttcgtcctagcaacctgaggctcaatgactctactcagtgtccctagccccctccctctctttaaagatgctaggtggcttcctttcagtatgg

SEQ ID NO: 808534 - DNA, 597 bp, Homo sapiens
caacccgttctgagtcattttcctcttcctcgtatttctttagcatccaaggggcatagctgtgtctctttctcttttctccttttcctctgtctcttctcacctttaatttccaaataggtaactcaggtattagtgtccctgatggtttgccaacccgtgtgacatctcttgtccatgtatccacagttgctggaagtgcaggtgcgggaatctctggcaaagtccagccaggtggccattgaggctctgtcggccatgcctacagttcgaagctttgccaacgaggagggcgaagcccagaagtttagggaaaagctgcaagaaataaagacactcaaccagaaggaggctgtggcctatgcagtcaactcctggaccactagtgtgagcacctgaagatgaatacccattcccttgtccttaagatgccgtgactccattcccattccyatgaccctgctcccactccttctttactgggaaatggttggttcagtattttcgtcctagcaacctgaggctcaatgactctactcagtgtccctagccccctccctctctttaaagatgctaggtggcttcctttcagtatgg

SEQ ID NO: 808535 - DNA, 630 bp, Homo sapiens
tgttttgtactgtggtttcttatgtttccggcacaccaaacggcccactgccttttgcagcgcacttttcagctgcggatgtctcctcttttatcatcctcaatgttttaccccctaactgcatcaccttttcccttaagctttttaattcctatgaggccccttccacttcccctatccccttaggcccacccccaagaatgtgcaagaccccagccacagggcccatcagggcactagcggccgcagctcagagccgtggcctctccgaagtggcagatggggcgggcgcggccagagcaagtgccaggcgggaacagagggactgggcgcgcctcacaactcaccacctcgcccgctggtccttcctggctcgcctggctctgaagctgcacctggaggggaaacctcaraacagtaggcgggattgcctagtaaatatctcccattcagggaggcccaggtcgtgtgacgtcgacagttgctgggtagatgaggccaacacaggttgcaagaagaggcggggtttagaggcgtgaaactccgcagtgctcagccaagcagggagcaacgctaggaagggcgggcagaaagggcacgctcttgtgggtgactacaggttaggagacc

SEQ ID NO: 808536 - DNA, 613 bp, Homo sapiens
taaagggcccaccttttgatactatcacattggtgattaaattgcaacacttgaattttgagtgacattcagaccacagcattttggagaaaatgtcccctttcttctcttttttctcttcagtttctcctttctacagataccttgcacttcacttgcaaccttgttgaagtctctcctgtcttaaaagtttcttttcccaaaacaccagaactcattccttctgtctaactgtaactttgtacttgttaccaacctctacccatttctacccctgactccccagcctctggtaactmctaacgtactctttacttcgatgaggtcaacttttttagattccacatatgagtgaaatcacgtaatatagtccttctgttcttggcttatttcacttaacatagagccctccaggttcacccatgttgttgaaaatgacaggatttcatgcttttttatggcggaatagtattccatcatgtatatatatcacatactaattaccctgatttgatcaatacacaatgtataggtgtgttggaacatcatgctgtaccccataaatatgtacaattattacgtgtcaatttaaaaaacccaagaaaagtatttt

SEQ ID NO: 808537 - DNA, 644 bp, Homo sapiens
ctccccaaagttcttgttaacttctgagtatgacttagcttccttattctttgaaatatttgaaacccctaacttcctctcctctgtggtgtaactcacatggcttcttgataccaggaggcactgtctgcatacaacctcatattatgaggatgaaatgcccatgaatcctaccaatctgaggaacaacgcrtttgtcttctctgacaaaatacgggtgccacatattctgtaggaaaaggtggtgttgaggtcagaacttctctgtttctctgtctctctctctctggttctggaaatgttgagaatatgagtgaagggaaaaagatgggcaccacgtggaggcaatttcatggtggcatgaaacaattttgggggcatgaatgccatgggcagaacatcagggccccaaaagggaaatacacagtactttctttggacttcagtgctctcttttatagtaatggaaaccacaagcgcagaggaaggggagctgattctataaaaagaagtttatttcctactttaaaagatgattttttgactatcttcccacaatagagccagaggatcacaggggaaagctacgatcctcaattatagaaaatgatgttgggtgcatctagcatcacagaagctttaga

SEQ ID NO: 808538 - DNA, 644 bp, Homo sapiens
ctccccaaagttcttgttaacttctgagtatgacttagcttccttattctttgaaatatttgaaacccctaacttcctctcctctgtggtgtaactcacatggcttcttgataccaggaggcactgtctgcatacaacctcatattatgaggatgaaatgcccatgaatcctaccaatctgaggaacaacgcatttgtcttctctgacaaaatacgggtgccacatattctgtaggaaaaggtggtgttgaggtcagaacttctctgtttctcygtctctctctctctggttctggaaatgttgagaatatgagtgaagggaaaaagatgggcaccacgtggaggcaatttcatggtggcatgaaacaattttgggggcatgaatgccatgggcagaacatcagggccccaaaagggaaatacacagtactttctttggacttcagtgctctcttttatagtaatggaaaccacaagcgcagaggaaggggagctgattctataaaaagaagtttatttcctactttaaaagatgattttttgactatcttcccacaatagagccagaggatcacaggggaaagctacgatcctcaattatagaaaatgatgttgggtgcatctagcatcacagaagctttaga

SEQ ID NO: 808539 - DNA, 644 bp, Homo sapiens
ctccccaaagttcttgttaacttctgagtatgacttagcttccttattctttgaaatatttgaaacccctaacttcctctcctctgtggtgtaactcacatggcttcttgataccaggaggcactgtctgcatacaacctcatattatgaggatgaaatgcccatgaatcctaccaatctgaggaacaacgcatttgtcttctctgacaaaatacgggtgccacatattctgtaggaaaaggtggtgttgaggtcagaacttctctgtttctctgtctctctctctctggttctggaaatgttgagaatatgagtgaagggaaaaagatgggcaccacgtggaggcaatttcatggtggcatgaaacaattttgggggcatgaatgccatgggcagracatcagggccccaaaagggaaatacacagtactttctttggacttcagtgctctcttttatagtaatggaaaccacaagcgcagaggaaggggagctgattctataaaaagaagtttatttcctactttaaaagatgattttttgactatcttcccacaatagagccagaggatcacaggggaaagctacgatcctcaattatagaaaatgatgttgggtgcatctagcatcacagaagctttaga

SEQ ID NO: 808540 - DNA, 673 bp, Homo sapiens
gcagaacatcagggccccaaaagggaaatacacagtactttctttggacttcagtgctctcttttatagtaatggaaaccacaagcgcagaggaaggggagctgattctataaaaagaagtttatttcctactttaaaagatgattttttgactatcttcccacaatagagccagaggatcacaggggaaagctacgatcctcaattatagaaaatgatgttgggtgcatctagcatcacagaagctttagaggacacagtcatctcaggtacctacagatraggaagaagtaccaatgagagtacctactcgtattcttattcatggaagcgaatcccttcaggaaccaaatcatttagctgctggtagatgtttcttttggctcctctctctcctgagctctcaaacacagacttttttttctgtgtgcctctgcttttggcaactctgttccaagaataagaatatttgtttgtagatgagcttgctaggtcggggatctcttgtatagggagatggtgaatcactgagcaggacacagaggcatgagttgaaacagtgagatgtaccttagtttaaagagaggtcacaagagctcatggaccattattagataaactctaaattagaaaaaagaaccatatttctcttttgatagtcacataaaaattg

SEQ ID NO: 808541 - DNA, 673 bp, Homo sapiens
gcagaacatcagggccccaaaagggaaatacacagtactttctttggacttcagtgctctcttttatagtaatggaaaccacaagcgcagaggaaggggagctgattctataaaaagaagtttatttcctactttaaaagatgattttttgactatcttcccacaatagagccagaggatcacaggggaaagctacgatcctcaattatagaaaatgatgttgggtgcatctagcatcacagaagctttagaggacacagtcatctcaggtacctacagataaggaagaagtaccaatgagagtacctactcgtattcttattcatggaagygaatcccttcaggaaccaaatcatttagctgctggtagatgtttcttttggctcctctctctcctgagctctcaaacacagacttttttttctgtgtgcctctgcttttggcaactctgttccaagaataagaatatttgtttgtagatgagcttgctaggtcggggatctcttgtatagggagatggtgaatcactgagcaggacacagaggcatgagttgaaacagtgagatgtaccttagtttaaagagaggtcacaagagctcatggaccattattagataaactctaaattagaaaaaagaaccatatttctcttttgatagtcacataaaaattg

SEQ ID NO: 808542 - DNA, 559 bp, Homo sapiens
tgataagagtgtcttttgcatgctaatgaggtgactggtggctggggctggtcaccagaaagaccaaggcaggattagagggttgggattttcacccactcacaatctctggggagaagggaggggctgaaggttgagttgactgccaatggccaatggtttaatcaactcaccatgctgacataacaaagcctccattaaaacccaaaagggcagagtttggagagtttccagatagcagaacacggaaagatgcctggaggataggctcttgaagaaggtgtggaagctccgcactctttcccccatactttgtcctatgtgttttgtttttctttatcaatctgttmgtctgtatcctttgtcttatcctatgtaataaaccagtgtatgtaagtaagtgtttccctgagttctttgggctgctctagcaaattaattgaacctgaggaaaggtttgtgggaacctccaatctataattggatggtcagaagtacaggtgatagcaactggcatctgaagtgggaagggggcagttttgcatgactgatccctcaa

SEQ ID NO: 808543 - DNA, 559 bp, Homo sapiens
tgataagagtgtcttttgcatgctaatgaggtgactggtggctggggctggtcaccagaaagaccaaggcaggattagagggttgggattttcacccactcacaatctctggggagaagggaggggctgaaggttgagttgactgccaatggccaatggtttaatcaactcaccatgctgacataacaaagcctccattaaaacccaaaagggcagagtttggagagtttccagatagcagaacacggaaagatgcctggaggataggctcttgaagaaggtgtggaagctccgcactctttcccccatactttgtcctatgtgttttgtttttctttatcaatctgttcgtctgtatcctttgtcttatcctatgtaataaaccagtgtatgtaagtaagtgtttccctgarttctttgggctgctctagcaaattaattgaacctgaggaaaggtttgtgggaacctccaatctataattggatggtcagaagtacaggtgatagcaactggcatctgaagtgggaagggggcagttttgcatgactgatccctcaa

SEQ ID NO: 808544 - DNA, 602 bp, Homo sapiens
agtcaagctgagagccaaatcaggaatgaactcccgttcacaattgtcacaaaaaaaataaaatacctaggaatatagctaactggggaggtgaaagatatctacaaggagaactacaaaccaccgttcaaagaaatcagagatgacacaaacaaatggaaaaacatctcatgctcatggataagaggaatcaatatcattaaaatggccatactgcccaaaacaatttatagattcaatactcttcttattaaactaccattgagatacttcacagagctagaaaaactattattattattattwtttttttgagacggagtttttgctcttgttgcccaggctagtgtgcaatggtgcgatctcggcttaccacaacctctgtctcccaggttcaagcgattctcctgcctcagtctcccgagtagctgggatattacaggcatgcgccaccatgcccagctaattttgtatttttagtagagacatggtttcgccatgttggccaggctggtctcaaactcctggcctcaagtgattccccctgcctcggcctcccaaagtggtgggattacaggcctgaggcaccgtgcccggccaga

SEQ ID NO: 808545 - DNA, 602 bp, Homo sapiens
agtcaagctgagagccaaatcaggaatgaactcccgttcacaattgtcacaaaaaaaataaaatacctaggaatatagctaactggggaggtgaaagatatctacaaggagaactacaaaccaccgttcaaagaaatcagagatgacacaaacaaatggaaaaacatctcatgctcatggataagaggaatcaatatcattaaaatggccatactgcccaaaacaatttatagattcaatactcttcttattaaactaccattgagatacttcacagagctagaaaaactattattattattattatttttttgagacggagtttttgctcttgttgcccaggctagtgtgcaatggtgcgatctcggcttaccacaacctctgtctcccaggttcaagcgattctcctgcctcagtctcccgagtagctgggatrttacaggcatgcgccaccatgcccagctaattttgtatttttagtagagacatggtttcgccatgttggccaggctggtctcaaactcctggcctcaagtgattccccctgcctcggcctcccaaagtggtgggattacaggcctgaggcaccgtgcccggccaga

SEQ ID NO: 808546 - DNA, 584 bp, Homo sapiens
aatgtccatttatatcattgcattaaatctaaatttttctgctcagtaaagatggtctgtgtgtgtgtgtgtgtatttgctattcaaaaagtgctggtggcaatggcttatacctgtaatcccagcactttgggaggccaaggagggaggatcacttgagcccaggagtttgagatcagcctgggtaacatagcgagaccctatctctacaaaaataaaaaaattagccaggcgtggttgtgcatgcctgtagtcccagctactgaggaaactgaggtgcaaggatcgcttgagcctggaaggttgaggttgcagtgagccgtagtcgcacccctgcactccagcctgagyggcagactgagaccctgtctcaaaataaaaacaaaaacaaacaaaaagcacctaaaacaaaatgacaccgagtgattaaaccaatggacaatgataaactcaggcaaatgctaacaaaaattaattatggatagaaatactgtcttactccattttgtgctgctataatagaatatccaagactggataatttttaaagaacagagattgacttattacagtcctagaggcta

SEQ ID NO: 808547 - DNA, 641 bp, Homo sapiens
ctttgtttctccctcctccccattccattctaggtcccaaaggtaactgtgtgtagtttgtgttatactaggatatttcctgtgcttttacacattccaggtatatggcaggaaaaatcctgagacatcaactgaggattattttcctcaggcatctttctacaacagaggcagataacgcatttcccctcatgccatgggagacagaccacagcaaaacagcaatgaccaaaagattaagatttttcatttaaaattttacatttgaaaaccatggtaggccaggtgtgatggtcacatgcctttaaccatttaggaggctaaggcaggaagattgcttgagcccaggagttcaagaccagcccggacaacatgacgagactcagtttytacaaaaaaaaaaaaaaaaaaaaaaaaagaaaagtaaagaaaaaaaaattagctgggcatggtggcgctcacttgtggtttcagctactcaggaggctgaagcaggaggattgcttgggcacaggaggttagggatacagcaagccatgttcaggtcactgtactccagcctgggtgacagagtgagaccttgtctcaataaataaataaataaataaataaaatagaaaacccagtagaggccaaatgaa

SEQ ID NO: 808548 - DNA, 641 bp, Homo sapiens
ctttgtttctccctcctccccattccattctaggtcccaaaggtaactgtgtgtagtttgtgttatactaggatatttcctgtgcttttacacattccaggtatatggcaggaaaaatcctgagacatcaactgaggattattttcctcaggcatctttctacaacagaggcagataacgcatttcccctcatgccatgggagacagaccacagcaaaacagcaatgaccaaaagattaagatttttcatttaaaattttacatttgaaaaccatggtaggccaggtgtgatggtcacatgcctttaaccatttaggaggctaaggcaggaagattgcttgagcccaggagttcaagaccagcccggacaacatgacgagactcagtttctmcaaaaaaaaaaaaaaaaaaaaaaaaagaaaagtaaagaaaaaaaaattagctgggcatggtggcgctcacttgtggtttcagctactcaggaggctgaagcaggaggattgcttgggcacaggaggttagggatacagcaagccatgttcaggtcactgtactccagcctgggtgacagagtgagaccttgtctcaataaataaataaataaataaataaaatagaaaacccagtagaggccaaatgaa

SEQ ID NO: 808549 - DNA, 535 bp, Homo sapiens; identical to SEQ ID NO: 758174

SEQ ID NO: 808550 - DNA, 474 bp, Homo sapiens
ccacaggtggtccttcctgagcaccctgtgtaaaactcagtccccatctgctcactctctacttatcctgctttatttctcctcatagcatttatcccacctgatgtcttatgtgttttactgttcattttttttattgtctccccctaccccattaaaacatcaactcaataagaacttgggctttgcctgttttacttactgctgtattccccagcacctaraatagtgtctggcatacagcaggcactcagtaattatttgttgagtgaatgaaaagaagaaaggaggaaagggagaaagcaagagagtcctaagagtcactaaaaagaaggattttaaggaactacaataagagaatgtttctggaacagtgggcgtgaagaacctccagactagagtgcctggtcttcaaattatatggtttgaatcttcatttgcagtgttgcaaaaacattggaaattaaaattaat

SEQ ID NO: 808551 - DNA, 612 bp, Homo sapiens
gggtagagaagaaatagcagttccctgtgcccctacagaccctgtctgatggccaggcatgctagggaggtgcttgttcttcacacctgggcgtgtcagctgtgccagaggagctgtgtcacacgccacacaggcgcccacccctcccccccaccaccacaggaaatgcaaggaggactgtgatggctggggtggccacggttcttgggggtaattcccatgagtcctgggaaactccagggtttacacctgtcaatcccagcactttgggaggccaaggcgggtggatcacctgaggccagaagttggagaccagcctggccaacgtggtgaaaccccgtctctactaawcatacaaaaatgagccaggtgtggtggtgggcgcctgtaatcctagctacttgggaggctgaggcaggagagtcgcttgaatgcgggagggggaggctgcagtgagctgagatcgcaccaccgcactctggcctgggcgatagaccgaggctctgtcttcagaggaaaaaaggttgcccccttgtggacaactatctacagtacccattttgaagctgaacccactgaggcccagacagcttcagaaattggttcaaaggc

SEQ ID NO: 808552 - DNA, 566 bp, Homo sapiens
aatagtaacgatcatagctagcatttatggaacacttatgagccaaggtccattctgagcacattgcatgcattatttgatttaatcttcataatgccattgagtggtgttagcccattttacagatgagaaactgctggctcaaagagatgagggaaatcagtggagggcacaaagctagtcagtgataagaggcaggtctaattttaaagtctcctttgcttaataaacatacagtcgtgctttgcttcatgatggggatagttcatcttcatgtgaataccacaaaatgtacttacacaaacccacatggcatagcctactacacactgaggctgtatgctacagcctgtggctcctagcttactaagctgtatagcatgttattgtactgaatatagtagacaaccrtagcacaatggcaagtatttgtgcatctaacttttaaaagatacagtaaaaatacactattaccgttgtcgtatatgtggtccatctttgcccaaaacatcattttttggtgtgtgactattaacaggaacttgtcccagccttactttgtcatt

SEQ ID NO: 808553 - DNA, 626 bp, Homo sapiens; identical to SEQ ID NO: 804366

SEQ ID NO: 808554 - DNA, 618 bp, Homo sapiens
tggacaaaacgtgtccaaacccaatacagctgcccagaaattctgagggaagcatgagctgtccgttctgctcagttactgttaattccggaaatacacagagaaaataaaaatcacggaagatgcagttaaagtatggagctagaccactgttaaaacttgccagcaatttttaccaatccaatctttggtgttaattggtttccccagaagatgcaatatctctttccccactgatgattatattgcccagagccgctggctttcagaaatgtttaatcaagcattgcatatattcaagcaatactttccagacacctcagcttttcttgacagcgttaccttccttcgctctttctttgtctcttttaggaacatcaaatcatccagtgattttctgcataactcaaagttttgtcatttagaaaaaaaatcataacagaacagataaccattaggaaaycaatttgcatcagacatccatttgagaagtttaaaatgtggggaatgcaaactctacccatagggacttagtctgtagggaagaaatatgaacttgccactaatttctgaaaagcaaaattaattcagttatagctagatctgccttcataagga

SEQ ID NO: 808555 - DNA, 620 bp, Homo sapiens
actctccacctccatgtctggccctctgccctgggaagctgatcctgtccacagccgtcaccccccacccctagactaggctaccactgggagcccttcaggaagtcagagcaagggaggagagccaggctggttcttttctgttagcagtgggagccctttcagggtgctggctttcctatatgaagctgcctgtgcccacaattggatgggcatgcctgccaagctctctctagaggagtctgtgagcctgtgaaaggccccctcaccccgtcaccttggggtgaaggctcccacaggtacccaaccatggcttcggctgtattagtctgggatggtagagccccagctccacaatgtggccccrgctctgctgtctcagccatccctgcattccagccctcacactccctctctcatccccactcatctgcctgccgccagtccctcatccctggcaggtggtggctggcctctggcctcccccacagtgcctctgcctggaggcattcgtctccttcctcccagcaggcatgaaggagccaccccaccaaagctgccctcagctgcctcaccgtgagtccagggcaggatttagtccacagagtggccaacctggc

SEQ ID NO: 808556 - DNA, 628 bp, Homo sapiens
ggaacggtggttatttcattatatatgtctggctctatggtgggtgcttaatccaccccaaactcctaatatttgtctatcattattccacccattattgtacacatcagacaaccacagctcagggtaggttaaataatatgccatacattacacacaatagtacagagtggaaccaggaagtacctagcttgtaatctggcacccagcagctctacagtgagaagtaatcaagttcctagcgacagtttgatcattttaaaacaaaaggccaggcgtggtagctcatgcctgtaatctcaggacactgggaggcggaggtgggtggatcaccagaggtcaagagttggagaccagcctgtccaacatagtgaaaccccatctctactmaaaatacaaaaattgccagatgtggaggtgtggtggcgtgtgctgtaatcccagttacttgggaggctgaggcagcagaatcacttgaacccgggaggcggaggttgcagtgagccaagatcgcgcaactgcagtctggcctgggcaacaagagcaaaactcttgtttcaaaaaaattaaaaaaaaattaaaaaaagaagaactagggggtggtaagagggtacagtctactgtatct

SEQ ID NO: 808557 - DNA, 536 bp, Homo sapiens
gggttcaagggattctcctgccacagcctcctgagtagccagtattacaggcgcccaccaccatgcctggctaatttttgtatttttagtagagacggggtttcgccatgttggttaggttggtcttaaactcctgacctcaagtgatccacccacctcggcttcccaaagacatttttyttaaatttttttttacatatttatatacatgcatacatacatagttttaatataaaattgtgagaaggttcaaggttttttttgcttgtcgaaccctctcccttattgttaacccatgttaacaacttagtatgtgccttttatatttttgttaatttttttctatgattataatttatatggttggagagtcatgtgttgcataatgaatgatgttttggtcaacgacagaccgtatatatgttggtggtcccataagattataatggagctgaaaaattcctgtctcctagtgacatcatagctgtactgttatcatagcacaatgcattacatttttttttttcccaagacag

SEQ ID NO: 808558 - DNA, 583 bp, Homo sapiens
gacattgaccagttggtactgggagggcataaagaaactataaagtacaaacaacacctgtgccaggtgaaaggcaatgctggggcaaaactgacagaaaccacaggcccacagaaagaagcaaatcccttcttcctgccgtgcagcccccctggaatgcaaatgactggcagaatatagtaagaactcccatagtaagrgagtgatagggtttgactgtgtccccacccaaatcttgtcttgaattgtagctcccataatccccacgtgttgtgggagggacccggtgggaggtaattgaatcatggcagtgcgtttttcctgtgctgttttcatgttagtgaataagtctcatgagatctggtagttttataaatcggagtttccctgcacaagctctcttgcctgatgccatgtaagatgtgattttgctcttcattcaccttccgccatgactgtgaggcctctccaaccatgtggaactgtgagtcaattaaacccttctcctttataaattacccagtctcgggtatgtcttcattagcagcatgagaacagactaatactaatacagggagatatg

SEQ ID NO: 808559 - DNA, 577 bp, Homo sapiens
gagaccaaaggagaactgaagaagggcagaagctagaacttcctccggtcctcatcacctcgtctaagccagagacctcacagtctgcacccttatcattgttgtccagctgttcaacgtgaatggcaaaatcattgctcttcattaattcactggaagccttcatgcaaacctcattaagaggcacagtaattgttctgtgaatattgcccattttccaattaygttcctttcctcatgcggggagaatgtgccatcagagaaaaagcactgggttgccttcatctgttttaaaataagtggttgagggactggcttttgatggtggcttctacaaccagaaaggactcttcagccaagaaccattcttagtaatctgatagtgtgcaaagtgcaaacatctgtctatcaacccagcccagggactcacacacctgggcttgccacttcagggaagagactgcctggccatgagttctcagcagagaattgtagcaaggatctgaactctgtctttctgtgaaccacaccggaaggcatgtatgtattcacatccatgcagacggctcagcagagc

SEQ ID NO: 808560 - DNA, 533 bp, Homo sapiens
acacagcaggttagatttcagcatacaaattctgagggggtgtaaacattcagaccatagcaggcaggcaggcgggagggcgggtggacatacagacagacggatgcacggatggatggatagatagatagatagacagacagacagacagacagacagacagacagacagacagayagatacagaaagacagatacagacagacaatgtttttggggccaagattcaaattcaggcatatctggccaccaaaattaatatccttttcacaacgcagtgttcattctcaatcatttcaaattccaggatgctctccaggaaaagtgagtctaacgcactgccaacctcctctaagtgcctctctcactcaagtcattctcctcaacctgacctcacccaccacaatctgcccctacagctaagaccctgggaagtcggggtggaggggtgcatgtatatacaaacacacacatatacatttatatgtgtatatatgtgtttctatacatacacacatgtgtatacgtatatag

SEQ ID NO: 808561 - DNA, 523 bp, Homo sapiens
gggactatgaattcaattccatctcaatacaaatttcagcaggcttttttggggatagaaatcaataaggtgatttaaaatttatacagaatggcaaaatatatggattagcaaaaacagttttggaaaagaagaagtttggaagacttacactaggtgacctgaagattttctataaaggcacagtaaccaagataatgcagacgcacagaccaacaggaccgaatggtgtctcaaaatagacccrctcggccgggcgtggtgcctcacgcctgtaatcccagcactttgggaggcgaggcgggaggttcacctgaggtcaggagttcaagaccagcctggccaacgcagccaaaccccgcctctactaaaaatgcaaaaaaaaaaaattagccaggcatgatggtggatgcctgtaatcacaggtacttgggaggctgaggcaggagaattgcttgaatctgggagacggaggttgcagcgagctgagatcgtgccactgcactccagcctgggtgacaag

SEQ ID NO: 808562 - DNA, 523 bp, Homo sapiens
gggactatgaattcaattccatctcaatacaaatttcagcaggcttttttggggatagaaatcaataaggtgatttaaaatttatacagaatggcaaaatatatggattagcaaaaacagttttggaaaagaagaagtttggaagacttacactaggtgacctgaagattttctataaaggcacagtaaccaagataatgcagacgcacagaccaacaggaccgaatggtgtctcaaaatagacccgctcggccgggygtggtgcctcacgcctgtaatcccagcactttgggaggcgaggcgggaggttcacctgaggtcaggagttcaagaccagcctggccaacgcagccaaaccccgcctctactaaaaatgcaaaaaaaaaaaattagccaggcatgatggtggatgcctgtaatcacaggtacttgggaggctgaggcaggagaattgcttgaatctgggagacggaggttgcagcgagctgagatcgtgccactgcactccagcctgggtgacaag

SEQ ID NO: 808563 - DNA, 523 bp, Homo sapiens
gggactatgaattcaattccatctcaatacaaatttcagcaggcttttttggggatagaaatcaataaggtgatttaaaatttatacagaatggcaaaatatatggattagcaaaaacagttttggaaaagaagaagtttggaagacttacactaggtgacctgaagattttctataaaggcacagtaaccaagataatgcagacgcacagaccaacaggaccgaatggtgtctcaaaatagacccgctcggccgggcgtggtgsctcacgcctgtaatcccagcactttgggaggcgaggcgggaggttcacctgaggtcaggagttcaagaccagcctggccaacgcagccaaaccccgcctctactaaaaatgcaaaaaaaaaaaattagccaggcatgatggtggatgcctgtaatcacaggtacttgggaggctgaggcaggagaattgcttgaatctgggagacggaggttgcagcgagctgagatcgtgccactgcactccagcctgggtgacaag

SEQ ID NO: 808564 - DNA, 506 bp, Homo sapiens
cagtgcctggctccactcctggcctccttcctcctgacttggagaccctgtgcaggcctggggcatggggtacatgggccacagcctgggaccctgtgtcctcctgggtggccctgctgctgtggggtcctgacctcaccccaccacgttgcaaccctgggtgtggggtcagagccagtctagggctgagcaagacctgagccctgccctcccctcctcggggcccttcccttactcacccstgctgccaggatctacaaccaatgccaggctcccaggctgccctgccctcctcatggacctccacaacgccacccctgcctgccgcccccatcttcccctccttgagggccaacccacagcccctcccccacaggcccagtgtacccagacctgatctacgctggcttgaaggcaggatggggtcagatttgactctgtgtccgcagagtccggtgactggacagtccccagatctggggccccgtggagcctggtgaagtgac

SEQ ID NO: 808565 - DNA, 657 bp, Homo sapiens
gctattaggaaccctagactgggtatcggatcccagctgtatagcctccctttgctgttccctcaccccgtgagatcctggggcaggccctcctcactgtgggcgtcgcatgccccatctgtccaaggggacaaccagacgggctctggggccttctgaggccagctcagctctggtcttcggccccgtccacagcccaccctccgctccccagctcctstgaattcttgtcactttggcttggctggcagggagggcacccccaacctgcctccagcctgcagacccccctgccacccactgtggaaggctgggcaggagaagggccacaacccaggtgtccccgtcagagttctaactgtgtggctgcttctgacacacgcaagggtgttttcttccacctctgcctccctgagacagcgtttccctggggagccctgagcactccctcactctaccaccccttcctttcaccccagggcccccagctgcctcagggccctctcacctcctgccacagtgacaaggttagggtcagggtcagggtcaccacacacaaacacacacaacacacacacacgcacaccacacacacatacacaccacacatcacacacacacacacacagcacacacaacacacactatacagcacac

SEQ ID NO: 808566 - DNA, 467 bp, Homo sapiens
ccctgtttctattatgtagtcactcttcactcaccctgcctctggcccctggaacctccagttggctttccatctctgcggatttgcctgttctggacgtttcgtataaaaggagtcatacgctgtggggccttttgtgtctggcttcttccagtttcatccatrttgtagcatgtgttagcatttcatttttatggctgaataatattccattagtggacagaccactttttgttttccattcacctgctgatggacatttgggtagtctccatttttggctgtcatgaatgacactggcatgagcgtgtgtgttcgagtctttgtaatttgctggcatgagcgtgtgtgttcgagtctttgtaatttgattctcttggggaggtgcttgggtggaattactgtgtagctccatcttcagcgttttttttttttttttttttttttgaggcggagtctcgctccgt

SEQ ID NO: 808567 - DNA, 642 bp, Homo sapiens
caaaaaaatggaaaagaatacgtggggagagcgtggagaagtcagaacccttggattgctggcaggagtgtaaaatgccacagctgctacagaaaacagttggtggttccttaaaaagttaaacatagaattatatgatccatatggtcataccacatacccttctaggcatatacccaagagaaatgaaaacatatgtccgtgaacaaacttctacacgaatgtttatggcagcattattcataatwgcccaaaggcagaaacaatccaaacttccacccgtgggtgaatgaagaaatgtatgcgcgggaacattcgccacgtgccacagcatggtgagccttgaaaacgtggtgcaaagtgaaaagcggtcacaaaggtcacgtattatgtgattccatttatatgaaacacccagaataggccaattcatagagacagaaagcagatgagggattgccagtggctgaggtgaggaagtcagtggtgattattaaaagggtgttttctggggtgataaaaaccttttgaaactagagaggtgatgggtgcacagcaccgtgaatgcagaaaatgcctcagaatcataccctttaaaacagttgttcgttatatgaatttatttgaaaaaagaaaagggaa

SEQ ID NO: 808568 - DNA, 642 bp, Homo sapiens
caaaaaaatggaaaagaatacgtggggagagcgtggagaagtcagaacccttggattgctggcaggagtgtaaaatgccacagctgctacagaaaacagttggtggttccttaaaaagttaaacatagaattatatgatccatatggtcataccacatacccttctaggcatatacccaagagaaatgaaaacatatgtccgtgaacaaacttctacacgaatgtttatggcagcattattcataatagcccaaaggcagaaacaatccaaacttccacccgtgggtgaatgaagaaatktatgcgcgggaacattcgccacgtgccacagcatggtgagccttgaaaacgtggtgcaaagtgaaaagcggtcacaaaggtcacgtattatgtgattccatttatatgaaacacccagaataggccaattcatagagacagaaagcagatgagggattgccagtggctgaggtgaggaagtcagtggtgattattaaaagggtgttttctggggtgataaaaaccttttgaaactagagaggtgatgggtgcacagcaccgtgaatgcagaaaatgcctcagaatcataccctttaaaacagttgttcgttatatgaatttatttgaaaaaagaaaagggaa

SEQ ID NO: 808569 - DNA, 541 bp, Homo sapiens
tgtcttccacaatggttgaactaatttacactcccagcaaaagtgtaaaagccttcctatttctccacagcctcgctagcatctattgtttcctgactttttagtaatcgcccttctgactggcgtgagatggtatctcattgtggttttgatttgcatttctctgatgatcagtgacgtagagcttttcttcatgtttattggcctcataaatgtcttcttttgagaggtatctgttcacctcctttgcccactttttgatggggttgtttttctcttayaaatatgtttaagttccttgtaaatgctggatattagccctttgtcagatgagtagattgcaaaaattttctcccattctgtaggttgcctcttcactctgatgatagtttcttttgctgagcagaagctctttagtttaattagatcccatttgtcaattttggcttttgttgctattgcttttggcatttttgtcatgaagttgttggccgtgactgtgtcctgaatggtattgcctaggttttcttctaggattttt

SEQ ID NO: 808570 - DNA, 625 bp, Homo sapiens
gccatcacttctcacacctgctctgccatcaccgaggtctgcgtcacctttactctcacctgaatcgctgcaaagcccccaatggccttcctcctccctgtccattcattctctcccagtggccggcaagcccagtctcatcacatcactcttcacagagccctgcgatggcttcatggccatcagaggaagcaacactcaaggcttgacaatgatgacaatracaagtgacaggtggttcagcatggcctgggcttcctgctctctgtcccgtccccctctaaccccctcctgctcttgccagcagcctgccactgtggccttgctattgcagacaatctctgtctgctctgcccagcaggccgaccccctctcaccccccagagcctgccgcccctccaggcagttccccgtcctccagagtgcgggtcctccccacagcccacacgtctatgcatttgttctgtttcctgtcagttctcgctggcagggcggggacttctgttctatttgctgctgtttcccccaatgcctaggacggtgcctggaacatacaagatgctcaataaatccttgttgaatgaaaataaatgaaaaaaaaaatgtgctaaaaaaatactggttt

SEQ ID NO: 808571 - DNA, 558 bp, Homo sapiens
cttcagtgcactcttttcaaatgtcggggtgggttttttttttttccacaaaacttcaagcatctactaaagtagagggaggagtgtaatgaactccggtacccatcactcagcttccacggtttcatctcatttcatctgtgacccctccactaccctttcttcctgattcttggaagcaaatccaagacatcacacccttccctctgtaaatctttactatgttcctctaggagaaaagggctcttctcaatacataaccacaagtcatcatcacaccgacaagtgtaacartatttcctgaatagcttcaaatatcctagtagtgttcaaaaaatgtcatacgtattttcagtctgcttgaatcagggctcaaataaggtccacacattcagattgactgatatgccttttgactacctttgaatctagaggttccctttctatctccctgcaatttatttgtggaagcaagcaagtcgttcatgacgtagcctaacaggcccctctgacgttgttcattatgatttttctgtaaattggtagttgatctgagga

SEQ ID NO: 808572 - DNA, 605 bp, Homo sapiens
gcctcccgagtagctggaactacaggcgcccaccacctcgcccggctaatgttttgtatttttaatagagatggggtttcaccgtaatagccaggatggtctcgatctcctgacctcgtgatccgcccgccttggcctccaaaagtgctgggattataggtgtgagccaccgcgccgggccgacaaaagaaatctttgaacaaagcccttggtccctcatgtcccagatgacttggtagctatgaactccaatgtttgtctctccagacccataaacctgtgaaaagctaagcctattactcccctgtgggaaaaaaaaaaatcaacaaattcttttagggaaaaagcagccaaaattgttgagcttctcccgctgcatttcttttctctccaggaccttggcacctcacaccttggctgtcttggtagctctccartgccctcaaacagctgctgttgtggtggttattgtcattgttgttgattcagcttttatagttgttcttggcaagagagttgatctgatgcaagctactctaacttggatgaaattgggagttccaacctcaattgcatttaattcaagtgcatattaattcaactac

SEQ ID NO: 808573 - DNA, 544 bp, Homo sapiens
atgtgaatgttcactgaagcagtatttacaatagtagtcacagaataaacctaaatgctcatcagtgacagattggattaaaaaaaggcagcacatgtatatgatggaatactatgcagccataaaaaagaaacagatcatgtcttttgagggaacatggatagacttggaggccattatccttagcaaactgtcaaggaaaagaaaaccaaattccacatgttcttacttataagtgggagctaaaygatgagaactcatggacacaaagaagggaacaactgtcactggggcctgctgaatggtggaaggtgggaggagggagatgatcagaaaaaaataactattgaatgttaggcttagtacctgggtggagaaatgtctgtacaacaaacccctgtgactctacctgggatgctctctcttgctaagtaatgagtcaaaaaacagtaggtttaggtagacttcttctattgggtatagggtgcaaaatgtccagtcactgttctgttcctctagtcctggggtgccaaacattcttgcc

SEQ ID NO: 808574 - DNA, 606 bp, Homo sapiens
tttagcatgtttcattcccgttgtctaaggagtctccgggttaggctggggccctgtgtccacagcgcacctgccagccttcacgcctttcccccatcatgcagcacatgccttcatgggttctaaggtgatcgtcggtaatygccattgaggcaccccataatagtctacctggtggacgctctggaatgtaaaccttcatcagacagctccattttccaggcatttgtttgttttatgagtggctatggtggattcccagggctgccatgcccagccccacaggcgggggtgttgagcagcagacacgtgctctccctcgccctgaaggctggaagtctgaaatcgaggtgttggcagagccaggctcccctgcaggcacaagggcatggtctgttccaggcctctctctcagccctggtggtcccttggcttgggggagcgtgactgtaaccttcccaccacgttctctctgtggacatggctgggtccaaacgtccaccttttatggggacaccggtcatgttggattaagggcctgcctgactctgatggacctcatctgaactaattacccctgcaatgaccctacttccaagtcaggtc

SEQ ID NO: 808575 - DNA, 677 bp, Homo sapiens
ttgataaacaggacaacaatcaaattaaaaatctctaattatgaaaagacatcattaaataagtgaaaaagccaggtactgtggctcatgcttgtaataccaacaccttgggaggccaaggcgggaggatcacttgaggccaggagtttaagaccagcctgggcaacatggcgagacctcatctctgccaaaaatttaaaaaattagccagacatggttgtgtgcacctgtagtccagctacttgggaggctgaggtaggggaggatcacttgaacccaggagtttaaggttgcagtgagttatgattgcacgacttcactccagcccggggaacagagcaagaccttatgtaaaaaaaaaattaaaagttaaaaaagctagccacagaaggagagaagatatttccaataaatataacagaccaaaaaactgtccagaataacaaatttctacaacccaaggagaaaaagacacacaaatcaattttttaactaagcaaaagacacgaacaggggcttaatgaamgaagatatacaattagtcaaatatatgaatagtgtccaacagcgttagtcactggggagataacaaactaaaactacagtgagagatcacttctcatttaccagaacagctaaaattaacaccagtgatgacatacattggcaaaaatgtg

SEQ ID NO: 808576 - DNA, 644 bp, Homo sapiens
cagggaagcatccgctatggagggctgtggttctcacagagtaagctgagcaaaacataacctcctaatatactccatccgcaaaaggaaataatacatcacaggtgatatcagcagaaaacgaatctggatgctcaaggtttcattcaaacacagartaactatgtgtgaaatgcttaaagaaagaaaaaaaaaacaaggaacaagagaatataaagagctactaagtatctttggaaaaaaaaagtaaattaaaacttataaataataaatatagtcagaatcaggacttaagtggcaggctaggcaccactacagaatcacttaactggaggactgatcccaaaaaagttctcagaacatggaactgggagaaaaggagatgagaaacatgcaagagagtgttaggaatgcagaacagaagaaggtctaacaacaatctcaccagaggctgagagagacaactgaatggttgcaggaacatggagataacatggatggcaattatcatacaggaaattgaaaatgattggtaggccaaaggctctaatggaaaaagtagacagcatgcaagaacaagggggccgtgtgagcagagagatgggaagaaatgctggcaataaaaacaatctaagagaaacgaa

SEQ ID NO: 808577 - DNA, 583 bp, Homo sapiens
cttcacaaacttccagaaaatagaagaggagggaactcattctatgagagcagcattatcccaataccaaaaccagacaaagacatcacaataaaactacaaaccaatatcccttatgggtatagacataaacatcctcaacaaaatactggccaactgaatcctgcaacatataaaagggattctacaccaagaccatgtgggatttatcccaggaatacaaggatggyttaatattcaaaacaattaatgtaatacaccatatcaatagaataaaggacaaccacatgattttgatagacgaagaacaagtgtttgacaaaattcaacactcctccatgataagaacagtcaacaaaccaggaatagaagggaagttcctcaatctgataaagggttctatgaaaaacccacagctaacatacctagtggtaaaagactgaaagtttttcccccaagaacaggaacaaggaaaggatgtctgctctacttctattcagcatagtactggagattctcaccagagtaattaggcaataaaaagaaataaaaggtatccagaatggaaagaaagaacaattat

SEQ ID NO: 808578 - DNA, 583 bp, Homo sapiens
cttcacaaacttccagaaaatagaagaggagggaactcattctatgagagcagcattatcccaataccaaaaccagacaaagacatcacaataaaactacaaaccaatatcccttatgggtatagacataaacatcctcaacaaaatactggccaactgaatcctgcaacatataaaagggattctacaccaagaccatgtgggatttatcccaggaatacaaggatggcttaatattcaaaacaattaatgtaatacaccatatcaatagaataaaggacaaccacatgattttgatagacgaagaacaagtgtttgacaaaattcaacactcctccatgataagaasagtcaacaaaccaggaatagaagggaagttcctcaatctgataaagggttctatgaaaaacccacagctaacatacctagtggtaaaagactgaaagtttttcccccaagaacaggaacaaggaaaggatgtctgctctacttctattcagcatagtactggagattctcaccagagtaattaggcaataaaaagaaataaaaggtatccagaatggaaagaaagaacaattat

SEQ ID NO: 808579 - DNA, 539 bp, Homo sapiens
gagggaatcacagtgaggggtttcagactctcctaagtctttctcctctgtggcatttaaaaatgttatttagggtttttttttttttttttgaggtacaaataaatacattttatcaagggctgacaaagactgtctgaattcccattcctctgaaatgacatctttcaatgatatgacctctagtggctacattcatgacatttacagtcaaagttgaaccagcgagggtggaagggcactcgggagtggccgctgccaacagcaacagactgcccagaagaggctgtctgcagtcagagtcatggaaaaggcaaattytgaaacccaaaacacgcactgaccaaagtcccgtgcggaactgcagaaatgcaccacgttgctcagactggccatttctcagtaacaacttcgaatgctggaaattgttatcacacctcatagcaaatgttttaattaaagaatcaagtaggtagaacagaaccttctgtacaatctcacaaacaggttaaagatccatttgaagctacttcagtaac

SEQ ID NO: 808580 - DNA, 616 bp, Homo sapiens
tccccccgactccccgccctctgcccaccctggcgcccaccgttctaccttccatctgtatgaacgtgacggctctcaggacctcgtgtcggagactcaagcaggacgcatcctttggtagctgggttgtttcactcagcatgatcttgccaacattcatccgtggctgtagcctasatccgaatttccttcctttttaaggctgaataatattctgttgtatgggtggaccacatttggtttatccacgcctctgccaacagacacctgagttgctgccgtctcttggccgctatgaacgtgggcgtgcaagtatctgtccgagtcccaaatttcagttcctttgggtaaggctctgatgaggctgggggtaccgagtggaagctgacatcctggacagtgaaggcccctcccttattcagctcccagggcagagggcagcaaggcccacacccccaagctgaaggtaggggcttcatctgtggaaccctgaccacctgggaggggagagccacggagcattgttggggtcccagcagaggatcccgtcccatgggcccaggccccctaagcctcctaccgtgctcccacgttccggcaaatattcagctatgtt

SEQ ID NO: 808581 - DNA, 608 bp, Homo sapiens
ggagtgcagtggcatgatctcggctcactgcaagctccgcctcccgggttcacgccattcttctgcctcagcctcctgagtagctgggactacaggcgcccgccaccatgcctggctaattttttttgtatttttagtagagacagggtttcatcgtgttagccaggatggtctcgatctcctgacctcgtgatccgcccaccttggcctcccaaagtgctgggattacaggtgtgagccactgcacccggccagtttgtgatcttttgtgactggcttctttcactcagcacgatgggtgtgtttttgtttttgtttttttagacggagtctcgctctgtcttcaggctagagtgcaatggcacgatcttggctcactgcaacctcygcctcctgggttcaagcaattctcctgctcagcttcccgggtagctgggattacaggcatgcgccaccacacccagctaatttttgtattttcagtagagacggggtttcaccaagttggccaggctggtctcgagctcctgatgtcaagtgatcctctcgcctcggcctcccacagggctgggatgacaatatgatgtgttcagtgttcatccacacag

SEQ ID NO: 808582 - DNA, 608 bp, Homo sapiens
ggagtgcagtggcatgatctcggctcactgcaagctccgcctcccgggttcacgccattcttctgcctcagcctcctgagtagctgggactacaggcgcccgccaccatgcctggctaattttttttgtatttttagtagagacagggtttcatcgtgttagccaggatggtctcgatctcctgacctcgtgatccgcccaccttggcctcccaaagtgctgggattacaggtgtgagccactgcacccggccagtttgtgatcttttgtgactggcttctttcactcagcacgatgggtgtgtttttgtttttgtttttttagacggagtctcgctctgtcttcaggctagagtgcaatggcacgatcttggctcactgcaacctctgcctcctgggttcaagcaattctcctgctcagcttcccgggtagctgggawtacaggcatgcgccaccacacccagctaatttttgtattttcagtagagacggggtttcaccaagttggccaggctggtctcgagctcctgatgtcaagtgatcctctcgcctcggcctcccacagggctgggatgacaatatgatgtgttcagtgttcatccacacag

SEQ ID NO: 808583 - DNA, 563 bp, Homo sapiens
gctgtacctatacctgggtttagactacaaatgcttgaagtgtgttctaacgagcaatgataccagtttttgtcttttgaaacttcaggttcaatgatttcaaagcttcaaatgttttgttgtgtgtgtgtgtgtgtgtgtkttttttttttttttttgccaaatatgctaagttttgaaagttggaggcagttggtctttgaactgctgttaccatggtggggcaaccatgtcttcctgcttctataactggcccgtcatatactcaaggagtctgagtatggacaaaagggctttgttagtagcattcaaatcgtcaccaaccaaggccaaaaaagataatgtatttagtgctctgtttcctagaaaaatggaaggacttgacagcagagtgaaggtcttctcttagatcaccaggtggtttagaaaaccgtcattggagggtaatgataacagtgtatactagaaaaggtgaatagatattcaccgcaaatcctgacaattgatctgtgtgtgagagcacaataaattcacattccagtcatctttgaagagcctctgcc

SEQ ID NO: 808584 - DNA, 663 bp, Homo sapiens
tcctcctttttcctatcttcttttccttcttcacagtagtgtccaaccaccctttatcagtttgacttacattaaagttatattccaattccaacaagtatctatattagaaaaagaaataagaggaggaaaatgaaaaaaaaaatcacctcttttttcaccctttcctgacaaatccaaaccatcccttaggagaaaatcagaatgaggaatgaggttttatcgaaaccgatcagggagagaggggaatagaagatttcatcaggagttcagcttgacagaaataacgctttattgggatgggcrcttggcaaagataacatgttaccaagagcaagatagatgtttgggtaaaatcttgtgttaatacttattaaggtcaaaacccgccatctctacttttgacggacgggtattttcttccaagtcctacaccggagagtttttataaggtgcttccagcagtcttataaaagtaagaagaataaaactaagaaccctcaactcaataccactataaggcaaagtcaggattttcctctgcaagctgagaggaatgatgcgcttgagtgcaggaagtaacaggtgcagaggaccaaggggaagcctatgatggtgaagcctccagtacaggatcccaatttctgaccccaaaaagaaaag

SEQ ID NO: 808585 - DNA, 568 bp, Homo sapiens
aaaaaaaaggcagaccatgattgaagctcatgttgatgtctagactaccaatggttaaagaaaacctcagcaccaacaggtctaagatgatggaaatcatgacccaaggccgggcgcagtggctcacgcctgtaatcccagcactttaggaggccaaggtgggcggatcacaaggtcaggagattgagaccatcctggstaacacggtgaaaccccgtctctactaaaaatacaaaaaattagccgggtgtggtggcgggcacctgtagtcccagctactctggaggctgaggcaggagaatggtgtgaacccaggaggcggagctggcagtgagccaagatcgcaccactgtactccagcttgggcaacagagcgagactccatctcaaaaaaaaaaaaaaaagagagatgcagacaaataacttgaaagaagtggtggagaaaattattccagacagcactggagaagacacagaaatgcctgcaaatctatttatccgctccacgatgtcttctctgtgaggaaagttaaaatgctaaaaacactcaggtttgcattgggaaaac

SEQ ID NO: 808586 - DNA, 568 bp, Homo sapiens
aaaaaaaaggcagaccatgattgaagctcatgttgatgtctagactaccaatggttaaagaaaacctcagcaccaacaggtctaagatgatggaaatcatgacccaaggccgggcgcagtggctcacgcctgtaatcccagcactttaggaggccaaggtgggcggatcacaaggtcaggagattgagaccatcctgggtaacayggtgaaaccccgtctctactaaaaatacaaaaaattagccgggtgtggtggcgggcacctgtagtcccagctactctggaggctgaggcaggagaatggtgtgaacccaggaggcggagctggcagtgagccaagatcgcaccactgtactccagcttgggcaacagagcgagactccatctcaaaaaaaaaaaaaaaagagagatgcagacaaataacttgaaagaagtggtggagaaaattattccagacagcactggagaagacacagaaatgcctgcaaatctatttatccgctccacgatgtcttctctgtgaggaaagttaaaatgctaaaaacactcaggtttgcattgggaaaac

SEQ ID NO: 808587 - DNA, 622 bp, Homo sapiens
ggtatgatctgggggtgtggaggtggagatgacgttgttttatttcttacaataatacatgtatttcaggtaatcgaatttggttcttagcgctaatgtcattttctgctaatttaatgtcccaggaatccctccgagtaagaagattgctcgtggaatgcaaataaagcccattctgggaaaaataaccatttccccaacccaggtgtgctcaaaggctgaacaaaggccaatcccacagagtagagggagttaaatagatcctaggaggtggtctggrtatgaaggctgcttgctgggcgaaggggcagtggttatttgagattcttcattgtgaaagcaaactaatcaggctctctagcatcaggcatttggaaagccagcagggcactcaggggcctcagatggctcagatgggaggagaggagggcagggaaatgaggaagggggaatagtgtccatctggctagctctgcttccaaaggagcacgaagcatccctcagcctcctggttgggcagtcgtaagagaccatgccagggccgggcgcggtggctcacgcctgtaatcccagcactttcggaggccgaggcaggtggatcacgaggtcaggagatggagac

SEQ ID NO: 808588 - DNA, 570 bp, Homo sapiens
cattcacacaccactcactcactgactcacccagagaaagaaacttccagttctacaggctccattcatggtaagtgccctatacaggtatgccatctataccatatttatttatttatttatttatttatttatttatttttttgagacagagtctcactctgtcacccasgctggagtgtagtggcacagtctcggctcattgcaacctccgcctcccagattcaagcaattctcctgcctcagcctcctgagtagctgggactacaggtgcccaccacaacgcctggctaattttttatatttttagtagagatggggtttcaccatattagccaggatggtcctgatttcctgacctcataatctgcccgccttggcctcccaaagtactgggattacagacgtgagccaccgcacctggctcatctataccatatttttactgtaccttttccatgtttaggtacacaaatgcttaccattgtgttacaattgcctccggtagtcagtacagtcacatgctatacaggtttgctgcctagaggcaataggctataccagcagtcc

SEQ ID NO: 808589 - DNA, 607 bp, Homo sapiens
gataagatttagtttcttgctttttattttttgtgtatccattgtatttttttttttttttttggtttgaggttaccatgaggctcaataatactatcttataacccattattttaacctgatagcaactgaacactatttgcacaaacaaacaaacataaagcaagcaagcaaaaagaaaactaatgaaaactctgtgccttaacttcatccccccacgttttaatattttgttgtttctatttctatatcattgcattgactatgtctcaaaaagttgttctagttattaatttttattggttcatcgtttagtctttctacttagggtaacacgagtttgtacaccacagttacagtgtcattgtattctgtgttcttctgtgtccttactaytaccagtgacttttgtaccttcgggtgataatttattgctcattaacgtccttttctttctgattgaagtacacccctcagcatttcttgtaggataggtctggtattgatgaaatctctcagcttttatttgtctgggaaggtctttatttctccttcatgtttgaaggatatcttctagggtatatactattttagggtaaaagcgttt

SEQ ID NO: 808590 - DNA, 634 bp, Homo sapiens
aatattagcaagtaggcaaatgttgaagtatggaatccgtgaatagtgagaatttactcagatgctcctcagtttacaatggggttaagcactgataaacacatcattaagttgaacatattctaagttgaaaatgcatttaatataccttactgaacagcataccttaratgtgtttagaacacttaaattagcctacagttgggcaaaatcatctaatacaaagcctattttataataaagtgttgaatatctaatgtaatctattgagtactatactaaaagtgaaaaaaaagtgtatgaagactcaaagtgctgtttctactgaatgtgtatcactgtcatatcacagtaaggtcaaaaaatctcaagttgaaccatcctgagtcagggattatctattttatttacatatgtgtatgtgtatgtgtatatatatatatatacacacactatatatatacacatatatacaaacacatatgtaaataaaatagatattttatatatacacacatacactcatgtatatacatatatatgcaaacacatgcatacatatatacatacaaatatatacatacatacatgcatacatacacacaccaccagaaggatagatactgcaattgta

SEQ ID NO: 808591 - DNA, 525 bp, Homo sapiens
agcatttttaaaatgaagagtattttctagccctgtttactagaaatattttgagagagctattgaaaagttaattgggtaagacctgaattattttagtgtgtaatttaagatgtttattttagaaagctcatgtgcatctatattgtcagcatggcatggtgacatatagtaacgccattttgactcatactagctggtgatgtcagaagagtgctrtctagttctcaatacctttctatgtgtcaaactccaactgcatttttctaagaagcaaaatactaataagaaagctgcctcaggagctgatacaaggttctgaactgaattatgtcctaacggcttagttgttgttatttttaaaaataaagttgtaatattagaatatttttagatttagaaaagtattctgagaatagtatgaagaattcccatacaccccatacctggtttcccttatcgttaacctcttacattgtatgctacatttatcgcaggtaatgacctaatgctgtaatatgatta

SEQ ID NO: 808592 - DNA, 681 bp, Homo sapiens
catcttacctctccaccaatttccatctctgctctctcactctctctcacttgctgtctttgtccctttgttggtcaccagataacacagggcaggtgagctctaaaattggggcttagcttgggagggttcttggcttcacccaggaaagaattcaagggcaagctggtggtgttaracaacaacttttattgaagtggcagtttacagcggcagcagaggtactgctcattgcagaacagggttatcccattggcagtgtgcacagagtagtagctcaggggcagttctgcagttatatctatatccacgttttattatatgcaaattaaggggtagattatgcagaaatttctataaaagaggtgatatcttccagctcattggcttgttgccatggaaagaggtgataacttccaagtgttgctatgacagtggtaaactgacatggcactggtgggcatgtcttatggagagatcctttcactttttccctgtttcagctagtcttcagtctggtccagaacccaagccccacctctgcagtcaagtcctgcctcctacctcataatgagccaagaaaagcaaggtaccaattgaaatgtgcagagtagttccatttctacaatgtttaaggacatgtaaaacaatgttataaattgatgatacttctatgtatat

SEQ ID NO: 808593 - DNA, 647 bp, Homo sapiens
tgatgatgcctctgaaacaatagaggcaagatagttgcacttaactgtcagaagttaggcggatgtaaataccacaatgcactgcagggtcagagtggcaggtggggaggcctgacctgcagagagctatggagatggttaacagaacacagtacccctagtgggtagatggttaagagacagttaataggacatggacagtcaatacaacataatgtcctggggggaaataggcagccaacaatctgcactctatacaatcaaaagaaatgaaaggtgttcacaggtttgagggaggttgcctcaataaaaagtcataattacttatccagcttctagtctcaagtcagsttttgatccacaatacatggtttgaaagaaaggccgagtgcccaggaagaaggaccctacaacgcatgtgtagtaatgatttctctggtccttccatttactcaggtaactgtgtaccaaggaaagagaaatactcgaacattttgagaacagatggacactggttctgagttgatattgacacccagagacctaaagtgtcttaattgtcccccttattagaatgggggcacatgggagccaagtattaagggggatcctggcctaggtagggttcacagtgggcccactgagtt

SEQ ID NO: 808594 - DNA, 600 bp, Homo sapiens
ccaccatgcctggctaatttttttttttttttggtattttttgatacagatggggtttcaccatgttggccaggctggtcttgaactcctgacgtcaagtgatccactcgcctcagcctcccaaagtgctgggattacaggcgtgagccactgcacctggtcaatctgcatctcactcttatctgtctttaccactctactaaaatatctcatgagaagatctcttaagatggggacattactaaattcagtggacgcttttccacattgattttgcttgatcttgtagcagttgtcattattctttkttttttttttttgagacggagtcttgctctgttgcccaggctggggtgcagtggcgcgatctcggctcactgcaagctccgcctcccgggttcacgccattctcctgcctcagcctcccgagtagctgggactacaggcacccgccaccatgccctgctaattttttgtatttttagtagagatggggtttcaccgtgttagccaggatggtctcaatctcctaacctcatgatccgcccacctcggcctcccaaagtgctgggattacaggcatgagccatcatgcctggc

SEQ ID NO: 808595 - DNA, 428 bp, Homo sapiens
acagcagggctctgaggacagattatctgggttcaaaccttcattgaatgactttgggcaagtttcttaatctctctatgcctcagttttcccattttcaaaatgggagaaatgattacttcttagaattctggaaggatgtaatacgatgatacaggaaaatactacagaacacttgaaatgtggctgctctgaagtgagctgtgctataaattaaaatacaggctgggyacggtggctcacacctgtaatcccagcaatttgggaggctgaggtggggggatcacttgaggtcacgagttcgagaccagcctggccaacatggtgaaaccgtgtctctacaaaaatacaaaaattagccgggcgtgatggtgcacacctctagtctcagctactcgggaggctgaggcacaagaatcgcttgaacc

SEQ ID NO: 808596 - DNA, 428 bp, Homo sapiens
acagcagggctctgaggacagattatctgggttcaaaccttcattgaatgactttgggcaagtttcttaatctctctatgcctcagttttcccattttcaaaatgggagaaatgattacttcttagaattctggaaggatgtaatacgatgatacaggaaaatactacagaacacttgaaatgtggctgctctgaagtgagctgtgctataaattaaaatacaggctgggcrcggtggctcacacctgtaatcccagcaatttgggaggctgaggtggggggatcacttgaggtcacgagttcgagaccagcctggccaacatggtgaaaccgtgtctctacaaaaatacaaaaattagccgggcgtgatggtgcacacctctagtctcagctactcgggaggctgaggcacaagaatcgcttgaacc

SEQ ID NO: 808597 - DNA, 644 bp, Homo sapiens
tggatccagagggatggaagtcagcggcaggtctgtgactgtggcaaacagcaatggtggacagcaagcgaaagctcagctccagccataacaaacccggaccagaagagagtgcggttgcaagatttaacagagtgaaaacagagctcccatacaaagggaggggacccaaagagggtagccattgctggctcgaatgcctgggtttatatcctgatcattgtccctcccgctgtgctctcaggtgatagttgattggctatttctttacctcctgtttttgcctaattagcattttagtgagctctctttactacctgattggtcrggtgtgagctaagatgcaagcaccctgtttaaaggtggatgcggtcaccttcccagctaggcttagggattcttagttggcctaggaaatccagctagtcctgtctctcaccattactgggtacatacccaaaggattataaattattctactataaagacacatgcacacgtatgtttattgcagcactattcacaatagcaaagacttggaaccaatccaaatgccaatgataagctagataaagaaaacgtggcacatacacaccacggaatactatgcagccataaaaaaggatgagttcatgtcttttgca

SEQ ID NO: 808598 - DNA, 586 bp, Homo sapiens
cagatcgcccctcccaggcaggggacttcaaaggccctcctccggggcagcatgctgcccccaggcctgtagtcactccagggaccagggtctgagtgggcaaggtctaataagaggatgagtgggttccagccacccccygaactgttagccaactccaagtttccactagaccgcagctggccttgcccggttgagtgcttcatagaggccctcaccccaccatccctgaggggcagttgaggggaggcactgagtccagagaaggagctgagagctcaacccgagagagcttggccccaggacaccacagagctcagacagcaggtgcttacgggcccaggcaggctgtccacagcacttggacatgcaaacaaaaacactgccagcacctgccgttaggagccccagggaatgccaaccacactggcagctcccaagaggtcacatgccaagcacatgccagaaaacaccaacacactcatgacctgtatgagatacctgagcagggaccaagagagagactggcgctgtgggaaggccctgcgggcagcccggggacccaagaggggcagagtgtggacac

SEQ ID NO: 808599 - DNA, 608 bp, Homo sapiens
ttaaaagacagaatgaggaggattacataattgtctttaagataattatctttggctacaaggatcaataacaaaggtggcaccagtctgaagttggacaggcagtttctgggcagatgtcctcacagaagtattttttgtgtatgtaaggtctttgtccgaggttttggtttttgcagtcttttgtaatagttctcattatcagatgtttttgcatgagaatcctccctttatagcctcctccagttctatttgtcatggtttttaacacaagcaactccattttgattctaacaactttcacaatagtgtttcctacaagctatgcctgagattaggatgcttgtgtaaatggtttattaagggagtgacctgaagraaaacttgtaatgaagcaaaggaagcaggagaaggcaagataagaagctaagtaaggacatggcatcaggagaagcatagcctgatcccgtgggggccattaaaacacgaattacatcactgattgtcttgctcagtggtaaggaggatggacttttgtgctactgcatctgccatttattgatgaattgcttctgggatgagggacataaccttcctgacttatgaag

SEQ ID NO: 808600 - DNA, 603 bp, Homo sapiens
ttgtcaccattgtcaaaggtcagttaatcctatgtgagtaggtttatttctgggatttatattctgttccattattccatatgtgtttttgtgtcagtgaaatattgctataattatcatagctttgtaatatattttgacatcaaagcatgctgcctctggctttgttcctcatctcctaatttctttggctgtttggagtgtttgtagttccatatgaattttgggcttcattttctatttctgtaaaataaaatctactaggatctggtagggattacattgaatctagagatcacttggggtgtatggacattttaataatactaactcttcccacccatgtacatgaatatctttacatttacttgttcattctttaatttmtttgagcaatgttttgtaatttcattttacaagtgtttacattttacaaatttctgttttacattttacaaatttattcttaattatgtttcatgctattgtaaatgtgactgttaatttacttttcagatagttcactgttagcatgtagaaatacaactgatttttgtatgttgatgtattatcctgcaatttgctgaatttgtttattagatc

SEQ ID NO: 808601 - DNA, 569 bp, Homo sapiens
agaaataggaaatttgaaaagacctattacaagcaaatgaaacttgaattagtaattacagatcttcccacaaaaagagaccaggcctacaggattttgctggtgaattctatcaaatatttaataaatctcaatcttaaacaaactccttcagaaaacataagtgaaaaaaacatttcctaactcatcctatgaagccagtattactctgataccaaagtcagacaaakacatcacaaagataggaaactacagaccaatatattttattagtattaacacagatgcaaaaatcctaacaaaatattagcaaaccaactcaggaacacatgaaaaggattatataccaccgccaagtgggagttatcccaggaacacaggttgatttaatatccttaaatcaactgatgtgacacaccacggtaacaaaataaaaaacgaaaaccacaagatcgcaacacatgcagaaaagacatttgaaaaactgaacaattcaatattcaatacaattcaatattcaaatcatgaaaaaactcaagaaattaggagtagaatagaatttccttaac

SEQ ID NO: 808602 - DNA, 569 bp, Homo sapiens
agaaataggaaatttgaaaagacctattacaagcaaatgaaacttgaattagtaattacagatcttcccacaaaaagagaccaggcctacaggattttgctggtgaattctatcaaatatttaataaatctcaatcttaaacaaactccttcagaaaacataagtgaaaaaaacatttcctaactcatcctatgaagccagtattactctgataccaaagtcagacaaatacatcacaaagataggaaactacagaccaatatattttattagtattaacacagatgcaaaaatcctaacaaaatattagcaaaccaactcaggaacacatgaaaaggattatataccaccgccaagtgggakttatcccaggaacacaggttgatttaatatccttaaatcaactgatgtgacacaccacggtaacaaaataaaaaacgaaaaccacaagatcgcaacacatgcagaaaagacatttgaaaaactgaacaattcaatattcaatacaattcaatattcaaatcatgaaaaaactcaagaaattaggagtagaatagaatttccttaac

SEQ ID NO: 808603 - DNA, 618 bp, Homo sapiens
tcctttgcccgttgtttaaatttgattgtttttctgctatggagttgtatgatttccttacaaaatttggatgctaaccccttattcatatatatgttttgcaagtatttgctctcaatgtgtaagttgccatttcattttgttgattgttccctttgctgtgctttttagttcttcttattcattcctaggaaaatgatctatttctctgctcagttgactaatacttgtaatgcaagattgaataggtgtgaggtagtaggcatgctttccttgttcctgatcccaagggaaagcttcgagtgcccccccaccccattaaataagttactagcattaggacttaggtatatatgttttatcatgttaagaaagcatcctgtggtgcctattttcttaaggcttttctattttttaacataaagaggtgttgaatttttccaaaggctttttcaacatctgtggtgataaccatatgatrtttgtctttaagtatattaatatggtggatgatatcaaggtactttctaatattgagccaatctgtattgatgggataaatcccactttgccaaagtatattatgattttttaaatatgttgtttgctaatatttta

SEQ ID NO: 808604 - DNA, 636 bp, Homo sapiens
atggaagcatccaggttctcgcattgagattaatcaaggaaataacttgacccatggagaatgagagaaaagcaaggcaggacgacggcacacccaggtgcaacacaaagccaacggaagctccccaccgaaagaagtggtgagtgaatgtgtggtcctsggaacccatgcttcttccatggatttttgcaacccacaggtcaggagatcccgtcatgagcccactccatcagggccttcagtctcacacacagagctatgtggagtgccggcaggagagcggacatgcatggagaaccaggaactttagaaactctggctatccgggcatcctagcaaaagtagctgcaactccagcaaagcaggatgttagacccctgtacctaccccaggaaagagactgaatccagtgggccaagcagccatggtctgtgggccccacttccacaacacctcacaggataagacctactggcctggaattacagctagccaccagtagcagtgctgcacctacttgggacagagctccaagggggaggggcgggccgcatgtttactgtttgggtgacttagcccttccagcctttgggatttggaaagtccaaaccaactcggggcagaagggatccccca

SEQ ID NO: 808605 - DNA, 636 bp, Homo sapiens
atggaagcatccaggttctcgcattgagattaatcaaggaaataacttgacccatggagaatgagagaaaagcaaggcaggacgacggcacacccaggtgcaacacaaagccaacggaagctccccaccgaaagaagtggtgagtgaatgtgtggtcctcggaacccatgcttcttccatggatttttgcaacccacaggtcaggagatcccgtcatgagcccactccatcagggccttcagtctcacacacagagctatgtggagtgcyggcaggagagcggacatgcatggagaaccaggaactttagaaactctggctatccgggcatcctagcaaaagtagctgcaactccagcaaagcaggatgttagacccctgtacctaccccaggaaagagactgaatccagtgggccaagcagccatggtctgtgggccccacttccacaacacctcacaggataagacctactggcctggaattacagctagccaccagtagcagtgctgcacctacttgggacagagctccaagggggaggggcgggccgcatgtttactgtttgggtgacttagcccttccagcctttgggatttggaaagtccaaaccaactcggggcagaagggatccccca

SEQ ID NO: 808606 - DNA, 584 bp, Homo sapiens
tttctatggcaatatccagttgcaaaaaggaacctataaagtaccatctatgtatttttaaaacattctttttacttttaaaaatctgatttgtcatctggtgtattaaaatccatgtaataagaacacattactaggatgtcaaatccattttattataccatcatgaaatttaattagaattaggtaactaatactatacagtattttaagtctgtttttagctctttcttcagagaatttatttggggattttatacagaatgtacattcaataaacattttgatagatgaaatttttaaagcatagacctattaggtaygacacacaaatttatacataaaagggggaaggtacatgataaaagtaaagttaacccttggcatttatatgacttctctggggaaataagattcagttgaaggtcaataactatttagacagctaaataaaggttttgaggagacacgaacacatcttctgtaagaatctggtaaatgcctacaaaatgcaacttggaatatgcaagcatatcatatatttttcaaagtagattgaactctaaaaactatttggcacctca

SEQ ID NO: 808607 - DNA, 586 bp, Homo sapiens
attttctatggcaatatccagttgcaaaaaggaacctataaagtaccatctatgtatttttaaaacattctttttacttttaaaaatctgatttgtcatctggtgtattaaaatccatgtaataagaacacattactaggatgtcaaatccattttattataccatcatgaaatttaattagaattaggtaactaatactatacagtattttaagtctgtttttagctctttcttcagagaatttatttggggattttatacagaatgtacattcaataaacattttgatagatgaaatttttaaagcatagacctattaggtatgacacacaaatttatacataaaagggggaaggtacatgataaaagtaaagttaacccttggcatttatatgacttctctggggaaataagattcarttgaaggtcaataactatttagacagctaaataaaggttttgaggagacacgaacacatcttctgtaagaatctggtaaatgcctacaaaatgcaacttggaatatgcaagcatatcatatatttttcaaagtagattgaactctaaaaactatttggcacctca

SEQ ID NO: 808608 - DNA, 594 bp, Homo sapiens
aagtgtaatgaaataaatctattttatgactctgtgtggttttatttaaagctggatatggtggtgtgcatcgtggtcccagctacttgggaggctgaggaaggagggttgcttcagcccagtagtttgagtttagcctgggcaacatagcaagaccttcatctctaataagacaaaataaataaaggcgccatcctgtatttatgtgtccccaccactttagttagctgtttatcttccactacactatactgtatcttgggccccaggatagtcaatatcaggtgtgaacttgattgaattgaaggatgtggctggtaaagtattgtttctgtgtgtgtctgtgagggtgttgccagaggagactgacatttgagtcagtggactgggagaggaagacccaccgttaatgtgggcaggcaccatccarttggttgccagcatggctagaacaaagcagccaaaagaagctgggataagtttgcttgctgagtcttctggcttccttttcccatgctggaagcttccttccgctcctactgccttggacatcagactccagattctttggtctttggactcggggacttgcac

SEQ ID NO: 808609 - DNA, 614 bp, Homo sapiens
cccaggatgtaggacatggaaccaaggaatatttttggaaatctgaggttaaatgtcccctgctgggtttcagacttacatgggagctgttgctcctttcttttggccaatttctccctttgggagtgggaatgtctactcaatacctgtaccaccattgtaccttgggaataaataacttgtattgatttcacaggctcataggctaaaggaacttgccttgagtttcagatgagaatttggactttggactttgagttaatgctagaatgaactaagacatttagggactactggaaaggagtgattgtattttgcaatgtgaaaaggatatggtatttgtggggccaggggtggaatgatatgatttggatgttttctcccctccaaatctcatgttgaaatgtgatcccaatgttagaggttgggcctggtgggagawgtttgaataatgggggtggatctctcatgaatgactttgcgccattcttgcagtaatgtgtgagttttcagtctattaattaatgcaagatttagttttttaaaagagcctggaacttcctcctccttctctttctcctactctcatcatgtgatatgcctgctcccccttt

SEQ ID NO: 808610 - DNA, 620 bp, Homo sapiens
ttttcttctgcaaaattaatatttttttcattgatgtatcattagaaataagtacctccctgtagactaagtacctccctgtagactaaggctagaactgcagctttgaggatctcagagaaggggacttttgcaaatagtggtgacaaaaatgaggagaggcattccctgaatccagtagatagagctttctggacatctggtctccgtaggaagaatgttttggacctacaggcatgctgtgttcactcagccttgtgacagacaggaagtaccatccctgtctcagagaaaggaaagagtgtgtgtctgtgtgtccgcgttgcccatgcaagcaagattagtgttttgtattacatacttttagaattaggttactgatacatgtactccaaatcatgttggtaaacacattgccagacaacactggatcccactrcacatttcgtttactgtgttatgtattatatatggccaaattttgtttcttgttcagaatatgctttttagtggtttttttttctttacctcttggtgttttaatatttgagttgattgttttaaaataagaaagtagtacagttctctgtacaataatgtaatggaacaatatccatgag

SEQ ID NO: 808611 - DNA, 575 bp, Homo sapiens
gtctgttggattttgattatttttgctagtggagaatagtatcacaaatattttgaaggtgctaataaccaaaacataattttcattgaacttgggacatattatttttcctttcctttcttggctttgtttctgaatttatctatctctttttagcctgctagacttcagataatagtaatttgctaacacttgagtgcttatgcttggtgtgccaaacattgttctaagcacttaatatgtgttaatacatttacttctcacaactcattgaagtaggtggaatgtaatattaatccattttacagatgaaattaagatagcatttaaataacttgtccaaaggcacacagttaataactggcatggaaacagatataaaagccagtgaattattcattttctgtagttgaatgaaraaattttgttgtattgaataatgtttgagacagaagagaccattggctagtatttagcaattatcatagttatttgatttatattaaaaagcatttgtctttccactaaaacataaagggaataagggcctagagttatatgagttaatagtaatt

SEQ ID NO: 808612 - DNA, 477 bp, Homo sapiens
catatacaaatcaaaaaacgtaatccatcacataaacagaaccagtgaccaataccgcatgatcatctcaatagatgcagaaaaggcctttgataaaattcaacatcccttcattttaaaagctctcaataatacaggtattgatgggacatataagagctatttatgacaaacccatggccaatataatactgaatgggcaaaagctggaagcattccctttgaaaactggcacaagacaaggatgccctctctcaccactcctattcaacatattattggaagttctggccagggcaatcaggcaagggaaagaaataaggcgtwttcaaatagaaggggagaaagtcaaattgtctctgttttcagacaacatgactccatatttagaaaaccccatcatctcaggccaaaagctccttaagttgataagcaacttcagcaaggtctcaggatacaaaatcaatgtgcaaaact

SEQ ID NO: 808613 - DNA, 472 bp, Homo sapiens
taaattttaggataattttttctatttctataaagaatgtctttggtattttgatagggattgcattgaatctgtagattgctttgggtcatatggacattttaacaatattgattctaccaatccataaacatgcaatatctttccatgttttggtgtcctcttcaatttatttcataagtgtttcatagtattcattgtagagatcttttacttccttggttaaggtaattcctaggtatttaattttatttgtggctattgtaaatgagattactttattcctttttcatattgtacactgtkgtcatatagaaatgctactaatttttacgttgattttgtatcctgaaactgaactgaattgatcagttttaatagttttttggtggagtctttaggtttctccaaataaaaaattatatcatcagcaaacaaagatagtttgacttcttcctttccaatttggatg

SEQ ID NO: 808614 - DNA, 445 bp, Homo sapiens
gcttggtaggttgtacatgtctaggaatttgtccatttcttctagattgtccattttattggcatatagttgctcatagtagccactaatgatcctttgaatttctgttgtatcagttgtaatatctcctttttcatctctgattttatttatttgtgtcttctcacttttattttcattagtctggctaaagttttgtcaattttrtcttttcaaaaaaccaactttttgtttcattgatcttttgtgttgttttcaccatttcaaattcatttattgctgttctgattgcgactatttatttttttctgctaactttgagtttggtttcctcttgcttttctagttctttaacatgtatcactatgttatctatttgaagtttttcttctttttgcatgtaggcacttatagcgaaaaatttccctcttagtactgatttcac

SEQ ID NO: 808615 - DNA, 539 bp, Homo sapiens
tttcattacccttgacctttgggagtttgattattaggtgccttgtggtagtcttccttgggttaaatctgcttggtgttctaaacattcctgtacttgaatattgatatctttctctaggtttgggaagttctctgatattatctctttggataaactttttacccytatctctttctctacctcttctttaaggccaataactcttagatttgcccttttgagcctttttttttctagagcttgcaggcatgattcattgttttttattctttttttattttgtctcctccgattgtgtaatttcagcctgtcttcaagctcactatttctagtgatagacaaattctgctattaagtgactctgatgcattcttcagtatgtcaattgcattttccaactccagaatttctgctctactctttagttatttcaacttctgggttacaattctctgaaagaattcttaattccttctttgtgatatctttaatttctttgaatttcctcaaaatagcaattttgaatcatctgtttg

SEQ ID NO: 808616 - DNA, 612 bp, Homo sapiens
agaactcattctaattaggagaatgagataataaataagtaaatatctgatatgtcagatggtggtccaggctatggacaataataacataaagaagcaaaataacagttgttcgggtggggtgacaggagaacagagaaatagttataatctcacatttttgtaaaatagtttttcacctctcttctgaaatttgcctttaccatcctgttatgtatgtttacctacatgctttttggagggaattgggcaggatatatagtaggtaaatacatatatttatcccatcataataattcaaaagtcttttgactggttttcagggtactctgtgatgattaattttaggtgtcaacttgactggattaagagattacccagatagctggtaaagcattattccggagtatgtctatgagggtgtttccaaaagagactgtcatttgaatcagtgraatgaatacgaaagacccaccctcacccaatattggtgagcactgccaaatcggctgagggcacagacagaagaaaagtcagaagaaaggtaaatctatatgtactctctgtcttctggagttgggacacccttcttctcctgcccttggatatcag

SEQ ID NO: 808617 - DNA, 542 bp, Homo sapiens
atgggattacatcaaaccaaaaggcttctgcacagcaaaagtgttgcaggaagtcagggaccccaaacggagggaccagctgaagccatgacagaagaatgtggattgtgaagattttatggacatttattagttccccaaattaatacttttgtaatttcttatgcctgtctttactgcaatctctaaacataaattgtaaagatttcatggacwcttatcacttccccaatcaatatccttgtgatttcctatgcctgtctttactttaatctcttaattctgtcagttgaggaggatgtatatccttccaggaccctgtaataattgcgttaactacacaaattgtacagcatgtgtgtttgagcaatatgaaatgtgggcaccctgaaaaaagaacaggataacagcaattgttcagggaataagagagataaccttaaactctgactgtcggtgagccgggcagaacagagccatatttctcttctttcaaaagcaaatgggagaaatatcactgaattccttttctcagcatggaa

SEQ ID NO: 808618 - DNA, 542 bp, Homo sapiens
atgggattacatcaaaccaaaaggcttctgcacagcaaaagtgttgcaggaagtcagggaccccaaacggagggaccagctgaagccatgacagaagaatgtggattgtgaagattttatggacatttattagttccccaaattaatacttttgtaatttcttatgcctgtctttactgcaatctctaaacataaattgtaaagatttcatggactcttatcacttccccaatcaatayccttgtgatttcctatgcctgtctttactttaatctcttaattctgtcagttgaggaggatgtatatccttccaggaccctgtaataattgcgttaactacacaaattgtacagcatgtgtgtttgagcaatatgaaatgtgggcaccctgaaaaaagaacaggataacagcaattgttcagggaataagagagataaccttaaactctgactgtcggtgagccgggcagaacagagccatatttctcttctttcaaaagcaaatgggagaaatatcactgaattccttttctcagcatggaa

SEQ ID NO: 808619 - DNA, 540 bp, Homo sapiens
acaaaattttaaagacggatttctttagttgattttgaggtttctggagttggctgcttaatgtgattagaccccaaaatgctaagaacactactaatagtatgcagaacactgacagtccttggcacatactcttttgagagttatgcaaagtaaatgcatctgatactcctaattcacagctcttgagaggcaaagagtttaatgactctacacagaatacctttgattgtatgtagagaaacaatgaatataatgaagttggtaagttgctcctaagtttgctggacaaagcaatgaaagaaaaagatgagctcaaggattctaactcctggctccagaagcacatactgagccgcaaatcttctaagattgccctgagtgagaatsttatctcctatagacaaagggctgaaattgcggaaaattagacacaagctcttatagtgggagtgactgacatgcaacgaaaggtgcacactcagtctcaccatgtgtctactgttagaataaggatattgattggaaaaggatgggatc

SEQ ID NO: 808620 - DNA, 539 bp, Homo sapiens
actaaggctccgtgaggtcgtaagggtagggccccgatcttatggatccctgtaaggagagaccacagggagcttagtgcccatgtcccctctctcctcatcatggaaggaggcagagagaaggtggcatctgccaaccaggaagaggaccctccccaggagctggactgaccggcaccctgatcctggacttatcagcctctagaaytgtgagaaaatgcgtttttgttctttaagccgccctgcctatcgtgtcgtgctatggcagccaggcctgaccactgtggacagtgttcatggtgattcagagaggagtggctgggggcgcacccaactggaaatggactttaacccccatcagacagaactgcactggcctgtggaatgaggagaaatcagcctgtttcggtcaagctccagagatgtggggattattgttttggcagcgagaggcatttccctgactcatggagaaattggtacttaccttgggtgtttccattaaataaggagggaggtgagatcagcttcaaggtcag

SEQ ID NO: 808621 - DNA, 539 bp, Homo sapiens
actaaggctccgtgaggtcgtaagggtagggccccgatcttatggatccctgtaaggagagaccacagggagcttagtgcccatgtcccctctctcctcatcatggaaggaggcagagagaaggtggcatctgccaaccaggaagaggaccctccccaggagctggactgaccggcaccctgatcctggacttatcagcctctagaattgtgagaaaatgcgtttttgttctttaagccgccctgcctatcgtgtcktgctatggcagccaggcctgaccactgtggacagtgttcatggtgattcagagaggagtggctgggggcgcacccaactggaaatggactttaacccccatcagacagaactgcactggcctgtggaatgaggagaaatcagcctgtttcggtcaagctccagagatgtggggattattgttttggcagcgagaggcatttccctgactcatggagaaattggtacttaccttgggtgtttccattaaataaggagggaggtgagatcagcttcaaggtcag

SEQ ID NO: 808622 - DNA, 539 bp, Homo sapiens
actaaggctccgtgaggtcgtaagggtagggccccgatcttatggatccctgtaaggagagaccacagggagcttagtgcccatgtcccctctctcctcatcatggaaggaggcagagagaaggtggcatctgccaaccaggaagaggaccctccccaggagctggactgaccggcaccctgatcctggacttatcagcctctagaattgtgagaaaatgcgtttttgttctttaagccgccctgcctatcgtgtcgtgctatggcagccrggcctgaccactgtggacagtgttcatggtgattcagagaggagtggctgggggcgcacccaactggaaatggactttaacccccatcagacagaactgcactggcctgtggaatgaggagaaatcagcctgtttcggtcaagctccagagatgtggggattattgttttggcagcgagaggcatttccctgactcatggagaaattggtacttaccttgggtgtttccattaaataaggagggaggtgagatcagcttcaaggtcag

SEQ ID NO: 808623 - DNA, 484 bp, Homo sapiens
attcattctgtgtatttttaaaattaatttctggtttaatgcattagaataactgttatttttgtggtctaacatataatctctattttgcatatgtttcatagcaacttgaaaggataaaataataattcatgcaatacaatatttgatagagatgctttcatgtaacgtttttagttaaactattcaaattcattaggtccttaatgtatacattgtctatttgatcaaagcctggragaaacataatctcctataaatggatttctgcccacttatatctacatttctaaaagtatttttagtatatttagatgttggcatttagcacaaaatgttcgagactgatacagccttgttgaacaatatcctttctttccaaaaaataatgtttctcttttttcgttaaatgatggttgccttgcatttggcctttgttgtaaatgactatttcaagccttcctttcttttcctttgcttttct

SEQ ID NO: 808624 - DNA, 606 bp, Homo sapiens
tcctatgtctttttataaatactttccaaattgtctaaaagaatatattgtttttcatgctctatatttcagcaggcgagttctatttaaacgaagaaagaaagcacattccagatccttttgttcatccagagacttcaggtaaaaattgaggcaattaaattatgcatcctggcggctttctctcaccgtcagcacgagtcgagatttttttttttttgagaagtaaaacatgaaattcaaaatgtatctcgagtcacagcacgatggtttaccagatgagtcaagaggaagacctccctccsttctgtcatcagggctgcctgaggagggcaccagccggttctccagcagtcaggtctgacaggctggcagccttcatgccatcccctcggccagaggctcagacgcgtgcaagaatcacgtggacaaggagggccggtactggtgggccttgaacgccaggctaagccatttgaattcaattttgtgtccaattagttggcttgctgtctctcaggaaactgcaaggactttcacaaaatgcagtttgatacgcaaatttatgtttttacacgaagtggtttggttgcctacatatatatt

SEQ ID NO: 808625 - DNA, 527 bp, Homo sapiens; identical to SEQ ID NO: 781615

SEQ ID NO: 808626 - DNA, 610 bp, Homo sapiens; identical to SEQ ID NO: 781616

SEQ ID NO: 808627 - DNA, 532 bp, Homo sapiens; identical to SEQ ID NO: 781617

SEQ ID NO: 808628 - DNA, 616 bp, Homo sapiens; identical to SEQ ID NO: 781618

SEQ ID NO: 808629 - DNA, 588 bp, Homo sapiens; identical to SEQ ID NO: 781619

SEQ ID NO: 808630 - DNA, 625 bp, Homo sapiens
gggtctgtgttattttcccattcattggtagcttaatgaattgttctgtctttctcatcccatcaatatttaaaaattaccacaattggggctgctattgatgggacaccggtaaagtgctttgttgtaagtcctttatcaacattattatatttaatctgatcgatgaccctataagacargttctattactaaccctattttacagatgaggaaagtgaggctcagaaggaataaggaaccaactaaaaatcataaagccaatgagtagcctagatttgaacccaagatgtgagactccagagtctgagctctgaaccacccaccatgctgctaagatttaattctttacaccaaagcaataaccacgcagtgagtgggttccagcgcccagcgatgagctcatgcaccagtgtcagtggagaggcatgttgttggccttgtgtctccagacttggagactgacctgtcctgggcctgccctgtccactcatgcctgattcttgcctgggcttggtcagtacaggtacactggccactatctgcaaagctggagcagcataaaactaatgatcccaagggtgaagcaaacagaagccttgctcttggcagcctgagctcatca

SEQ ID NO: 808631 - DNA, 625 bp, Homo sapiens
gggtctgtgttattttcccattcattggtagcttaatgaattgttctgtctttctcatcccatcaatatttaaaaattaccacaattggggctgctattgatgggacaccggtaaagtgctttgttgtaagtcctttatcaacattattatatttaatctgatcgatgaccctataagacaagttctattactaaccctattttacagatgaggaaagtgaggctcagaaggaataaggaaccaactaaaaatcataaagccaatgagtagcctagatttgaacccaagatgtgagactccagagtctgagctctsaaccacccaccatgctgctaagatttaattctttacaccaaagcaataaccacgcagtgagtgggttccagcgcccagcgatgagctcatgcaccagtgtcagtggagaggcatgttgttggccttgtgtctccagacttggagactgacctgtcctgggcctgccctgtccactcatgcctgattcttgcctgggcttggtcagtacaggtacactggccactatctgcaaagctggagcagcataaaactaatgatcccaagggtgaagcaaacagaagccttgctcttggcagcctgagctcatca

SEQ ID NO: 808632 - DNA, 616 bp, Homo sapiens
agtacttggcacgtagtaaattctcaatcaatgctagctattattattactatcactactattagcagatcaagcccacaatgttgcggtgggaagcaaaataatttgtacgaatgacctagtgcaggctggaacatcattccygtatttgtttgtttgttttgttttttgtttgtttgtttgtttgttttttcccccagcttccctgcaaatccagccctggaatttgacggctctggaaattctgattatctagaaggggatctgtcttagtcccaacatgacagatcttcaagcatcaccatcagctgactgccctgaggcctcccacgctgactcctgaaacacggtcagcagcccctagcagccagagaggtcattgggtctcccagcccacagggaggctggtgacattttcatccttttatgagctaatatcttgggctcccactcatgtctgggaacttgaaccactccagcctgcacccttatgttggtttgctgacaaagcagagagcttaagctggctgacccgagggcagagaaagggaccaggacttgtggaggaagaggcccagaggcagggggatggcagcaaggggctcctgcccaggaa

SEQ ID NO: 808633 - DNA, 616 bp, Homo sapiens
agtacttggcacgtagtaaattctcaatcaatgctagctattattattactatcactactattagcagatcaagcccacaatgttgcggtgggaagcaaaataatttgtacgaatgacctagtgcaggctggaacatcattcctgtatttgtttgtttgttttgttttttgtttgtttgtttgtttgttttttcccccagcttccctgcaaatccagccctggaatttgacggctctggaaattctgattatctagaaggggatctgtcttaktcccaacatgacagatcttcaagcatcaccatcagctgactgccctgaggcctcccacgctgactcctgaaacacggtcagcagcccctagcagccagagaggtcattgggtctcccagcccacagggaggctggtgacattttcatccttttatgagctaatatcttgggctcccactcatgtctgggaacttgaaccactccagcctgcacccttatgttggtttgctgacaaagcagagagcttaagctggctgacccgagggcagagaaagggaccaggacttgtggaggaagaggcccagaggcagggggatggcagcaaggggctcctgcccaggaa

SEQ ID NO: 808634 - DNA, 616 bp, Homo sapiens
agtacttggcacgtagtaaattctcaatcaatgctagctattattattactatcactactattagcagatcaagcccacaatgttgcggtgggaagcaaaataatttgtacgaatgacctagtgcaggctggaacatcattcctgtatttgtttgtttgttttgttttttgtttgtttgtttgtttgttttttcccccagcttccctgcaaatccagccctggaatttgacggctctggaaattctgattatctagaaggggatctgtcttagtcccaacatgacagatcttcaagcatcaccatcagctgactgccctgaggcctcccacgctgactcctgaaacacggtcagcagcccctakcagccagagaggtcattgggtctcccagcccacagggaggctggtgacattttcatccttttatgagctaatatcttgggctcccactcatgtctgggaacttgaaccactccagcctgcacccttatgttggtttgctgacaaagcagagagcttaagctggctgacccgagggcagagaaagggaccaggacttgtggaggaagaggcccagaggcagggggatggcagcaaggggctcctgcccaggaa

SEQ ID NO: 808635 - DNA, 616 bp, Homo sapiens
agtacttggcacgtagtaaattctcaatcaatgctagctattattattactatcactactattagcagatcaagcccacaatgttgcggtgggaagcaaaataatttgtacgaatgacctagtgcaggctggaacatcattcctgtatttgtttgtttgttttgttttttgtttgtttgtttgtttgttttttcccccagcttccctgcaaatccagccctggaatttgacggctctggaaattctgattatctagaaggggatctgtcttagtcccaacatgacagatcttcaagcatcaccatcagctgactgccctgaggcctcccacgctgactcctgaaacacggtcagcagcccctagcagccagagaggtcattgggtcycccagcccacagggaggctggtgacattttcatccttttatgagctaatatcttgggctcccactcatgtctgggaacttgaaccactccagcctgcacccttatgttggtttgctgacaaagcagagagcttaagctggctgacccgagggcagagaaagggaccaggacttgtggaggaagaggcccagaggcagggggatggcagcaaggggctcctgcccaggaa

SEQ ID NO: 808636 - DNA, 564 bp, Homo sapiens
tagaaagaaagaaagaattaaaaatatttgtttgcaaatgatattatcctgtatttaagaaacctgaaaaacttcacacacacacacacatacacacacacaccccaattaaacacattcagtgacattgtaagatacaaaatcaatgagcaaaaataaattgcattaccataaacaatggacaattgaaaataaaattaaraaacaatgatgtaaaattgcatagacataatagaatacttaagaataaattatccatgtagatgaaatacttgtacactgaagactacaaaacctgtctgaaaaaatgaagacacaaaaaatggaaagatattctttgttcataggttgaaagacttaatattattaaaatgaaaatactgacaaaactatctacgggtgtaatgcaattcatatcaaaattccaatggcattatttgaagatatagacaaatttatcctaaaatccatatgaaatgtcaacggtccctgaatagccaaaacactcatgataaataacaaagttgaaggtgtcacactttctgatttcaaaacttattacaa

SEQ ID NO: 808637 - DNA, 642 bp, Homo sapiens
ttttcatttcaaatttatttatttctgctctaattcttattatttgtttctattaatttgggttttgatttgctcttgcctttctagttctttaataggcatcattaggttgtttatttaaaatttttattctattttcttgtaygcacttatagctgtatgcttccctgttagtaatactttcattatatcccataggatttggtatattgtgatttcattatcattggtttcaacaatttttttaaatcttccttttttcttcgacccactggccattcaggagcatattttttaactttcatgtgtttgtattgtttctgaaattactcgttattgattttcagttttattccatcatgttcagagaagatgcttcgtattatttctattttttgaatgtttcaagacatgctttgtgaccaaacatagtctatccatgagaatgatccatgtcctgaagaaaaaaatgtgtattccatagccattggatgaaatgtcctgtaaatatctattaggtctatttggttaatagtgcagactaagtcttatatatatttttttctgtctggaagatatgcccaattctgaaactattgaaaatggcatgttcaagccttcagcttttattttttggagtct

SEQ ID NO: 808638 - DNA, 588 bp, Homo sapiens
gtcttttgattgtagagtttagtccatttatattccgtgttatcattgataagtatgaacttactcttgccattttgttacttgttttctggtggttttgtagtcttctctttattctttgctttcttcttgtctttctttcttttaatgaaagtggttttctctgttggtacaatttaattccttgtttttttgtgtgtattcattgtctaatatttagtttgaaattaccataaggcttgaaaatacaactttataacccattgttttaaactgataacaacttaacactgttttcataaacaaacaagtaaaaagaaaactaataaaaactctactaataaaaactaamccttaactttgtaccctgaatttttagctttttgctgttttcctgtatttctaattgtactgtctttgtcttaaaagtgtttgtgttcattatttttgattgattcattatttgttctctcttcataagtttacacaccatagttacagtgttaataatattctttttctatgtgcttactattaccagtgagttgtatcttcagatcatttcttcttgattatttacttccttta

SEQ ID NO: 808639 - DNA, 588 bp, Homo sapiens
gtcttttgattgtagagtttagtccatttatattccgtgttatcattgataagtatgaacttactcttgccattttgttacttgttttctggtggttttgtagtcttctctttattctttgctttcttcttgtctttctttcttttaatgaaagtggttttctctgttggtacaatttaattccttgtttttttgtgtgtattcattgtctaatatttagtttgaaattaccataaggcttgaaaatacaactttataacccattgttttaaactgataacaacttaacactgttttcataaacaaacaagtaaaaagaaaactaataaaaactctactaataaaaactaacccttaactttgtaccctgaatttttagctttttgctgttttcctgtatttctamttgtactgtctttgtcttaaaagtgtttgtgttcattatttttgattgattcattatttgttctctcttcataagtttacacaccatagttacagtgttaataatattctttttctatgtgcttactattaccagtgagttgtatcttcagatcatttcttcttgattatttacttccttta

SEQ ID NO: 808640 - DNA, 625 bp, Homo sapiens
agtggtgttaagaggaaagttcatagcattaaatgtttacatcaaaaagtctgaaagagcacaaatagacaatctaaagtcacaccttaaagaactacagaaacaagaacaaaccaaacccaaacccagcagaagaaaagaagtaacaatcagaatagaactaaatgaaattgaaacaaaaaaacacaatagataaaagaaacaaaaagctggttatttgaaaagagcaacaatattgatagactattagcaagattaaccaagaagagagaagcttcaaaaaagctcaattataaatgaaatgtgagatattacaaccaataccacagaaacaaaaaagatcattcaaggctactatgaacacctatatgctcaaaaactagaaattatagagaagatggatatattcctggaaatataaaaccctcttaaattaaatcagaaagaaatagwaactctgaacagaccaataacaagtagcaagattgaaagagtaataaatagttgccaataaataaagtccaggatcaggtggattcacacctgaattctaccagacattcaaagaagaattggtccaaattctattgaaattattacaaaagatagagaaagacagaatcct

SEQ ID NO: 808641 - DNA, 616 bp, Homo sapiens
tacaaccaataccacagaaacaaaaaagatcattcaaggctactatgaacacctatatgctcaaaaactagaaattatagagaagatggatatattcctggaaatataaaaccctcttaaattaaatcagaaagaaatagtaactctgaacagaccaataacaagtagcaagattgaaagagtaataaatagttgccaataaataaagtccaggatcaggtggattcacacctgaattctaycagacattcaaagaagaattggtccaaattctattgaaattattacaaaagatagagaaagacagaatcctccctaaatcattctatgaagccagtatcaccctaataactaaaccaggaaaggacataacaaaaaaagaaaatgacataccaataactctgatgaagatagatgcagaaattctcagcaagatactggctaaccaaatccaatagcataccaaaatgaaaatacaccatgatcaagtgggtttcatccctgggatgcagggatgatttaatgtatgcaagtcaataaagctgatacattacacaaacagaattataaacaaaaatcatatgataagacgcagaaaaagcaactgacaaaatcc

SEQ ID NO: 808642 - DNA, 616 bp, Homo sapiens
tacaaccaataccacagaaacaaaaaagatcattcaaggctactatgaacacctatatgctcaaaaactagaaattatagagaagatggatatattcctggaaatataaaaccctcttaaattaaatcagaaagaaatagtaactctgaacagaccaataacaagtagcaagattgaaagagtaataaatagttgccaataaataaagtccaggatcaggtggattcacacctgaattctaccagacattcaaagaagaattggtccaaattctattgaaattattacaaaagatagagaaagacagaatcctccctaaatcattctatgaagccagtatcaccctaataactaaaccaggaaaggacataacaaaaaaagaaaatgacataccaataactctgatgaagatagatgcagaaattctcagcaagatactggctaaccaaatccaatagcataccaaaatgaaaatacamcatgatcaagtgggtttcatccctgggatgcagggatgatttaatgtatgcaagtcaataaagctgatacattacacaaacagaattataaacaaaaatcatatgataagacgcagaaaaagcaactgacaaaatcc

SEQ ID NO: 808643 - DNA, 498 bp, Homo sapiens
gaaaaagctttccagatatatatatatatactgaggattttgatgtaagccatatctgcaatagagggcactccaagcccaagaacactgtggttcttgcacacttgtagaggtaccaccttgttgccttcgataagttctggaagaattctctagaccacaaggcagagacacttgttttcttccctttccttrtcctcaataaatgaagtctctctgtccattctgaactaccaggagctacagttgttgtgacacaagcaccccagtggccaccagcactgtaattgtgctgggtcatacctgaagccagcacagcactgggtctcacccaaagcccactgtaaccactacctgactattgcttatgttcactcaaggatctagggctctatgattagcagagcgtgaagccagccaggtttgtgtccttcccttcaagacaccaagtttccccaggccttgtccaggtccagaggtatcatccatgacccaagg

SEQ ID NO: 808644 - DNA, 591 bp, Homo sapiens
tctatacagcagggcttaatgaaaatgaaagttgttagtgattagaaggagaaggaaaagttgaaccatcaaagatcttgacgccttgcagaaggttctaggtgggaacattatttccagtcagaatggtctttaagagctttttaagaggtgagaaacagtaacaatgaaaacgtcacataatagtttgttgttggacaaacacgcagacagaacacaactcgaggctctttactgtattatctctcaccctcatgacactcaggtagacattactgttgccattttggagatgagcaactagaagcttagaacacaaccagcgacaaaccagtcggaaagcgtgaacacaaccagygacagtgtcaggattcaaacccagacatacagaagcccaatgcctcccacctttcctcaaagccatgctgctcagagctgacttcctgtggtgtttttgttggctgtgacatggtatttgaagcaggaaaacaaaacaaaacaaaaaagatcttaacttggaggacaggagagagaaactgtagagatcagtaaaataaatgaggaggtttatccagtcatctgtactattaa

SEQ ID NO: 808645 - DNA, 618 bp, Homo sapiens
taatgacctcaaggctcacacacgttgtagcatataacaagatttccttcttttttaaggctaaatagtattctactttatgtatataccacgttttcttcatgctttcactcatcatcaatggacatttaggttgcttttacctcttggctagtgtgactgacacaacaatgaacttggggtgcaaatctctttgagctcttggctttaatccttttagagatatactaagaagtagaattgctggattatatgacaattctatttataatcttttttaggaacttccattctgttttccatagcagctgcactgttttttattcccatcaacaatacacaagtgttccaatttctccacatcattgccaagacttcttrttttgttgtttgtttgtttgtttttggtaatgaccacccctatgaatatgaggtgatatctcattgtggtttttatttgcattttcctgataattagtgataccaagcatcttttcatatacttcttggccatttgtatatcttctttgaagaaatatctattcaagtcttttgcccatgtttttaaatcaggcaatttgtttgtgttgttgttgttaagttgtagaagttcttata

SEQ ID NO: 808646 - DNA, 639 bp, Homo sapiens; identical to SEQ ID NO: 788892

SEQ ID NO: 808647 - DNA, 647 bp, Homo sapiens
ttatgtgtatggcctgggtgataaaatcctctgtataccaaaatcccatgacatgcagtttacctatataacaaacctgcacatgtacacctgaacctaaaataaaagctttaaaaaaaggatttaatgtttgccctgttgagttttgggcttggtacctgtttctctttttttttttttttcctgtttcttctttttggattagaaatatctgttttgtgcctgccccatcaytgtattcttggaagtaggcaacttgtttgatttcgcaagcaaaatgctatagggaaatttgcctaaggatgaagcatgtcttgagtctcacccatatttgatatttagatgtgactctgaactttagattttaagttgatgctggaatgaattaagacatttgggacaattgaaattaaatgaatatattttgcagatgagaaggacataaattttgagggccaggggcaaaatgctgtagtttgaatgtgtccctcagaaggcatgtgtttgagacatgatttctactgtggaggtgttgggaggtgggaacatttggaaaatgtttaggtcacgaggcccctactctcatgaattgattaatgccattataagaagggcttgcaggagtgagtttgctctcttctgctcct

SEQ ID NO: 808648 - DNA, 647 bp, Homo sapiens
ttatgtgtatggcctgggtgataaaatcctctgtataccaaaatcccatgacatgcagtttacctatataacaaacctgcacatgtacacctgaacctaaaataaaagctttaaaaaaaggatttaatgtttgccctgttgagttttgggcttggtacctgtttctctttttttttttttttcctgtttcttctttttggattagaaatatctgttttgtgcctgccccatcattgtattcttggaagtasgcaacttgtttgatttcgcaagcaaaatgctatagggaaatttgcctaaggatgaagcatgtcttgagtctcacccatatttgatatttagatgtgactctgaactttagattttaagttgatgctggaatgaattaagacatttgggacaattgaaattaaatgaatatattttgcagatgagaaggacataaattttgagggccaggggcaaaatgctgtagtttgaatgtgtccctcagaaggcatgtgtttgagacatgatttctactgtggaggtgttgggaggtgggaacatttggaaaatgtttaggtcacgaggcccctactctcatgaattgattaatgccattataagaagggcttgcaggagtgagtttgctctcttctgctcct

SEQ ID NO: 808649 - DNA, 647 bp, Homo sapiens
ttatgtgtatggcctgggtgataaaatcctctgtataccaaaatcccatgacatgcagtttacctatataacaaacctgcacatgtacacctgaacctaaaataaaagctttaaaaaaaggatttaatgtttgccctgttgagttttgggcttggtacctgtttctctttttttttttttttcctgtttcttctttttggattagaaatatctgttttgtgcctgccccatcattgtattcttggaagtaggcaacttgtttgatttcgcaagcaaaatgctatagggaaatttgcctaaggatgaagcatgtcttgagtctcacccatatttgatatttagatgtgactctgaactttagattttaagttgatgctggaatgaattaagacatttgggacaattgaaattraatgaatatattttgcagatgagaaggacataaattttgagggccaggggcaaaatgctgtagtttgaatgtgtccctcagaaggcatgtgtttgagacatgatttctactgtggaggtgttgggaggtgggaacatttggaaaatgtttaggtcacgaggcccctactctcatgaattgattaatgccattataagaagggcttgcaggagtgagtttgctctcttctgctcct

SEQ ID NO: 808650 - DNA, 647 bp, Homo sapiens
ttatgtgtatggcctgggtgataaaatcctctgtataccaaaatcccatgacatgcagtttacctatataacaaacctgcacatgtacacctgaacctaaaataaaagctttaaaaaaaggatttaatgtttgccctgttgagttttgggcttggtacctgtttctctttttttttttttttcctgtttcttctttttggattagaaatatctgttttgtgcctgccccatcattgtattcttggaagtaggcaacttgtttgatttcgcaagcaaaatgctatagggaaatttgcctaaggatgaagcatgtcttgagtctcacccatatttgatatttagatgtgactctgaactttagattttaagttgatgctggaatgaattaagacatttgggacaattgaaattaaatgaatatattttgcagatgagaaggacataaattttgagggccaggggcaaaatgctgtagtttgaatgtgtccctcagaaggcatgtgtttgaracatgatttctactgtggaggtgttgggaggtgggaacatttggaaaatgtttaggtcacgaggcccctactctcatgaattgattaatgccattataagaagggcttgcaggagtgagtttgctctcttctgctcct

SEQ ID NO: 808651 - DNA, 416 bp, Homo sapiens
ttgatatggattgcactgaatctgtagaatattttgggtagtatagacgttttagcaatatttagtattccaattcatgcacatggaatatctttccattttttgtgtcctcttcaatttttttcatcaaagttttataatttttattgcagagatttttctattctttggttaagtttactcctaggttttttatttttttgtagcaattgtaaatggaaatacytcttgatttctatttcagaatattgttagctgcagtgaatttgtttatcaattcttatagtgttgtgatggagcctttaagttttaccaaatacaaaatcataccacctgcaaacaaagataattggagttcttcttttacaatttgaatgctctttatttctttttttgtctgttttctctagctacaa

SEQ ID NO: 808652 - DNA, 527 bp, Homo sapiens
cataaaaataagaggttcatccctggacatttgtaaactgtttttttctgctctttctacaccctgtcagcagttaacttttaagcaagtttttttgtttgtttgtttgtttccttttggaagatgttttgctaggctaggaatgataagggtcactgtttatattctctgtaaagctttaattgtgaaaaaggatgtgtgagactggtcttaagctgtagccaatctggtgtgctttgcatgtctgtacggttcatagaaaactttgctgcaggcctccatcttttttttacatcctggaagtatggcctgtaactmcatggcaagactttgtttagcaatcctgacttaaggaatgagtctgtttctggtttaatatctgcaagttttcctacccctgtctcttaaagggacccacccaggaactgggttttttttctgcctgtctgtgtaactatatatgtgttgtgtatgatatctgcaaaaaagagctctaattaatttggcctaaagaaagacaagcactt

SEQ ID NO: 808653 - DNA, 501 bp, Homo sapiens
tgcacgggctgttccctctcctctcctgcaacttccttcccccacatgcctacatggcttgcctcttcacctccttcaagactctgctcaccttcccagaccaccttttcttaaaaagcatcccagcccaccccacactccctactcctmttttccaaccttttctaccattgcaccttattgccatctgacatactgtgtatatttgcttcttcttcccacagtaggatctgagccacatgtgagctgggaagaggactgttttgttagtggcatggaagtgagaggggtcaaccctccagactaccagtcccaccactacaggtcccaccggcctcagcattcagccccatcacccaacctgccagccccaaaaccaacctcctcagcatctcctgagcacctatttgccccaatgccaagccaaggacagacttggtctccggccctccaggatcctgtcttcactgggaaggctggatagtggggagccggtagtcc

SEQ ID NO: 808654 - DNA, 631 bp, Homo sapiens
agtaaaaggcacaaatcctttaaatgtcagtgtgtgggtttggagggttgtttttggcttatttgttttgtagctttttcccctaaccattgcaagttattaggaagaaacaaaagagaaatgcagtctgaaaacattcttagcctctgccccaagtgaacctctgttgaatatcaaaatacagctcatgaaaacaaaccaaaamaccagaatacattcccacactctccatgaaagattcaggagttggaacagatatctcaggatttacactcaaattgtaccacagggcagcagtcactggcctgcaagtcaggacaaggaggaacacagcagtcctgacgtctaagaagatgcagctcagctcccgggtggtgctcccccttgcaagcccagccccggctcactctacgtttccaccaaacacacagctcaggtacaacattcttacctccaaaggacttacaattgaaaattctcacagaccacatcacgtgtcagacccaaatgctcattagatgtcacttgcttggaatgaagagcctctaatgtccaacgggcatccggccatcactcaggggatacgatttctagattgctttctcattaacttgtgtttgatccttacatt

SEQ ID NO: 808655 - DNA, 538 bp, Homo sapiens
tggatcccagacatcagcatcagttaaagctttccagaggattctagtacacatcctaggtgagaaacactgtggacccctactctactcactagggtggctaccccagttgcaaccttattcctgacccccttgtctcctcttcttatttcaatttgaggctttagctgtgtcccctacccgacactgtcccactgytgtccatcagaatgaattatcagaaacctcgaagtagcctctgtgtgcagcaactcttatttttcaaacaaaactgggacatgggagctggcagaaaaactactgtgctcttccaaggcagtggccccaggcaagttaggacagggctttggagttctcatccttgtctggacccatatctggtccaaggtcacacacatgtgtgtgacctcatacaaggaaatgaacctcatttggtctcagtgtgctcctctgtaagtcaggcaccatgacagccacctcatcaggctgttgggaaaacacaatgagaatcatgaatcaagcatttgacattcaggag

SEQ ID NO: 808656 - DNA, 623 bp, Homo sapiens
gtggtgggggtgggatccagtgccagacagctgtatgaacacgctctcctggctacctgggccccatctgtttgcttcgggctgacagtgagataagggacaatgacttttccctcctgagccacatgttagtgaagcgrtggagataattctgctctgagtcctgacgggaagttgctggggagcaactttacagtgctcctggcttggggcactacccactcggggctttgtggcaagctattccccctcacggccaaggaacctggcttcccataccacctcctttcctccacccaccgtctccctatctgaatcctattcacttttcaggtcttggctcaaatcctgactcccctgtgaagatgtcctgaccctcccagcctagagccactactccctccttgaatctcaggatctccaactgtgacatggccatactatttgccacatccccacagacggattgtgatgaggaaggaaagagagagtccatgtagcatgctagatgcggtgtctggtgcaggcctgtggtgagttccctgcctcttcctcttcctcccctctgacccccagcatgcaggcatggcggccttgatcacctgctgccttctctagataat

SEQ ID NO: 808657 - DNA, 488 bp, Homo sapiens
ataagggctttctctaccatgctcatttctttttgagacttgactaaggtcacccttagcatccatgtttctacaacagactgtccaaggaaatctcagctttttctatcatgtcctcaacattcctccagcctttccctactgtccaattccagagccatttcactttttttttttttttttttttgagatggagtctggctctcttgcccaggctggagtgaagtggtgcaatctcggctcactgcaagctccacctcccgggttcaagagattctcctgcctcagcctcccgagtagctgggactatagtcacccaccaccacgcctggctaattttttgyatttttagtagagacagcgtttcaccatgttggccaggctggcctcaatctcctgaccttgtgatccacccgcctcagcctcccaaagtgctgggattacccatttcacatttttagtcctttgttatggcagaaccacacctt

SEQ ID NO: 808658 - DNA, 696 bp, Homo sapiens
catggtgatttcttctcctctagaacgataagggctttctctaccatgctcatttctttttgagacttgactaaggtcacccttagcatccatgtttctacaacagactgtccaaggaaatctcagctttttctatcatgtcctcaacattcctccagcctttccctactgtccaattccagagccatttcactttttttttttttttttttttgagatggagtctggctctcttgcccaggctggagtgaagtggtgcaatctcggctcactgcaagctccacctcccgggttcaagagattctcctgcctcagcctcccgagtagctgggactatagtcacccaccaccacgcctggctaattttttgtatttttagtagagacagcgtttcaccatgttggccaggctggcctcaatctcctgaccttgtgatccaccygcctcagcctcccaaagtgctgggattacccatttcacatttttagtcctttgttatggcagaaccacaccttcaagtaccaaaatctgtatttttttgaattgctgttactccaaatttccccaaacttagcagcttaaaacaacacaaatttattatcttatatacttgaggagaaaagtccaaagtggatctgacggggctaaaatcaaggtattggcagggatatgtttgtgtctacagtctctaggaga

SEQ ID NO: 808659 - DNA, 694 bp, Homo sapiens
ttgttatggcagaaccacaccttcaagtaccaaaatctgtatttttttgaattgctgttactccaaatttccccaaacttagcagcttaaaacaacacaaatttattatcttatatacttgaggagaaaagtccaaagtggatctgacggggctaaaatcaaggtattggcagggatatgtttgtgtctacagtctctmggagagacttggatttgctgcattttttggctttaatagcctgcctgcattatttggctcatgaaccagttctatcttcaaagctaataatagccgttcaagtatttcttatatcacatcactctgacagtaattcttctttctccctcctccacatttaaggaactgtgtaattacctaaattaaggataatgtccttaagttgtgatcagcttgttagcagtttttcttccatctgcaatcttaagtacctcttgccatgtgacatagcccattcacacgttctgagtgccaggacatgggcacctttgggaagttgttatcctgcctttgcccaccatcccattggattcttttttgtggatttcactttaaatacttatttaaagtatttcttcaaataatactttaacgtgttaatcacaattattttaacaacagtgtcaaccatctctgatatctgggtcatctgtgggtctgagtttgatttctgtt

SEQ ID NO: 808660 - DNA, 673 bp, Homo sapiens
gaaagatctaaaatcaataatctaagctccaatgtgaagaagctagagaaaggactacaactgaagcctataaagcaagaacaagaaaagaaataattttaaattttaaacaagaagtcaatgaaattgaaccagaaaagcaatagagaaaatcaataaaattaaaaggtggttcttggaaaagttttgtaaaattgataaacttctaagcaggctaaccaatgaaaagagaagacacaaattgcaggtgtcatagaagaaatagtggtcatcgctactgaatccagggacattaaaatggaaacaaagcagatataaaaamctccaactccacacatctgatcttttagataaagtgaactgatttcttgaaagacacaaaccatcaaaacccatacaatgagaattatatcatttgaataggtaaatagctaataaataaattaaatcaataatgaacaacctttcaacaacaatgacaacagcaatgacaagaaacaaagcccagatgatggcattggtgaattctaccaaaaacctttaaggaagccatgataccaattatctactgacatagtcgatgtatgtccccacccaaatctcatactgaaatataatctccagtgttggaggtggagcctggtgggaggtgattggatcatgggggcagatt

SEQ ID NO: 808661 - DNA, 396 bp, Homo sapiens
gctgaataaaagtcagtttaaaaaggatccatattgtgtgacttcaattatgtggcatttaggcaaagataaaactatgaagatagtaaatatatcagtgattgccacagattcaggaagcgagattgaggattatatatartatatatatagttatgtgtatatatataattttaaaaaaatatccctaaggagctcaaggaaataatgggatggaatgaagaatgtgacacaataatctaactgcactaaaatgtataatgcagcctcatggaagaggatgtcagagaaagaagctgatgcatgtaactttggaagtcagtggtcagtgacactagagacaaaagaagctgtgcacagcactgtgctttagttgacacagttgcttctcacaga

SEQ ID NO: 808662 - DNA, 574 bp, Homo sapiens
tctgttgttttttgactttttaataatagccattctgactagcttaagatggtatatcattgtggttatgatttgcatttctctatcagtgatgttgaggtttttttcacatgttttttggcctcatgtatgtcttcttttgagaagtgtgtgttcatgtctttgcctactttttaatgggctgtttttttcttgtaaatttgtttaagcttcttggagactggatattagacctttgtcagatggataaattgcaaaaattttatcccgttctgtaggttgtctgttcactctgatgagttttgtttgctgtgtagaagctcrttagtttaattagatctcatttgtcaattgttgcttttgttgcaattgcctgtgcctatgtcctgaatggtattgcctaggattttctaatagggtttttgtagttttgggttttacatttaagtctttaatccatcttgagttaatatttatatatggtataaggaaggggtccagtttcaattctctgcatattgctagccatttctcccagcactatttattaaatagggaatcctttccccattgc

SEQ ID NO: 808663 - DNA, 600 bp, Homo sapiens
ggtaatatgttacagcagccacacgaaacaaatatagctgtgtactacctaacaacgtttctgtcaatgatggaccatacatgcaacagtgatctcataagattataatggagctgaaaaattcctgacattgtagctgttgtagtatggcagcacgacacatttctcacatgtttgcagtgatgatggtggtgtaaacaaacctattgtactgccagacgtataaaagtattagaaaaatgtggaaccagcccaaatgcccatcaaccaacgagtgtataaagaaattgtggtatatatatatatatatgatggaatactactcagccataaaaaggaagaaattaatggcaktcacagcaacctggatggaattggagactattattctaagtgaagtaactcaggaatggaaaaccaaacattgtatgttctcactcataagtgggagctaagctatgagaatgcaaaggcataagaaagatacaatggactttggggacacaggggaaagacggggagaggggtgagcaataaaatactacaaattgggttcagtgtatacagctcgggtgatgggtgtaccaaaatctcacaaat

SEQ ID NO: 808664 - DNA, 543 bp, Homo sapiens
tctccaggtccctaagggctgggctcgtatgaagaaaatcctagtgtcagacatagagaacactaaagacaccaaatgcccatctagaaaccgcattgcaggtcagtggggaggagacaggagaatcatttcagggatgttccacagtccagacactgtgctagagattagggataaragggtgatgagagataggtaaggtctctgccttcatggaacccatagtgaggtgcaagacacaagacagaggtaagcacactaactagttacaaattgtgtctgcagggatcaagaggaaaccaccactttagatgggggagtggggctcagagagacctctctgaccaggggctttttaaactgagacctgagaaccaaaaagaaggaacatgaaaaacagagaaagaagttactaagacaaaaagatagcatgtgaataaacctctaggtaaggaaggactttgaagcctggtgttttctaggaactgagaggaagccacagtgaatggagtttggggagcaaggagaaggtggtaagaactc

SEQ ID NO: 808665 - DNA, 601 bp, Homo sapiens
gctgggattacaggcttgagccactgcacctgacctatttgtgtatatactttttattctctacctgacatgtcgctgggcagaaatagggtctcattcatctttgtgttcttcataatacttaatacaatctattgcacatagtggatatacagtaagtatgttttaattgacttgagatcacagggatggataaagtaggtagcattcatagtattgtactctgtaccaggtaccatgccaaagttttacaaaaattacctgattgatcacacagtcctataagrtaagcagcatttctagctttacttgcccaatacttcatagccagtaagttgtagaatctggaccagaatccaaattcctttggctctagatactttgctcttagtcattgtgctatagtgcaaaacaacaaggtgggaactcaaagatttagagtttagaatgtgattgatggatgaatttggcatgaaagactaacttttatttcctggaggacatagcagctaggtttgggaagatagtttgggactatattgtggaagactttgaatgccaggcatggtatcagaagttacctcccttccctagctctcca

SEQ ID NO: 808666 - DNA, 633 bp, Homo sapiens
ggaacaatttcaacagatttgtggaggtggatccctgattagaatgtgtccaagagagaatgggaggagaaaaattgggaacatcaaatagagaccactattacaaggggatgagagagtagtcaaactagttacctaggggaagaactttcctgatagatgaaacagacattgcaaatgctctaagacaatagtgagtatggcttgtttgaggaacagcagggaggctacagctggggcagagtgagtgaggaacagaacaggcagagctagtgggagatagaaaagtatggtcatctggggctccctcttggccccaaactgatgtaggtagaaggcctagggaagtatagtcttagacaggaacaccggttcaaatgatgtcttatattgtgtatagaaacatatttcatatgtatctgtaaaagagatttgcatcaaaggrgagcaagggaattgtgtaatggcaggtgggaaagtggagccaagagaatataaatataaatatatatatatacaatgataaatatttgagtgtgatatataataaagatgagaaataacagtataaatgaatcctgattgactgatcaaaatgacccaatagacagcacaacattgataatgctggag

SEQ ID NO: 808667 - DNA, 561 bp, Homo sapiens
ttgagtttctgattaccctttccaaaggaggcaatcaggtatatatttatcacaagagcagaatgatgactttgaatagaatgggaagcaggattgccctaagcagatcagctggctttgttcttagcttagtgatttgggggccccaagatattttcctttcacatttcccccttttccttttttcttttctttcttttcttttttttcttttttttttttttgagatggagtctcattctgtcactgaggctggagtgcagtggtgatctcagctcactgcaatctctgcctcccgggttcaagtgattctcctgcctcagcctcccaagtagctgggactacagtcatgtgccaccatgcctgkgtaatttttttgtatttttagtagagacagggtttcaccgtgttagccaggatggtcttgatctcctgacttcatgatccgcctacctcagcctcccaaagtgctgggattacagtcgtcagtcactgcgcccggcctccctccttttctttttaaaaatattttagagaaagcattttaaaaaaatgagtctc

SEQ ID NO: 808668 - DNA, 632 bp, Homo sapiens
tatatatctaacttcctgtcccatcatagccaggaactcaattttaaggtttttctggggtcctcttggcaaagaggggattgtgcaaaagcaattctacaagggcaatttacagcaataaatgcctatatctataaagtagaaagatctcagatgaaaaatacaacattgcacctcaataaacttgataaaaagaacayagaaaaccaaaaagtagtagatggaaagatataataaagatcagagcagcaaaaaataaaatggaaataaaaaacaataacaacatcaaaaaagatcaatgaaatgaagattttttttttgaaaagaaaatcaacattgacaaacttttactttactaacagagaaaaaaatgactcaaataaaatcaaagatgagaaagaaaatattacaactgatactagatataaaaagattagaagagaatattatgatcattgacagatatgccaaaaaattttaaaacctataataaatgaataagttactgaacacataaaacctacaaagagtgaatcataattaaatagaaacccaaacagaccagtggcaagtaacaacattgaatcagtaataacaagtctctcatcaaagaaaagcccaggtcctgatgc

SEQ ID NO: 808669 - DNA, 632 bp, Homo sapiens
tatatatctaacttcctgtcccatcatagccaggaactcaattttaaggtttttctggggtcctcttggcaaagaggggattgtgcaaaagcaattctacaagggcaatttacagcaataaatgcctatatctataaagtagaaagatctcagatgaaaaatacaacattgcacctcaataaacttgataaaaagaacacagaaaaccaaaaagtagtagatggaaagatataataaagatcagagcagcaaaaaataaaatggaaataaaaaacaataacaacatcaaaaaagatcaatgaaatgaagattttttttttgaaaagaaaatcaacattgacaaacttttactttactaacagagaaaaaaatgactcaaataaaatcaaagatgagaaagaaaatattacaactgatacyagatataaaaagattagaagagaatattatgatcattgacagatatgccaaaaaattttaaaacctataataaatgaataagttactgaacacataaaacctacaaagagtgaatcataattaaatagaaacccaaacagaccagtggcaagtaacaacattgaatcagtaataacaagtctctcatcaaagaaaagcccaggtcctgatgc

SEQ ID NO: 808670 - DNA, 657 bp, Homo sapiens
acacacagcttctaacttcatgtcagtagaccagcgggttcattaccaagaccgacaggtcagccatggcccacagctgcggccaccattcagcctgacttcctctcccacctacccagatatgcaggtagcatgaggaaggcagaagggaggctctttctcyaccctctacctgcctggcacctggcaacccaccagttgagatgctggtgagacataaagagaaaagagttgtatgggatggtgatttccaggtggaaaaggagtacagtgaagtcagactagcctttgaacctacctgtgttcaaatcccagttctggccacttactagcctgctaggcctgcagacagtccttaagttctccaagcctcagtgtcctccatcatacaatggaagtgaaaacagtgtctatgagttttatctttcaaagactacttatgagagctcacatggagaaacacctcaagccatgcatctagcaagccgtcagcacaggctggctgctcccatttggctgctcttccctatggtcattggcatgttctttgtggccctggccccgccacagagactggatcctctggtgacagtccagaagtgactgactgcccaccacagagagttctgcagccctgcctgcacaccatgagccacc

SEQ ID NO: 808671 - DNA, 569 bp, Homo sapiens
cacagttggccatctcccaagaaaaacactgttttgtgccctgagagctgagtgggaggaattcattgacaatgaaattccttagcaccacgctggagtcgaaaagtttcctctgcctttattgaacagaaaagattttacttgaactgatttgatgacctccttggattataacctcgttttggaaagcaataaaaarccgttttcttcacacaagaccttgtaatttactcagcacttgcttcatttcacacttctgaaaagtaaatcccatagtagcaaatgtttacttcctaaactgcatactaaacgtttcagtcatatttgatgttgtccaaaaagtcttcgcactggaaattctgcggctatatagacttaagactctccctgtgtgactattttatatgacattgtatttcagaacagaaagtttggttttagaaacctttagatgtaaagttttcttgagaatagtaaacacctgaagctgtgtagtctccacatcagaggcttacaggtgtttgtcttccaaactttgaaagaaatttatggccagggtcccaaaaact

SEQ ID NO: 808672 - DNA, 580 bp, Homo sapiens
aaagggacagcaaggaagccaatgaccgggtgaaatgagtgaagagagcgttcagagaggacagccaaaagctctgtgggccacggcaggactttgtcccttgctgagcaagatgggaagccactgaatgtttgcgggcagggtagtgacatgctgtgacttatgtttaaaaggattactccttcatagcgatgaagaaaagctctataacaaaagttccgttgtggtggttatacagcattgtgaatgyacttaatgccaatgaattgtgtactttaaaatggtaaattttatgttatatatgttttaccacaataaaaataatttttttaaaggatcattctggctgctatgtgcagaatagactgcagatgggcagaggtagaagcaggaagactagagagatggctgtggcaacagtgcagtcaccaggcgatgctggcttgggctagggtactagcaagggatatgattagttgtgggcatattctggaaatagttcagagctagagctgacagggcttaccaatgacacgtggaatgggagagagtttagcccaaacagctggaggaatggagt

SEQ ID NO: 808673 - DNA, 616 bp, Homo sapiens
ccactaatgcactacaatttaactcagaacaaaatataagtttcatatggtgttctacaatgccctacagagcctgactcgcgcttttaccagtctttctgttatttacatgacctcagatatggcctttttgaattcccttaaaaatgctaatcaagatcttcagggctattgtacactctgcattctctgcctgtaatgcttttccctagaaatctgcagagcttgctgccttacttcattcagatctttgttaaaatgtcaccccataagaaaggacttaactgtccaccttattaaaatatccttccaatttccccactttccactggaaatttgtttcctttttctagtcttatttttcytatctcaaatttataaatatatttattgtttatttttcatcacaaaagtttaaactacacgagagcaagcgcattctctgttccttcattattgtatcacccatgcccaaatcactagaggatatggatggtgctccaaaaatatttgatgaataagtaaatggatattagtaaatgagtttatgtttacctcttcagacattgaaaaatattaaaatagtacatatgcttcttcccccatcttccttctt

SEQ ID NO: 808674 - DNA, 588 bp, Homo sapiens
gtagaatttatagtatctaaaaccctgtgttctttccaccaagccatattacctctcataacatgaagactcttttttagttctcaatctatcaagtagttaagagactgtgggacttgaggtcttatccttctctgaaacyaacaataggtttaagatgctctagaatactacttttcaagtttcattgcattgattctcaatgattccaagttgatattttctgagttaataggaaactccattattagtaatgtcaattaatataatagttaagaataaaaactgatacagttctacctggttgaagtctcaactctatttaaataatattttatgcctcttgtaccacatttataaaataagtcaaataatagtagataatttgtagagttactgtaaggattaagggaggcaatatatctaaagtatttagaaatgcgccttgttggcattttgtaggcactacataattactagtaatttttgtgattataaatgaagcaaatgatgtttcctcttcttttgggaaaaaaaagaggaaacatacattatttagaagtggttaagtgttcgaaaattagtgac

SEQ ID NO: 808675 - DNA, 644 bp, Homo sapiens
tccagagagagagcacatgttgggtttcactcacatcccaaattctaagcagctgctgcaaggtgacattttaagtgcctagccatcaccacactgcaccctgccctggcggtcaacaatcccttaatctccacatccctggaaccccaatgatatgctctgtccacatctgggaactgctgctggctgcagctgtcagggctgaagtatgaacaattggctgtgatctsactaccccaagtagcagggccactgtgcattttaaattgccctgagaaaaggctactccacttagagctgccgcctggagccccagctgcctgtttatggctgttgccactgaaagccatcccaccagggagcagcagggatgcggcacagccactgctgccccaacccaagcattcttataaaggtttgagaattttgtcaatgactaccacagtcagtaccaacaaactccacagagaagctcaggatagttctgcccagcacagcacaatctcctcagtgcccaggcacaccgtctgatgtcctcaagaccactctgtcccatctatcactgtacctgagtactcttcttagggtcttgaggatgggcctaaacaaacttctactatgcccacagctggacttacccacat

SEQ ID NO: 808676 - DNA, 644 bp, Homo sapiens
tccagagagagagcacatgttgggtttcactcacatcccaaattctaagcagctgctgcaaggtgacattttaagtgcctagccatcaccacactgcaccctgccctggcggtcaacaatcccttaatctccacatccctggaaccccaatgatatgctctgtccacatctgggaactgctgctggctgcagctgtcagggctgaagtatgaacaattggctgtgatctcactaccccaagtagcagggccactgtgcattttaaattgccctgagaaaaggctactccacttagagctgccgcctggagccccagctgcctgtttatggctgttgccactgaaagccatcccaccagggagcagcagggatgcrgcacagccactgctgccccaacccaagcattcttataaaggtttgagaattttgtcaatgactaccacagtcagtaccaacaaactccacagagaagctcaggatagttctgcccagcacagcacaatctcctcagtgcccaggcacaccgtctgatgtcctcaagaccactctgtcccatctatcactgtacctgagtactcttcttagggtcttgaggatgggcctaaacaaacttctactatgcccacagctggacttacccacat

SEQ ID NO: 808677 - DNA, 600 bp, Homo sapiens
tcatgcacatagaataaaagccaaatagccctacccaaccaacatgacaaaaatatcttcaggaaaaagttcttccccaaaaatatattttttaaaaattgaggaatccaactattataccaaatgcacagataaccacagaaggacacaagaaayataaataaacaataaaaatttcacctccaaaagaacacaatagttctctagtaacactccagtgaagaaacttatgaaatctcaaaaaaaagaatataaaataatgatattaataaaggtcaatgagataagaaatctcagaaaaacaataaaaagaaataagaaatttttttaaaaaattcaggatatgaatgagaaatttaccaaagagataaatattttaaaaaagaaaaaatatatcagaaaccaaaaaattcatcgaaagaaacacaaaacacatttgaaaacttcaagaatacagtatatcaagcagaagaaagaaatcagaactagaagacaagtcttttgaaataatccagtcagacaaaaataaagaaaaaaattttagaactgttgcaagaaaaagtaaaataactaggaatgtacttacacaagtagagaaag

SEQ ID NO: 808678 - DNA, 600 bp, Homo sapiens
tcatgcacatagaataaaagccaaatagccctacccaaccaacatgacaaaaatatcttcaggaaaaagttcttccccaaaaatatattttttaaaaattgaggaatccaactattataccaaatgcacagataaccacagaaggacacaagaaatataaataaacaataaaaatttcacctccaaaagaacacaatagttctctagtaacactccagtgaagaaacttatgaaatctcaaaaaaaagaatataaaataatgatattaataaaggtcaatgagataagaaatctcagaaaaacaataaaaagaaataagaaatttttttaaaaaattcaggatatgaatgagaaatttaccaaagagataratattttaaaaaagaaaaaatatatcagaaaccaaaaaattcatcgaaagaaacacaaaacacatttgaaaacttcaagaatacagtatatcaagcagaagaaagaaatcagaactagaagacaagtcttttgaaataatccagtcagacaaaaataaagaaaaaaattttagaactgttgcaagaaaaagtaaaataactaggaatgtacttacacaagtagagaaag

SEQ ID NO: 808679 - DNA, 635 bp, Homo sapiens
acattcttaaaatacaatgcatagaaatggaaaactaattagaacttgcccagttttaaggtaggttggggagaaggatattgtgtggttataaaaggtcaacatcaggaattcttgtggtcataaaactattctgtattgtatgtgcaggtgtctctgttttattttgcacaactgtgtgtgaaaatacaattattgtaatatttcaaaaagtttaagtgaaaaagaaactaataaaagggactgagttacagatacaatagaacaaaaaataattttctatggaaatcagattccatctcttttgagaatggttaaataagtgcattgcttgtatctatgtgcccaatacttagacaactaaatatcaacataattacatccagtggaagttctttgtaagtgtcacgaatgggaaacttacagtatatwtataatctttcttaatgtgtatttattcattcactggaatgaataacaaaataataacaaaacttttaatattgagatgtgtaggaggaaatgcaagaaggaaaagaaagagaaaaagaaaaataatagctgataccagttttatgatgtaaatatagtatcttaaattggtcaacacaaagagcaagtactgaaataattta

SEQ ID NO: 808680 - DNA, 635 bp, Homo sapiens
acattcttaaaatacaatgcatagaaatggaaaactaattagaacttgcccagttttaaggtaggttggggagaaggatattgtgtggttataaaaggtcaacatcaggaattcttgtggtcataaaactattctgtattgtatgtgcaggtgtctctgttttattttgcacaactgtgtgtgaaaatacaattattgtaatatttcaaaaagtttaagtgaaaaagaaactaataaaagggactgagttacagatacaatagaacaaaaaataattttctatggaaatcagattccatctcttttgagaatggttaaataagtgcattgcttgtatctatgtgcccaatacttagacaactaaatatcaacataattacatccagtggaagttctttgtaagtgtcacgaatgggaaacttacagtatatatataatctttcttaatgtgtatttattcattcactggaatgaataacaaaataataacaaaasttttaatattgagatgtgtaggaggaaatgcaagaaggaaaagaaagagaaaaagaaaaataatagctgataccagttttatgatgtaaatatagtatcttaaattggtcaacacaaagagcaagtactgaaataattta

SEQ ID NO: 808681 - DNA, 543 bp, Homo sapiens
cacccagccctgaacttgtgttggaactgtctgataaatgcgggaagggacagccctcaggcctttcggcctgccactcagccaggccggcacagcaggggtgctgagtggtggcagagacaagacgcctgacccaccctccatgcgtggagcccagggcccagcctcctgcccagccccttgggaatcacagggctggggtctctttccaagccacttcccccacccctaaaggaacaatcaactccgatagcttgggaggagcagccaaaggcctgaggtcctggtcccaaccctctccctgcaccccccttgstggactctgctatgtgagggagacagatgtctctcccttccactgcacctgcagcccagccatggcctgggacagtcggcactaaacagaaattattttcttttctttctttgttttttttttttttttttttgagacagacactctgtcacccaggctggagtatagtggtgcagtattggctcagtgcaacctccatctcctgagttcaagtgattcttgtggtt

SEQ ID NO: 808682 - DNA, 517 bp, Homo sapiens
gcctgatagaaagagaacctggagctctccaggcaagctgggcaggtttatgagctcggagcctgagaggtgaaaggtgaagctcctccccttctgctctgaccctgtcgtgtgtgctccccaaatatttggtgaaatccatcccactcagaaatcgctttggatttgagcgtgggatctgggtcagtgatagcaacagagcagccctcgaggtaggaacagaggcttccccatcctctaggaatttgcataaatatrctaggagattgtgaaatgaatgaaagtccaagaaaatcacatctagatctgtgaggcaaggagagaggcccagatgccatctgggtaacatatgggaaagtgtttgcaaactttaaccactacgtaatgcaaagaatcatttgctatccttgttatatacaaaaatcttcatcaaaatgtttgcattgagcagttgaacctaatgatgaaagaggcttgcaagagcaggctggccgggtcagccctgggacagccagcc

SEQ ID NO: 808683 - DNA, 552 bp, Homo sapiens
tctaactacctgtaacatttggaaatggtgaagctggtggaatgttgtgggaagtcagggaccccaaacggagggactggctggagccatggcagaggaacataaattgtgaagatttcattttaatatggacatttatcagttcccaaaattaatacttttataatttcttatgcctgtctttaccgcagtctctgaacataaattgtgaagatttcatggacatttatcagttcccaaataatacttttataatttyttatgcctgtctttaatctcttaatcctattatcttcataagctgagaatgtatgtcacttcaggaccactattgtacaaattcattgtagaacatgtgtgtttgaacaatatgaaatctgattgtaaaacatgggtgtttgaataatatgaaataagtgcaccttgaaaatgaacagaataacagcgattttagggaacaagggaagacaaccaaaggtctgacttcctgcggggtcgggcagaatagagccatatttttcttcttgcagacagcctataaatggatgtgca

SEQ ID NO: 808684 - DNA, 552 bp, Homo sapiens
tctaactacctgtaacatttggaaatggtgaagctggtggaatgttgtgggaagtcagggaccccaaacggagggactggctggagccatggcagaggaacataaattgtgaagatttcattttaatatggacatttatcagttcccaaaattaatacttttataatttcttatgcctgtctttaccgcagtctctgaacataaattgtgaagatttcatggacatttatcagttcccaaataatacttttataatttcttatgcctgtctttaatctyttaatcctattatcttcataagctgagaatgtatgtcacttcaggaccactattgtacaaattcattgtagaacatgtgtgtttgaacaatatgaaatctgattgtaaaacatgggtgtttgaataatatgaaataagtgcaccttgaaaatgaacagaataacagcgattttagggaacaagggaagacaaccaaaggtctgacttcctgcggggtcgggcagaatagagccatatttttcttcttgcagacagcctataaatggatgtgca

SEQ ID NO: 808685 - DNA, 671 bp, Homo sapiens
attgcagtccttgtggcctaaactggttttaaagtttattttgtaccccagagcactttagcccatggtgacagggcttgttgagacttagcttctgaccgctgggttggatgatttgcccctggctagggcttgtctaaatgccccttccatgggtactgagttctgccctatattgctttctgccrtgacagggcatcactgaattccaatgcaaagtccacaatcactgcactctcctccccaaaccacttgattctctctccatttgacatggttgctgccagggcatggaggagggttggtgattcaggactgtctttcataccctctttagtgccttttcccttaatatgatcttaaaaccaggtactgtaattgcgcccgcaaattaaaacctttcagaggagacaatgatttttactgtccattcaactggattccgcacaaaaagagaggccaggaggccaactgggaaggaattcttacccttttactggctttttgggttcctgaattccttcaactgcagcttccagaagagcagagttttgaccaccctgatcgctaattactaaggaaaaccattttcattattttcatgggttcataggtgaaagccactcaattttataagacacaagggatccaattaacattccccatatcag

SEQ ID NO: 808686 - DNA, 606 bp, Homo sapiens
gcctcccactatctgccagcaatggctcctaaactcttctgtggactagtctgaagctcaatgattgacactatcatcctattttcaccttataaagtagtctcagactcattcacattacttagtctctaactcaaatcactttctctccaccccaagctgaytaccagtattcacttacagatactcaagacttcagaggatctttgaactcccccaaattgagtagtatacgtatgtacatgtatgtaattttaatggaagagggactattacaaggactgtttataggcaagaggaactatttcattgggttttgaaagtagtccatgattcaaaaaaggggtaagcctctggttctggcttataagattatggctttaattcacacctcaaatcttattttcagggccagttttcctgatttttgtttagctttccttcttgactattattcaaactcttattctgtaaatacctgactcagtctagtccagtttctggaactttgtatctgaatgcagatggtgaccctgtcatattctagccttgggaactagacgcaaatattgcctacactgtctttgttttatgtaatgaatttta

SEQ ID NO: 808687 - DNA, 586 bp, Homo sapiens
atattttgatttttctacttttattcttacaaacaacactaaggtgaatgtttctatgtaagatctcttggtaatatcttattttttagaaaactgggagagcattactgagttaaagagagtgaccactttcaaaattcttggagcaatatatatttaaattgctgtacagggaaattttaccgatatataatcccatcagtagtatgtgaaggtacccgtctttttaaccttcaaaatatggaatataatacatttttaaaagatttgcgaatctgataagcaaaaataatgttttaatttgcatatttaatactagtgaggtccatatgttaatcatttgtgttwtccctatggtcatttttatcctttgctcatacatctactgacatctctatcttttgtttttttttaaactgatttaaataagctttttatttcctttgctttttcctgggacatatttgatatatgtacaaacatgtattctcttatatgtaaattatgaagtgtagtaaccaagtgaatacaagtgaaaagtaaatagagtgtcaaattaaattgaatattaaaaatactgttcaag

SEQ ID NO: 808688 - DNA, 615 bp, Homo sapiens
agtagtatatcctccaaacaccatctttcctgtagatagcagataatttaatttttgtgtatttggggatggcggtattttctgtagtctgtgtttgtatatgagaatggcttcaataaattgatgttaatttataggaaagttttctttttggttgctctccttttcctctcaatagtgatgagagaaacactgatataagttgaatttcagagtagttytttcattttgatattgtatctgctgttttatctttacaagaacctctgtagtcctcctcctatgtagcatttggttggctggcttcctgagaaaaggtttcttagaaatatctggcatttttgaggttccactaatctagggcctggccattaattttgctttttagaaatgattttgttatggaaaattaccaaacttataatctaattgaaaaaactacactatgatatttttgtttataatatgaacaataggctggcaagatgtgcaatggaagtactgagggaagtcttcaagaatagcaagaagtaaactcatttaaatgtatttttgactaaatgaagcctcacattgccctaatttgttgggaaagaacagttttgtattggcctt

SEQ ID NO: 808689 - DNA, 575 bp, Homo sapiens
gcctcatcttctaattttttttgtttgttttgagaaggagtctccctctgtcacccaggctacagtacagtggcacgatctcagctcactgcaacctcagcctcctgggttcacgtgattctcctgcctcagcctcctgagtagctgggattataggtgtgcaccaccacacccagctaatttatgtatttttagtagagatagggtttcaccatgttagccaggctggtctcgaactcctgacctcaagtgatccacccacctccggctcccaaagtgctgggattacaggcatgagccactaacgcccggcctcatcttctaatttaaacactatacagaattagggagaagctgagatcccttggagtgtttatctatatatagtgaaataagggtgtgagtaaaattcctgaatcctcagaggcatactaggtaaktggcctccactatgccccacaaatagaatttacttctaaactagaattgtgatgctaaattgttccagtgggaatgtgagcttatacacaataagctcctaaaatatactcactgatagacaaccagctaatgat

SEQ ID NO: 808690 - DNA, 607 bp, Homo sapiens
atttaaattaatcttttatttttcaccactcattttaggcttatattatcacttttacaccaccaatttgatcagagcaatattaacgacccaagcaaggatccagttctagcctaattaggggcagcaggtgaattagtagatggaagcccagagagataacaccgtgtgtccaggtcacacagcaaaactgggatctgaatttggaagaggaaactcctcatcataaccctctactccaacctcccatccccctcctgcagtcctcaggcagttccccttaaaccatgtgtgcaattgcatctttccagataaaccaagtctgagaaggttacacaagggtcttgcctcccttctccacatttgtggtctggcccctcctgcaatattaacctggctcttataaatgtttcatccattttctattccacatcacccctgctaccatcttctcacatttgagctkgggatcatgaaaagtaaatgtgcttacttcacccacccttatgctttcgcccagatttgggacttaacaggaaatgatcttgttcaaatgttcttccaatcatctaattctctagtccttcagccctgcctgctcagctgg

SEQ ID NO: 808691 - DNA, 504 bp, Homo sapiens
attctgaggggcacggttgaagtcaagactgcaggttgcccttatcctgctgcttggaatcctgttttgttggtggcagccttaattaaatgttctatgatacaaattgaacagatgtagtcccagtctctgtcagtcagagtagtcagagaggctgatggagtggtatacttatggggaaatttaccagaagmtaagattgtgtaaaaatgaaaagtacatattgttgggagataattctccataatcctcttgagtctctgcatgttttttcaaacaaggagctgaatgtcttttgctttgtattatctttacaaaaatatttgtatagcaaatggccttagaaggtagaactagtttctccatcaggatcagaaagcagacctgctttttgtttagtacgataaagattatatctttcactgaagcaaagggtaggcatattgctgcccattgtaaaatattaaagttctctaaattcagggttcgtctcctataatgcaa

SEQ ID NO: 808692 - DNA, 536 bp, Homo sapiens
ttattatcaagatgacattgttgcccatagtgagttgtagattcaatacaatttctaacgaaatattaagataattttaaacataaattgacaagctaatttttcaacttacatcaaaatgcaaaaacccaagaacagccaaaaccatcttgaaaaagaagaacaaagttggaggattcacctttccctatttattgtattataaagctacagaaatcaaaagagtgtggcactggtgtaaagatagagttacacatcagtagaacagaattgagagcatattttaaaaaaatcctttgcatrtataactaattttgacccagatgagaaaatgaggaaataatagtgttttcaaccaatagtgtctgaacaattagacagccacatgtaaaagaatgaagttaaacctttatttcctcgcatataaaaaaaagctcaaaatggatcaaagacttaaatataatagataaaattataatactcttagaagaaaacctgcaaggaaatttgtatgactttggattaagcaatggttt

SEQ ID NO: 808693 - DNA, 563 bp, Homo sapiens
acctgaattgtgagtaaatgtggacctagagtcttcacttttttccgaggctgcttctcctcagactttcttctgaatgcagacgaagcactgaaccattgactagtctgttgaaagtgaatggcgcagctacagaggacaggatgcaaccctgccacctctctctctctctttgtggggaaagaaacgttggctttgtttcctatcacgaaggtctagccatggtgtaggactagaataaagtcttggggcaactgaaggcatccggctgaggccatgtcttcgtgttgctgaaaagcaagcccctagactgattccgtccccaaccaccagttagggcatcagccaagacccccaaaattttctggcatttttcctttcttctttcatggtatgaaatggctmgtatctcttttataatggtaagggtgttgctgcaaactgcagagatattactaggtagaatgagcattcagcccagccatcggatatgcaattcaaaacaataggccaggcgccgtggctcacgcctgtaatcctagcactttgggcgtccgagaagg

SEQ ID NO: 808694 - DNA, 624 bp, Homo sapiens
gagtaaatgtggacctagagtcttcacttttttccgaggctgcttctcctcagactttcttctgaatgcagacgaagcactgaaccattgactagtctgttgaaagtgaatggcgcagctacagaggacaggatgcaaccctgccacctctctctctctctttgtggggaaagaaacgttggctttgtttcctatcacgaaggtctagccatggtgtaggactagaataaagtcttggggcaactgaaggcatccggctgaggccatgtcttcgtgttgctgaaaagcaagcccctagactgattccgtccccaaccaccagttagggcatcagccaagacccccaaaattttctggcatttttcctttcttctttcatggtatgaaatggctagtatctcttttataatggtaagggtgttgctgcaaactgcagagatattactaggtagaatgarcattcagcccagccatcggatatgcaattcaaaacaataggccaggcgccgtggctcacgcctgtaatcctagcactttgggcgtccgagaagggcagataacctgaggttgggagttcaagaccagcctgactaacatggagaaaccctgtctctactaaaaata

SEQ ID NO: 808695 - DNA, 619 bp, Homo sapiens
cagtgtaataatcttttgatgagtcagtgatggtggcagctaagtagcagtaacttgcagggctggggcaaggttctccaggaagatgtatatgctctgaatcagtgtccaacatataatgctggttctactatacacgcaatatgtgtgtcaaaaaatcaagggtagaaatgggagtgacaccactcactactgcctctgttgacccatgaacaaaattgtttcttcttgttcagatgaatttatgctgtattggccaagagattatagttccagagggaagactgcttctaccagaagacccaagaatgatttcattgaaatagaagttaagactgctacccatctactttgggcttctcatgcctctmagtaaattttgcttatttttagttactgtgctaattggaacaattgatcctgactgccaagaataaatcggactgttgctatacaatagaggtaagggaagactatgtctgggaggcaggagatatttttggatatctgttagtgctaccatgccctgtggttaaagtcaatggaaaactatgacaaccaaatccaggcaggactaccagtagccaagaccctacaagaatgaaggtttgtgttaccc

SEQ ID NO: 808696 - DNA, 629 bp, Homo sapiens
ttatatatttcagtatttagaataaactttcaagatgtctatgtactcttaaaataaatgaacctttgatcacagtattaccccagcagattacagaggtgcctcagtcactgtaaggtaagctgaagagtaggctaaagatactgctgtctggcataagattgaaataagttagttttcccatatttgtgaaaaaatattgaatatgctattaaaacattagaaattgaacaataatcagtagatacatttctataaagcattatggaaatttctactattttataaatttttgctgatgtttctattattaaatgtatcttgatctagatcctagtctttcatttttctagattttatttagaactcttcattcaaactcactgtaaataactagcttggcgtrtgtctcagctatgtcagcttacaacatcaaaccatcttgacatcaaagtcctttctaagttcttgtagttgtcagaggcttaattctgttttagccaagggctgtttatctacccaatttgagtaatcaaaaggatggttatagttctctctggcttccagtaatgttggagggtctttcatttttgattttttagttgaaatacttcagatggtattttctt

SEQ ID NO: 808697 - DNA, 640 bp, Homo sapiens
ctccagttcccaataagttcctcatctctatctgagaccatctcagcctgggttttattgtccatgttactatcagcattttggtcaaagccattcaacaagtctctgggaagttccaaacttatccaaattttcctgtctctgagccttccaaactgttccaccctctgccttttacccagtttcaaatttgcttacacattttcagttatctttacagcagcaccccactccmagtaccaatttaatgtattagtctgttcttacactgctaataaagacttacctaagactgggtaatttattaagaaaaaaaaaagactgttactttactcatagttccatatggctggggaggcctcacaatcatggcggaaggtgaatgaggagcaaattcatgtcttacatggcagcaggcaagaacttgtgcacaagaactcccatttgtaaaattatcagatcttgtgtgacttattcactaccaagagaacagtatggaggaaactgcccccattattcaattatctccacctggtgccacccttgacaggtggagattattacaattcaaggtgagatttgagggggaacacagccaaaccaaatcacctagaaaataccacactagacataggccctg

SEQ ID NO: 808698 - DNA, 492 bp, Homo sapiens
ctcagcctcctgagtagctgggattacaggcgtgcaccaccacacctggcttatttttgtatttttagtagagacagcgtttcaccgtgttggccaggctggtctcaaactcctgatctcaagtgatctgcctgcctcggcctcctaaagtgctgggatwacaggtgtgaaccactgcacctggcccattttattttttaaaattgtaaaaacacagaacccctggtttataatcaatttggtcttttttataccactcatatcttcactgaactttttgaatatatgaaatacaattacagaaactattgcaatgtccttttctctgctaattctaatatagttattctcctcattatggatcattctttccttcttctttgcatactgataatcttttatcggatgccagacattgtgacttttacctcattgtatgctagatgtttttgtatttctaataaatattatagaccttcgttctgggatgca

SEQ ID NO: 808699 - DNA, 634 bp, Homo sapiens
acaagctatggaggcatctacctagacttcaaagactgtccctgacaactttggggaccaggtggaaaactgccatggggcagagctgctgcagagaacccccactagtgatgcaggaattttcttggtcactttcacagctgggacctccagtgatgtcctcaccaccctggccttactgaaacccaggcctgctgctggaggcaccccacccactcagcccacctgggccaagtctggcttgcacactggttcagcctgcagctgggccgggagcaccccagcccacctgtataatagcttgtacccgcattcggtgcttcccaagctcttgttgtgcttcccaagctcttgtcctgcatccaagaagaatgaggatatgctgacagttgaaggatgaggatcggcatataagaattttattgagtggtggaacacctctcagmagagaggggatgtgatgatgaggggtggtggtcacccactcgtgcaatctggtggttttttttctcagtgtggctgggtccaggtctttttatggattcagaatggggagtgcgtgctgattgtttttgtgaggatgcaaaaaagattaaagcaaagttaccactcaaaggtgggcatgacagtgtag

SEQ ID NO: 808700 - DNA, 559 bp, Homo sapiens
gtgtgaaatattatcatagaaatgtatttacatggaaaggtggtcataattagggcaaaggtaggttacaatgatcataaatggaagaatctaattttgcttatataggtgtctagctatttctccagaggtatcataggatttttaaaatgatacatttgtctttcttacatacagctttctcttcagcttagaaggagcctatactttctgtctgatggccatcagtatccctgtatactgggaatatgcccttttccacccagacttccagaaagctctttagggtgggttccactttcgtgctcattggtgttcaagctgcagttgaagcttctgtcacaagatggcaccaatgtatctctattgtcaaacttttctgcaaagaaatgtatgcagaatgmaaagtacaatctctcccttaaaaccgagcttatgaatctatgtacagaatgattctaattctgtgtttaaaaaactgatagatgtgaaaaaagactattaaaaaagtgactctaggagaaaggcagaaactcactggctgatgtgggttacctgg

SEQ ID NO: 808701 - DNA, 605 bp, Homo sapiens
tcaacttatacaacagtcaaaccctcaaggacatagaatacaaaagcaaagtatctcatctaaaggacagcaacttcaaattaaaggaacatcagcccacacagatgagaaacaaccagtggaggaactctggtaactcaaaaaaccagagtgtctctttacctccaaacaaccatgctagctccccagcattggttcttaaccagactgaratggatgaaatgacagacacagaattcagaatctgggtaggaatgaagatcattgagattcaggtgaaactcaaagccaaattcaaaaattctatggaatttagaaaaatgatataagagctgaaagataaaatagacattttaagaaaaaaaaactgatcttccagagctgaaaatcttactacaagaatttcataataggaaataataataacagaatagaccgagctgaggaaagaatctcagagcttgaagattggttgcttgaatcaattcagtgagataaaaataaatggaaaagaatgcataaaacctctgagcaatatggaattatgtagagactaaacctacgactcattggcatccttgaaagagagggagagagagcaagca

SEQ ID NO: 808702 - DNA, 611 bp, Homo sapiens
agaaaaaacacagagaacattatgagtgtacgaaaatatggatttagagagaaatgatactctctctagtccagctgtagtatcactgctagcagtgttctgatagtacagcacccagatggaacagagcattcctgaaagatttgggaggagacatttccattgttaggggaaaatgtgattctttcatgttggacagttcaaggtagtgatgaatatggtctcctaaacagaatccaagcaaagagcaatcactgactactcccgcattatttattcatgatttactttaatggctttgtgttattaagaaaaagtaggttagaagaggaatgcaaagctaacatcytccaagctgtaaatagactgtagcctggaggccgaaggagccacactactcaaatgttcttattccatttttgagacaaatttatataaaccccccattgggttagaagggcattgacatttgtttagtgtccaacatgtgctacaccttaaacatacaatctcttatttaattttcctcactttgctgtaaggggggcattatcatccccattttacaatgcagaaacagtctgagagagatcaagtgacctgttttatac

SEQ ID NO: 808703 - DNA, 635 bp, Homo sapiens
ttgctagtattttgttgaggatttttgcatcaacattcatcagagatattggcctatatatttttgatgtgtctttctctgatttcggtattagggtaatactgtccttgtagaatgagtttggaagtattcactcctctatttttcagaatagcttgagtaggattggcattagttctttattaattgtttttttcaaattcagcatttaaaaygctgtgtcccaagcttttgtttactggaagactttttattgttgcttcaatctcattatttgttattagtcttttcaggatttggatttgttcattgttcaaacctcatagattgtctatggctaagaatttttccatttcttctggattttccaatcgattgccatataattgctcatggtagccaataataatactttgaattactgcagtatctgtagtaatgtctccttttcatttcttcttttatttatttagatcttctctatttttttcttagtctggctaaagatttgcccattatgtttaacttttcataaaattaactttttgtttcattgatcttttgtattgttttcttcatttcaattgcatttatttgtactctggtctctattatttcatttttactactaattt

SEQ ID NO: 808704 - DNA, 564 bp, Homo sapiens
gcatcttcatcaggaatagcttctgtctcaagaaaccactttcttggagtccagtcattctgggaaaagaaaagaaaaaaaaaaagaaaccacttttttttcctcatttgtgagaagcaccttctcatccatttaaattttcctgtgagattgcagtaattcaagcacattttcagactgtttctaattctgttgtctatttccaccatatctgtagttacttcctccactgaagtattgaacccctcaaagtcattcacgaatgttaraatcaacttctaacttgcagttaatgttggttttttgacctcttcccatgaatcacaaatgttcttaatggcatctagaaaagcaggtcctttccacagggttttcagtgggctttgcccagttcatcagagaaatcacttctatggcagctatagccttatcaagtatatttctcaaataatgacttgaaagttgaaataactccttgatccatggtctgcagaacgaatatggcatcagcaggcatgaacacaactttcatcttcctgcatgtctccatcagagctcttgggg

SEQ ID NO: 808705 - DNA, 564 bp, Homo sapiens
gcatcttcatcaggaatagcttctgtctcaagaaaccactttcttggagtccagtcattctgggaaaagaaaagaaaaaaaaaaagaaaccacttttttttcctcatttgtgagaagcaccttctcatccatttaaattttcctgtgagattgcagtaattcaagcacattttcagactgtttctaattctgttgtctatttccaccatatctgtagttacttcctccactgaagtattgaacccctcaaagtcattcacgaatgttagaatcaacttctaacttgcagttaatgttggttttttgacctcttcccatgaatcacaaatgttcttaatggcatctaraaaagcaggtcctttccacagggttttcagtgggctttgcccagttcatcagagaaatcacttctatggcagctatagccttatcaagtatatttctcaaataatgacttgaaagttgaaataactccttgatccatggtctgcagaacgaatatggcatcagcaggcatgaacacaactttcatcttcctgcatgtctccatcagagctcttgggg

SEQ ID NO: 808706 - DNA, 585 bp, Homo sapiens
cctgagaagctggaactgtaggtgcttgccaccacacctggataatttttatatttttgggtagagatggggttttgccatgttttccagactggtcttgaactcctgggctcaagcgagctgcccatgttggcctcccaaagtgctgggattacagatgtgcgccaccgcgcccggccgcaaaatgtaagttttatttaaaatgaactyttatagatagtttattcttgcaacttgctttcttaactttttagtgtatgtttagaccacatatatattcatctaatctgtccaacctaattatttatacggttggggtttaggttgccattttcctatttactttcatcttttcttatttgttcttttttccctaccttctttggatgaattgattatttttttcaattaatggagtttggtttttttagagcagttttagctttccagaaaaattgagcaggaggttagagaggccccatgtgctcctcagcgtcctccttcagccccagcctccctgtgattagtatctcacatcactgacttcagtgtggcatatgtgttacaattgaggagccaatatcg

SEQ ID NO: 808707 - DNA, 585 bp, Homo sapiens
cctgagaagctggaactgtaggtgcttgccaccacacctggataatttttatatttttgggtagagatggggttttgccatgttttccagactggtcttgaactcctgggctcaagcgagctgcccatgttggcctcccaaagtgctgggattacagatgtgcgccaccgcgcccggccgcaaaatgtaagttttatttaaaatgaactcttatagatagtttattcttgcaacttgctttyttaactttttagtgtatgtttagaccacatatatattcatctaatctgtccaacctaattatttatacggttggggtttaggttgccattttcctatttactttcatcttttcttatttgttcttttttccctaccttctttggatgaattgattatttttttcaattaatggagtttggtttttttagagcagttttagctttccagaaaaattgagcaggaggttagagaggccccatgtgctcctcagcgtcctccttcagccccagcctccctgtgattagtatctcacatcactgacttcagtgtggcatatgtgttacaattgaggagccaatatcg

SEQ ID NO: 808708 - DNA, 634 bp, Homo sapiens
cttcttaataagggctggcttgttaaaatgcagagggcactttctgcttctcttgccatctctgcatcagcctaatccaaaccacactgacaactggacagggctccatgacccaattaagagccaaggctacactctcaggggctgtcgcsttcaggggctgctcagagtcctgggatgtcctgctgcctgcccctggatgtagaatggccctgtacaggctgtgggtgcgcaccctggtgctcgtgactcttggccatgctctggtttctggatcccccaacctcgcacaattaggacctggtttatttccggggtgccagtaacctcccagggtacagaagagaatccttttccctccagattggattccctttcagatccttggaaggcgggcccagattccactctggagggctcctcctcaccctacaaggctgtgctggcttctggcagtgtcagggatgggaggaccgtggactaaactgatgaacccttcactccacagattaactcttgaactcctgctagaacacattgagctctgttacatgcacgcaggagacacttcagcgtggttttaactcaagaaatcctccttcttccaggcttcagtgagggggtcctggagagg

SEQ ID NO: 808709 - DNA, 635 bp, Homo sapiens
gggggagggctgcaaggaccgagccgcagggctcttggcccattggatcctgggcaccccagagctggggcccgggcagtcacacgcatcagccactccttcttgccaagtatccatgagtcctgggctgggaggaatgccccttaaagagtaatgccatgggagcttcccaacagcacagtgcarggaaactgctgtgtgagcactgtcaggggtaaacgttttggcaggaggtggtgacagtcaggaaaaagaccacgtgctacttgccaatttatccagcatttccgaaaacagctccttgccagcagagtcaaaaatgaagagttcctacaatcagaaaagcaagaaaagtctccacgtggaaaaaccacaagctacgagtcactggtatcactctcaactcacactggacttgtcttaggggtgaaatacaggcacccacatcttcacacatgctctgtcttttctcccaggcacgagagaagatgaaggggaaaggagcgaactccagagtcttagagaggcagtacgacgggttctcgcaccaaccagcactttctgtgtggagtctcacctcttgtaaccctgagtgcaaaaataccaggaacaagctgacttcccacctggcagaa

SEQ ID NO: 808710 - DNA, 625 bp, Homo sapiens
atctcattttaaaagctcaaagatgtaatgagcgttaaaatctaaaatatgaaggtgttttattaaagtgatgtttgtgaacaaagggagaacaaatacactttgatggggctaagcggtgagactcggaaacttgaagtcgtactttgctcttagtccatttactctctgcaaaaggagaatgcatcactaacctcgtttgcccgtcacccagggaggctctctgtacgcgtttactgggttgggggtgcctcttgcacgtggttagggggtcagagacctaaatccctggcctggacaagtcacctcatccctcagcctcaggatgggcctaggagaacccgccttgtggggtggttgtggrgatggaaggagagaaacgtatgagtgcctgggagatagtaggtgcacacgtgattgtggggtggatgggagagcggaagcttatctggacagatttggtttatcatcactgtcactggttggccgaatgtaccccttgttctcactttctcagggcccctgggattctgatggctgatgctgaagggaagagcagcccctcagcaaaggtgcctgtgcgaaagttccacattccctccagacacctagaacattccacctc

SEQ ID NO: 808711 - DNA, 534 bp, Homo sapiens
taaagggagtacttcaatcagagagaaaaggacactaatgagcaataaattatcacaggaagttacaaaactcactggtaatagtaagtactgttaaatcaagtttagcctaaagctgcctccttacatattttaagttcagcctaaaggtttctctgtatatcatgaacaataataagtggaggtgtaaactgaccgtaacctacacttttgtcaatcactgagttttggccaatcaaatgtagccaactgtttgaaccatggtcaaataaggcaaaggctgagctgtaaccaatatggctctttctgtacctcacttccattttttgtacawcactttcctttttctgtccataaatcttctaccacgtggctgtgctggagtcactgagcctactctggctgggaagactgcctgattcatgagtcattcattgctcaattaaactcctttcagcttaatttggctgaagtttttcttttgtcaggatggcatcagaagtgggatccgaagtagagcttctaacaaccccc

SEQ ID NO: 808712 - DNA, 681 bp, Homo sapiens
aacttgcagagatatttcatatggatccaaatttgtattcactgagaaaacttttctgaaagaacagcaaagaaattttatcatatcaaaggggcaactcccaccccaattgctaaaatcaagaatctattgacattagagacagtgaaagaagaaataataaaatgtctgtgtagatgcaataacagagaaaatgcagaaaagasaggatacaatgtaatttcaaagagatctgtaactgttagatttctagaaggctaaggagacaaattgaggaagaagcaacattggaagagaaaatgtgggagacatcaacggcagatacaagaagtagtcgctaaaagcgaaggcaggattgatatggtttggctctgtgtctccacccaaagctaatcttgtagctcccataattcccacgtgttgtgggagggacccggtgggaaatgactgaatcatggggactggcctttctcatgctgttctcctgatagtgaatggatctcacaagaactgatggcttaaaaacgggagtttaggccaggcgcggtggctcacgtctgtaatcccagcactttgggaggcgaggtgggtggatcacgaggtcaggagatccagaccatcctggctaacacggtgaaaccccgtctctactaaaatcacagaaaattagacgggcatggt

SEQ ID NO: 808713 - DNA, 635 bp, Homo sapiens
atcagctcattaagaaactagtcggatggggtcaagggggataaactaaatctctgttttacctcccaggaaattcttaaccagcctgcatgtcccagactctcaagacaggattaagtacaagttctgtgtgacgartattaataccaggtcatgctcacagagtttagctcagaatcaattcccgagctcatcaaaggcttagaagcagcaatggggacttgcaaaaaccctaaagcagaggttcccaagccttcttggtttatggtgcccatctcaagaattttttcacggcattcttaaggccaaagaagtactaagcagattcacgtattaagtagttagagcgaaatagcttattaagtgtttacatcctaacaatttagtaaccatttgaaaaaaagtacggaatgtttttatttcattcctaaataactacaattacttactaatgggatgtatgtgcttattgggcagtgcacaaattcctgaaccttagaatcagattggacaccattaccctcatttcctctcccacgtgattttcacatggtacttagtttttggcacaaccaccaccaaaaactcagcttcacaaagatgcaacatcactgaaagaaacatacgatccaatc

SEQ ID NO: 808714 - DNA, 635 bp, Homo sapiens
atcagctcattaagaaactagtcggatggggtcaagggggataaactaaatctctgttttacctcccaggaaattcttaaccagcctgcatgtcccagactctcaagacaggattaagtacaagttctgtgtgacgaatattaataccaggtcatgctcacagagtttagctcagaatcaattcccgagctcatcaaaggcttagaagmagcaatggggacttgcaaaaaccctaaagcagaggttcccaagccttcttggtttatggtgcccatctcaagaattttttcacggcattcttaaggccaaagaagtactaagcagattcacgtattaagtagttagagcgaaatagcttattaagtgtttacatcctaacaatttagtaaccatttgaaaaaaagtacggaatgtttttatttcattcctaaataactacaattacttactaatgggatgtatgtgcttattgggcagtgcacaaattcctgaaccttagaatcagattggacaccattaccctcatttcctctcccacgtgattttcacatggtacttagtttttggcacaaccaccaccaaaaactcagcttcacaaagatgcaacatcactgaaagaaacatacgatccaatc

SEQ ID NO: 808715 - DNA, 644 bp, Homo sapiens
ttttcacatggtacttagtttttggcacaaccaccaccaaaaactcagcttcacaaagatgcaacatcactgaaagaaacatacgatccaatctagaaacgaaactacttcggccattaatttacatggcgtctgacagacgctgagaattgctatgtttcctttgaaaattaaaaatatactgtgctacccccatgagtctgtggcgctccaggacttctcagtgtcgagtttgggaactggagccctaatgtgatgacttttggagttctcctctaacagtaaataacagaagtctctggtgttatatcccagggaaaaaagcctgactgctcctcatgtaaaacacaggtctgagaaacctatggggtgggctggggggaggaggtatatccatatacccaatgacccaatgacccaatgacccaatctataggtttcctkgtttttttttttttttttttttttttttttttgtgtgtagagatggggtcttgctgtgttgcccaggctggtctcgaactcctggcctcgaatggtcctcctgccttgacctcctaaagtattgggattacaggtgtgagtcactgcacccagcctagtcaatctatactttaaaaaagtccacactttaggaaaattaa

SEQ ID NO: 808716 - DNA, 635 bp, Homo sapiens
aagccgctccattttataatcccaccagccatgtgcaagggttagaatccttccacattgtctcctgctccattttgcaatccttccggcagtgtacacaggttctaatccttccacattgcctccgacacttgtaattattttttctactatagccatcctagtgggtttgaagaggtaactcattgtgattttgatttgcatttatctgatggctgcagatgctgggcagctttctgtgcactgaatgaccatttgtttatcctcttggggaacaatgtctgttattacagaatcctcrtccatttttaactgggacattgtctgtttattactgagttgcaagagttctttatatatcctggatacaagtcccttatttgatatacgatttacaaacattgtctttcattctatggattgtcttttagttgtttaatttttcttaattttttatttggagacagtcttgctctgtcacccaggctggagtgcagtggcgtgatcttggctcactgcaacctccgcctcctgggttcaagcaattcccctgcctcagccccccgagtagctgggactacaggtgcacgctcccacgcccggccaattttttgtattttagtagagacaggttt

SEQ ID NO: 808717 - DNA, 591 bp, Homo sapiens
cctggccatgtccttgaggctgctcagagccccagtctctgcccctgcacagcgggaagctgagctggggaggctgtgagagcagattttcatggagaggcacgagggaggaagatggggcggcccccgccctggccccaggctcattctcctgggggctccctctgcagctccccagggccttgcacacttggcctcaggccactcaatgcagctgagtctcacaggcccctctgggatggtggtgctggaagtcagggtgctggggcagcagggagggggctcrgggccagacagctgactcttgatgggggccgcaaggcctctgccccgatagcacatgcctggcctggccctgggctcgtggtgcacagagccacctgatgtgccctggccgcagatgcaacctctgcccttgggagcgtctgctgacctgacgccagacagttccatccccagggcctgtcaccaggtgtgcagggctccaggagggacagaggccagctcgggctcctgcagttctcaccaggaccactcccacacagagcactgtcctaggagtccactgtaagcccgctcccaggcccctgg

SEQ ID NO: 808718 - DNA, 622 bp, Homo sapiens
ctccaccctgcccaaaaccacatatgtcagagaccagctaggccggacctgggtctgattgctagtgtgagcgtccccacactttgtgggaaaaccttggggcaccccaagccccagcctcttgcctggtccccagagagatacattctagatcttctcttcaggcacccctgggtcctggcagaaagtttgttgagaagacagmgccgggttgtttctgccaacatcttggttcatcacccccaccccacacgaccactcacctccctccccgcccagcctcccctgtggtgaggggcttggagtaggacaggaggccagaccttgctcccagggggttcacatccccaagagaatcgatgcatcctctgagcccctgcagatccaggtgtgctggatcctagcggagaccacgagaggtgagggaggctgagagctccactgcggagctgagacaggcttggaaggagaagcggacccagctggtgctggcagggtagggggtgagggaggaaggagggtcgtggccaggggtgtggggggagatcctgggctctgtgcaggtgcacagggtgggcatatggctgtggctcatgcgggaagaatcgtctcttgggaaagg

SEQ ID NO: 808719 - DNA, 622 bp, Homo sapiens
ctccaccctgcccaaaaccacatatgtcagagaccagctaggccggacctgggtctgattgctagtgtgagcgtccccacactttgtgggaaaaccttggggcaccccaagccccagcctcttgcctggtccccagagagatacattctagatcttctcttcaggcacccctgggtcctggcagaaagtttgttgagaagacagcgccgggttgtttctgccaacatcttggttcatcacccccacyccacacgaccactcacctccctccccgcccagcctcccctgtggtgaggggcttggagtaggacaggaggccagaccttgctcccagggggttcacatccccaagagaatcgatgcatcctctgagcccctgcagatccaggtgtgctggatcctagcggagaccacgagaggtgagggaggctgagagctccactgcggagctgagacaggcttggaaggagaagcggacccagctggtgctggcagggtagggggtgagggaggaaggagggtcgtggccaggggtgtggggggagatcctgggctctgtgcaggtgcacagggtgggcatatggctgtggctcatgcgggaagaatcgtctcttgggaaagg

SEQ ID NO: 808720 - DNA, 622 bp, Homo sapiens
ctccaccctgcccaaaaccacatatgtcagagaccagctaggccggacctgggtctgattgctagtgtgagcgtccccacactttgtgggaaaaccttggggcaccccaagccccagcctcttgcctggtccccagagagatacattctagatcttctcttcaggcacccctgggtcctggcagaaagtttgttgagaagacagcgccgggttgtttctgccaacatcttggttcatcacccccaccccacacgaccactcacctccctccccgmccagcctcccctgtggtgaggggcttggagtaggacaggaggccagaccttgctcccagggggttcacatccccaagagaatcgatgcatcctctgagcccctgcagatccaggtgtgctggatcctagcggagaccacgagaggtgagggaggctgagagctccactgcggagctgagacaggcttggaaggagaagcggacccagctggtgctggcagggtagggggtgagggaggaaggagggtcgtggccaggggtgtggggggagatcctgggctctgtgcaggtgcacagggtgggcatatggctgtggctcatgcgggaagaatcgtctcttgggaaagg

SEQ ID NO: 808721 - DNA, 576 bp, Homo sapiens
attgctatttcaaatacatagtgtcagaagctgctttcatattctggagatgtaattaatctcaaggaggaaattgacttttgatttagaaaaacacgttaatgcgccatttcattataaatgaaatacccaaagcttgtatagacagaagttacatgtttcygtgaagcatatggagatatatgttattataaaaacattaatttactagaggtcttaatgttttccttttgcacttctttagatgtgaccttatgcctattcacccaggggaaaatttggatttttatcacagaagaccaaaagcaaacaatattccaaaacagaatattgacagctatatcaaagtcatagtcttaaaaattagacattggtaagagaaaagggagtttctaaatttacaaaagtctaggtccttagagctctctgctggggattcattctagactgagatcacctcttttgggaggtgggcactcactggccacttctgtgttcctgagatcttagaaacaccagaaccctctcctctcaaccctctgctacctccacatggcactagagcccacaggatct

SEQ ID NO: 808722 - DNA, 602 bp, Homo sapiens
tgggtgggcctcatccaatcagttgaaggctttgagagcaaaacctgagttaccagaggaatttttgccttaggactacagcagttttcagcctgcctccttgccttgtggatttcagaatcaagactgcaacactgactcttcatgagtctccagcgtgctggcctgccctrcaaaatccagactgctagctgtattagttagggttctccatagaaaaacaaccaataggaaagagatagatgatggataaatagatgatagatagatagatagatagatagatagatagatagatagatagacagacatttatcataagggattggcttatgtgattatggaggccgagaagtcccatgatctgccatctgcaaactggaggcccaggaaagccaatggtgtatttccagttcaaacccaaaagcctgagaatgaggggagtaaacggtataaatcccaatttgattctgaagcctgagaatcaggagcaatgatgtctgagggcaagagaccacagatatcccagctgtagcagagagcaaatttgcccttcctgtgcctttttgttctattcaggtgctaaacaatttggatgatga

SEQ ID NO: 808723 - DNA, 609 bp, Homo sapiens
cactgtggttttgatttgcatttctctaatgaccagtgatgacaagcttttattcatacgtttgttggccacataaatgtcttcttttgaggagtatctgtttatatccttcacgcactttttgatggggttgtttttttcttgtaaatttgtttaagttctttgtagattctggatattagacttttgtcagatggatagattgcaaaaaatttctcccatttggtaggttgcctgttcactctgaggataaattcttttgctgagcagaagcactttagtttaattasatcccatttgtcaattttggcttttgttgcaattgcttttggtgttttagtcatgaagtcttcgcccatacctatgtcctgaatggtattgcctaggttttcttctagggtttttatagttttaggttttacatttaagtctttaatccatcttgagttaatttttgtttaagaggtaagaagaggctccagtttctgttttctgcatatggctagccagttttcctaacaccatttgttaaatagggaatcctttccccattgtttgtttttgtcaggtttggtgaagatcagatggttgtagatgtgtgctgttatt

SEQ ID NO: 808724 - DNA, 344 bp, Homo sapiens
taatgctgagagtttgtagattatctcaggtttttccatacaggtaaataatatattgtctatatagatatgatcgtttgggtgtttttaattccaatcattatatcttttatttattgcactggctagaaccgccactgttgagcagaaatgacaatattgagcaamcttgtcctgttcttgatttttaaggacaatccatgtaaatcttcaccagtgtgcacagctgttggtgcagattattttgtagatatgtgttttccatctgttttttcccagtttggcaagaattgtgttttggtttgtttttgtgtgttccgtgaacaggcactggattttatcaa

SEQ ID NO: 808725 - DNA, 540 bp, Homo sapiens
ttatgtacatgtacattagggaaccatatgttggagtgtggatttcataaaactaggaactaaggggatagttgccattacaaaaagaatatgccaaccttgttcttccctgtagtgcttcaatagtcgaagacaagctcctatacctctctaagccttggtcctctcasccagggagcagagactacaatgtgtgcttctcagcctcatcgtggggactagagatggcctcacatgttacccatcaaccacagtgtctattcagctcaggctctcagagctaccagggttcctttgtggacaggaaccatggaacccatcacatggcccctctgcttcctctctctacatcatcaggcttccacagcctggacctccttccctagccagctctgacgtcctggtcttccagtcactcatcctcctgccaattcccacgatttcctgtggtcctatcctcccagcacatgctaactctgacacctgaactcactctctcatctctcgtgcgctctacctctatacacacacacacacaca

SEQ ID NO: 808726 - DNA, 540 bp, Homo sapiens
ttatgtacatgtacattagggaaccatatgttggagtgtggatttcataaaactaggaactaaggggatagttgccattacaaaaagaatatgccaaccttgttcttccctgtagtgcttcaatagtcgaagacaagctcctatacctctctaagccttggtcctctcacccagggagcagagactmcaatgtgtgcttctcagcctcatcgtggggactagagatggcctcacatgttacccatcaaccacagtgtctattcagctcaggctctcagagctaccagggttcctttgtggacaggaaccatggaacccatcacatggcccctctgcttcctctctctacatcatcaggcttccacagcctggacctccttccctagccagctctgacgtcctggtcttccagtcactcatcctcctgccaattcccacgatttcctgtggtcctatcctcccagcacatgctaactctgacacctgaactcactctctcatctctcgtgcgctctacctctatacacacacacacacaca

SEQ ID NO: 808727 - DNA, 425 bp, Homo sapiens
tctttatgtacatgtacattagggaaccatatgttggagtgtggatttcataaaactaggaactaaggggatagttgccattacaaaaagaatatgccaaccttgttcttccctgtagtgcttcaatagtcgaagacaagctcctatacctctctaagccttggtcctctcacccagggagcagagactacaatgtgtgcttctcagcctcatcgtggggactagagatggcctyacatgttacccatcaaccacagtgtctattcagctcaggctctcagagctaccagggttcctttgtggacaggaaccatggaacccatcacatggcccctctgcttcctctctctacatcatcaggcttccacagcctggacctccttccctagccagctctgacgtcctggtcttccagtcactcatcc

SEQ ID NO: 808728 - DNA, 654 bp, Homo sapiens
aagggtttgaaatccttgaaagaagagggctgtgacaacaccagctggtacaaaggatctggaatcctctcagctacgggtgctgcccttgggaagctcccctactcatcgatgaggggaggggcctgcaagtgtgagacccatgtacatgtccttatctgagggtagaayaagagttgtggctcttggagggtgggacagacatcaattcaaaagaagcactgggcagctcgaggcagtgtggtgagggtacaaaagaagacctgggtctggattctgaccttgagtggctgtggaaccctggaaagcgatgctttctcttagactgacttttggtgaaatgggaaaaaaatagcaaaaccgcacagggtcaccatgagattaatacccaggacgctagcagaatacctggcagagttattatggtgtttgctcacaaaatgttactttccttttctcccttcctccttcctgctatgtgccaggcaccgtgctaggtgctgagggtctggagaaataaggcacagttcctgctctcaagaagttcagcctagctgtggagacagacatgcacaaccactaacagagtgggacggtggcatattagtataatgagggtagaaataataaaaataagccaagcgtggtggctca

SEQ ID NO: 808729 - DNA, 628 bp, Homo sapiens
cctgggattcatgcttcagggcagtgggctccattttggcccagagcaggtcccaaatgccatccaagagtcaaatcctggaatcagggaccccaagagcccacttggcgctctatctccctgtgtcgatgctggtatctgaagccagcaagcctcagaagctcatccaaagccctggacatagtacctgggtattcttgctggttattctggtcccaagggctcttaatttagcaggtgacaaattcttccaggactgggtccttcccttcaaggcagtaggttcccttctggccgagggtgtgtctagaaatgtcatccaggaactagggcctggaatgaggccytcatgactctgactagtgccctatccttctgtgagtgagctggtatccaagatgcaagacaaattcctcccaactctttcctctcctctcctcaagtggaaggaaggggtctcttttggaggtgcaagctgtgcagtctagtgttagaggaagggtgatgccaacattcccttagctgccccagctggtgtctcagtagatgggatgctcccccatgatccactgtctctgggcccagttcagccctaggactcatctaagagtttaagtccttatagcct

SEQ ID NO: 808730 - DNA, 651 bp, Homo sapiens
cgattctgtgactgcagaggactcaacacatgtatttcacatggtggcagaaacatcctgtgctcaccaatatccatattttgctctcttcctgggcacagagctaggctgtatctccagcctccttgcagttaagaataactctgtgatacagctstggccactggagtctggaaaggctctggctagtacaggcaccactctgaagccttgctcaggaacaaattttattcgccttcttttcttggctgacagccagagcaagagaatcctgtagagcaggctggggttctgtggagggcagagccacaagacaaaaggagcctgggtccttcaacctgcagaaaaactacctgccaatcatgaacacccatgtggactttctgcaaggttccagcaggttgagccacattacagctgcttgtgctaccttgactaacaggcacatttgaatgcttgtagcctgtaagtgatggagacatagtacgatggaccaattaaggagtctgggaggccccgtttcttccttcctgtgacacccctccttctgatgtcttggggcaatgggtgaaatcactgatggggaaattaccactcaagcatgttgctttgcactttcaacttgctttcactttttggtggcttcgtatc

SEQ ID NO: 808731 - DNA, 534 bp, Homo sapiens
cgttttcactgttgacatcagcctcactggggcagccaaacagttcccgcctcagaagattgccgtcatactccaggaaggtcaggtagaggttgcgaaaaaactccacatgcttgttcttcacccggagcttcttgggggagttccagtgaatgacctggcagggagataaggaagtggtcaggtatggcaggggtggggtggggatccctcacacctgtaggaagccatggctcagcactgggctaagcattatttgagggtctgctcattcgctcattcaacattttggcagagtggttaagggtargggctcgggggccaggtcacctgggatcaaaccctgcctctgctctaggtagtcctttaatctcacacaagtgactgaatctctgtgcctcagtttcctcatctgtgaaatgggaataatctgtgccagttattacattgtcatctctcagccctaagatgtgatgcttaggccacgactctacaaaccctaattctgcttggccacctgctgcctgtaggtgc

SEQ ID NO: 808732 - DNA, 534 bp, Homo sapiens
cgttttcactgttgacatcagcctcactggggcagccaaacagttcccgcctcagaagattgccgtcatactccaggaaggtcaggtagaggttgcgaaaaaactccacatgcttgttcttcacccggagcttcttgggggagttccagtgaatgacctggcagggagataaggaagtggtcaggtatggcaggggtggggtggggatccctcacacctgtaggaagccatggctcagcactgggctaagcattatttgagggtctgctcattcgctcattcaacattttggcagagtggttaagggtaggggctcgggggccaggtcaccygggatcaaaccctgcctctgctctaggtagtcctttaatctcacacaagtgactgaatctctgtgcctcagtttcctcatctgtgaaatgggaataatctgtgccagttattacattgtcatctctcagccctaagatgtgatgcttaggccacgactctacaaaccctaattctgcttggccacctgctgcctgtaggtgc

SEQ ID NO: 808733 - DNA, 534 bp, Homo sapiens
cgttttcactgttgacatcagcctcactggggcagccaaacagttcccgcctcagaagattgccgtcatactccaggaaggtcaggtagaggttgcgaaaaaactccacatgcttgttcttcacccggagcttcttgggggagttccagtgaatgacctggcagggagataaggaagtggtcaggtatggcaggggtggggtggggatccctcacacctgtaggaagccatggctcagcactgggctaagcattatttgagggtctgctcattcgctcattcaacattttggcagagtggttaagggtaggggctcgggggccaggtcacctgggatcaaaccctgmctctgctctaggtagtcctttaatctcacacaagtgactgaatctctgtgcctcagtttcctcatctgtgaaatgggaataatctgtgccagttattacattgtcatctctcagccctaagatgtgatgcttaggccacgactctacaaaccctaattctgcttggccacctgctgcctgtaggtgc

SEQ ID NO: 808734 - DNA, 441 bp, Homo sapiens
tccagagtgtaaatactactagcatggccaattttaagacagcatttatgtgccagtcagttcagagagacaattgcctcttgtgagctggtgcaatttgctatgagctccagcacacccttggcacagttctacttcccaggtgggatgatgggacatggacatttttaaaaatagattattttacatttatgtagacattatcatacaaagttgtatggaatagctatttggtgaccgatagttgttaaagagagaactggaaggcaggatctggaaggcccrgaacagagaacaagcagaactgtattctcgctttcctccctgacaccatcccttctccaagctcagagaaaactccagaaaggcttccagtgggcacctggttcctcaggtgacagggatccgagccaggtggaagaggtttgtcaggccctggga

SEQ ID NO: 808735 - DNA, 585 bp, Homo sapiens
caagataattttgttttcatgccttttaatacatatcacgtcttttagttcatggatcaaggagtaatttaaaatctgaggtcatattattttaaaaatacattttggccaggtgcagtggctcatgcctgtaatcccagcactttgggaggccgaggcgggtggctcacaaggtaaggagttcaagaccagcctggacaacatggtgaaactccrtctctactaaaaatacaaaaattagctgggcatggtggcgcgtgcctgtaatcccagctacttgagaggctgaggcaggagaactgcttgaaccaggacccgcgaggtggagcttgcggtcagccgagattgcaccactgaactccagcttgggctatagagcgagactctgtctcaaaaaaaaaatttttttcataaagctatagttgccatagacagtgattcctctgatggatcttggcaaaggaaattgaaaaccttctggaaatgatttacctttctagatgccattaataatatttgggattcataggaggagatcaaaatagcaacattaacaggagtttggaagttgattcccatccttat

SEQ ID NO: 808736 - DNA, 567 bp, Homo sapiens
ttactgcagcctcgtgataaaacttgaattgatgaggagctgcttcttatggataagctaataaagtgacttcttgagatgtaatctactcctgataaagatgctatgaaggggccgggcgcagtggctcatgcctgtaatcccagcactttgggaggctgaggcgggcggatcacgaggtcgggagatcgagaccagcctggcaaacacggtgaaaccccgtctctactaaaaaatatacaaaaaattagccgggagtgttggtgggcacctgtagtcccagctactcrggaggctgaggcaggagaatggcatgaacccgggaaagcggagtttgcagtgagcggagatcacgccatagcactccagcctgggcgacaaggagactccgtctcaaaaaaaaaaaaaaaaatgctatgaagattgatgaaaagacaacaaaaggatttagaatattacgtaaacttagttgataaagcagcagcaggttttgcgaggactgacttcaagtttgaaagaagttctactatgggtaaaatgctatcacacagcatcacgtactgcaga

SEQ ID NO: 808737 - DNA, 581 bp, Homo sapiens
gttggccaggctggtctcaaactcctgacctcaggggatccgcctgcctcggcctctcaaagtgctaggattacaggcatgagccactgcgcccggcccatcagttctttttcaccatcaatccacgtctgacctttcctgtgcytaagctgtcatagagggtaaatgcaaaccaaacacacttcagatggaaaacacctcacccttctcccaattctcaaaccttgactcacttcccatagcacatggaggagaatgctagcatcttcccacaactcgctccacctctcctcccacccagcccttcctccttcactgctagttgccctgctggttctagaacatgccttggaaccttctcccccagatacctacatggctgtgtctaggacctcattccagtctctacacaaatgtcacctcatcagaggccttccccggccaccatgtccgaagagacacccagccctaccctcacttctctctctatctgcttcccttgctccgaggctctcttgctgctcaactgtggattatacattcatttgttcctcatttctctctgtcacgagaaagaaaac

SEQ ID NO: 808738 - DNA, 659 bp, Homo sapiens
actcgagtcaaacccttgttaaataaccagtttctccaattgtgtcctgttacaaaaaaaaaaaaagaagaaagaaggaaaaacagattcttactgcacttatgcaaataactatattgccgtaagttaagaacactcacaaatagtttccaaattctgcagaaatcaggtaaagagaaaaaaacatattccaaattttgtttttggacaaaactttgttttataatccttaccggagcgtactttactcaattgttaaaagctgtaaatagctcaagaagggggggttwcttgactctgaaaaacaaaacagaaagatcaacaacattttaagcaaaaagtcataaaagattatttcagtcttttattagttcagtctatgcaattaattcctgttttgcttgatatatatgtgttagttttccaagagtcttggatgatgttttctttttctctgcatttaagagtactcatcagagtcctatagctgattataaaccaccttttgaagagaataaaagcaagacaacaattgtctatggatgacagaaagacttagagcagtcatggttaaagaattaatatcattgactaggaaatgtggatacctctgtggcatataataaattaacatcataacaattataattattattgat

SEQ ID NO: 808739 - DNA, 659 bp, Homo sapiens
actcgagtcaaacccttgttaaataaccagtttctccaattgtgtcctgttacaaaaaaaaaaaaagaagaaagaaggaaaaacagattcttactgcacttatgcaaataactatattgccgtaagttaagaacactcacaaatagtttccaaattctgcagaaatcaggtaaagagaaaaaaacatattccaaattttgtttttggacaaaactttgttttataatccttaccggagcgtactttactcaattgttaaaagctgtaaatagctcaagaagggggggtttcttgactctgaaaaacaaaacagaaagatcaacaacattttaagcaaaaagtcataaaagattatttcagtcttttattagttcagtctatgcaattaattcctgttttgcttgatatatatgtgttagttttccaagagtcttggatgmtgttttctttttctctgcatttaagagtactcatcagagtcctatagctgattataaaccaccttttgaagagaataaaagcaagacaacaattgtctatggatgacagaaagacttagagcagtcatggttaaagaattaatatcattgactaggaaatgtggatacctctgtggcatataataaattaacatcataacaattataattattattgat

SEQ ID NO: 808740 - DNA, 613 bp, Homo sapiens
tgtcccggggagagacagcagcagagagagcccagcccacccaagtctggggttgggggttgggtagtgaggaatcctctggggtgggttggaagcatctcggctccaggctctcttctcccttctgcctgccctcctcttcctaggagagcctgatccctgcccctgaaaggggggttcattaagatcaagaaatgagggccccmgcgaggttctgcatggaccttggctctgaagctggacaggaccgtgtaagcctgggaggcaagcctcttagtggctgtgaggctcagcttccccatgggtgtcctgtgcatgctaatagccatctcccagggggatcaaatgagatcacacatgtgtgacatcttgcgcaggggccagcatgtggcaggcctttgctagatggtggctatgatcgatcttcctgtggtccttcccacgatgtccaagtcaggtcaactcaaaacacatgtgttgtgtgtaaggtaatgcatgtgtcataccatgtagaagacactgtgctgagataatgggagacccacaaagagctggccatggctccctgccctccacaggctcatagtcatgggagagatcagataaagtcact

SEQ ID NO: 808741 - DNA, 489 bp, Homo sapiens
ccctcctcgttggagtctccaagacacaccctaggaacagaaatcctgccttaagcacacctcctacgtccgtttctacagacgacgtcgtccttggattcagccacaccatcagcaggctttctatccagggagcaacgttttgatctctcaaataattgcttctgccttggtgtggggcccctgtcatgggcttcagcccaaagattggkgtcaggggaaggggggactctgctctgggacccgcagcaagacccaggtgctcagccctccccaagcacctgccaggctacagagaggtggggacacttctacaaggcactggtgatagggaagcagcaattccaaaacaaccagccaggtctcccccaggaagctctagaggggtgtgtgtttctctctgccatgtgctgaagtgcactggcctgtgtgtaggatttggaaggttggcacggacgctctggaggggtgtgtgtttctctccgccat

SEQ ID NO: 808742 - DNA, 637 bp, Homo sapiens
agttgcggaaactaccatcatacttcagagggaattgggaggaatcagcagcagccaaaccaggaccgtaggccccatctctcaggagcagcccaggccagcgccgtggctcacctggccagcaccaatttgctggaagaagcccaatttgctcattaaatgcgggtcctagagttatcctgggaggtaaacaagaggtgattccatcctgtatgactcaggaggcayagaaagtcctgaaaaatgcatctttcctccccatgtgctccagattccagagcatgatcttcccacaagaaagctgttttctattttttcttgctttgagttggtcctcttgccaacacccactcaccctctgaagggacccctgaaactctaacttctccagctcccagttggacttagccaaatatgtgtataattaaatggtggcagaagaaagtgaagatatgtccagctcttaacccccagtgcctgtgaaggggaccttatttggaaatggggtctttgcagatggaattagttaaggatctcgaaatgaggtcatcctggattcggggcgggctgtgaatctactgactggtgtcccacaagaagatacggagagctgcagggagaagtcatgcaaagacag

SEQ ID NO: 808743 - DNA, 653 bp, Homo sapiens
agatttccatccactttattttcttataaaacggcactaagcaccttacagctctagagtgatttagtgcaaaatgcaaacatgtccaggaataaggcaccgagcctggggcctccctgaatgcctgatgctccgagracttgtctgcacccagctgttgtgcttccttcattatcacagaggtgagcacatgttacatgcaaaacgctacgaaaaattattgtgatgtgccaattacaattttccctattcaaatttggagcatcgagtagaagaatgtccttaaaaaaattcttcccaaatcccaaatgattagtttattcattttgccatcatgtacctgttatttaaattcaaaagtagtgatgttagcgttgttgttcacaggggtgtgggttaacagttctgaggccatttttgtctgctgctgagtcagaacaaatgcgtatgatgggtggtggatgggggagctggatttcttgctgtcagagtgagagttaaatatcaataacagcatgaggctaaatgacccatgaggtcacgggttagggctggagacaccagcaagaactcatgttgggcttactagagatccatacagttacatgcagagctatttatagatacatgtatatacacagtatgtgcacaca

SEQ ID NO: 808744 - DNA, 653 bp, Homo sapiens
agatttccatccactttattttcttataaaacggcactaagcaccttacagctctagagtgatttagtgcaaaatgcaaacatgtccaggaataaggcaccgagcctggggcctccctgaatgcctgatgctccgaggacttgtctgcacccagctgttgtgcttccttcattatcacagaggtgagcacatgttacatgcaaaacgctacgaaaaattattgtgatgtgccaattacaattttccckattcaaatttggagcatcgagtagaagaatgtccttaaaaaaattcttcccaaatcccaaatgattagtttattcattttgccatcatgtacctgttatttaaattcaaaagtagtgatgttagcgttgttgttcacaggggtgtgggttaacagttctgaggccatttttgtctgctgctgagtcagaacaaatgcgtatgatgggtggtggatgggggagctggatttcttgctgtcagagtgagagttaaatatcaataacagcatgaggctaaatgacccatgaggtcacgggttagggctggagacaccagcaagaactcatgttgggcttactagagatccatacagttacatgcagagctatttatagatacatgtatatacacagtatgtgcacaca

SEQ ID NO: 808745 - DNA, 653 bp, Homo sapiens
agatttccatccactttattttcttataaaacggcactaagcaccttacagctctagagtgatttagtgcaaaatgcaaacatgtccaggaataaggcaccgagcctggggcctccctgaatgcctgatgctccgaggacttgtctgcacccagctgttgtgcttccttcattatcacagaggtgagcacatgttacatgcaaaacgctacgaaaaattattgtgatgtgccaattacaattttccctattcaaatttggagcatcgagtagaagaatgtccttaaaaaaattcttcccaaatcccaaatgattagtttattcattttgccatcatgtacctgttatttaaattcaaaagtagtgatgttagcgttgttgttcacaggggtgtgggttaacagttctgaggccatttttgtctgctgctgagtcagaacaaatgcgtatgatgggtggtggatgggggagctggatttcttgctgtcagagtgrgagttaaatatcaataacagcatgaggctaaatgacccatgaggtcacgggttagggctggagacaccagcaagaactcatgttgggcttactagagatccatacagttacatgcagagctatttatagatacatgtatatacacagtatgtgcacaca

SEQ ID NO: 808746 - DNA, 532 bp, Homo sapiens
ctctgagttcactaggcccccacctccctgcgttccccacccactccacggctcactgggaccactctgaagttggctgacgttcaacttttccctggggtgggtcttggagactccaaagaggagggcacggggtggcatgggagggggttttggggcacacggcagttgtttattatcttaatagtttaatgattttattttaaaaggtattrcaaggaatataactaggtcctcaaacctgtaatttggcttctcatctctgcagtggtggtggcagcgacgaggatgtgttttgtatttcactgatttcaaatgagcctgggaagccttttcccagcttcccattgggctttctgtctttttctttctgaagtaggaatcgcctctctagtcacgacattagttcttcattgacgttctgctttctttcagctgatcattgggccatagcgtcgtgtactggagacaaccactccgtgttgatggagaagtcgcccaggtcttgcctggtggtgtcccatgttccctg

SEQ ID NO: 808747 - DNA, 584 bp, Homo sapiens
gactctttttcttggtaggttcccagaaatgcttcgggatgtttgggttctcggggacatctgttcctcagctggactgcatggccttggctcactgcctagccttcaaggttcaaggagcaaacatgcactcctaaggaacccagtggggacccctcaccccacaccacaggctatgatgctcttargggttttgggtctggagacctctatttccgtggcacctgcatgggacgtcagccctgtgtgaccctattttctgtttctgaatctcatctcagtggccaccacagactccaaggagccccagggacacacacggccaaccctgatgacgcaaggggctccaccttctcccctcctctcagagctcctccagtgttcagctgcaggaggaactcccagccatgtgggtcagcacttgttgggccctccacacatccctcctgcacatcgccctgaccaccaggggttgatggtggaggggacccacagttgggggcatcagagtggggtcacagggcccccagcacggccccatctgtcttagtgcgtgcatcccagggatgcttcaagagtgtcag

SEQ ID NO: 808748 - DNA, 584 bp, Homo sapiens
gactctttttcttggtaggttcccagaaatgcttcgggatgtttgggttctcggggacatctgttcctcagctggactgcatggccttggctcactgcctagccttcaaggttcaaggagcaaacatgcactcctaaggaacccagtggggacccctcaccccacaccacaggctatgatgctcttaagggttttgggtctggagacctctatttccgtggcacctgcatgggacgtcagccctgtgtgaccctattttctgtttctgaatctcatctcagtggccaccacagactccaaggagccccagggacacacacggccaaccctgatgacgcaaggggctccaccttctcccctcctctcagagctcctccagtgttcagctgcaggaggaactcccagccatgtgggtcagcacttgttgggccctccacrcatccctcctgcacatcgccctgaccaccaggggttgatggtggaggggacccacagttgggggcatcagagtggggtcacagggcccccagcacggccccatctgtcttagtgcgtgcatcccagggatgcttcaagagtgtcag

SEQ ID NO: 808749 - DNA, 632 bp, Homo sapiens
agcctcatattcattgtaaagaaacttatttcactctgaaagaaattcagagccaagcagggtctggtaagaggagtgatgagtcagaactactcgaaaggttttaccccgcagctctgcagagaggaccctaaaagcggagcaggagtggaagcagagagacagtttagaaagtcrttgacaataacctgattgcagaggacagtgactgggccagggtggtggccagacagacggtgagaagggttcagatctaggtagattctgaaggtcaagccctccggatttgcagatggactgtgcatgcgctgtgagaggaaaccttgctttgtagacacctggagggagggagttagcatatgaacaaaggtggtggaggtttgtggggaagagaatgtccagtgtccactctcaggtgctgatgagttaagggtgagatgcccaaaagacccctaaggaggtcgagcaggaggcagccggatggaggagcctgaagggctcggggctggaggcagagatgactcaggggaggccagtgtctggacggagttcaaagccatgagacagcaggaaagaacgccgataagagagagagagagaagcagtgggctgagtcccgaggatcccatttc

SEQ ID NO: 808750 - DNA, 728 bp, Homo sapiens
attaatgtcttctttctattctaggatccaatcttgggtaccacattgcctggcttcccagtctcttctaatctgtgactgtttctcaggctttccttacatttttctttcttttttgagacagtctcgctctgtcgccaggctggaatgcagtggcgtgatctcagctcactgcaacctccgcctcccgagttcaagcgattctcctgcctcagcctcccaagtagctgggattacaggcacacgctgccatgmccagctaatctttgtatttttagtagagacagggtttcaccatgttggccaggatggtctccatctcctgaccttgtgatccgcccacctcggcctcccaaagtgctgcgattacaggtgtgagccaccgcgcccagccctttccttactttttaaaatgaccttcacagccttgaggagtcctggccaggtgtcctgtagaatgtccccaaatctgggtttgtccgaggttttttttcatggttagactggagttacagatactcaaaaagaataccccagaggggaagtgcccttctcatcacatcacatcagtaggtacctgagatccacacaacatcactggcgacgataatcttcatcactccttcatcacttggttaatgtcatatttgttagccatctctactatgaagttactatgttttccttttttatactccatttattggaggcacatcactaagtctagc

SEQ ID NO: 808751 - DNA, 542 bp, Homo sapiens
ttctgaggccaactaggaagcaaaatagagcagctctactacctggcagccctacaccgtctttactggactcctacatggcacccccatcacctcttttcagaactaatgtagatgcaaaaccagatgctcagcttatcttcagactctagcccttttttccttgcctgactacccaacaaacaagctcggactcagcaacactgaaatgctttcaggcttcttagcccataagagctgaatcaccggacccttctgtagattccattgcttcacaggggaagctgttgctacccctccttccacttctctscaatcttgaaatgtctcttgctccatcagaagcaccactgtgtgtctgcaaggcagactggggtaaaggttgcagtgggttgagactgatagttacaggagaatgatgccaaagggtctgacattttctacctactcttttgtgcttttggctttcccaaatgaaaagggaggacaaggtagacgagagttttaacacctcaagtctattcaagtatccacttctttaa

SEQ ID NO: 808752 - DNA, 622 bp, Homo sapiens
gaccctatgcctggacttcccagctgtcctttctggagccagcctctgggctgggccaacttccccagctactatcgtacctggccccagcttgctccccctgcttgtagagcctgtgctgccaagaccccagcatgccaatttccaaacccatctaagcacctttcttcctggaatactttattaatcatgtccaacaccaagcacagaaatccaggagagagagagaattaatgggagcaggaactccactggcatcgccagctgtggattttatttggcttcattcatttattcatattaaaaaaaatttattggccaagctccccatgtcagacattagaaaacagcagtaaacaagagggagaggttctgtcttcagcacacttggaatctagtaggtagaaaagactttaaatggagtcacacaaggaaatacmcagcaattacatttgtggtggatgctagcaaaaactgcatgaccctggattgtaaaacacagagggatccattgctgactagcccttcgttatcctcaactgacatcacaaggagatgtaaactgaaattctccctaattcacaaattctttggcattatttccaattgtccttaactttgg

SEQ ID NO: 808753 - DNA, 511 bp, Homo sapiens
aagcagggcacccattcctcccacccatgctgacccaaaaaagcatgagtgagtccagccgaggtcagtagggagctcaccttagcccagccagtccacgaccaatgcacaagaggcatgatctgtagtaaatgacttgttttaagccacttaatatgggggttatttgtgactcagcaatagctagctgatacagcatccttgattcctctctccctcacttmcaacatccaatccatcagcaagctccaaataaatctacccacttctttccaattgcctggccacacccttagtccattccagcatcatttctcatgtaaaccactgattctctctcacctacactcttgcctgcctccaatccattctctacacagaaattgggattctttcttcaaagcaaaattgaattaggtctccctagacctagagtagagacaaatcttcataaaatctcagctcctaatgatgcccaccaggcccctacaggatccatcccctgatgacc

SEQ ID NO: 808754 - DNA, 621 bp, Homo sapiens
aatgacctgctgatgggtagaaccagatgtgaaagaagaaccaaggatgactccctgagggtttcagtatgaactactggatgagcagtgatgccttttaataagaaaggaaactgaggaaggggcagatttgggaatcagtccttctgaggcagttctaaatcttagtcatttctacatggacccgccagtctccagcacaaggcctaacacataggagggtgtgagcaatattgtttgaacaacggggccactaagatccargtttggccttgccagaggctatcatcctcaaagattaaaaattgtaatttctggctggacatgtggctcactgtaatcccagcactttgggaggccgaagcagatggatctcttgaggtcaggagttcaagaacagcctggccaacatagtgaaactccatctctactaaaaatacaaaattagccaggcatgatggtgcatgcctgtaatcccagttactcggggggctgaagcaggagaattgcttgaactcgggaggcggaggttgcagtgagccgatatcgtgacaccacactccagcctgggtgacaacagtgaaactgcatctcaaaaaaaaaataattcataatttcttt

SEQ ID NO: 808755 - DNA, 610 bp, Homo sapiens
tctttctttctttcttttttttttttttttttgagacggagtcttgctgggtcacccaggctggagtgcagtggcgcgatctcggctcactgcaagctccgcctcccaggttcacgccattctcctgcctcagcctcctgagtagctgggactacaggtgcccaccaccaggcccggctaattttttgtattttttagtagagacggagtttcaccatgttagccaggatgatatcgatctcctgaccttgtgattcgcccgcctcagcctcccaaagtgctgggattacaggcatgagccacsgcacccagccgatctttgtttcattaagtaatgtttctctttgtctctagcaattaaagtctactttatctgatattattatggccactcctacttttgcaaatgcaaatgtgctttgagtatcttttcccatccttttattttcagcctacttacatgtatcattgtatttgcagtgtatagtatttgtagatagcatgtagttggatcatgtattttttaattggttctgccaatctgttttcattactgagtttagaccatttacgcttagagaagtaattactggtatgttagagcttaaat

SEQ ID NO: 808756 - DNA, 610 bp, Homo sapiens
tctttctttctttcttttttttttttttttttgagacggagtcttgctgggtcacccaggctggagtgcagtggcgcgatctcggctcactgcaagctccgcctcccaggttcacgccattctcctgcctcagcctcctgagtagctgggactacaggtgcccaccaccaggcccggctaattttttgtattttttagtagagacggagtttcaccatgttagccaggatgatatcgatctcctgaccttgtgattcgcccgcctcagcctcccaaagtgctgggattacaggcatgagccaccgcacccagcsgatctttgtttcattaagtaatgtttctctttgtctctagcaattaaagtctactttatctgatattattatggccactcctacttttgcaaatgcaaatgtgctttgagtatcttttcccatccttttattttcagcctacttacatgtatcattgtatttgcagtgtatagtatttgtagatagcatgtagttggatcatgtattttttaattggttctgccaatctgttttcattactgagtttagaccatttacgcttagagaagtaattactggtatgttagagcttaaat

SEQ ID NO: 808757 - DNA, 349 bp, Homo sapiens
gggggctgacccccccacctccctcccggacggggctgctggcctggcgggggctgacccccacctccctcccggacggtgtggctgccgggcggagacgctactcacttctcagatgaggtggctgccgggcggagggactcctgacttctcatayggggcggttgccaggcagagggtctcctcacttctcagacggggcggctgggcagagacgctcctcacctcccagactgggtcgcggcggggcagaggcgctcctcacatcccagacggggcgttggggcagaggcgctccccacatttcagacgatgggtggccgggcagagacgctcctcacttcctaga

SEQ ID NO: 808758 - DNA, 530 bp, Homo sapiens
tagaccccaggcccatcttcagatcacaatgcaaagagaattggcacagcaggtaatcagttgcccactggaaaccaacctatattgagattaccaacaatagcatgattactagcacaaacagaagcggttgcagccatataaatacatctcactaatcccaaacagagggttctctatctygatatcccctttgctagataccaaagatggtcagagtcactgcaaaccaacagccatccagcatgaagggacatttgtctgaacttattgtggtgaagacatcttagctttgccagtttaacaacatgatatcctcacgtggacatattgctagggcttaccctatccctcaaaaggacattgtgcaagtgggactcctgtatcttaagcttcatctgttgccttcaaggtcataacccacctctggtcatgagcccaggggaagagagaggcttgggctggtgccagtgagctgtgatttcatagcttggttgcctagcaagggctgcccaggtcagtctgtgcct

SEQ ID NO: 808759 - DNA, 573 bp, Homo sapiens
ctagggactgctgtgttgttcttgacctttgaggtctctgagaaaacagaaagcatctcacttaatactcttttatataactgtagaacaaattattgttacatcatatatgtgcacgtgtgtggatgtatggatataaaaccacactaacatcttgcagaactcagtttggaaaatctgggctaaggcatttctgattaacttgcattagacagaagttaccccaacttccttctgagaacaacacttgctcagaaagtcttaagctgaatgatccaaaacacctacagtgttttgctgaaatcaaactttgggctgcaaagttggcatgtctttccagcagagggtattggatttgaatcgctcagctctatttggaaccaacaaagcacaattatacaacagttgtkctgggcttctaatgatgtcagagaatggggaacatggaaaacacaattgtcccacttagagaaattagcaaggaccccaatgtcatcatcacgaaactaatcagcttactcatcagctccatattctgaaactcagctagtttttacgaagcctctatgggaa

SEQ ID NO: 808760 - DNA, 638 bp, Homo sapiens
atcactatcacgagaaaagtatgggaaagacccacccccaagattcaattacctcccactgggttcctcccatgacacatgggaattatgggagctacaattcaagatgagatttgggtggagacacagccaaaccgtatcacctctgtattagtccattttcatgctgctgataaagacatacctgagactaggcaatttacaaaagaaagaggcttaattggactcackgttccatataactggggaggcttcacaatcatggcagaaggcaaggaggagaaagtcacatcttacatggatgtgcagaaaaactcccgtttttaaaaccatcagatctcataagactcagtcactatcacgagaacagcccaggaaagacccacccctatgattcaatcaccttccaccaggttcctcccatgacacatgggaattgttggagttacaactaaagatgagatttgggtggagacacagccaaaccatatcaaccttcataactatttatttgtgtatttacttatttatttatttatttttttgagacaggatctcactctgtcacccaggctggattgcagtggcacaatcacagcttattgcagcctcgacctttctggcgcaagggatcctcc

SEQ ID NO: 808761 - DNA, 533 bp, Homo sapiens
cattttcacatctgcaggcatttgcagagacctcttcttctgcctataacaacttttctgccttcctcccttgtcttttcaagacccagcccaaggctccttccctacagttcccagtctcaaaaaggtgaatctcgagcccgttttcatggctcataaatagaagctgggacttcaatagactttctctctctytctttctttctttctttctttctttctttctttctttctttctttctttctttctctttctctctttctctctttctttctttctttttcttttctttctctctctctctttctttctttttttgatgaagtcttgctctgtcacccaggctggagtgcagtggtactatctccgctcaccacaatctccgactcctgggttcaagcgattctcctgcctcagcctcccaagtagctgggattacaggtgtgtgccaccaagccccgctattttttttttgcatttttagtagagacagggttttaccatgttggccaggctggtctcgaactcctga

SEQ ID NO: 808762 - DNA, 516 bp, Homo sapiens
gaatagactaatagcaagttctgaaattggggccgtaatgaatagcctaccaaccaaaaaatgtccggattcacagctgaattgtaccagaggtacaaagaggagctggtaccattccttctaaagctattccaaacaatagaaaaagagggaatcctccctaactcattttatgaggccaacatcatcctgataccaaaacctggcagagacacaacaaaaaaagaaaatttcaggccaatatccctgaggaacatcgatgtgaaaatcctcaataaaatactggcaaaccgaatccagcagcacatcaaaaagctaatccaccatgatcaagtcggcttcayccctgggatgcaaagctggttcaacatccacaaatcaatgggcaaaaactggaagcattccctttgaaaactggcacaagacaaggatgccctctctcaccactcctattcaatatagtattggaagttctggccaggatggaagggaagggaagggaagggagagagaaag

SEQ ID NO: 808763 - DNA, 641 bp, Homo sapiens
ttgatgagcataatatctccattttaaagatcttttattgaggctaactaaacttacctaactagtcagaagttacactgctaggaagtggcaaagagagtattttttgaactcagacattcttcacgtgagcacattgttaggctattaggctacattactctttttttttttttgaaatgtagtctcgctctgtcaccaggctggagtgcagtggtgctattttggctcactgcaacctccgactcctgggttcatgccattctcctgcctcagcctcctgagtagctgggattacaagcgcccgccaccacacccggstaattttttgtatttttagtagagatggagtttcaccgtgttggccaggatggtctggatctcctgacctcgtaatccgcccacatcggcctctcaaagtgctgggattacaggcgtgagccagtatgcctggccttttttttttttttttttttttacatggagtcttgctcttttacccaggctgtaatgcagtggcacgatctcggccgcctcagcctcccggttcaagagattctcctgcctcagccttctgagcagctgggattacagttggatgcaaccacacccggctaatttttgtatttttagtagggatg

SEQ ID NO: 808764 - DNA, 641 bp, Homo sapiens
ttgatgagcataatatctccattttaaagatcttttattgaggctaactaaacttacctaactagtcagaagttacactgctaggaagtggcaaagagagtattttttgaactcagacattcttcacgtgagcacattgttaggctattaggctacattactctttttttttttttgaaatgtagtctcgctctgtcaccaggctggagtgcagtggtgctattttggctcactgcaacctccgactcctgggttcatgccattctcctgcctcagcctcctgagtagctgggattacaagcgcccgccaccacacccgggtaattttttgtatttttagtagagatggagtttcaccgtgttggccaggatggtctggatctcctgacctcgtaatccgcccacatcggcctctcaaagtgctgggattacaggcgtgagccagtatgccyggccttttttttttttttttttttttacatggagtcttgctcttttacccaggctgtaatgcagtggcacgatctcggccgcctcagcctcccggttcaagagattctcctgcctcagccttctgagcagctgggattacagttggatgcaaccacacccggctaatttttgtatttttagtagggatg

SEQ ID NO: 808765 - DNA, 492 bp, Homo sapiens
gggaatgtgtattgttacaacctttatggaaagcaacatggaaattcttcaaaaaaattaaaaatagcaataccacatgatctggcaatcccacttctgggtacatattccaaagtaatgaaatcagcagtgtctcaaagagatagttgtacccctatattcatcacagcattattcacaatagccaagatttgaaaacaacctaagtctctattgatggataaaacacacacacacacacacgcacacacacacacacacacacacacacacacacagtatttagccataaaaaagaaggaaatttgtgatggcatygattgctctggagcccattatgctaagtgaaataaaccagacacagaaaggtgagtactggatgatatttactgtatgaaagacgggttctatttggacgctaaaaagtcaaactgacagaagcagagagtagaacggtggttgtcagaggctggggggtagaagaaatggaga

SEQ ID NO: 808766 - DNA, 627 bp, Homo sapiens
aattggtaccagtagagtggggtgctgctgtaggtactggaaaatgtggaaacaactttggaactgggtaacaggcaggggttgtaacaatttggagggctcagaagaagacagggaaatgtggaaatgattggaacttcctagagacttgttgaatggctttgcttaaaatgctgatagtgatatggatgatacagataatacagattcttctgtatctggcagaataaattactaagcagcaaagcattcaaaagatgaattgggtgctgtgacaggtcttcagttttataaggaaagtagagaataaaagtttggaaaatttgcagcctggcaatactatagaaaacaaaattcattttctgaggggaaattcaaaccagctkcagaaatttgcataagtaatgaggagctgaatattaatccccaagacaatggggaaaatatctccagggtatgtcagaggtcttcacagcagaccctcccatcacaggcctggaggcctaggaggaaaaagtggtttcatgggccgggcccagggtcttcatgctgtgtgcagactagggacttggtgccctgcatcccagtcactccagtcatggctgaaaggggcaaacatggagctca

SEQ ID NO: 808767 - DNA, 632 bp, Homo sapiens
ctagaaaaagcaaatgaatttgcccccagattccccagaaggaaaaaagccctgctgattccttgattctagcccagtggacccatgttgggcttctaacctaccaaacatgaagataatacatgtgttgttataagccactaggctcgtgtactttgttatggcagcaatagaaagttaktatagatttaaagtcttagcaagaataattggaaaattgttcaaaaaacacatttccaaagtgaatatggtcccatgactcagagtccaataatttcagagttataagattcctgtgggagcaacctgatgtgagcatgggtttcagaaagaccagagtacctgctcctgcacttcctactgatgtgacctcagactcgctgctcactatgctgattctgtattcctctcatctgtaacatgagaataataccacctcctaggagggttgtgataaggattagagctaataggtcaaaaagcctcggttgcaggctggaaaaccagcaagcattctatcacatacactgacctgtgtcacaaacaccttctgtgacttacacactaaaccatgcctatccttccctaacaggatggcaaaaagtagtttgggctgagttccttagataatt

SEQ ID NO: 808768 - DNA, 560 bp, Homo sapiens
acttgggaggctgaggtggatcacttggacctgggaggtcaaggctgcagtgagctgtgatcgcaccaccacgctccagtctgggtgacagagtgagagagctagttaaaaaaagaaaagaaaagaaaaaagaaaagaaaagaaaagaagcctgggaaaaaargcatattaaatatgagaaaacggaatacttgcatacttcttgccacagattatggaggccagaagaccatggaacaacatttttaaagtgctgaaacaaaaggaatgtcaaccccaaactctatatccagcaaaaatatctttcaagaataaagaataaagatattataaattgaagaaaactaagacaatttgtctccaacagacctgctctaaaagatgtcctataggaagttcttcaggggaagaagaatgatagctgagagaaacttagaacttcagaaagagaggaatagcaacagaaatggtaaatacctaggaaattataatacacaattttttttctcagagtttcaaatacatgaagcataaattaatagtattagaaaaagaaatag

SEQ ID NO: 808769 - DNA, 560 bp, Homo sapiens
acttgggaggctgaggtggatcacttggacctgggaggtcaaggctgcagtgagctgtgatcgcaccaccacgctccagtctgggtgacagagtgagagagctagttaaaaaaagaaaagaaaagaaaaaagaaaagaaaagaaaagaagcctgggaaaaaaggcatattaaatatgagaaaacggaatacttgcatacttcttgccacagattatggaggccagaagaccatggaacaacatttttaaagtgctgaaacaaaaggaatgtcaaccccaaactctatatccagcaaaaatatctttcaagaataaagaataaagatattataaattgaagaaaactaagacaatttgtctccaacagayctgctctaaaagatgtcctataggaagttcttcaggggaagaagaatgatagctgagagaaacttagaacttcagaaagagaggaatagcaacagaaatggtaaatacctaggaaattataatacacaattttttttctcagagtttcaaatacatgaagcataaattaatagtattagaaaaagaaatag

SEQ ID NO: 808770 - DNA, 577 bp, Homo sapiens
gcccctgtggcttattctccctttcactgtctatgtaaataacagacagtctgattgtgaaagtgtgcgctgtatctacgctggtccaatcagtcaggcctggccttggcttcctgcgtgtggaggttaacagtaaacaggctgtgtgtggctagtgccgggccagcaggtgagaaaaaagggaagggatggaagtgttgcagtgctgcccarggagaccgaggcgggtggcaacgcaggagtacaaggctatccccagggcctgcctgtggaattcggcaggaagcacgtgattgggaatgctgagagttctgtgccatctgcacatggtccccggcccagctctgcagaggagcctgtcccagcacaggatggcactggtgttcaggtagaaagccgtggcccccgcagaagcacacacagccgcggtgagcctctggttgcttgctttgaaaaaaactttatattttgaaaacaattgcacatgaattattcatggcaaactcttcttgctcagttctttcacaaaaccatatgtactggatcgtaaggaaatgtctgcaggcaaatgttcccc

SEQ ID NO: 808771 - DNA, 655 bp, Homo sapiens
ttatgtggccctggagtgacaaaattggagacccgggtgggcccaagttatgactggtttccctttgcagacaggagccgaactctgcaaggatggaagcccccacactttcgtggtacgcaggggatcgaagcccagggagaaaggccctgagaatacaaaagtgagcatatggagagccctagaggaggggtcagctgaggctgtggctgcttttgccctcagggaacgtgcccttcggggcacagctggatgccaagagaatctggccgtgtcctcggtggaaggacattgctggaggatggaggaataagtaacaacttctgaaggttgtgtagggcttggactgacaaaactgaagatgtgagggacctccaatacaaagctggtcatccccttaaaatatccacagaattaggaagctgtttggaacaggaagctcaagaactaaacctattcactcctcccccaacacacaccagctgccctcagtaatgtgaggctgccacyggtttctctaggtgtttcctcagcccctgaacaaggatggagaacctttgctccgtgtgctgaatctgactaggcctcacagcaagcctcaggaactcccgctgtgccgacagcagtcaaaacacaatgatgtcagcggcccttg

SEQ ID NO: 808772 - DNA, 580 bp, Homo sapiens
gaggaacaaaccatagctctgtgattggaaactctccactggcaggcaggggccgagtggctttgtactctcacccgcaggctgcccaatgatgcacagtgccaggtatgcagcagatagccaaaccgcatcaataaatgcttctgatatgtaaaagcttaaatatcaaaagctggccacatccatattgaaagtattctctaagaaatgtgccaatgacaattttttggccaaaaaaaaaaatccttttaaattgttgaaagatgcctaraaatggatctgctgcgtcctgggataagccattgtcctttaaagtatgttagtataagaaaacagctgaacttctgcaggatagaaacaaagagaaacccattctcctaccttcttaaagtcatgcacgttaatttttccattaggctccttgctgaagtcaagaaatcgttttttgaatgccgggtcctgctgctgtatacactttttgaatttttcaatcacttcttctgtggtcatcttcttggtcagggtggttttatcctccgtgagcttggttctaaaatcacaagcaggcatttagacccag

SEQ ID NO: 808773 - DNA, 532 bp, Homo sapiens
cagaactggaggtccccagcacagtgtccaagtgaaagcccatgtacagtggcaggctggggacaggggaacttgcagggagagaatattatggtcctcgagattttcagttatgctttgagctggccgaaggtggcatgtgaccgggcacacagggttgaaaaaggatattttttgtgaagtggaaaaattaaaagtcagagcccattagaaagctttaaatgaaagaaataggctgttttgtggtaactagatcaaggaagtcatcaaacatccayggaaatgaagggaagtccacagttactccacaaatcggcttgatttataaaatacaaattgaatgtgctgttctgtgagtctcagcgtggatgtgtctgagcatgtgggcgtgggtgttcggaggacagctatttcctcagctctctggaagtctcttgcgccccatatttttggggaaaaaacagccctgagacagtcatggagaatggacttctattccttccccgctgcgtctcctgatttttaagagctc

SEQ ID NO: 808774 - DNA, 620 bp, Homo sapiens
tgctgccaccatgcctggcctgctccaaatttattagccttgctaataccagaggtttcctctttttaatgtcctaagccatgcacaggtgtgtgtgaaagagagctgagcatctgcacgtgtgtggctgaagctgcattattgctggaagctgaagatgcataggcatctgaggaggcctcatggatgccgccacccccacctccccmcttgtgggattgaaaacgctttgtgcaccgtctttagctccaatacgttttcccacctgtccaagtactagtgtctgagaggctggattccctgggtgtacagacctggctcagtctctgtaggagatgatctcacctgggattctgcacaagaagaggaagccccaccacagagtgaccgtgagccctgtgcaaggaagtcaaccacagacatccaagcctgccccagccactccagccccaccacagagtgaccgtgagccctgtgcaaggaagtcaaccatggacatccaaccctgccccagccagtccaggcctggggaagactcctgctccagctccaggtgcctcctgattcggctgtctctacgttgcttctgcactcactcagggtttggtctgcttctcttt

SEQ ID NO: 808775 - DNA, 620 bp, Homo sapiens
tgctgccaccatgcctggcctgctccaaatttattagccttgctaataccagaggtttcctctttttaatgtcctaagccatgcacaggtgtgtgtgaaagagagctgagcatctgcacgtgtgtggctgaagctgcattattgctggaagctgaagatgcataggcatctgaggaggcctcatggatgccgccacccccacctccccccttgtgggattgaaaacgctttgtgcaccgtctttagctccaatacgttttcccacctgtccaagtactagtgtctgagaggctggattccctgggtgtacagacctggctcagtctctgtaggagatgatctcacctgggattctgcacaagaagaggaagccccaccacagagtgacygtgagccctgtgcaaggaagtcaaccacagacatccaagcctgccccagccactccagccccaccacagagtgaccgtgagccctgtgcaaggaagtcaaccatggacatccaaccctgccccagccagtccaggcctggggaagactcctgctccagctccaggtgcctcctgattcggctgtctctacgttgcttctgcactcactcagggtttggtctgcttctcttt

SEQ ID NO: 808776 - DNA, 589 bp, Homo sapiens
tgagccataaaacacaccctaacaaattaaaaatcatataaatcatacagtgtcagctcttaggccacagtagaattaaactagaaataaataacagaaagataactggaaaatcacaaaatatatggagattaaacaagacattaaaataatacatgagtcaaaaagaaatctcaaaaaattttttttaaatttcttgaactaaattcaaataagaaacaacaacaacaacaaactcctggaactaatataaataattaactacagcaagattaaaggatatacrgttaataggcaaaagtaaattgctttcccaaatgctagcaatgaacaagtgaaatttgaaattaaaaacaaaataacatttacactaccaccttaaaaactgaaacacttcgatataagtccaacaaaatatgtacaagatctgcagctctgttgaaagaaatcaaagaagaactaaataaagggagaaatactccatgttcatggccaggatgactcaatattttcaaaatgtcagttcttcccgatttaatctctagattcaatgtaattcaagtcaaaatcccagaaacttattttgtgg

SEQ ID NO: 808777 - DNA, 691 bp, Homo sapiens
actgtgcatatgaaaatgtaggagtgtctgatgaaaggcatggaaatctcatgcccgaaggatcaacagtggcaggtcaccaggaaaccgcacggttctgtgcataggcttaatttttccccctcatctcagcctgcggtaatattttaagtagaacccaatgatacatgaattcatgtatttatgctttttttgcccatttgctagcctgtgttcttttttgggcttttgtatttttctcctaaattcaaagctgcatcctccacacccccacaagctttggggagtggttggttagccatcctggcaagggtctttctgtcggtcttaccttctgacctggaacctggctccctgggctcccctttcccaggcccctygcgggtctcaccagtttgccttgaaggaaggcaggtgtggcagcagcttcccctggggtgcctgcctcctaccaggaggtattgctggctcgccggaggcagccccgcgggggaggctgggtgtgcagatgtgcttctcctttctctcctacatggataccagccttccaatcccctctttcaaacccaccaggagctgtgcaggctttgggttcggccttgtcattggctctgtgctcctgctcactgcttctgtatgtggactcgacttcctgggtgacaggatcccatcctccccgcagatgggtcat

SEQ ID NO: 808778 - DNA, 691 bp, Homo sapiens
actgtgcatatgaaaatgtaggagtgtctgatgaaaggcatggaaatctcatgcccgaaggatcaacagtggcaggtcaccaggaaaccgcacggttctgtgcataggcttaatttttccccctcatctcagcctgcggtaatattttaagtagaacccaatgatacatgaattcatgtatttatgctttttttgcccatttgctagcctgtgttcttttttgggcttttgtatttttctcctaaattcaaagctgcatcctccacacccccacaagctttggggagtggttggttagccatcctggcaagggtctttctgtcggtcttaccttctgacctggaacctggctccctgggctcccctttcccaggccccttgcgggtctcaccagtttgccttgaaggaaggcaggtgtggcagcagcttcccctggggtgcctgcctcctaccrggaggtattgctggctcgccggaggcagccccgcgggggaggctgggtgtgcagatgtgcttctcctttctctcctacatggataccagccttccaatcccctctttcaaacccaccaggagctgtgcaggctttgggttcggccttgtcattggctctgtgctcctgctcactgcttctgtatgtggactcgacttcctgggtgacaggatcccatcctccccgcagatgggtcat

SEQ ID NO: 808779 - DNA, 691 bp, Homo sapiens
actgtgcatatgaaaatgtaggagtgtctgatgaaaggcatggaaatctcatgcccgaaggatcaacagtggcaggtcaccaggaaaccgcacggttctgtgcataggcttaatttttccccctcatctcagcctgcggtaatattttaagtagaacccaatgatacatgaattcatgtatttatgctttttttgcccatttgctagcctgtgttcttttttgggcttttgtatttttctcctaaattcaaagctgcatcctccacacccccacaagctttggggagtggttggttagccatcctggcaagggtctttctgtcggtcttaccttctgacctggaacctggctccctgggctcccctttcccaggccccttgcgggtctcaccagtttgccttgaaggaaggcaggtgtggcagcagcttcccctggggtgcctgcctcctaccaggaggtattgctggctcgcmggaggcagccccgcgggggaggctgggtgtgcagatgtgcttctcctttctctcctacatggataccagccttccaatcccctctttcaaacccaccaggagctgtgcaggctttgggttcggccttgtcattggctctgtgctcctgctcactgcttctgtatgtggactcgacttcctgggtgacaggatcccatcctccccgcagatgggtcat

SEQ ID NO: 808780 - DNA, 691 bp, Homo sapiens
actgtgcatatgaaaatgtaggagtgtctgatgaaaggcatggaaatctcatgcccgaaggatcaacagtggcaggtcaccaggaaaccgcacggttctgtgcataggcttaatttttccccctcatctcagcctgcggtaatattttaagtagaacccaatgatacatgaattcatgtatttatgctttttttgcccatttgctagcctgtgttcttttttgggcttttgtatttttctcctaaattcaaagctgcatcctccacacccccacaagctttggggagtggttggttagccatcctggcaagggtctttctgtcggtcttaccttctgacctggaacctggctccctgggctcccctttcccaggccccttgcgggtctcaccagtttgccttgaaggaaggcaggtgtggcagcagcttcccctggggtgcctgcctcctaccaggaggtattgctggctcgccggaggcagccccgcgggggaggctgggygtgcagatgtgcttctcctttctctcctacatggataccagccttccaatcccctctttcaaacccaccaggagctgtgcaggctttgggttcggccttgtcattggctctgtgctcctgctcactgcttctgtatgtggactcgacttcctgggtgacaggatcccatcctccccgcagatgggtcat

SEQ ID NO: 808781 - DNA, 610 bp, Homo sapiens
gggagggtctccctccccggccggggtgcccataacacataacacgtaacacgtctgctgcttttagctctcaacagggctggttgtttcatttcctgagtcctcacaggtattctgccagatcctattttaaactgaaagtcctcgttgaattcacactcaatcccaacattctgcttcctcctcgaaggtgtcagacacattggctccgcttctgcacaccacaaacatatttccataactgactgctttgygcgtgaagccgtgccatcctttctgagtaaggattcacatgttttcaaggatttctgacaggtttcgagaaaagagccgtcgtctccttttccgttagccatctcagcgttgcgcgctgttccgaagcaccaccttcctggcacaggtcactcgtggcttccagatggcacagttaaggaagaggaggcagcagggagcacataaatcctgacactcactaatagactttattaatagttcacgcatggtgatcggccggccccaaacacgctccccgtagttacggatgacccgcttctatattctggcactgctggaaaagacttcatcggactcattttaattattttccaga

SEQ ID NO: 808782 - DNA, 615 bp, Homo sapiens
ctgctatgggtaaacagcccccaaagctgctccagtgagcataggtgttaggggcatggtgatgggcgtggaagcccagctaggaggcgggtgactgggcttgagtacaggtggagctgataagaagggttcagagtctgggtgtttcaagggtggacccccccaggtttcccaacccactgaatgtgagccctgagaaagaggggccacaaggaccccagttttgtgcctttgccggggatggtcaggagccctttagacgtccaggagtcacaccagaagcacgtgaggcctggaagccaccatgcaggaagaaatgtcatttaggaagggggagcagggcagrtgcgggaggacggctttacttagagaagacaaaagagccgaggactggacaaattcctcaaaagaggcctgctgggcatcgtggtagagaaccagcagacatgggcccagagtcaggggagttggggctcaggagacaacctgagggacctccggtagggtacccccacgggcttcagcttccccttttgtgaagctgggctgaggagcctcccttgccaagaggttctgcttatcccagcctggactgacaggatgggaaagtcaagg

SEQ ID NO: 808783 - DNA, 615 bp, Homo sapiens
ctgctatgggtaaacagcccccaaagctgctccagtgagcataggtgttaggggcatggtgatgggcgtggaagcccagctaggaggcgggtgactgggcttgagtacaggtggagctgataagaagggttcagagtctgggtgtttcaagggtggacccccccaggtttcccaacccactgaatgtgagccctgagaaagaggggccacaaggaccccagttttgtgcctttgccggggatggtcaggagccctttagacgtccaggagtcacaccagaagcacgtgaggcctggaagccaccatgcaggaagaaatgtcatttaggaagggggagcagggcaggtgcgggaggayggctttacttagagaagacaaaagagccgaggactggacaaattcctcaaaagaggcctgctgggcatcgtggtagagaaccagcagacatgggcccagagtcaggggagttggggctcaggagacaacctgagggacctccggtagggtacccccacgggcttcagcttccccttttgtgaagctgggctgaggagcctcccttgccaagaggttctgcttatcccagcctggactgacaggatgggaaagtcaagg

SEQ ID NO: 808784 - DNA, 611 bp, Homo sapiens
gctgaaaacgtggagaggctcacaggtacctaaccctgtatttcctctaggagaaatggttcagtattcactaactaaatgtttacattgactttacagagcataactaccatgaataacaagaattgactatatgtggtagttggaattttatcagcaggcraagggacattacttaggagctgggagcttggaatgaggtcccttcatgaggtctactggcatatgacactgtaggaatacactagagagtctcccattgtggtaaaataaagttatccagaaccacaagcttttgctaattagagttcaagtttatactgctcacaaaggtttctaaaagttaattttaaaactaatcctgaaccagcaccacgcaagctctaagaagaggaaaaaaaaaatgccccataagaacacctctataacccagggcacataagggaatcccaaagaaacaactgccacccagaacttcacagttgaaaattataaaccacactaggaaaccaatatgagagccaggcagcagtcaaggcaaataagtgggttctcttctgtaagatctaggattatattacactccaaaaagtaatttttaaatatgaata

SEQ ID NO: 808785 - DNA, 624 bp, Homo sapiens
gtattgatggctgctgaaaacgtggagaggctcacaggtacctaaccctgtatttcctctaggagaaatggttcagtattcactaactaaatgtttacattgactttacagagcataactaccatgaataacaagaattgactatatgtggtagttggaattttatcagcaggcaaagggacattacttaggagmtgggagcttggaatgaggtcccttcatgaggtctactggcatatgacactgtaggaatacactagagagtctcccattgtggtaaaataaagttatccagaaccacaagcttttgctaattagagttcaagtttatactgctcacaaaggtttctaaaagttaattttaaaactaatcctgaaccagcaccacgcaagctctaagaagaggaaaaaaaaaatgccccataagaacacctctataacccagggcacataagggaatcccaaagaaacaactgccacccagaacttcacagttgaaaattataaaccacactaggaaaccaatatgagagccaggcagcagtcaaggcaaataagtgggttctcttctgtaagatctaggattatattacactccaaaaagtaatttttaaatatgaataa

SEQ ID NO: 808786 - DNA, 717 bp, Homo sapiens
aggcagggcacagtggctcacgcctgtaatcccagcactttgggaggccgaggcaggtggatcatgaggtcaggagtttgagaccagcctggccaagatggtgaaatcccgtctctactaaaaatacaaaaattagccgggtttggtggcgggcacctgtaatcccagctacttgggaggctgatgcaggaaaattgtttgaacccgggaggtggaggttgcagtgagccaagttcctgccacttcgctctagcctgggcaacagagcaagactccatctcaaaaaaaraaagaaagaaagaaagaaagtaagaaacaaaaaaaaccaacaacaacaacaaaaaaactccacaattagaagatgaacaacccaatttaaaaatgggcaaaagacatggacagctcatggaagaagatatagatggcaagtgaggagataaaaagatgctcaatatcatatgtcattaggaaaatacaaattaaaacaatgaaatatcaccacacacctataagaatgccccatatctataatactgacaacaccatatgctggtgatgatgtgaaacaacaggaactctcattcattgatggtgggaaggcaaaatggtacagctactttggaagagagttcgacggtttcttgcaaaactaaacttacgctggtcataggatccagcattcacactccttggtatttactgaaaggtgctgaaaac

SEQ ID NO: 808787 - DNA, 573 bp, Homo sapiens
agctggcactgagagatcgtgatgactggtgcactcctgacagatcttcacaggggaaagcactaaagttaggcagagggaagacagaagctaggctgaagaggaagaaagctgggaacgctgcacagggctaccaaacaccaggatttgtttctgactgccattgaatccagggaaatgggtgagttgaatggacaaaaagcaagccactctcaccatggatatctggaatcctggcargaggaaacctctcgaccatcaaggacacttgaattggaaaggacagctgcttagagaagtggtaggggcagcatgccagcagatgtggaacccagataatttggtctaggagtctctgtagtgaagcatggccagagacatctatcctggctcccataatttagccctaggaaaactgtcagaccagaactctgcagagcagtcttgcccaccagacaagaatagtctgaccttaacatccagtggtctgctggtgtctcccagaaacccagcctggctgtgcttgcttgaagtgtcaccttgggtgacctggggacccacatcatagctcct

SEQ ID NO: 808788 - DNA, 523 bp, Homo sapiens
ttagattgtttattcgatttttttttcttttttgatgtaggcatttatagatacaaacttccctcttcacacatcttttgctgtatcccataagttttcatattgatgtggtttagatttgtttccccacccaaatctcatgttcaattgtattcttcaataatgaaggtgggtcccatgggcgtgtaattttataaatagctgagaacaatctcttttgtgatattctcataatagagtattcataaggtttgttcatttaaaagtgtgtggtacctccccatgstctctctttcttctgcaccagccatgttagatgtgcctgctttccgtatgccttctgctattgtaagtttattgactgtaagttttctgaggcctccctagaatcaaaagccaatatgctttctctacatcctgaagaacaatgagccaatttaacctcttttttatataaattacacagtgtcaagtatttcattatagttatacaagaacagactaattaaagtatgttgttttt

SEQ ID NO: 808789 - DNA, 613 bp, Homo sapiens
tttttcaattttcttcttaatctcttcattgatccactggtcattcaggagcatattgtttaattttcatttacttgtatagattctaaaattcctttgttattaacgtgtagtttattccatcatagtaagagaaaatacttgatattatttcatttttctgaatgttttaaagcttgtttgtgacctaacatatagtctatccttgagaataatcattgtggtaaaacaaatgtatatcttgcagcttttggaagaaatattctataaatatcagttagatccatttggtctgtattgcaggttaagtatgamttttttgttttgattttctctggaagatctatacagtaataaaagtgggatgttaaagtcttcagctattattatattggagcctatctctctctttagcactaatatttatttgctttatatatcttggtgcttcagttttgggtgaatatgtattcgaagttgttattcttcttgctgaattgactgctttatcgtactagcacacaagcttgggcagacaagggagtgctgacatcacccctcacctaacaccaggcttcacagctcctgtctcttaaaaaggcccatttttttt

SEQ ID NO: 808790 - DNA, 451 bp, Homo sapiens
tctctccttctctcctgaactgtaaggtttccactaaaaagtctgctgtcagatgtattggagctccattgcatgttatttatttcttttctcttgctgcttttaggaccctttctttatctttgacctttgggagtttgaatattaaatgytttgaggaagtcttctttgggttaaatctgcttggtgttctaaaacgttctcatacttggatattgataccattctctaggtttgtgaagttctcagttattattcctttgaataaaatttctaccactatgactttttctacctattctttaaggccaataactcttaaatttgccctttgaggctatcttttaagttgcaggcatgttttgttagtttattcattgtattctatttccttttgtctcctctgactgtatatttacaaatagcctctcttcaagttatccattctact

SEQ ID NO: 808791 - DNA, 646 bp, Homo sapiens
cactcccatttatgaatgacagcatctcaattgggatactatccaataatagcaatagtaagcaatgcagtcttaatgttacatttgtaaagaatatcaccactcaatttacagtttgtgtttttaatccttatgactttttgtcagctaagaaggaccagctccaggtaaacagtatccaattgacctgtaaatcttgccatttgtatcactgcattaatcatagcacattgcaaacacataatatctctactttgattttaggttgcatccctgggctatggattcctattaatctgtctgagccttgggttgccacccttgccttgcattttgttgaaacttcttctaactcagcttactcattgtgtccgtagagccttaggcatgataatttttgctattgtttccttggtcacamtaatgacttctgttgtgatgtcctctgtagctttgcatcattctattcaaacagctcagtacatggagaactggatgtgcacagccaaccaagcgtggctacactgagttacaaactgaagggccaatgttgaaatccatgtttctatggttaggagaacaagtacaaatcttgcagttgcagcagcaattgcattgtcattttaaccacactcgtatttgtgta

SEQ ID NO: 808792 - DNA, 492 bp, Homo sapiens
ctatgtaaggcaccacattaacatcttatatgtagttcttggaataatgttgttttgtctctgtcttctgttcatagtctgtaaaatcggatggaccgccaatcagaaaatgggtgctgccaagcctggacttacattctttctattaatttgtaaacacaaagggggatatgtagggagccaaaggcccatgggatgtgatcaactcagcattccactgaaggctatatgatcaaacagcaaactgtttatcatgaatacaggatgtaggcaaactcacactgcgcctgccaccaaaaagtttgctcagggccatcactccctggtrctgggctccttgaagttatatactgggaaatctagcacctattgttcgaaggatgcagtctcacaagcctgctgtgaaccaaacggctgagtgacaattacctgacaatcaccccccccaccttctcgttatctctcttacttaataaattcggagggctgaaa

SEQ ID NO: 808793 - DNA, 492 bp, Homo sapiens
ctatgtaaggcaccacattaacatcttatatgtagttcttggaataatgttgttttgtctctgtcttctgttcatagtctgtaaaatcggatggaccgccaatcagaaaatgggtgctgccaagcctggacttacattctttctattaatttgtaaacacaaagggggatatgtagggagccaaaggcccatgggatgtgatcaactcagcattccactgaaggctatatgatcaaacagcaaactgtttatcatgaatacaggatgtaggcaaactcacactgcgcctgccaccaaaaagtttgctcagggccatcactccctggtgctgggytccttgaagttatatactgggaaatctagcacctattgttcgaaggatgcagtctcacaagcctgctgtgaaccaaacggctgagtgacaattacctgacaatcaccccccccaccttctcgttatctctcttacttaataaattcggagggctgaaa

SEQ ID NO: 808794 - DNA, 594 bp, Homo sapiens
caacaaagacaaagaaaataatttctaaaaatgaacaaagctggagattgctgacaagaagcccaataggaagagctccagtctgcatctcccagtgagatcgaagcagaaggtgggtgatttctgcatttccaactgaggtacctggttcatctaattgggactggttagacagtgggtgcagcccatggagggcgagccgaagcagggtggggcatcacctcacctgggaagagccaggggtcaggaattttctcccctacctaagggaagccaggagggactaagcctgaggaaccgtgcactccagcccaggtattgtgctggtcccccggtcttcacaacccacagaccagaagattccctggggtccttaccccatcagggccctgcgtttcacgtgcaaaacwgggcagctattgggcagacatcaaaggagctgtaggaggttttttttttttttttccatatcctagtggcacctggaatgccagtgagacagaagcattcactcccctggaaaggggtgctgaagccagggagccaagtggtcaggctcagcaggtcccaaccccatggatcccagcaaattaa

SEQ ID NO: 808795 - DNA, 543 bp, Homo sapiens
gtagtggttgtggctgaggggcttttgctggtctcctgggggctccaccctagagaggtgcaggttagcaattgctcagtgcaataagcccaggataggggccctgtgctgtgggcccaagctgggggttccctgcttagtgataagcatggacagtgggtgggacttgtgaaagatggactggacttctctctttgagtcaactgaagcttgttgaaggtgtggataaggcacttaggatctttgttcctttgttagttcaagagtagcagtggtagtaccactgcagtggcagtggcagagaataagcttttgtttgaccctggaggttycacctctgagaaatatggagctgctgttactgggagtgtttagcttgtgggacgcggtggctgtccagctggaataaacttggggccctgcttgttggggagcagaaagttgagggctcaccaggaagagagatttttctcctctctatatggtgactgtggcatgcttgggtctagacctcaagctctttgttttttcccaagactgagg

SEQ ID NO: 808796 - DNA, 617 bp, Homo sapiens
agaccaatgacactatgaagaaactgcatcaactaatgtgcaaaataagcatttagcatcatggtgacagaatcaaattcacacataacaatactaaccataaaggtaaatgggctaaatgccccaattaaaagacagactggtaaattggataaagggtcaagacccatcggtgttttgtattcaggagactcatctcacatgcaaagacacacataggatcaaaataaagggatggaggaatatttaccaagcaaatggaaagcaaagaaagcaggggttgtaattgtagtctctgaaaaaacagagtttaaaccaacaaagatcaaaaaagacaaagaagracattacataatagtaaagggatcaatgaaacaagaagagctaactatctgaaatatatatgcacccaatacaggagcacccagattcataaagcaagttctatgagacctacaaagagacttagacttccacacaataatagttggagactttaacaccctactgtcaatattagacagatcaacaagacagaaaattaacaagaatattcaggacttgctgtagaccaagtggacctaaaagacatctacaaaactctctaccctaaatca

SEQ ID NO: 808797 - DNA, 592 bp, Homo sapiens
ggcccactgcaacctccacctcctgggttcaagtgattcccttgcctcagcctcccgagtagctgggactacaggtgtgcaccaccactcctggctaatttttgtatttgtatttgtatttttttagtagagatggggtttcactatgttggccaggctggtcttgaactcctgacctcaggtgatctacccgccttggcctctcaaagtgctgggattacaggtgtaagccaccgcgcccggctgactgcttcttttttaaagttttaaacttttttaagagatgaagactcgctrtgttgcccagggcagactcgacttcctgggctcaaacgattgattctcccgcctttacctcttgagtagctgggactccaggtcacgtcactgtgcccggcagccttttttttttgagacagagtcttactctgttgcccaggctggagtgcagtggcatgatctcggctcactgcagactccacctcccaggttcaagtgattctcctgtctcagcctcccgagtagctgggattacaggcatgcagcaccatgtccagctaattttctgtatttttttttttttgagacggag

SEQ ID NO: 808798 - DNA, 596 bp, Homo sapiens
caccctggcccgggatcctcctgttctctcccctccctgcagccttctctctgtctctggactccaccgccagggctgacctggcccagtttccaatctgtaagcttcagattgatcaacgttttagagacatttcctacccttggattagatgggcttgagtttgattcccaaatccagggactaccaactctttgccttgggcatgtcctgtggtctcccagagccttcatttccacatctgaagaatggtcttaaccccaccatctacatggggctggggggatggaatgtgtggatattagagggttgagcccagagcctggcacccagtgggcactgagtgagcgtcagcttccccrcctttcccttcttcctgttggggcttggggggtgcagacaattccagggggctcactcaggggctctgagtggcatggtgcagcaggggactggagaggccttgaggccatcgcagcagatgctgggagggcacgcaggccatgcctgtgttgtctgggcttcaaggatgctttgcccacacctgatgtcctttccaagagcaaggcaggtgggatcaggccaaccccagctct

SEQ ID NO: 808799 - DNA, 602 bp, Homo sapiens
ttggcaaggacttcctggtccgtggtgcagacggaaaaactcaggctagagaaggtcagggctggctcggggtctcaggaggggctggtggctgagccaggtctcacgcccggtccatcacgctgctgcaggtggaggcatctcatacatattcatgaatgaggctgtgcccccagctctgggcctgctgagggtttggccagtgcagactcggctctgggcagagcctgctgcgtgctgagagctctgttaggtttgagaaggaatcttcacggggacagagctggtgccttcctccggggcccctcgtaccaagcttgccctccgctgtttccccagcctgcaatgtccttggaaactctcmttcaataaacagctgccaggtgagagagacctccacccttggaaaccagactcgctggaccctggggccccagctcccaggcatgaggactctcctacagccccgttggtgtgggttaggagcagggcgtcccactcacccagcagcggctgcctggcggtctcctttgctcgtgcctggctgtggggccggaggtggcacttggcatctcggatcttgaagcgggccttctgtttga

SEQ ID NO: 808800 - DNA, 567 bp, Homo sapiens
atcaaactacagccatagtcaaggcacttacaggtataatggcacttaatgttaatgtgggcaaacattggtggattttgcaccactaattgctctaagatgttataaatagtaactcacagaactcttccaagaacctaggaagtgtgtaccattggtatttccattttcaggtaagaaaactgaaacagatgttcagtgacttgcccaagctcagaatctactacgtggtaaagactgggttcccacccagacagacggactcaagaactcacgcactgcctctgcaccctctgctgccaatgaaaatttaaatgagggcaacaggagatcagagaygccaagagatgttggaaaacagaactggctgaagaaatgacaactgaataaagaggggtgaagggagctgtgaaccacagcaatgccaagagggcatccagccaggcagagtggtctactaggcagagcctcagagaggggaggagttcaccaggcccacgtgccatatgggattcatgccagccttgagtctacaccagtgaaaaaaatcagagagttcatgactga

SEQ ID NO: 808801 - DNA, 528 bp, Homo sapiens
cgttcaatatgaatagatctaggatcagaaattggagaaaggtgaaagtggggaaacagaccaagatgaccaaatacaaaaggagtccagaacaaacaagtaattttttaaatctcaaacccatgtcctcagggagattaaaaaatattttattcataaacttaaaacaagatatatagaaaagaagaaaaatcaatgaaacaaacaaaaaaagagattttctagaaactaaaaggtgatgatcaaataaacaagtctagagagaccatgtgaaagaaagtcacggaaatcctccagaaaataaaccaaaaagatgacagargaaaaggagctatatggggaatagaaaagttaccaggcacagggtcacagggtgttctaagaaagctacttgagaatgagccaccgggaggaagaaagggtgggtgggtgggtgtgtgtgtgtgtgtgtgtgtgtgtgtgtgtatgtgttgtgcatccatggagggcaggtggggataaccaagaaagaaaaagacatgggatcca

SEQ ID NO: 808802 - DNA, 648 bp, Homo sapiens
acttgtgaggagctgcatccaggatcccatcctcctgggtcattgttggcctggctcccacctttgtctggagcctctgctgggggttgaggctggatactgcccctcaggcttgactaggacacagtgtgtactccatgggtgagcctgcaggctggtcaattccggtgtccaactgagcgacctggaagaggagccctccctcccacctcagctctgagccaagctctccagatgcagaggacagggactctcagcaaagcatctccctccaagtggttgtggggcatcctccttgggcagggaaagagkagtcgaaatgatttcctgagaaatcgtcattttcattttatttttgagaaactgtcttgctctgtcacccagtctggagtgctttggggctatcacagcttgctgtagcctagagcccctgggctcaagtgatccttctgcctcagccttccaggtagctgggactacaggcacacggcaccatgcaggactaatttgttaatttttcatttcagagagacagcatctcctgtgttgcccaagctgtcttgagctcctagcatcatgtgattctcccgcctctgcctcccacagcactgaattacaggcctcagccgtggcactgcacccttctga

SEQ ID NO: 808803 - DNA, 694 bp, Homo sapiens
gttgctgtttatcatgaggtaggtgatgccagtttcctttccccaggctcagaccctcccacccaggccaacatccttgtccttttagcggccacagcacagcccacggaaagacgcaccacagttgatgccatcgtgcaggccccttggtgggctttagggtattcctaattattcagcattacaaataatcccacagcaaaagccttcctggaagcttctgcamtgatgagcgtgtgcgtttcccaaaggtgagagtggagaaaggaggctcgggaaacattccttggttaatggtgtaaatcgcttttttggctttattatttttttcatgggtagtttaagacagttgcttccgcagccccaggaaccagccaagctaaatagaagaggccggcacaggtgtgctagaaccgggcctggactccttgtggcttgggaacagacctgtgaaagctcccacatctcctcgccagtcatcaccaactagtcaccaccaacaaggagatggcgcagcccctgcctaatcacagcaattaactgttagggtctttgtgcaggaagcacacgatatgctgagaaaaaccagcttttgtctaagcatgcacctctatggactaagttgggtctaagccccagtcacatgcagactgggaagatgtctgctaggtaagtgttgagggcaggtccacca

SEQ ID NO: 808804 - DNA, 694 bp, Homo sapiens
gttgctgtttatcatgaggtaggtgatgccagtttcctttccccaggctcagaccctcccacccaggccaacatccttgtccttttagcggccacagcacagcccacggaaagacgcaccacagttgatgccatcgtgcaggccccttggtgggctttagggtattcctaattattcagcattacaaataatcccacagcaaaagccttcctggaagcttctgcactgatgagcgtgtgcgtttcccaaaggtgagagtggagaaaggaggctcgggaaacattccttggttaatggtgtaaatcgcttttttggctttattatttttttcatgggtagtttaagacagttgcttccgcagccccaggaaccagccaagctaaatagaagaggmcggcacaggtgtgctagaaccgggcctggactccttgtggcttgggaacagacctgtgaaagctcccacatctcctcgccagtcatcaccaactagtcaccaccaacaaggagatggcgcagcccctgcctaatcacagcaattaactgttagggtctttgtgcaggaagcacacgatatgctgagaaaaaccagcttttgtctaagcatgcacctctatggactaagttgggtctaagccccagtcacatgcagactgggaagatgtctgctaggtaagtgttgagggcaggtccacca

SEQ ID NO: 808805 - DNA, 694 bp, Homo sapiens
gttgctgtttatcatgaggtaggtgatgccagtttcctttccccaggctcagaccctcccacccaggccaacatccttgtccttttagcggccacagcacagcccacggaaagacgcaccacagttgatgccatcgtgcaggccccttggtgggctttagggtattcctaattattcagcattacaaataatcccacagcaaaagccttcctggaagcttctgcactgatgagcgtgtgcgtttcccaaaggtgagagtggagaaaggaggctcgggaaacattccttggttaatggtgtaaatcgcttttttggctttattatttttttcatgggtagtttaagacagttgcttccgcagccccaggaaccagccaagctaaatagaagaggccggcacaggtgtgctagaaccgggcctggactccttgtggcttgggaacagacctgtgaaagctcccacatctcctcgccagtcatcaccaactagtcaccaccaacaaggagatggcgcagcccctgcctaatcacagcaattaactgttasggtctttgtgcaggaagcacacgatatgctgagaaaaaccagcttttgtctaagcatgcacctctatggactaagttgggtctaagccccagtcacatgcagactgggaagatgtctgctaggtaagtgttgagggcaggtccacca

SEQ ID NO: 808806 - DNA, 680 bp, Homo sapiens
caaggagatggcgcagcccctgcctaatcacagcaattaactgttagggtctttgtgcaggaagcacacgatatgctgagaaaaaccagcttttgtctaagcatgcacctctatggactaagttgggtctaagccccagtcacatgcagactgggaagatgtctgctaggtaagtgttgagggcaggtccaccactgactgactgtggcagacttggcaacagcagctgtcacccacagcagtggcaatwccccgcacctccccccccgaaactaggacatgtttggcgatgtctggagacattttgggttgtcacaactaaggacggtgctcctaactctagtgggtagcagccagggatgctggtaaacatcctagcatgcacaggagggtcccacaacaaagaatgacccagcccgcaataccaggaatgccgaggttgaggagccctgccccggagcactgattcatgccacatgttgggcctcaagagcttgtttaatccacataatcctgtatggtgggtggtcattctcattttccagatgaggaaaccaaggatcagagaggttaagtaactgacccgaagtcaaacagcttatgagtggcagagctctattcaaactctgagcacatgcctttagccaaagctctgcacctggcagacaggcccaacgata

SEQ ID NO: 808807 - DNA, 680 bp, Homo sapiens
caaggagatggcgcagcccctgcctaatcacagcaattaactgttagggtctttgtgcaggaagcacacgatatgctgagaaaaaccagcttttgtctaagcatgcacctctatggactaagttgggtctaagccccagtcacatgcagactgggaagatgtctgctaggtaagtgttgagggcaggtccaccactgactgactgtggcagacttggcaacagcagctgtcacccacagcagtggcaattccccgcacctccccccccgaaactaggacatgtttggcgatgtctggagacattttgggttgtcacaactaaggacggtgctcctaactctagtgggtagcagccagggatgctggtaaacatcctagcatgcacaggagggtcccacaacaaagaatgacccagcccgcaataccaggaatgccgaggttgaggagccctgccccggagcactgattcatgccacatgttgggcctcaagagcttgtttaatccacrtaatcctgtatggtgggtggtcattctcattttccagatgaggaaaccaaggatcagagaggttaagtaactgacccgaagtcaaacagcttatgagtggcagagctctattcaaactctgagcacatgcctttagccaaagctctgcacctggcagacaggcccaacgata

SEQ ID NO: 808808 - DNA, 450 bp, Homo sapiens
ccagcacctccccgtgagcgctcctcaccttgccggcatagtggataatgcagaaatcagctttgtccttcagctgcttgggcttctggaacttggggtgggtgccctgctcctgcatcaccttctccacgaagctcttgtcggtggctttggggaaccagcactcctcgtccagcagggccagaatgcccggggggcctgcctggaggaagcgcagcatcagcacaggtgagtgcaccctgggaggggcaccccacccttcaagaagccaargcccggacatcagaatcccctgaatcccacagacggtgggcgacacactccccaggagaagcaaagcactgttgaagatttctagcttctaaagaaacctctggggcccaggctgcggctgacacctttacccaaggatccatcgcggtggttctccagcattagtgaaaccctcag

SEQ ID NO: 808809 - DNA, 703 bp, Homo sapiens
cgcattaagatgaaataaaattcaaatgtcagcgttcataaataaagttctactggaacacagccatgctcacttatctctccctggaactcaaaagtaaggaaaacaaatattttaccatcattacacatgcacatacacacacacatcacatgcgcgcacacgagcatgctccttctctgtgcccactgtgtacgggctttgcagaaattgcatttcttgcagagaaactttgaacctcacaatggaaggtaatttaccaatctcttatctatctatttatcatacttcacgttttagtaataactgaatttcacccttttcaagcttggaaattatatctcctcattctgctgaacgtgtctatggccactttggggctacaatggcagagsagagtagttgtgacagagacgctatagccctcaaaaaatattttgcttactactatttatttacaaaaataaaatatttactatccggcccttcatagggaaagtttgccgactcctggtctactatgagccaggtactgtgctaggactttcacatcttctataattctatcaaaaactttagtggtatattaggttatagagacctgaagaatgtatctagaatctagaataataacatgctttatttgtaaatattcaaatgatttgcaaagataaagagttactttctttaggatcctatcctt

SEQ ID NO: 808810 - DNA, 612 bp, Homo sapiens
tctccttcactttcttcatcgaattgtctaccattacaaaatagaaaagaaatgaagggagggaggaagggaaactgcaacacacacaggttttattggggtgaggcatacctcttattactctggtcagtctaatttgtcaaatcctcgagggtagggccgatacattttttttttaacgtcgtccaacatctattagaggttcagtcattgattatcctcctccctttcttcgtttcccttgggaaacctggaaaacagaaaatcttcccacagaaactcctcaggggcgcgccgagatctgggcttgcgcacttggacttggccggcgctcagcccccgcctcaagccggcggggtctcgcactaacctagcgcgggcgcctcgatcwcccgcgcgcgcgcgtgcgcgagacccccctttggccccctaccctgcagcaagggtagcgtgacgtaatgcaacctcagcatgtcagcagcaatataaaggagaatgaggcggcgcgcctcccagacgcagagtagattgtgattggctcgggctgcggaacctcggaaacccgaatgtgaggaccttaagggatccacagctgccgccccccgcagccat

SEQ ID NO: 808811 - DNA, 642 bp, Homo sapiens
ctagtaaactaagctttcgctgcaaaaaaactcattctacctccctatcaagacaatcaatgacagttatttgttacattcactactccctccacatttaccgctccccccttttttttaaattaaaaatcagctggtataagcagtatgtttcatggtaaaatctgatacaggatttactgggttcttgaagattatctttgaaacacaccaaaatttcttcaatagtggtcgcaggtgtctaagaaataaccaatcaaaccccttttctttacaggtgaggaagctgagacttagagaagtgccttgcccacagtcactcaaactaggtaggtatgaaagagaacccagaatttacaactcctgactctcaaatcatataaactattcacttcagactctactagttatattacagatatatgtaactcctttcatcatgcaatagaaaggytggacggaaccttgggagttgaagatacagattcaaattctggctgggtcactttctaactatgtgactagtcaaaatccttaatatctctgactctaaattttctcaactgtgtaatagataatatctaccacataaagttgtgacatccaatgagataatcaggtgacgcttatctggcacaatat

SEQ ID NO: 808812 - DNA, 601 bp, Homo sapiens
caatgcataaaactgatagtattcactgactgaatttgaggtgcaagagaaagaaaagaatcgagaataactacaatttttcaaacatggagtggactaacattatgaatgacaaaattattttatgatttattcaacctgatgaacaaaaatggatttgaggggtcccagtttaggcatcaccttctttgtgaagtgcctgaacccaccagtaacagttagatgcttccataataatctttctttacccctattatgcaatttttcagattatgcaatgaaactttgtttccatttatgtcttttacattaggatttaaactcatctatttgtaccagatagtagcaaygtgtttgtttaatgaaattgtgtgtgtgtgtgtgtgtgtgtgtgtgtgtgtgtgtgagtgaggggagaggtgtttggtttcagatatgcttaaattaacaaacctttacatatggaaacacccagcaaaaaatagatgatttacaactagagttttgataaatattgggctcgagatgtaggcttgtgagtttccataactgagctactagataaagctattaatgtggaagagacttctgaaggaggaaa

SEQ ID NO: 808813 - DNA, 527 bp, Homo sapiens
gccatatcatttttcaattttggtatttggcttgttttataaataaggttgtgaaaaatagaaatcccagctttaaaaaccaaggttgggtgtggtggttcacccccagaagtccctcacttttggaggccaaggcggsaggatcacttgagcccaggagttcaaggccagcctgagcaacatgacaaaactccatctctacaaaaaaataaaataaaataaaataaaataaaaataaaattagccaggagtggtggtgtgcacctgtggtcccacctacttgggaggctgaggtaagaggatctcttgaacccatgaggtcgaggctgcagtcagctatgatcacatcactgcactccagcctgggtgacagagtgagaccctgtcttaaaaaaacaaaacaaaattttatgaatgtgtgggtgcaaataacttaactctacttttgccattaaatatttttgtagactgctcctcaattaaataattgtaacttataaaacaacattaataaacacaatgcttta

SEQ ID NO: 808814 - DNA, 578 bp, Homo sapiens
gaatcacgtttttatttttatggttattctttagaccttaaggaagagaagacaggctgctaaaaattgaagtatgagaatcaagatttattttgtaatgacagcctggattcaattgttaaactctgggtgtaaggaaacgttttctgatcctgatggaacagaaaaggcttctaagagagcaactgagttaattactgggaaggagaagagacactgccaaggtgctctaagttcaaaaaccartcctagtatctttgttattaatagtcttgcacatctactacacactcgctattattttgatatatactttcacttgcatcatctcctttaattcttaaaacatctttattaagtgagttctattattttaactatttcatgaaagaggaacctgagcctcagagaggttaagtaacgtgctgcaggtcacaaagttggcaagtggcaaaggcaaggttcaaacctagtactgattactactatgttaaaagtgaccagaaaacaaaccagacgaacctagaaagatatccaaatcagaagttgtgtttgtttcagagtcttatttgaaatat

SEQ ID NO: 808815 - DNA, 620 bp, Homo sapiens
gtatgagcatttgagccagccagattagggttcagaacccagaccctccacttcctagctgtgtgatctcaggtaagtttctttatctccaccagccacatttttattatttgtaaaataggaataatttccacctcccaggattgttgtgagatttaaattagagaatactatataatgcacatgacagaaggtttttcagatagtagatattcatcaaatgttagttcactttctatccacacagcaaataagaggctgggctatgcaacttggctttcaaattacttgaacttttattgctttttacgcttaattttttgttagggtggtaaagatgagaaggtttttgtttcttcgacattccagtttggatagtgggactgcttttattttaactgacatgatttccctagatagytgacaccccaattttgaaatgcagtttttaaaaaatttcagtcaatgatcgatgattttaaaaaagaaaaattattcgtaccacaatggttatcaatttcattcctcagagctttagtactccacagaggttcttgaagggtcacggagtggggtgacaaggaggcctagcagaaggcaaagcagatgagagagtgggt

SEQ ID NO: 808816 - DNA, 552 bp, Homo sapiens
tgccctttgtttttttttttttttttttttttttttgagacgcagtctcactgtattacccagcctggagtgcaatggcgtgattttggctcgctgcaacctctgcctcgcgggttcaagtgattctcctgcttcagcctcccaagtagctgagattacaggcatgtgccaccacgccccgctaatttttgtatttttagtagagatgaggtttcaccatgttggtcgggctggtctcccactcctgacctcaggtgatgcacccgcctyggcctcccaaagtgctgggattacaggcgtgagccacagcgcccgacctgtgtgtcattctttaactctcgtcttcccttcaaaacctaacaatatcttaagatcaaaagcattcttcatttaggtttcgctttaaagataatatagatctttgccaaagtcagtaaacaaagatgaacaatccttgtgtcaggcctctgagcccaagccaagccatcgcatcccctgtgacttgtacgtatacgcccagatggcctgaagtaactgaagaatcacaaaaga

SEQ ID NO: 808817 - DNA, 620 bp, Homo sapiens
aaaatgtgtgtcctttttaaaatggtgaacaatttttgtctaactgaaagcgcatttaaaggttatatataaaacaagggaaaaggaaccaggaaataagagagatgtaaagaaagctataaaaataaagagctttttttttttgtaagaaaacttaaagagaaataatgtaatatgagaaagaatcttgtatggtaaatttagtcctatgtacaatgactgtttaagaaagagggttgttcaagacaaaccagaaagtccaagcatgtcacgaatggtctgtgtaagtcacaataagaggatttgtaaaaaaaacccaaaaatttttatatgatcaagttgtctataattaaagggaaatcacatggtctttctagagattgggcttgatgtaaaaacaatttatggccgggcgcggtggctcacacctgtaatcccagcactttgggaggctgaggcgggcrgatcacgaggtcaggatatcgagaccatcttggctaacatggtgaaaccccatctctactaaaaaatacaaaaaattagccgggcgtggtggcgggcgcctgtagtcccagctactcgggaggctgaggcaggagaatggtgtgaacccaggaggt

SEQ ID NO: 808818 - DNA, 538 bp, Homo sapiens
gcacctgtagtctcagctactagggaggctgaggcaggagaatggcgtgaacctgggaggcggagcttgcagtgagccgagatcgtgccactgcactccagtctgggcgacagagcaagactctgtctcaagaaaaatgaaataaaataaagtaaaatgaaataaaattgcaaaactaaatgaaaacatggaatgttaaacttactgaacaccattaagtagattactacatttggaaaagaaatcttagaagacgaatgtagggaaaaagtagtagagggrttatttgaagataaaagaggatgagaattttccaaatttttatgtgataaaagaaaaactaataccaatcaatactgtttgctttgaaattatttggaattattctggaactaaaaataaggaaacaataaagaacttacaaaataaacaaaatgtgaaggcatttctcatcaccggcatggtcccacaagaaatgctacatggtggccaggcaccagtggctcatgtctgtaatcccagagtcttgggaggccaa

SEQ ID NO: 808819 - DNA, 598 bp, Homo sapiens
tctcatcaccggcatggtcccacaagaaatgctacatggtggccaggcaccagtggctcatgtctgtaatcccagagtcttgggaggccaaggcaggcagattagttgaggctaagagttcaagatgagcctgagtaacatwgtgagatgctgtttattttttttttttgccaaaaagtgtccatatgttgaaaaatataatggtgctgaacagccttaaaaaactacatgaaactataaagctttctgttaaatgtaaatatataaacacatatacaatggtttattaccataatcatgaagcaaaatctcttaaaattctactatagaatttcaacaaaaaaatctgcataaatctgttaatagatacacaatataaaataatatttgtaataataaaaaaactacaggatgtaagcctgggcacaatggctcatgcctgtaatcccagcactttgggaggccaagataggtggatcatgaagtcaggagttcaagaccagcttggctaagatggtgaaaccccgtctctactaaaaatatgaaaaattaaccagtcgtggggatgggtgcctgtaatctcagctacttgggaggc

SEQ ID NO: 808820 - DNA, 598 bp, Homo sapiens
tctcatcaccggcatggtcccacaagaaatgctacatggtggccaggcaccagtggctcatgtctgtaatcccagagtcttgggaggccaaggcaggcagattagttgaggctaagagttcaagatgagcctgagtaacattgtgagatgctgtttwttttttttttttgccaaaaagtgtccatatgttgaaaaatataatggtgctgaacagccttaaaaaactacatgaaactataaagctttctgttaaatgtaaatatataaacacatatacaatggtttattaccataatcatgaagcaaaatctcttaaaattctactatagaatttcaacaaaaaaatctgcataaatctgttaatagatacacaatataaaataatatttgtaataataaaaaaactacaggatgtaagcctgggcacaatggctcatgcctgtaatcccagcactttgggaggccaagataggtggatcatgaagtcaggagttcaagaccagcttggctaagatggtgaaaccccgtctctactaaaaatatgaaaaattaaccagtcgtggggatgggtgcctgtaatctcagctacttgggaggc

SEQ ID NO: 808821 - DNA, 593 bp, Homo sapiens
attactcgacttcaaactatactatatggccatagtcaccaaaatagcacagtattggtataaaaataggcaaatagaccaatggaacagaatagagaagccagaaataaagccaaatacttacagccatctgatcttcgacaaagcaaargaaaacataaagtggggaaaggacaccctattcaacaagtggtgctgggataattgcaagccacatataggagaatgaaactggatcctcatctcttatcttatacgaaaatcaactgatgatggatcaaggacttaaatctaaggcctgaaaccataaaaattctagaagataacattggagaaactcttttagacatttgcttagacaaagagttcatgactgagagcccaaaagcaaatgcaacaaaaacaaagataaattgatgggatctaatcaaactaaaaagcttctgcacagcaaaagaaatagtcaacagagcaaacagacaatcccacagactgggagaaaatctttgcaaactatacatccaaaaaaggaataatatccagaatctacaaggaactcaaattagcaagaaaaaaataagctcatcaaaaag

SEQ ID NO: 808822 - DNA, 593 bp, Homo sapiens
attactcgacttcaaactatactatatggccatagtcaccaaaatagcacagtattggtataaaaataggcaaatagaccaatggaacagaatagagaagccagaaataaagccaaatacttacagccatctgatcttcgacaaagcaaaaraaaacataaagtggggaaaggacaccctattcaacaagtggtgctgggataattgcaagccacatataggagaatgaaactggatcctcatctcttatcttatacgaaaatcaactgatgatggatcaaggacttaaatctaaggcctgaaaccataaaaattctagaagataacattggagaaactcttttagacatttgcttagacaaagagttcatgactgagagcccaaaagcaaatgcaacaaaaacaaagataaattgatgggatctaatcaaactaaaaagcttctgcacagcaaaagaaatagtcaacagagcaaacagacaatcccacagactgggagaaaatctttgcaaactatacatccaaaaaaggaataatatccagaatctacaaggaactcaaattagcaagaaaaaaataagctcatcaaaaag

SEQ ID NO: 808823 - DNA, 629 bp, Homo sapiens
aacagatttgttgacatgtgtcattgattggtattgaggtgtgtgtgtgtgtgtgcgcgcgcatgagtgtgtgtgtagagagaaagaaaagggcgtaaggagtggagaggagaaaggaggaaaggaggcgaagaaagagaaggaagatagagaaagagggagagagagagaggtwttttgtgctttatttgggaaagtagaactgggtgaatgggatgaggctaggctatgtaagtaggtggagaatgacaacatgcagaaaagtgtgaggctgaaactttgcttgtctctcagtagagttcaaatctagccggttgaaacattcataatcctctgaggacaggcccttttctccttttcttggggaatccctttacctcttaagccctttaggaccttccaacattttcccaccttcctagctatctgacaactctttaatcttttcacagggttcttgctctaatgaatgcatatttcattggtggatctggaaacagttgtattaaaaattatttttttcaggcctcttagataagtcactctttcagcaacagtattgtcaacttctcagagctgagatctaattctgcttcttttaaaccccaccagtggcctagcacaagcta

SEQ ID NO: 808824 - DNA, 629 bp, Homo sapiens
aacagatttgttgacatgtgtcattgattggtattgaggtgtgtgtgtgtgtgtgcgcgcgcatgagtgtgtgtgtagagagaaagaaaagggcgtaaggagtggagaggagaaaggaggaaaggaggcgaagaaagagaaggaagatagagaaagagggagagagagagaggtattttgtgctttatttgggaaagtagaactgggtgaatgggatgaggctaggctatgtaagtaggtggagaatgacaacatgcagaaaagtgtgargctgaaactttgcttgtctctcagtagagttcaaatctagccggttgaaacattcataatcctctgaggacaggcccttttctccttttcttggggaatccctttacctcttaagccctttaggaccttccaacattttcccaccttcctagctatctgacaactctttaatcttttcacagggttcttgctctaatgaatgcatatttcattggtggatctggaaacagttgtattaaaaattatttttttcaggcctcttagataagtcactctttcagcaacagtattgtcaacttctcagagctgagatctaattctgcttcttttaaaccccaccagtggcctagcacaagcta

SEQ ID NO: 808825 - DNA, 629 bp, Homo sapiens
aacagatttgttgacatgtgtcattgattggtattgaggtgtgtgtgtgtgtgtgcgcgcgcatgagtgtgtgtgtagagagaaagaaaagggcgtaaggagtggagaggagaaaggaggaaaggaggcgaagaaagagaaggaagatagagaaagagggagagagagagaggtattttgtgctttatttgggaaagtagaactgggtgaatgggatgaggctaggctatgtaagtaggtggagaatgacaacatgcagaaaagtgtgaggctgaaactttgcttgtctctcagtagagttcaaatctagccrgttgaaacattcataatcctctgaggacaggcccttttctccttttcttggggaatccctttacctcttaagccctttaggaccttccaacattttcccaccttcctagctatctgacaactctttaatcttttcacagggttcttgctctaatgaatgcatatttcattggtggatctggaaacagttgtattaaaaattatttttttcaggcctcttagataagtcactctttcagcaacagtattgtcaacttctcagagctgagatctaattctgcttcttttaaaccccaccagtggcctagcacaagcta

SEQ ID NO: 808826 - DNA, 615 bp, Homo sapiens
caactgaaactattctaaaaaattgaggaggagggtctcctccctaactcattctatgaggccagcatcatcctggtaccaaatcctggtaacgacacaacaataaaagaaaacttcaggccaatatcccagatgaacatacgtgcaaaatcctcaacaaaatactagcaaaccgaatccagcagcacatcmaaaaactaatccatcatgatcaagttggctttatccctgggatgcaagattggttcaacatacacaaatcaataaatgtgattcatcagataaacagaattaaagacaaaaaccatgattaccttaatatatgcagaaaatgcttttgataaaattcaacatctgtttatgttaaaaaactctaaataaactaggtattgaaggagcatacctcaaaatagtaagtcatatatgacaaacccacagccaatgtcatactgaatgggaaaaagtgagaagcattcccccttgaaaatcagcacaagacaaggatgccttctctcaccactcctattcagcatagtattggaagttctggccagggcaatcaggcaagagaaataaataaagggcatccaaataggaagagaggaagtcaaacta

SEQ ID NO: 808827 - DNA, 615 bp, Homo sapiens
caactgaaactattctaaaaaattgaggaggagggtctcctccctaactcattctatgaggccagcatcatcctggtaccaaatcctggtaacgacacaacaataaaagaaaacttcaggccaatatcccagatgaacatacgtgcaaaatcctcaacaaaatactagcaaaccgaatccagcagcacatccaaaaactaatccrtcatgatcaagttggctttatccctgggatgcaagattggttcaacatacacaaatcaataaatgtgattcatcagataaacagaattaaagacaaaaaccatgattaccttaatatatgcagaaaatgcttttgataaaattcaacatctgtttatgttaaaaaactctaaataaactaggtattgaaggagcatacctcaaaatagtaagtcatatatgacaaacccacagccaatgtcatactgaatgggaaaaagtgagaagcattcccccttgaaaatcagcacaagacaaggatgccttctctcaccactcctattcagcatagtattggaagttctggccagggcaatcaggcaagagaaataaataaagggcatccaaataggaagagaggaagtcaaacta

SEQ ID NO: 808828 - DNA, 615 bp, Homo sapiens
caactgaaactattctaaaaaattgaggaggagggtctcctccctaactcattctatgaggccagcatcatcctggtaccaaatcctggtaacgacacaacaataaaagaaaacttcaggccaatatcccagatgaacatacgtgcaaaatcctcaacaaaatactagcaaaccgaatccagcagcacatccaaaaactaatccatcatgatcaagttggctttatccctgggatgcaagattggttcaacatacacaaatcaataaatgtgattcatcagataaacagaattaaagacaaaaaccatgattaccttaatatatgcagaaaatgcttttgataaaattcaacatctgtttatgttaaaaaactctaaataaactaggtattgaaggagcatacctcaaaatagtaagtcatatatgacaaacccacagccaatrtcatactgaatgggaaaaagtgagaagcattcccccttgaaaatcagcacaagacaaggatgccttctctcaccactcctattcagcatagtattggaagttctggccagggcaatcaggcaagagaaataaataaagggcatccaaataggaagagaggaagtcaaacta

SEQ ID NO: 808829 - DNA, 563 bp, Homo sapiens
aatttccattttatttaatgttttccattattaatttcgatgctcaaatttcccagactggctagtaggaacctctttgaattaaatcctgggccatgttttttcatgctcctactgttctttgagtatctccttactttctggcacaaattttagtctcattttataccttctgtgcctcaatcctagaattagctatcttgccaagaggcttccctcctcttcacttcttttttattttttgtggaggaagagactcagaaaccaatatttgggtacttggagtattccmtagggttgtcattgcttctaggctcttcagaagagaaggttaagaaatacacacatatatagtacataaactcacatacagatacatctatttctacatgtatattgttgtgtgtgcttgagtgtgcatggtgtataatcatgaccatttatttgttctaaaatcatttctttcaaatttcaagcaatgttttatactgtagcaggctttgatgaacaaatttttattcactatattcatgtgctccatggtaatatgtattttgatgtta

SEQ ID NO: 808830 - DNA, 623 bp, Homo sapiens
gtattaataaagaagattctgctgaggtcagagaatcaggtagaaatataggaaaaatataatttaaaatttccaggtcaggcatggtgctcatgcctgtaatcccagcactctgggaggctgagaggggtggatcacttgaggccaggagttcaagaccagcctggccaatatgttgaaaccctgtcgctactaaaaagacaaaaattagccaggagtggtggcccacgcctgtgatcccagctactcgggaggctaaggagggagaatcgcttgaacccaggagatgtaggttgcagtgagyagagatctcaccactgcactccagcctaggtgacaaagtgaaaccctgtctcaaaaaaaaatttttctatggctgtcgcaatgtaattgtaagcatatacataggaaatgtatatactttgtgttcattagtaatattaaagtacaaaaagatataaataaaacataaaaggtttgaaagaggttttaattaattaaaatctgctcaataaataacttacagaaagataaggtgtttatttaaaacaggcttatatgactaaaatttatcagtttaatacaaatatgtgtttaaagtttcaactttgagtatactatgc

SEQ ID NO: 808831 - DNA, 621 bp, Homo sapiens
gtattaataaagaagattctgctgaggtcagagaatcaggtagaaatataggaaaaatataatttaaaatttccaggtcaggcatggtgctcatgcctgtaatcccagcactctgggaggctgagaggggtggatcacttgaggccaggagttcaagaccagcctggccaatatgttgaaaccctgtcgctactaaaaagacaaaaattagccaggagtggtggcccacgcctgtgatcccagctactcgggaggctaaggagggagaatcgcttgaacccaggagatgtaggttgcagtgagcagagatctcaccactgcactccagcytaggtgacaaagtgaaaccctgtctcaaaaaaaaatttttctatggctgtcgcaatgtaattgtaagcatatacataggaaatgtatatactttgtgttcattagtaatattaaagtacaaaaagatataaataaaacataaaaggtttgaaagaggttttaattaattaaaatctgctcaataaataacttacagaaagataaggtgtttatttaaaacaggcttatatgactaaaatttatcagtttaatacaaatatgtgtttaaagtttcaactttgagtatactat

SEQ ID NO: 808832 - DNA, 624 bp, Homo sapiens
aagacatttcttgttttttgataggatgactcaatagtataaatatgtaaattaattcataaatttaatataatcccaataaaaataacaataagttatttttagaattagacaagttgtcactgaacctcacatggaaaaattaacaatagccagtgaaacacacaaaaaatgataawctatgagcaggtactagccctactagacagtaaaacatactataaatcatctataatttaaagggtgttgggattgcatcaaactaaatagcttctgcacagcaaaagaaacaatgaacagagtgaagagataacctatggaatggaaaaaaaaatttcaaaccatacatttaagggattagtatacaaaatatataaggaactcaaacaactcaatagcaagaaaacaaataaccaaaagaaaaaatgagcaaagcacttaagtagacatttcccaaaagaaggcatacaaatggccaacaggtataagaaaaaatgctcgacatcctaattatcagggaaatgcaaattaaaatcataatgagatactacttgatacctcttagaatgactattatcacaagataacaagtgttggggaggatgtagggaatatcattgtgtt

SEQ ID NO: 808833 - DNA, 434 bp, Homo sapiens
acggtttccctcattcatgccttcactcatgagacagttacagagcaccaaggctcagcgaggtgcaggactggcctggggcggggggtgaggggaacctgtgctgtctgaccccccagcagcctctccagggcctcctcggctgggctgatagacctgtgttttagcttgaacctctgtccaccacccttcagggaggacctcacacacgccttggccggcgtgtgatgggcactccyaggaggcatgtggtgtgagccagagtcggattggaactcaggatgggaacaacgcctgcacaaggagaacgtccataaacagctgcagaagaccaaaagggaggggtggaggagggagtcctccctccaccattgctgttgttatgacccagccactccctgggggctcactccctctggaaaatggtaggttag

SEQ ID NO: 808834 - DNA, 682 bp, Homo sapiens
ttcaaccattgtgaaaggcagtgtggtgattgctcaaagacctaaaaacagaaataccattcaacccagcaatcccatgactgggtatatattcaaagtaatataaatttttctgccataaaacatatgaatgcttatgttcactgcagcactattcacaatagcaaactcatgaaatcaacctaaatgtccatcaatggtagaaaggatgaagaaaatatgttaaatatacaccatggaatactatgcagccagaaaaaagaatgagatcatgtcctttgtatgaacagcaatggagctggaagccattatccttagcaaactaacacaggaatagtaaaccaatactgcatgttctcacttataattgggggctaaatgatgagaacacatggacacatagaggggaacaacagacagtggaagggaggagggggagaggatcaggaaaaataactaatggacactagacttaacatgtgggtgatggaacaatttgtamaacaaacccccatgacatgagattacctgtataacaaacctgcacaggtacccctgaacgtaaaatgaaagttaaaaaaacttccttttaaaaattttattttagtttcagtgagtacaggtgaaagtttgttacctgggcaaattgcacgtcaggctttgatgtacaaattgttcaccc

SEQ ID NO: 808835 - DNA, 602 bp, Homo sapiens
gattacttgaggtcaggagttcgagactagcctggccaacatggttaaaccctgtctctactaaaaatacaaaaattagccaggtgtggtggcgtgtgcctataatcccagctactcaagaagctgaggaaggcgaatcgcttgaaatcaagaggcagaggttgcagtgagccgagatcgcaccactgcactccagcytgggcaacagagtgagtgtaactccatctcaaaaaaaaaaaaaaaaaatatatatatatatatatatatatatacatatatatatatatatgctcttaatcatgtcatctatgatatacagctttgagttgttgttttatacttcagttttgaagtgggcaggctttctgttccaaggagttgttcaaacaatgcaataatgtctccatcttgagagcacatctcaggagtcattcaataagaatacttatgtaacatatggctactgctatgctttgaatctttgtaccccatgaagctcatgttgaaacttaatcatcaagagaacagcattaaaaagtggggactttaaaaggtgattgagtcatgaagttcccacccttatgaatagattaatctgttca

SEQ ID NO: 808836 - DNA, 602 bp, Homo sapiens
gattacttgaggtcaggagttcgagactagcctggccaacatggttaaaccctgtctctactaaaaatacaaaaattagccaggtgtggtggcgtgtgcctataatcccagctactcaagaagctgaggaaggcgaatcgcttgaaatcaagaggcagaggttgcagtgagccgagatcgcaccactgcactccagcctgggcaacagagtgagtgtaactccatctcaaaaaaaaaaaaaaaaaawatatatatatatatatatatatatacatatatatatatatatgctcttaatcatgtcatctatgatatacagctttgagttgttgttttatacttcagttttgaagtgggcaggctttctgttccaaggagttgttcaaacaatgcaataatgtctccatcttgagagcacatctcaggagtcattcaataagaatacttatgtaacatatggctactgctatgctttgaatctttgtaccccatgaagctcatgttgaaacttaatcatcaagagaacagcattaaaaagtggggactttaaaaggtgattgagtcatgaagttcccacccttatgaatagattaatctgttca

SEQ ID NO: 808837 - DNA, 640 bp, Homo sapiens
ttaatgttaatagtaatattggtattgttatttttaaattattattggtttgtttagaattaagcaaataagtatgaagttaatatacttagaaacaaagattgtcagggtaagagaaaaaagacacaagtacaagataaagaaattgggtaaaaccctgtaccattaaatttgaattggaaatagctttataaactcattatatttttcacatttaaaaatatctttttcggccaaatgcggtggctcacacctgtaatcccagcactttgagaggccaaggcaggtggaccacatgaggtcaggagttcragactagcctggccaacatagtgaaacctgtctctaccaaaaaatacaaaaattagctgggtatagtagcatatgcctgtagtcctggctactcgggaggctgaggcaagagaatcgcttgaaccggggaggtggaggttgcagtgagctgaaatcacattactgcactccagcctgggcaaaaaaaaaaaaatcccacaaatatatatatgtgtgtgtgtgtgtgtgtgtgtgtgtgtgtgtgtgtgtgtgtgtgtttcctagttctttctaccgaaaagcccagaagcaatgacaactcaacagcaaaaaaaaaaaaaaaaaaaaa

SEQ ID NO: 808838 - DNA, 694 bp, Homo sapiens
aagaatcaacagcactgaaatggttatactgcccaaagcaatttacagattcaatgctatttctatccaactattatatcaatgacattcttcacagaactattatgaactattttaaaatttatgtgaaaccaaaaagtagcttgaatagccaaggcaattctaagcaaaaagaacaaagctggaagcatcactttactcaacttcaaactatactacgtggctacagtaacccaaacagcatggtagtggtacaaaaacaggcacatagaccaatgaaataaaacagaaagcccagaaataagaccacacatctgtgaccatctgatcttcaacaaagctgacaaaacaacaatggggaaaagactccctattcaataaacggtcctgggataactggttagctatatgcagaaggtacaagtagraccccttccttagaccatacacaaaaattaactcaagataaagacttaaatgtaaaatctgaacctatgaaatccccggaagacaacctacgcaataccattctgaactaagtaatgggcaatgatttcatgatgaagatgcaaaagcaattgcaacaaaagcaaaaattgacaagttggatctaattaaactaaagagcttctgcacaacaaaataaactatcagcagattacacagacaactcacagaatgggagaaaattttt

SEQ ID NO: 808839 - DNA, 635 bp, Homo sapiens
aagaggggaacaacagacattggggcccacttgagggtagagggtgggaggagggagagggtcagaaaaaataactatttggtgctaggcttagtacctgggtgatgaaataatctgtacaacaaacccctataacacaattttacctatataacaaacctgcacatgtacccaaraacctaaaataaaagtttttaaaaaagtaaataaataaaaacaatattaactttttcaatccaaaaatagaaaaaaattcataatttccttacactcatcttttcctatatgaacaatcaagaataaatcaatggaatgcattcaatgcttttatgaccttatccacaaatatggaagcttatgactggcatgtttttgtcaactaaatgctttgactttacgtaagaatgatctataggacatggaactattgtgtatgagaataaaaagaagtgtaattctcagaatatgtctatgtgatgtcccaattagtggcagaaatatttaaaaagtcagaaaaaatatatactgggcttgaggcaatgaacaacacagacacaatccctggtcccagggagcttaagtatattttgactaagacagtaaataaattaagattattttaaatgctgataaat

SEQ ID NO: 808840 - DNA, 635 bp, Homo sapiens
aagaggggaacaacagacattggggcccacttgagggtagagggtgggaggagggagagggtcagaaaaaataactatttggtgctaggcttagtacctgggtgatgaaataatctgtacaacaaacccctataacacaattttacctatataacaaacctgcacatgtacccaagaacctaaaataaaagtttttaaaaaagtaaataaataaaaacaatattaactttttcaatccaaaaatagaaaaaaattcataatttccttacactcatcttttcctatatgaacaatcaagaataaatcaatggaatgcattcaatgcttttatgaccttatccacaaatatggaagcttatgactggcatgtttttgtcaactaaatgctttgactttacgtaagaatgatctataggacatggaactattgtgtatgaraataaaaagaagtgtaattctcagaatatgtctatgtgatgtcccaattagtggcagaaatatttaaaaagtcagaaaaaatatatactgggcttgaggcaatgaacaacacagacacaatccctggtcccagggagcttaagtatattttgactaagacagtaaataaattaagattattttaaatgctgataaat

SEQ ID NO: 808841 - DNA, 587 bp, Homo sapiens
tggagcaccataagtaaggcagaaagtgatagaagagtctggcaggaaccagatctatataaagaatttggattttcttttaggttatttattcttaaatattccttgatttattattgtaagtttatcaattgccactaattgctttgggcacaaaaggcagctttgtataatggaaagtattagcatcaaaataaaatcttggcctctaaaggcagaatcttgaaggagctgagccagaccagatgttccaaaagttagtgtatttgggaatcacctgcataatttgataaaatgagaattcctggatcccacccttggatattggtatttatttgttctgatgtaggggcatgtytgaagagtaccccaggtgtttctaatatggatattccttgggccacatattgagaaacaaatcaagtccacttatacggactacataatttaacaatggtatgttatttctagctctgacaccctaggatcatgtaagggctcttatttaatggtatttggtgatcctgggcaacaaagtattcttgtggacacatgaaatcctcctctccactgacttttattttcac

SEQ ID NO: 808842 - DNA, 564 bp, Homo sapiens
attaaaactaatggcaggctgggcgcgctggctcacgcctgtaatcccagcactttgggaggccaaggcaggctaatcacgaggtcaggagtttgagaccagcctggccaacatggtgaaaacccgtctctactaaaaatacaaaaaattaactgggcgtagtggcaggcgcctgtaatcccagctactcgggaggctgaggcaggagaatcattgaacctgggaggcagaggttscagtgagccgagatcgtgccactacgctccggtccaggagacagagtgagactctgtctccaaaaaaaaaaaaaaaagtaaaggcaaaaatcgcaattactcttgcaccaacctaataaaaagggagtgaccaaagatacagaaaagggagagaatagtgggtaagattcaggagaagagtttgggatctggggctcagttgatgatgatggtagtggtggtggtcgtggtgtgtgtttgtgtggattgagtaggggtggtagaagttttgaagaaggtggaaaaggtaaattgtcattgtagaaagtgggagagcaaacagaccaaa

SEQ ID NO: 808843 - DNA, 613 bp, Homo sapiens
tctcatctgttatagtttgacaaatacctggtattgggaccatttctgagctgtttgtttgagagactgatggaagatattgagataagttttaactacactttttttctaaacaaggaaagggtctagcactgtgatttctgcttgttgtggggtcctatcatttatggaactttcttatatcttttatattttttttgagacagaatctcgctttgttgcccaggctggagtgcagtggcatgatctcgggtcactgcaacctcygcctcccgggttcaagcgatttccagatattttttgtatttttagtagagacggggtttcactatgttagtcaggctggtctctaactcctgacctcaagtgatccacccgcgtctgcctcccgaagtgctgggattacagtcatgagccaccgcacccagcccctttcctatatcttttaacccaacatccactagctatgaccttctactcactccattctccctgtattcacccctccccagacaaaccccacctcctttcactgttccaatctgcttctctcacagctctctgtccatttctgtgactggctgctggatttgatccagcagcacagaaacca

SEQ ID NO: 808844 - DNA, 617 bp, Homo sapiens
actgaggtgcagagagacgcatcagcagctgggaaggagccaccttgggggagaggagccctcctctctggcagtggaatacagggtggggctggagggtgaacctggctctgctgttccctagctattgtgggacctgggcaatttcttatgctcactgggactcacttttctcatctacaaaatgcrgagatggggcttaatttatagggttattttggggattagattttggttagtgcaggcaaagtgcttaaaatagccctgtgaggtggtcggtgctccaagcatgctgatcctccatgagccatcctttctacagatgtgagcagtggctccggtctaggcactaggcaattcacacatgttgatctttaatttacaacgtcctaggcttcctgtggagtattaatagcttcattatgcagaagaggaacaactgaagctcaaatacagctgggaagcagtaaaacaaggattaaaaagtaaccaaaacccgtgttcttatttcattttagacatcaggccgcttcacaacagagacacggctgatgtttctgggttacaaaggcacctgtagcctagctctggaaccagagcacaagaacctcaaagcc

SEQ ID NO: 808845 - DNA, 617 bp, Homo sapiens
actgaggtgcagagagacgcatcagcagctgggaaggagccaccttgggggagaggagccctcctctctggcagtggaatacagggtggggctggagggtgaacctggctctgctgttccctagctattgtgggacctgggcaatttcttatgctcactgggactcacttttctcatctacaaaatgcggagatggggcttaatttatagggttattttggggattagattttggttagygcaggcaaagtgcttaaaatagccctgtgaggtggtcggtgctccaagcatgctgatcctccatgagccatcctttctacagatgtgagcagtggctccggtctaggcactaggcaattcacacatgttgatctttaatttacaacgtcctaggcttcctgtggagtattaatagcttcattatgcagaagaggaacaactgaagctcaaatacagctgggaagcagtaaaacaaggattaaaaagtaaccaaaacccgtgttcttatttcattttagacatcaggccgcttcacaacagagacacggctgatgtttctgggttacaaaggcacctgtagcctagctctggaaccagagcacaagaacctcaaagcc

SEQ ID NO: 808846 - DNA, 580 bp, Homo sapiens
ctggagctctgccagggcagaggggttccagcgctggctttgacatcagctgtgcgggacccctcagctcttcccacccccgcttcagcacgcaccaccaggactcaccccatacggcaacaccagcctcacgcccgccgtcctcgaactgccaggccacagtctaactccctgactgtcccattggttacaagcaggacctggtccaggacgagccctgtcatttgtgggtctcttctgcctctttccatttagaacagccccacagcaccccttcttcccatgaaaggaacttttttttgagacggagtcttgctctgtctcccargctgcagtgcaatagcgtgatcttggctcactgcaacctctgcttcccgggttcaagtgattctcctgcctcagcctcccgagtagctgggattacaggcgcccaccaccatgtctggctaatttttatatttttagtagagacagtgtttcaccatgttgactgggctggtctcgaactcccgacctcaaacgatctgcccaccttggcctcccaaagtgctgggattagaggcatgagccaacacacatg

SEQ ID NO: 808847 - DNA, 621 bp, Homo sapiens
aaatatccagggtttgttgtctcatgccaagaaaatttaggacatggacacacaggagtttaggagcagggtttttttttgttgttttttttgagatggagttttgctctgttgcccaggctggagtgtagtagtgcgatcttggcttactgcaacctctgcctcctgggttcaagcaattctcctacctcagcccccaccagtagctgggattacaggtgcgcgtcaccacaccgggctaatttttgtattttttagtagagactgggttttgccatgttggccaggctggtctcgaactcctgacctcaggtgatctacctgcctcgacctcccaaagtgctgggattacaggygtgagccactgcgcctggccgggagcagaggtttaataggcaaaagaaagagaaagaacagctctctctggtgagaaagaggggcttcggaaaggaaaagacccagcagtatgctctactttctatttcagcaatttctccttttgttttttttctttccttctactttctttggggttattttgtgctagtgtttttttctacctttttatcccgtttctccctagcattagcatcttaggctccaagtaatactttcattata

SEQ ID NO: 808848 - DNA, 582 bp, Homo sapiens
tcctgtgtcttttctctgagctacaatcttgaaagaagaaagttactgtgctgtgttataacataagaatgtaaatattttaagctgtcagagttgtttcctcagaatttatccaacattataagccaaagggtctacatcagtgtctgaaccatttaaaattattcagtgtattgagaagcgagtaaaacgctaggtatttcatgtttacatctgaaggagaccacactagttyatcccctaccccttttctaaatgatgaaactcatgagatctagcaaagaccaaggactaaaataagaagcatattgtgcacacctcaaaagattttcatttaaaaagttattctgtttgatacaaacctactgtagttcatgaatttactatgtgtaatcatcaagtcttcacttttaaaagaaagtattccttgaatctattttgtaaagtttttaaacatctacttgagcatttgcattagcagtattaatcaacctgagaaatgaaaaaaaaaagttgcaaatatatttgcctttggcatgaggacaagtaattggtgcagtccagctctaaaagtacaactct

SEQ ID NO: 808849 - DNA, 582 bp, Homo sapiens
tcctgtgtcttttctctgagctacaatcttgaaagaagaaagttactgtgctgtgttataacataagaatgtaaatattttaagctgtcagagttgtttcctcagaatttatccaacattataagccaaagggtctacatcagtgtctgaaccatttaaaattattcagtgtattgagaagcgagtaaaacgctaggtatttcatgtttacatctgaaggagaccacactagttcatcccctaccccttttytaaatgatgaaactcatgagatctagcaaagaccaaggactaaaataagaagcatattgtgcacacctcaaaagattttcatttaaaaagttattctgtttgatacaaacctactgtagttcatgaatttactatgtgtaatcatcaagtcttcacttttaaaagaaagtattccttgaatctattttgtaaagtttttaaacatctacttgagcatttgcattagcagtattaatcaacctgagaaatgaaaaaaaaaagttgcaaatatatttgcctttggcatgaggacaagtaattggtgcagtccagctctaaaagtacaactct

SEQ ID NO: 808850 - DNA, 508 bp, Homo sapiens
tttaaaacatttcctttattttttgattaaatttttttccttttaaatattaggacttagttttttattaaatttgaacataatatatttaacatacttacggatacatttttgtgggcatatttctctgacaatttctcttattacaaaccaaacttgttagtgacctgatttkgtgtgtgtgtgtgtgtgtgtgtgtgtgtgtgtgtgtgtgtgcgcatgcgcgcgtgttttgcatttctattcttgttttctagtttcatccctatgctaggacatggctgtgttcgtttctctttcactagatttttttaatgactgtaaggttattctacgcttgtaatctgcttttgcagtacttttccatcaaaaacaactgtgttacttctcatttaaatatttatttatttatttttgagacagggtttcgcgctgtcacccaggctggagtgcagtgtcgtgatcttggctcactgcggcctctgtctcctgggttcaagcaattctc

SEQ ID NO: 808851 - DNA, 621 bp, Homo sapiens
taaatgttttaaataaatgaacaaatgttaccttctattctcttttattctttttatgtgctatgctttgtctttctagttagaaactgaaatgtaagtcctttgagtacagagatcatgaattacgaaggtgtatatggtatatttgcttggttgtcttcatgggagcatttcaccatcctctgaatgtcgatttgtgctttctttttcccccaaaccaccttattgaggtatgactgacatactaaaagctttaggtatttaacatataccactcgatgtgtttggagattttytttaaaaaaaaaaaaaaaaaactatgtttagatattgttatggattttcaggttgggtcattaatgaagtttgacagttttaataagactgactttctttgtggtttataaacaggctccgaaagcagcttcaaaagtagagctccaaaatagttccataattattgtaattaatgcaagtcttccagaattcgggcagagttggagagtctctgaattaggagtcaaaagtcctggattcatttgtattgctgacatttgcttgagtgcatactgggtgccaagcgcaggaatgactgaaaattcaaaaactacagtatggaaa

SEQ ID NO: 808852 - DNA, 585 bp, Homo sapiens
gctcaataagtaattgctgactgacttatcaacacttgctggccacccttcttgctggcaagtgctctgaagtccactcatcagctaggtaacatttcttggatgctgtctttttatccatccatccattcattcgtccattcatttattcctttattaaatatttgctttattgaatagctccactgttaggtmctgtaataagtgctgaggagacaaaggaaaataaggcctcaagtaactcatagtctatgtcacaaggatcacagcagatagaaaaaaaggtaccatgcataaattgtcaaagaactcatgatccagttaaggaagtaaccttaagtgacattaaatgattcaagaacaacataaaatattataaaatgcagtattaaatcatttagcctagataagtgggaaaagggaaaaagaggaggaggaatctgtgtggttttcaagaggtgcagaagataatgaaggaatataaatttgagagacaaaggtaacaaggccataaacctcagcttttattagtggtcatattagattttcgtgaacatacaaaacataatctaaaataaatattat

SEQ ID NO: 808853 - DNA, 545 bp, Homo sapiens
tcccatatcatttaacatgccacaactaatatctactccatagaattgttgtcaggatcaacaaaactatgagtgtgtaagtgccaggcacatagtaggtgcttgataagtgctataagtgctggtttccatgtactcattgagcatctctgagacagtcatatttcctcatgtatttggagggtaytggaatgttcgaatagtcttatgtataatactgttttcttcctatgccagcccatgaagtaggaagtagtgtcatccctatttgataaaaagaggaaaatgaaacaacagaatgtgtctccctgaatgttaccaagagagttagcagagtcaagagtagaattcagaccttccaaattcagacatggggctctttctgcttccctttagcacaaggaggaatccatttatattagtgcaaggttgacagtagccaaggtgcattgggagaaagagtgagcttttacctgaggtagaatgaaggagttatttcttaagatacacataaggacagcaagcagaaactcattgtataattt

SEQ ID NO: 808854 - DNA, 595 bp, Homo sapiens
aggtatcttgttctgggtcatttacctgtcttggaaagccccctctgaggatcctgcaaggtaacaggtggtaatctgaacagagaattctggttgaaatattaatgactgataaggatttaatttattcccttccagatagcacgcttgcattttggcacaggctttcagtgcagtaatacaaataaacaaatttgtggaatttcagactaatggcacactgttggggggcaatttttctggggaattttgctattttgcgatcctcaaatgacactgggtaagcttttaatggcttccctggagsagttctcggctcaggtctgctagaaagtgacattacttcccttccctcccatccctcccatcagtgagtgcctggcacaggccttgaaaatggagtcaatttttcagtctcttagggaaccagatagaattcaggttgtgttgtacttcttgtttctaaccctgtttaagggaagtcagacagctgaggagcagatgttacattcctccttctggcatgccttgacccagagaagcaaagtggaaaggcagttggaactgcatgccaaccttcgctctcttgggcagg

SEQ ID NO: 808855 - DNA, 631 bp, Homo sapiens
cccctcccccagtctattcccaactcagcagccagagggatccttttaaatggtgcgtccaggaggcctcaccatctggcccccatttcctctctgagctcatctgccacctcctccccgccacttccctgcagccacattggctcctgttactccccgactgtgccaggcacgctccccactcagggcctttgctctctgcctggaaggaatgctcttcccccagagctaccttctcacctcctcacccgcttcctgtctttgctcagatgccactttctcaatgagaccttccatggacacctatttataattgaaaaaaacaaatgtatcccctttctgcccttccctgttttatttttctccttagcacttagcattcttgatcacaatacctgttgcttccttattatgttttttgtctgtttctgtccattggaatgtgatctacagcrgggcaggggtgttgtctgttttgtccactgttgtgtcccctgcacagagcatggggcctatagggctcacattagatgctccaaagacatgtgcaatatgaatgaatgagtgaatgaataaatgaacctcagccgggtgcagtggctcacacctataatcccagcactttgggagg

SEQ ID NO: 808856 - DNA, 658 bp, Homo sapiens
gtctccacacccctggcctgacagtggcccctggatgggtgtcatcatcagtgtgccacctgcctcccccgtggctgggagatccctggacctcccaccccagatctggccctcccccaccccatctccatcctcatgcaggcctggccctcagatgctctcaaagctggagggcaggaaaagcccctcaggagggaggcactggcagccgtggagggcaggggtgctcctgggggctcggagacctctgctcccttcatggtccagcaaaggctggcaktggctgagcctccttgcctccccctccccactgagcaatctcccagatctggtgaggcttggtgagcccatctgaacatgggaaaaacctcctgcctctgcgagggggcaccgcaggcagcgtggactgagtggctgctgcggcctcgccacccccgcctcaagctgagcgcatggctaagccggagacggagccgctgtgcgcgccgctgccagctccccgcctcgcagaaagcctccattttgcagggagaaattaatgaaaggcagaagcctgggaaattaggagttgccacctgcaattctccttccaaggaaagtggcgcgagggctgatgagggctgcagccgccctgccaggctgggccagcagctgagga

SEQ ID NO: 808857 - DNA, 658 bp, Homo sapiens
gtctccacacccctggcctgacagtggcccctggatgggtgtcatcatcagtgtgccacctgcctcccccgtggctgggagatccctggacctcccaccccagatctggccctcccccaccccatctccatcctcatgcaggcctggccctcagatgctctcaaagctggagggcaggaaaagcccctcaggagggaggcactggcagccgtggagggcaggggtgctcctgggggctcggagacctctgctcccttcatggtccagcaaaggctggcattggctgagcctccttgcctccccctccccactgagcaatctcccagatctggtgaggcttggtgagcccatctgaacatgggaaaaacctcctgcctctgcgagggggcaccgcaggcagcgtggactgagtggctgctgcggcctcgccacccccgcctcaagctgagcgcatggctaagccggagacggagccgcygtgcgcgccgctgccagctccccgcctcgcagaaagcctccattttgcagggagaaattaatgaaaggcagaagcctgggaaattaggagttgccacctgcaattctccttccaaggaaagtggcgcgagggctgatgagggctgcagccgccctgccaggctgggccagcagctgagga

SEQ ID NO: 808858 - DNA, 527 bp, Homo sapiens
ccccaactccacgctcaggagccttgcaacctataactagcaaatcgctggtttgctgggtgcttagcttcttcatgtaaaacagggggaccaggctgggcgcggtgactcacacctgtaatcctagcactttggaaggcggaggtgggccgatcacctgaggtcaagagtttgagtccagcctggccaacatggtgaaaccccatcacttccaaaaatacaaaaattagctggkcatggtggcaaatgcctgtaatcccagctactcgggaggctgaggcacaagaatcgcttgaacccaggaggcggaggttgcagtgagctgagatcacgccactgcactccagcctgggtgacagagcgagactccatcttaaaaaaaaaaaaagataataaaaattaaaaagtagggagactaacacctacctcacaggcctgggacaatgagatgaattcacacatgtaaaatatttggaacaaggcccagcactcagcaattgctcaataaatatgagcaggtattacgg

SEQ ID NO: 808859 - DNA, 527 bp, Homo sapiens
ccccaactccacgctcaggagccttgcaacctataactagcaaatcgctggtttgctgggtgcttagcttcttcatgtaaaacagggggaccaggctgggcgcggtgactcacacctgtaatcctagcactttggaaggcggaggtgggccgatcacctgaggtcaagagtttgagtccagcctggccaacatggtgaaaccccatcacttccaaaaatacaaaaattagctggtcatggtggcaaatgcctgtaatcccagctactcgggaggctgaggcacaagaatcgcttgaacccaggaggyggaggttgcagtgagctgagatcacgccactgcactccagcctgggtgacagagcgagactccatcttaaaaaaaaaaaaagataataaaaattaaaaagtagggagactaacacctacctcacaggcctgggacaatgagatgaattcacacatgtaaaatatttggaacaaggcccagcactcagcaattgctcaataaatatgagcaggtattacgg

SEQ ID NO: 808860 - DNA, 509 bp, Homo sapiens
gcctgatttggaagcagggtcactacagatggaattagttgaggtgaggtcgtcctggagtaggtgaactccaatccaagatgactcatgtttttgccaggagaacagccatgtggagagagaccacaaaagaagccacgtgaggatggaggcagagactggagccacacagccacaagccaggagtgccacagatggccagactctgccaggagggctcctccacacaggattcccagggagcacagccctcctgcccckggagcctggacttctggcctccaggactttaagacagtaactttctgttgcttgaagccaccagctgtggttcttccttacagtggccattttccaaggagtggctcctggtgtgaggacacagcagccactgaaggggccaacgccggcttgcagtggccgtccaaaggactggacatttcaccgctgaatccagaagggggcctgcctggcctcgccctctcgtgaagggccacaggctgtttggg

SEQ ID NO: 808861 - DNA, 509 bp, Homo sapiens
gcctgatttggaagcagggtcactacagatggaattagttgaggtgaggtcgtcctggagtaggtgaactccaatccaagatgactcatgtttttgccaggagaacagccatgtggagagagaccacaaaagaagccacgtgaggatggaggcagagactggagccacacagccacaagccaggagtgccacagatggccagactctgccaggagggctcctccacacaggattcccagggagcacagccctcctgcccctggagcctggacttctggcctccaggactttaagacagtaactttctgttgcttgaagccaccagytgtggttcttccttacagtggccattttccaaggagtggctcctggtgtgaggacacagcagccactgaaggggccaacgccggcttgcagtggccgtccaaaggactggacatttcaccgctgaatccagaagggggcctgcctggcctcgccctctcgtgaagggccacaggctgtttggg

SEQ ID NO: 808862 - DNA, 597 bp, Homo sapiens
agacagtaactttctgttgcttgaagccaccagctgtggttcttccttacagtggccattttccaaggagtggctcctggtgtgaggacacagcagccactgaaggggccaacgccggcttgcagtggccgtccaaaggactggacatttcaccgctgaatccagaagggggcctgcctggcctcgccctctcgtgaagggccacaggctgtttgggaaggaacccaagggtgcccagcgggaaaggcaaactaggatgggcttccaggcacactctcccctaggccacctcggcyggagcctccaagggtggggcccagggcctccagctgctctcaggaccacccaccccccatgacagagcagaaacccacggatacccgttcctcaaaaactgtcccctggcccatccaggaggaaccatcagcttactgcgaacatcgtgcttcaaaaaaagcccttaaacaatagaacctttttattttttaactttttaactcagcagccactatgtgatattgtacactgtcacaatgtacaatagctcccccttatccgtggggggcacatccccagacccccagcagatgcctgaaa

SEQ ID NO: 808863 - DNA, 579 bp, Homo sapiens
tttcatgagtgttctgtgtatacatataaagaatatcctgcaattttgaggtacaggattctatagtttatattttcatctgatctatttgttaattgtgttgtttccatttttatatgcttataaatagttttgctgtcttgatttactgagaaagctgtatgaaaatcttccagtrtggggatggatttatctacttctccttgcagttctattaactttggcattataaaatttgggactacaccatgtgcatgcaaagtgttctcctgatggatttgacttttttattgtaaaatagccttcctcacccctagaactttcattttgctttgaatatagctacaccaaggcagctttgattttcatttgcttccaaggctctgtcctctttactttcaatatttttttgttatattttaggtatgttacatacttagtatatgaccattttttaaaaatgaaatctttacacttgctataactagttatatttgaatattatctatgtatacacaactttatgatattttttctgccttatctgagtttctttgctttctccacctcctttcttgc

SEQ ID NO: 808864 - DNA, 496 bp, Homo sapiens
aataaaataggcaataatcacatacgtatttttgcaagcataaacactcagtaaactaaggacagacacatggccataacagttataagaagatgagctggccgggtatggtggctcatgcctgtcattccagcactttgggaggccgaggagggtggatcacaaagtcaggagttcaagaccagcttggccaacatggcaaaacctgtctctactaaaaatacaaaaaaattagccgggcgtggtggcgggtgcctgtagtcccaactactcgggaggctgaggcaggacaatggtgtgaacccrggaagtggagcttgcagtgagccaagattgcaccactgcactccagcctgggagacagagcaagactccccttcaaaaataaagaaagaaaagatgagctgtgtctgtgatggaaacaggacaggtggctcacacctgccatccagccactcgggaagctgaggcaggaggatccattgagctaggatca

SEQ ID NO: 808865 - DNA, 542 bp, Homo sapiens
cctggcatttttaaaaccccaaccctggcatcctgagagccctgagttccaactttctcgtcccagcccagggagactctggcaaggccttgggctgcactctctcatcttcctgcccttgtgggtgggacagaagctgccccaaggagaaaaagcagtggccagtgtcggggaggggctgcctcccaagctgtgcccatttctgggaaggttctggattggctctggggaggttctgggcaggctcttaacttctcagatcctggctgcctgggctgctctctgatgtcttcaagctgtgttttgtttttttttctttttgaaatttcatcaagctatcacagttgttcttggcaggacggtragtctgacataagctgcctcaacatagacagatgtgtgagctcaggtttctgaattgtgtgtctcttgttcatggtatccccagctcctagaacagtgcctgcaaatagcaggaactctgcaaatatttctttaggaacgggtctgtgggtggatgaatttgaggccatgataccacg

SEQ ID NO: 808866 - DNA, 631 bp, Homo sapiens
ggacacggttttgtggcagaaggcacagatgtctgtggacgactctctctcaacaggctctgctggggaaggcggaagctcttcctccccaggcccgaggggactgggcccaggctggactgaaggtccctccactggggcctgtggtcggggtgggggcgagggcaggtgcaacygctctaagtctgcaatgagtgaggcccccattggagcaggagcctcttcttcagaagacaggagcaccggagggggcagtggagggggtgggacgaggtccaggtcaggaagtgcgtccttaccatccaggacaggaggagggggtgagcatcctccattggagagctgcagaggtgcagctggcactgtggctgcagccctgccagggggtgcccaggggctgggctttcccgctaagccagctccgggtgccttcatgggggcaggagcctcccaggggaggccacatcaggcctcacaaaccgcctgcccccttcctcaaccacagctaaatcgtggcacaggggtgcaagggtgataaagacagacgatgccacactcttctcaggctttgaggccatggcttcagctcctggtgtggctgggatccaattctcctggaaggtccgaaggc

SEQ ID NO: 808867 - DNA, 631 bp, Homo sapiens
ggacacggttttgtggcagaaggcacagatgtctgtggacgactctctctcaacaggctctgctggggaaggcggaagctcttcctccccaggcccgaggggactgggcccaggctggactgaaggtccctccactggggcctgtggtcggggtgggggcgagggcaggtgcaactgctctaagtctgcaatgagtgaggcccccattggagcaggagcctcttcttcagaagacaggagcaccggagggggcagtggagggggtgggacgaggtccaggtcaggaagtgcgtcctyaccatccaggacaggaggagggggtgagcatcctccattggagagctgcagaggtgcagctggcactgtggctgcagccctgccagggggtgcccaggggctgggctttcccgctaagccagctccgggtgccttcatgggggcaggagcctcccaggggaggccacatcaggcctcacaaaccgcctgcccccttcctcaaccacagctaaatcgtggcacaggggtgcaagggtgataaagacagacgatgccacactcttctcaggctttgaggccatggcttcagctcctggtgtggctgggatccaattctcctggaaggtccgaaggc

SEQ ID NO: 808868 - DNA, 547 bp, Homo sapiens
gtcaggaatctgggtatagctcagctgggacctctgctttagggtctcccacaaagctgcactaaagttgtaagccagggctgggagctcatctgaagtcgccactgtgaaaagatccatttccaagctcactcatgtagttattggcaggtgcggtagacagaataatggtcactgaagatgtatgtgtcctaatccttggaaaacatgaatatgttatttcacatggcaaaggagwattaagattgctaatcaactatccttaaaatagggagattatcctggataatctgggttggtgcaatgtcataataaggggtataaaaggtggaagtgagaggcagaagagtagtcagtatgagagtgatgcaatgtgagaaagatattcatacacttatgaatgttccgtactaattttgataggggtattgagttcttaacttactttgtgtcgactgcaggtcatatcctgtattcagtgaaccacataccctaacatttttcattgcagaattaaattgatcaaggatttcataggaaaagtaac

SEQ ID NO: 808869 - DNA, 635 bp, Homo sapiens
atatatgtaaaatggaagacagaccaacttttctgtgaagcttaaggccctagcttctcctggccagagaaaaggtgaccaagtaaacaaatgaataattgctgtggcattttacaaatgcacatagcattcattttctcttcatctttgtttgcacttgtgatattctgtgatacattatatggtcaaaatagaatyaatactgtccactagtaatgatgaaaaagtgactgaaggagtatttgaaaatatggttgtcttctatagcataacaaacaacatatgatgtggtaggattatctctttttacctttaaaaaattatttaaatgcagatgtgcatgaaattactaaaataaaagcaatatattggggcatttgtgttcacttattgacaccattttctgttgccttttgatatttatagctgtgactttagactgcacaaaacacatagcttctggaaatcattaattcatgtatttgtatgtacactgttgtggataaatattttattttgaccacctaatattttaaggattaatgtttcatgatgattggatgttatgctattgtttggtgtgccaaactgtgctatgatacattaaaggatcccttactgcctaaatgctgtat

SEQ ID NO: 808870 - DNA, 628 bp, Homo sapiens
tgacatgaaccaagatatgtggatatactcgaactactttttgttgacccactaaagtgaaggtactagaggatcagggtagacatcttcaaattcatttaaaaatggtaggaatctgagattctcattaatgtgcttagttctcagagagagttatattctgaacctcctttcagttcaagagaaatattaagsaacaaaatgaaaaccaaaagaaggcaaattttggaccctggaactctgcacctaggcaccttccacatgatttactgctcacagtgcagaatacaaataatggccatgccagcatgtgaaagcttaaaatacattctaatgaagatcacattgtgaacattgccaaggcagaataaaatgcaatcaggatttaaatgtgtctaaaataatagctccttggattcaagcacactgattaatgtcagagacacttatgaaatgttgttgcctggtcatcagtgttatttttcttgtggaacattttgtacaagaagcaataaatgagggctaataaactaagaaaagaataccttattctataaaattaacatgactcaggtgaagtgctttagttacaggtgatctatgttccaggattgacatgatatcagca

SEQ ID NO: 808871 - DNA, 644 bp, Homo sapiens
actgcatcaaggtgaatgcagtttatattttcaaaggtaataccccctcagaatgctgggaaagaaagactgaaaaggcctgatatgctgaacaaaactcaagctagaagtactttcactgagaatacctataagagcatacctcagtttctccaaatgtgagtttatgtgcaaaagtttgtgaagagagtttccgtacatatttcatggtgaatatatttttatattttaatttattttttgctttgttccttaaattgacttctcctttcttaagaatattttcattttttcttttgctttggctgttgacagatttattttcaattcagtacagctcactgaattgcaagggaaaataactagtgtgaaagtgttacagtacacccacgtagtccttccacctggttgccctatccttccaaacaggcatcaccccaragtaaaccatgttgctcaaaaacaatgatgaaagaagaaaggtaacagtctgctgaaatattctaattcaaatctatcttgaatggtattcatggctgttaagataagggcaaacctgatcttgtgatgaacaagtcagcacttttaaagtagattctgtgtaatgcaactccttcttaaatactaataagtatgccacaaaa

SEQ ID NO: 808872 - DNA, 601 bp, Homo sapiens
atgtttcacatccaagtcacactgatgcaagaggtgggctcccaaggtcttgggcagctctaccccattggttttgcagggtacagtcccttgcctgcctgctttcacagggcagtgttgagtgtctgtggtttgtccaggcacaaagtgcaagctgtcggtggatctaccattctgggatstggaggatggtggcactctgctcacagctccactaggcagtgccttagtggggactctgtgtgggggctccaaccccacatttcccttccaccctgtcctagcaaaggttctccatgagggtcccgtacctgcggcaaacttatgcctgaatatccaggcatttccatacattctctgaaatctaggaagaggttcccaaacctcaattcttgacttctgtgcacccacaggctcaacaccacgtggaagctgccaaggccttggggtttgcaccctctgaagccacagtcccagttgtaccttggcctcttttagccatggctagagcccaagtccataggctgcacacagcaggggggccctggacccagcccaggaaaccatttttccctccaaggccttcatgcttgtgatggga

SEQ ID NO: 808873 - DNA, 601 bp, Homo sapiens
atgtttcacatccaagtcacactgatgcaagaggtgggctcccaaggtcttgggcagctctaccccattggttttgcagggtacagtcccttgcctgcctgctttcacagggcagtgttgagtgtctgtggtttgtccaggcacaaagtgcaagctgtcggtggatctaccattctgggatgtggaggatggtggcactctgctcacagctccactaggcagtgccttagtggggactctgtgtgggggctccaaccccacatttcccttcyaccctgtcctagcaaaggttctccatgagggtcccgtacctgcggcaaacttatgcctgaatatccaggcatttccatacattctctgaaatctaggaagaggttcccaaacctcaattcttgacttctgtgcacccacaggctcaacaccacgtggaagctgccaaggccttggggtttgcaccctctgaagccacagtcccagttgtaccttggcctcttttagccatggctagagcccaagtccataggctgcacacagcaggggggccctggacccagcccaggaaaccatttttccctccaaggccttcatgcttgtgatggga

SEQ ID NO: 808874 - DNA, 540 bp, Homo sapiens
ttggcctcccaaagtactgggattacaggtgtgagccatcgcgcctaggcaatcgtactttattaacatgacatcttgatccgtcagaagatttttctggctcacttttctgtacatttatttattaaagtcatcaaaatacacacttttagccacttaaatttcaattgctataattgaaagtggtrtcagttgctcttggcaaatacaagaatgcaaataatttttgataatttttaagtttttagaaggatctttctgctgataccactgttaagagtattacataggctataataatattgagatgatttctgataaattaggtctaaatataagttttagtacatgtggaatttatatttcttgcagaacaatttttctaaaaagatttaactcttcattcaaatcaatttcatttaagactaaatttaattgtaaatgtaaatttatatgatggaattttaatgttttctctgacattttctgtaatttgagaaggtggtagaagaaactgaaagtggtttcatgatttatttc

SEQ ID NO: 808875 - DNA, 598 bp, Homo sapiens
ttagttgttgttttcttctgggatccttggaatcttccctgagcatatgaagttcggggatcagcaaataatttgaaggagtttatatttttatatttttgaggcttccctaccgtagctctctcctttgaattttccctttgattttctagccactttgtwgccttgaataaaacagctttctgcttgagctctatctgccctatgctgctgcaaactgggagtgtcctcaggagtaatgctgtacaaatttgaatctcctccactatacttccccttctttcatgatcagatctccagtttctacttgctcttgattgctttcctctgttttcaagtcattctttaaaagtattttttttcccagggtttataattgctatttgtggaaagattatttcagtgagtttgctgaattctattccaccatgtccagaactgttcacactcattttcattcattttaaactgggcgttaaacacagttgctaacttaatacacaccttgttttagaataagatagaaactcagtattgtttcagtcacatacacttgataagaataggttatttgatggaaagctaagagctaatgaat

SEQ ID NO: 808876 - DNA, 626 bp, Homo sapiens
tataagcagaatttactctcctgtgggagatctcagtctgtttgctcttaaggccttcaactgattagacaaggcccacccacattatggcaggtcatgtgctttactcaaagcctactgatttaaatgttaagcacatctaacaaatacctttgcattaacatctagactagtgtttgacaaaacaactggctactgtggcctagccaagttgactcrtgaaactagccattataggaggtgtaattggcctacaacaaactgcatatgtttaaaatggacaatttggtaagtttgggcatatgcagacgccggtagaaacatcaccaccatcaagataatgaatacatccatgccatcacctgcaggtgtcctttggccccttgtcagtcctccatcccaggaaactatggattctatcattatacataggttagtattttctgtaagattataaaaaatggaattatccagtatatactccttttttttctgacttgggtgactcagcataactattttgagattcatccacgtgactgcatgtatcacaaatagttcgttcctttctattgctgatcccttaccgtcgcatggatagaccaggggtccatgtacttacctgt

SEQ ID NO: 808877 - DNA, 617 bp, Homo sapiens
tgagtgtactactgacagattccatcagcttttgtttatctgggatgtttcaatttcttcattttttgaaggaaattttgctataaatgaaattcttggttcacatgtttttgtttttccttcagcactgtaattatgctatcacatttccttctgtcctccatggtttttcatgatattggttgttaatcttattgaggatcccttttatgtggtaagttacttctctcttgctgcttttaagattcagtgtgtcagccaggtatgggagctcatgcctgtaatcccagcactttgggaggctgaagtagatgaatcatttgagcccaggaatttgagaccagcctgagcaacatagggcgaccctgtctctaccaaaaaaaaaatacaaaaattaactgrgcatggctgtgcatgcctgtagtcccagctatttgggaggctgaagtaggaggataatctgagcccagaaaggtggaggctgcagtttgccatgattgcagctactgcactccagcctgtgcaagagagtgatactctgtctcaaaaaaaattcaatgtgtcttggtgtatgtatattagtttgctgcaaaagtaattgtggttttaggtcatga

SEQ ID NO: 808878 - DNA, 639 bp, Homo sapiens
agtcttaaggagctccacccctgtggctttgcagggtacagctcccatcccagctgctttaacagcctgtcattatctgtggcttttacacgtgcatggtgaaagctgtcagtgaatctaccattctgaggtatggaggacagtggccctcttctcacagctccactaggcagtgccccagtggagactctgtgtgggggctccaaacttttcttccatattgccctagcagaggttcttcatgagggctccactcctgcagcaaacttctgtacagacattcaggcattcctttgcatcctctgaaatctatgcagagttccccaaacatcaattcttgatttctgtgcaaccacaggaccaacatcacatgtaagctgccaaggcttggggcttgaaccctctgaagcaaaggcctgagctgtacattggccgttatagacatggctggagccgaagcaactggtacacagggcaccaggtcatgaggytacatagagaaggggcgccctgggcccagtctacaaaatgatttttttcctcctagacctctaggcctgtgattggagaggctgctctgaaggtctctgacataccctagagatattttcctcattgtcttggtgattaacattcagc

SEQ ID NO: 808879 - DNA, 456 bp, Homo sapiens
cccaggcttattagggggaggaaattcccacctaataaactttggtcagaccagttgttctcaaaaccctgtttcctgataagatgttataaatgacaatggtgacaaaacttcataagcaattttaatttaacttcggtcctgtggtcctgtgatctcgccctgtctccacttgccttgtgatattctattacactgttaaatacttgatatctgtcacccasacctattcatatactccctccccttttgaaactccctaataaaaacttactggttttgtggtttgtggggcatcacggatcctaccaaagtgtgatgtctcccccggacacccagctttaaaatttctctcttttgtactctgtccttttatttctcaagccagtcgacgcttaggaaaacagaaaagaacctacgtgattatcagggcaggccccgcgataggtacacgac

SEQ ID NO: 808880 - DNA, 544 bp, Homo sapiens
tctcctatactgatcttgtttcctggagttcagagtatttgcatctcagaccagaaacttccttgaggacccagagaagtactttttacttccaccaaatttcagctgaggtgactgctatcttttcatcatttgccttgtgtttgtagttaaatagtttaagtttcaaactatgtgggtctctaatggaaaaagtgaccaccagcacatcaaatcatcaaccaccggcagtgtaatcttttagtgaaagcttgtagggcttctcaacctggttagagggagttagaagaagaaacagaaaaggacgtgagcctttttagcttctgatctgaaatcagacttgggccacacagttctatggtttctgatgatttcatttacaactagaaattkgttgcatggccaggaatactgcttgcttccctcgtgcgtggttcatgttagtgattggtggactgcttagaaaatataagtggataatcctaagcagcaaatagattcaaaggaataaacacgagtcacctctgtgtatgagagagaaatg

SEQ ID NO: 808881 - DNA, 645 bp, Homo sapiens
ttttcctgaaagagagagcagggaatcacaaatattacaaagctctgttttcacaaaggaagtctcaggagtgagtgaccatttcgcctaccctctgaatatcaaagttttcaaacatctacaggctcacacaaaatactcttcatttcccatctaagagtcgggaacttagaastggtcactgggtgagactgaccctttccttaaggaggataatgactgaaaacacatttatttctgctaaaacaagttctagccaacccatttcctgggcatgctcttgacaaatttactaaagttaagtgaggcaagaagctgccattcaaacatttcaaaattgttatattcaaaatatttcccttctatatctactctctaaaggtcaattactagagaaacacaaagttttacacacattcatcagaggtatatatcttttttctctgatatgggttttctttttaatgtctaaaaaggttctgatgggaaataagaccttcattttgagtaaagcattttccatattcagggcaatgaggaagtctttcccctgtatgaatgttgggatagttaatgaagtgtgagctctcaatgcagacttccccaaatactttacttttataagacttctctcttgtgtgcagt

SEQ ID NO: 808882 - DNA, 554 bp, Homo sapiens
agaccccggttctataggaaggtccccttttagcccctctattttggttccatttgtcactgccttgccactcgtcgaagtttgtcttgggctctaaaagtggtagccgggaacggctgggaaggtctccacagggaccaccacatgggcaaggctggtgtccgcgccgagggatcggcgatcccaggtccggggaaactccgsgagcgacgcgctcgcccgcggccttccttgtcgctctcggatgttcccgattaatgggctccaagtgaccactgccaggtcggggaacacagcggtagtttttaaggggagtgcaccacatcgcctgatccacttttctgtttctcagccttcgccaagcaatctgagctccaggccgggaagccccaaggtcacaaattttaatggagccctgaaactaaacagaaatcatccctcccactagaacaagagcccctagaggccagcgacaccgctaaaataacatgtgtagaccaatgccgtccaggtaacagtgcctggcaaacacggtagaggttcaataaatacat

SEQ ID NO: 808883 - DNA, 532 bp, Homo sapiens
gatctctgattatttttttaatcttcttaaaaattatgtagtgttatctcattgccttcagaatcatacatagattaagtcttgcttctcagcctgccatataagacttattattatcttttctctctttacatcttgagtgtcatatctttayacttacccattgtaataggctaataatgccctccccctgcaaagttgtccatactgtaatccccagaacctgtgaatatgttgtattacatggcaaaagggactttacagatatgattaagtttaccaactttgagatagagataatatcttatattatttagatgggtacaatctatttatatgagcttttcaatgcagagacactttactctttgaagtcagagagataaggcagaaagaaggcaagaaagacgaagtgggagaaggacttgaccccacctcatctctcttgctttgaagattaatgggctttgaggcatggaatacaagtaggccctggagggtggaagtgaccttgaactgacggccaacaaag

SEQ ID NO: 808884 - DNA, 662 bp, Homo sapiens
atctatcaaaccatccatttttatctgttaagccagacgttgtccttgaagctcactgagacctcttaattctttattcttttcataaatagtgtttccccaaactggtgaaccagttgctgttgctgttcaactttttagggagccaactgagacatagccataccaaacctttccacccccacaaaaaaaaaatccaacaattatataatawatgcatgtattactttgacatcaaattttaaaaatagatgtttgaaattatatattattctgcaatatttgtttctccattgcaaaactgttattacttaaacaaaacaataatggtgtgtccagaattggtaggttcttggtctcactgacttcaagaatgaagccacggaccctcacggtgagcattacagctcttaaggtggtgggtctggagtctgccccttctgatgttcagatgtgttcggagtttctttcttctggtgggttcgtggtctcactggctcaggagtgaagctgcagactttcatagtgagtgttacatctcttaaggtagcgcatctggagttgtttgtttttcccagtaggctcgtggttttgctgggctcaggaatgaaactgcagatcttcacggtgagtcttacagctcacaaaagcagcatggaccc

SEQ ID NO: 808885 - DNA, 662 bp, Homo sapiens
atctatcaaaccatccatttttatctgttaagccagacgttgtccttgaagctcactgagacctcttaattctttattcttttcataaatagtgtttccccaaactggtgaaccagttgctgttgctgttcaactttttagggagccaactgagacatagccataccaaacctttccacccccacaaaaaaaaaatccaacaattatataataaatgcatgtattactttgacatcaaattttaaaaatagatgtttgaaattatatattattctgcaatatttgtttctccattgcaaaactgttattacttaaacaaaacaataatggtgtgtccrgaattggtaggttcttggtctcactgacttcaagaatgaagccacggaccctcacggtgagcattacagctcttaaggtggtgggtctggagtctgccccttctgatgttcagatgtgttcggagtttctttcttctggtgggttcgtggtctcactggctcaggagtgaagctgcagactttcatagtgagtgttacatctcttaaggtagcgcatctggagttgtttgtttttcccagtaggctcgtggttttgctgggctcaggaatgaaactgcagatcttcacggtgagtcttacagctcacaaaagcagcatggaccc

SEQ ID NO: 808886 - DNA, 617 bp, Homo sapiens
ggccctgaacttcggcagtgacttcctaactcatctttcagtttctgctcctgctgggtccaggtgatttttgattccccattcattcagtgtcatgatctttgaaaaccaaaactggatcattcctctctgattctcccactccccacaccaccttgcataagcatgcccctgttcacagagcctcctagacggcccatcatcctcagaataagcctagtctatcacattctaaaaggtcctcttcatttgtatccagtgctgttctccccttcttcagcattccccaggcacacctacgtttttgtttccgagaaggatctcagttcctgcgtgaaggcagtygtccaagcacatctctgcttgtgctcctcctgggcttggtcatcctcatgcttcacacccagcgttctgtgtcttttctctcaagtcccagctgagataggccacccgctccgatccctgccaaaacttgttctgttccttcagctcatcacaggttattgttaaatatgtgtgcatttatgtctggattacccgctggattgcttcctaagggcagggatcaagttttctgtgtttcacctcaatataaatataccattgtcttgcatgta

SEQ ID NO: 808887 - DNA, 640 bp, Homo sapiens
tgtgctatgacgtgtgatgtcagtgatgcactacatcctggagtgctgctcactcaggcgtctagcaacagaaatctcaggaaaacggctctacccttggtcttgcattatttgtatagtttttcatacgttgtctcaatcaaaaataggaggtgacgagacaacacgatatgaaagtcaaaagaagcgataacaaatagaaacaaacttagaggggctcctgatagtggagtcttcaggcaggaatttcaaataactttattcgatgtgtttaaagagacaaaggacaatattggaaacgtcagcaaaagaagggacacactgtgacagggggaccaaatgaaaattcttgaactggaaaaatataactaaaattaagaaatcaatggatgagtttagccacaaaaaagataaatagcaaatggaaggaaaatagctcagtcgaaaacatccagaagggatcgctgrgagaccaaatgatgaaaaatatagatgatagagtaaaagacatataggatacagtgaaaggttaagttctgatatccctatttagggtctaagaagagaggaaaaaatgggtgctttagtttttagtaataatacccaaaagtcaccaccaaaccttggggtttgaatatta

SEQ ID NO: 808888 - DNA, 481 bp, Homo sapiens
aaggttaggtttatttataaatatctacttgggtagattatcttcacattctctaattgcatggcttaaagttctctctctctcttttttttttttttttttttttttgagagaattgtccaggctgttcttgaactcctggccttgttggatcctctggccttggcctccccaagtgctaggattacaagcatgagctaccatgcctggcctatgycagctttttaagaaccttgagatcaaagaaataaatgagaaatttctgaaaatttccacatgtacttaaaactctgtaactatatactatatattaaatctaccaaaaaattgatggttaggaacctgcaaccaggatttaatagccttgttttataaaagtataccaaaacaattagaaaaacatagttaatagcttttaaacaaaatttgcttacaaattatagtttgatacaattataaagtaataaatggcataaagtta

SEQ ID NO: 808889 - DNA, 582 bp, Homo sapiens
ccatttcctgaggcctgcccaacacactcagcattataacaaaaactataacaaggaatatgggagttatgaaccagggactgtgggataaaaaccaatatctattatacatcattataccacaggcactgtcataggcactcttttataatgtttccttttattcccttaacaatcctgcaaaataagaatcctacttttttattttttgagacagagtttcactcttattgcccaggctggagtgcaatggcacgatctcagctcaccgcaacctccacctcctgggttcaagcgattctcctaccttagcctcccaagtagctgggattacaggcatctgccaccatgcctagctaattttgtatttttagtagagayggggtttctccactatagaaagtaaaaagttcctcttcaaagtttcccttcttgttaaataataaatcttaagtgttataaatgatagtttcttttaaagactaacttccttcaagcctccttgctttgtgctaataattctttgttaagccctaacctatgtagctgttagatataagggaataagtacattcaatgtcc

SEQ ID NO: 808890 - DNA, 644 bp, Homo sapiens
gcaaaacaagatccaagaaaagaaaaacataaaggtcttttaaatatactataacttggatatccacttttaattaagctgagcactctttatgaaagttcttttaactcccttatttcccatctttagccgtgccaagtggccaatatttctggctttcaaactttaccaaagggccagagaaaggaaaattcaaggcggttcatggaggggaagagaatcaacagatagcaaaggttgcacagatatcaaaatggaaagcactcatttcctaagccaggattgaacccmagaccaccattgtaaaatggcagaggctagaacaaaacattgccacttggttacaagtcagtcttgctcccaaggacatgaaacaagatggaggcctgcagcaaagtttgctactggccatacagaaagtcatgcaaagcattccagattggctacagcttaagatgaacctcacaaatctttttttacaattaaaactctacagagaatataaacactgatccccataatttctggcccagcaatacatcttccaaaaggaaagtaatcctcacttaaaagtcaactgctgacctggtggagaaaaggaaaaataacttaaatgcagggctgtgttaaccgctgatggggtg

SEQ ID NO: 808891 - DNA, 600 bp, Homo sapiens
ttgcaatgcacttttaaataaaataacttaatttgttcttacacagaggccctttgaagttggctatggcatggataaatgttatattctgattttgtaaaagagaagacttagagaggtgaagtcactcaccaaaggtaacacagctaggaaagggcagaactagaaccataactgaggtgctctgatcccaaataatttttccccattttggatcatcaaatgtttcagtaataatttcttatagttggatagaatttttagwgttataaagtgattgcatatgtattaggtggaaagacaagaaattgtccatatccattcattttaatgaattaaaatggcaattttgtatggttcaaacattaactcttaaattttcataagtttttttgctctcttcctaccttcctgtaagcactgcctctcacatcaccctcatctccaaacatgtgcactaatataaccagagactaatgttgccaggggctctcagttgagaaatagacacatgccatgaatttttacttactccctccttgatcattaactcaccttttgccccattctatctagattctcaaagtgactgttaaatga

SEQ ID NO: 808892 - DNA, 600 bp, Homo sapiens
ttgcaatgcacttttaaataaaataacttaatttgttcttacacagaggccctttgaagttggctatggcatggataaatgttatattctgattttgtaaaagagaagacttagagaggtgaagtcactcaccaaaggtaacacagctaggaaagggcagaactagaaccataactgaggtgctctgatcccaaataatttttccccattttggatcatcaaatgtttcagtaataatttcttatagttggatagaatttttagtgttataaagtgattgcmtatgtattaggtggaaagacaagaaattgtccatatccattcattttaatgaattaaaatggcaattttgtatggttcaaacattaactcttaaattttcataagtttttttgctctcttcctaccttcctgtaagcactgcctctcacatcaccctcatctccaaacatgtgcactaatataaccagagactaatgttgccaggggctctcagttgagaaatagacacatgccatgaatttttacttactccctccttgatcattaactcaccttttgccccattctatctagattctcaaagtgactgttaaatga

SEQ ID NO: 808893 - DNA, 623 bp, Homo sapiens
caatccctaacaaccactaatctgttttctgtctctgtggattttcctatcctggatatttcataagaatggaaccatgtaatatgtgagttttgtgacttacttctttcacttaatgtttttaaagtttattcacatggtagactgcatcagtactccatttyttttaatggctgaataatattccattttatgtatagaccacatcatattcagaagttcatcagctaatggacatttgagttgttttcatttaatggttaatgttttcatttaatggctgttatgaagtacaaattttcatgaagacatatattttttattgtcttgtatatctatgtaggaatgagattgctgggttcctataaaaattgccagtttgtttaccaaagtggtcatcccattttaccagctcaccagcaatgtgtgagaatttcaatttctccaaatcctcaccaacactttttattatctgtctgcttgtttatagctattctagtggatgtgaaccagtatctcattgaagttttgatttgcatttttctgatgtctaatgatattgagcatcttttcatggacatgttggccatttgtatatcttctttggagaaaggtctcttcaa

SEQ ID NO: 808894 - DNA, 620 bp, Homo sapiens
taaccatgtaatatggctactgaacaaagacaccaaccttaggatgcatgaccagagcatagatcccaagactcaaaaggtcagtgcccattgcattctgcactggtcacatatatcaggaacaatgagttctttctaagcgctccacattttaaggggtacatttctagagaagagtaatcagaatggccaaggatctaagaaccacaacctcctggggtggacaattgaaagaactaatagcttgatttagaaatgaggaactctagacagtgctactcagagtgtggtcagggggctgccagtccccaaacttgctctttaatgaggtagatacagaaattgagagtaagaaktaaaaccatttgtcaccatttgaaaagtctgtgctatctgagctcacaatcagtggatttgtcttactgaacagggtaaagaccagtctgggtgtagtcaaattcaaacggtgagtcctatgagtgacagctgcatggtactggtgtgtggtcaatctgatttacaacaagtgccaattcaaggttagtttgcttaccataaaccaaagtgtataatgtacagaatccactgtttcacaggtaatttacatttataactttata

SEQ ID NO: 808895 - DNA, 636 bp, Homo sapiens
agaaaatctacatgactttgaataaagtgatgaccttttagattcaacaccacaggcctggtccatgaaagaaataactgataaaccagacttcattaaaattcaatacttctacttagttctttcagagaaaaaaactttcaagagaaagagaagacaagctatatacagagagagcatatttgcaaaagatakctctgttaaaggactattagctaaaatatataaagaacccttaaaactcaacaataaggaaacaaacagcccagttaaaaagagggcaaaacatctgaacagacacctcactaaaggagatgaatatatggtaaacaagcctttaaaaaggcactcaacatcacatgtcattagggaattgcaaactaaaacatccatgagataccaccacatatctaaggtaaaaatctaaaacactgacaacactaaatgctggtgggaatgtggagcaacagaaactctcattcattgctggtgggaatgaaaaatggtatggccacattggaagacagtgggcagcttcttactgccaaatacacttttatcatatactcgagaaattgcacttctaggcatttactcaaatgaatggaaaacttacatccacatgcaaacctgcac

SEQ ID NO: 808896 - DNA, 636 bp, Homo sapiens
agaaaatctacatgactttgaataaagtgatgaccttttagattcaacaccacaggcctggtccatgaaagaaataactgataaaccagacttcattaaaattcaatacttctacttagttctttcagagaaaaaaactttcaagagaaagagaagacaagctatatacagagagagcatatttgcaaaagatatctctgttaaaggactattagctaaaatatataaagaacccttaaaactcaacaataaggaaacaaacagcccagttaaaaagagggcaaaacatctgaacagacacctcactaaaggagatgaatatatggtaaacaagcctttaaaaaggcactcaacatcacatgtcattagggaattgcaaactaaaacatccatgagataccaccacatatctaaggtaaaaatctaaaacactgacaacactaaatgctggtgrgaatgtggagcaacagaaactctcattcattgctggtgggaatgaaaaatggtatggccacattggaagacagtgggcagcttcttactgccaaatacacttttatcatatactcgagaaattgcacttctaggcatttactcaaatgaatggaaaacttacatccacatgcaaacctgcac

SEQ ID NO: 808897 - DNA, 603 bp, Homo sapiens
catttatttatttattgcatcagacacaaagctgggtgtctaggatggaaagtggtacaagacatctttccagccctgtagaatatctattataaataaggaactattttttcaaggtgctcagaaatccaaaaaacatattagataggccrattttgagggcatttatttgtagagttatataggtttgattagagtctttcgtcaagaagaaaaatcattggcttaccaaacgagaagcattacactttatttatttaagtaggaaacgctcagctgctcttgaaccatgatgcaagtgcccagcgaagggtcatgttgctcttgtcccctcttccctttgcagccatcaagctggatggggtggatgtcatcgggtataccgcatggtccctcatggatggtttcgagtggcacagaggttacagcatcaggcgtggactcttctatgttgactttctaagccaggacaagatgttgttgccaaagtcttcagccttgttctaccaaaagctgatagagaaaaatggcttccctcctttacctgaaaatcagcccctagaagggacatttccctgtgactttgcttggggagttgttgac

SEQ ID NO: 808898 - DNA, 442 bp, Homo sapiens
gccctgctttggaaggacggttttccagtttcattagtgacacgtcattttatctttgacttccacagtcaatacttagaatctggcttggtcctgttggctcatgcctgtaatccccacactttggcaggccaaggcaggaggatcaattgaggctagaaatttgagaccagcctgggcaacatagtgagacccgtctcwacaaaaacttctaaaaattagccgggcgtggtgctgtgcacctgtagtcccagctactcgggaggttgaggtgggaggatcacttgaactcaggaggttgaggctgcagtgaactatgttcatgccattgcactccaacttgggcaacagaatgagacctgtctctgaaataataacaagaagactctattagagccttggaagttttccattaaattatttatgatagtgctgttcaaca

SEQ ID NO: 808899 - DNA, 673 bp, Homo sapiens
tcattcctgcccactgagcccaaggaccagggtaaatcaataaaaagtacaaataatcttaggttggtacagattctctgcatggcatcaaaaagtatgatgaacagagactattacagaatagctgcctggaaatatacccactattcagggctgcaatttatcaattaagaacacaacttttattttggacagaatgtctaagaagctaatgggtgttaatttggaggagcaaagcctttgttttgtaaagtacaggacggacagcactctggatttaatcacagtccaccattatggtgggccccaaaagtctcggaggcagcaaatctctgaatattttgtttagcttcagcrttgaatcaactctataaaatgaggggatatttgacttagctgatacttttgttcatattttacttgcacatttttaaaagatgtaaataaatctgtgtttggtttaagttttcctggtcatgatgctgcttcaaaggaaaaaaaaaagaattaataaaaggaggcatgaaaaacctaattctttttcaaaaataatagggataaaagaacagtgtgaaatcaatggtggcactgaaataatagttacaaaggaaatgcagtacagtacatagcttaactctagtttttagggattgcaaattagacatcccaggaa

SEQ ID NO: 808900 - DNA, 559 bp, Homo sapiens
gctgttaccacccatttatacctcagtgtgaatgaatatttgatctttctctagttggttttttgttcagtaggggtagcgggtgggaggcaacaggatggaagtggatagaggagacaagggccacagataaagggaagagaaagcgagagagcagaacaggcccctacagctctgaaaacaagtggtcaaatggactcccttgctgaaggcctgctctagctaggaaccaccagatacacacgtwtgcagaggggcatctgcagtgctggaaatgagcatgattccccaaggaagacccctccatctccctccctgggccccccgggggtacttgggccatcctggcctaccagggttcccgcttagaggaaagcctgtgcgtttccctgacctgagctgggcgcacggtgccggaagtcgtccttggtgaggatgcagagggcgcgtccgttcatctcgaacccgtgctccgcggtgcatggcagagagtactcctgctctgcccagcgcagccagtgcagcacgtcctccctgctccacagtgcgggctggatgc

SEQ ID NO: 808901 - DNA, 538 bp, Homo sapiens
tcttggataattttctgtagttatggatatgagatataacgctagaatgttacagtgtcaaggtcagtaagtccagctccctcattttgcagataattgtatttagaccctgggagagaaagtgactagttggaggcagacctcacttaagccaatagtttccraactgtgttccagggatccttagggttctgcagatggggaggaaaagcaggggacagacacgtctgaagccccggctgcactagtacagccccgctgttgtccatcttatacatgggggatcttgctaaaattatatgtaaagaaaatctttcagtaatttcttttaaagtttgagaatcactgtttgagcccagttccctcaagatgcagacaaggagtttgaggatcagattttggctgaattacggtgatgaaatagaacattcattcgctcattcattctaggtcctggggatctggcagtgagcaaagcagtggatgtccacactcatgaagctgatattctcttggtgaaattaaaccatagaaaatt

SEQ ID NO: 808902 - DNA, 631 bp, Homo sapiens
gctaagcaaatgatagcattcctatataatgggacactgggaagccaataaaaagcacagaaggatctccaagatatattattagctggaaaaaaaggaatggtttagaggaacatgtgcatattaggcttctccactcactctcttaattattcatgcaagttttggcttgtatacatatggattacctctggaaagatataaaagaaaatgctagcagttgatgttccagggaggggagtgctagctttcattatacactcttttgtacctttttgatttttattactatgggcatgtacaacctattcaaatttaagatgcaattaaaaaaaaaaaaagagtatgattggcctgggagagtgccatctccctgcccaagggcccaagagtttsggggagctcaaggactggctgcctggtacggagccccagcagtgcagcagcctgaagagctggctcctcagaaggcctggccccctcagttctgcctgaacactgctcctcacctgagccattgtagtcagagtctccgttcacaccttccaggaagggcactcgagacagggctggcttcccacggctgcgtttggggggcgtcagaccactgcacacagagcagggagagagg

SEQ ID NO: 808903 - DNA, 633 bp, Homo sapiens
ttagatatatgaagatctcaaatgtccacttagttgaaggcccaaccgttattgtactgtagtaataagagtgaggctgaggaaagagtttgaagatagctcttgtgaaatgagctactggtctcatgagacctttgcaggaagtgaagtkcataaggaatgactaaaccctgcatagaaaatgttaccttcatccatgaaacaacatggttggttcttatcactcgccctaatgtgatagctgttcatcctggattaacatcacgttgattaatggtgccagttaaaagtcaaggcatgctgagtgttgaccccatggaagaatgcaaagctatgtatatttaataaggggcattagaaagggcgcaggacactgaaaagagttttcttgacactcttggtaattaaggatttacatcagcaggaggtcaagtcatgacaatttcagtcttaatttgtcaataggcaatcacaaattgtagtcactgactgcttcaccaccaacttcctaggtggcagttggcacatcccttttcagtattagagaaactgccaatcaggctggaatgacgtagtactctattttcaaagaagaacataatacatagaaaaaaattaggtcaatatttagct

SEQ ID NO: 808904 - DNA, 654 bp, Homo sapiens
atgtaaggagaagattaatactatgaaaaaaagaaaacggagagcaccccaagaagcattagaaaggctggagattggagagctgttgccctcatgagaaacgacctttgagcaaagattgaagggatgaagggttaatcaaggtggtctgagaatggcgaattaggggacagaaataggccatgaagtcagagagataaaggggttggggacagattatgtaagcctttggaccactgtaagcactctggcttttattctgaatgagctgaacaactacctcacacattccctacaacagcagtccccaacctttttggcactagagactggtttcttggaagacratttttccacagacaggggtgggggtgggtggtttcaggacgattcaagtgcattacattttttgtgcactttatttctattattattacattgtaataatgaaataattatacaactcaccataatgtagaatcagtgggaaccctgagcttgttttcctgcaactagatagtcccatctgggggtaaggggagacaatgacagatcatcaggcattagattcgcataaggagcatgcaacttagatccctcactagatgctgccgatctaacaggaggtggagctcaggcggtaatccaagtaat

SEQ ID NO: 808905 - DNA, 654 bp, Homo sapiens
atgtaaggagaagattaatactatgaaaaaaagaaaacggagagcaccccaagaagcattagaaaggctggagattggagagctgttgccctcatgagaaacgacctttgagcaaagattgaagggatgaagggttaatcaaggtggtctgagaatggcgaattaggggacagaaataggccatgaagtcagagagataaaggggttggggacagattatgtaagcctttggaccactgtaagcactctggcttttattctgaatgagctgaacaactacctcacacattccctacaacagcagtccccaacctttttggcactagagactggtttcttggaagacgatttttccacagacaggggtgggggtgggtggtttcaggacgattcaagtgcattacattttttgtgcactttatttctattattattacattgtaataatgaaataattatacaactcaccataatgtagaatcagtgggaaccctgagcttgttttcctgcaactagatrgtcccatctgggggtaaggggagacaatgacagatcatcaggcattagattcgcataaggagcatgcaacttagatccctcactagatgctgccgatctaacaggaggtggagctcaggcggtaatccaagtaat

SEQ ID NO: 808906 - DNA, 591 bp, Homo sapiens
ccgccttggcctcccaaagtgctgggattacaggtgtgagccaccgcgcccagccagcctccatttatgagtgagaacatacaatgtttggttttccattcctgagttacttaacaacatcaaatatcctgccagaatttaagttccgcttacctcataaaggtatttgtttgaattgggatttaaataaagtttatatattgcacaattgaaatgctccttaaatgtcttttttgtttgtttaatcaatcctttatttgtagacatttgattcattaaaaaattttaattgtggtaaaatacacataacatgaaacgtatcatcttaaccatttttaagtgtacatttcagtagtattaagtacattcacattattgtggaaccgtcaccaacgtctatctccagwactcttttcatcttgcaaactgaaattgtgtactcattaaattatagctccccactccacactctactcaacctctggaaagtgccattctttctgtctctgtagatttgactacttctaggtactgcatttaagtagaatcatacagtatttgtctttttgtgactgccttgtgttacgtagc

SEQ ID NO: 808907 - DNA, 567 bp, Homo sapiens
tctcaagtgctatggactgaattttgttccccaaaattcatatgtaagccccaacccccaatgtgaccatatttggaaatagagcttttaggattaaagaaaggcaaaatgaggtcataagggtggtgccttataagagggagaaagagaaatcactctatctccatgtgcaggccacgtgagaacataggctactgtctgcaagcaaggaagagaaccctcatcagaaacagaattggttagcaccttgatcttgaacttcctagcctccagcacygtgagaaataaatttctattgttttagccatccagtctatggtattttgtcatggcatcccaggctgactaatgaatcagtgatgctaatagcagtggtccatggaccatatttttgagcacctctagcctaggccacatcccccagaaatttcgctttaatttgtctggaggtagtacagggcatcatttattttcccaaagtttcctgggtggtcctaaagtataaccatacttgagaacaaatgaagtagaatggtttcttctatttatagctaaggacactaagac

SEQ ID NO: 808908 - DNA, 695 bp, Homo sapiens
ttttgctattggtgattctgtcatttttgaatgtaagtgagctcttcaggaaaaagtacctttgataaataaaaaagatcaatctattttcacccatccagagcttagagattttttacatttttttctagaattttgtgatttttattgttttaaagcttttcactgataggtatttatgtgtggtcttcccagtggtccagttggaccatgtggcactggtattttcaactctgccttcagtttgggcagtaatgagtttgcagatcagccctgagctggcctttctgcctacagactgatttataccttgtcttccacctttctctccaaccctatccagactgtatgatccaccttaacttcttccaccattacatgttctctagcccctcatccaacccaattcctatagttactttttatttaattcattggtttgcagtcataactgggttgcctggttttctgaccaggwgtgtacatcttctagattcggctccaaagaaacttctttctagaaaatttccagattccatcttctatacccaccctccagtgtgattcatatgttccaaggaacccatgcaaaactgttataggttgttttgcctgcactgcaattcttggtttatttgtctcctctactggcacataagcttattgagggtagccccagcatttttcggggttcc

SEQ ID NO: 808909 - DNA, 652 bp, Homo sapiens
gttgcctggttttctgaccaggagtgtacatcttctagattcggctccaaagaaacttctttctagaaaatttccagattccatcttctatacccaccctccagtgtgattcatatgttccaaggaacccatgcaaaactgttataggttgttttgcctgcactgcaattcttggtttatttgtctcctctactggcacataagcttattgagggtagccccagcatttttcggggttcyaagagccacatatggtatacctgccacaaagacactaattaattatattgaatgaatggatggatgaatgaatgaataatctgtcttatttttattgagagtctaagcttactgagagcagaagtcctggatctgtatacaactttgaaactgatttggtgccctgcgtactgtggctgctcctacttatctggtctcactttcactctgaagacgtgcctgtcatcagccgtttgtctgtcagcctgtaatcacagagacactgtacctttgacgtacttggaggccagtaggaagaatgtcaggatttgacatcttggtgcatagctcagcagagaatctcagattacctggtctttgaagtattcctcctgcacctggccttctctcctccctgatcccttgaattttg

SEQ ID NO: 808910 - DNA, 645 bp, Homo sapiens
gttgcctggttttctgaccaggagtgtacatcttctagattcggctccaaagaaacttctttctagaaaatttccagattccatcttctatacccaccctccagtgtgattcatatgttccaaggaacccatgcaaaactgttataggttgttttgcctgcactgcaattcttggtttatttgtctcctctactggcacataagcttattgagggtagccccagcatttttcggggttccaagagccacatatggtatacctgccacaaagacactaattaattatattgaatgaatggatggatgaatgaatgaataatctgtcttatttttattgagagtctaagcttactgagagcagaagtcctggatctgtatacaactttgaaactgatttggtgccctgcgtactgtggctgctcctacttatctggtctcactttcactctgaagacgtgcctgycatcagccgtttgtctgtcagcctgtaatcacagagacactgtacctttgacgtacttggaggccagtaggaagaatgtcaggatttgacatcttggtgcatagctcagcagagaatctcagattacctggtctttgaagtattcctcctgcacctggccttctctcctccctgatcccttg

SEQ ID NO: 808911 - DNA, 606 bp, Homo sapiens
tatagcgaaccttgttctatttgcttctgttttcaggtcataattttaatgcaagatagaataatcagtaaattagactcagaagaacagtataccattttaacagaaaccaatttcttacttgtagaaatagaaaaggtcctcagtastttgggaggctgaggcaggcgaatcacaaggtcaagagatcgagaccatcctggccaacaaggtgaaaccccatctctacaaaaacaaaaacaaaaacaaaaaaaaaattagctgggtgtagtggcacgcgcctgtagtcccagctactactcgggaggctgaggcaggagaatcgcttgaacccgggaggcggaggttgcagtaagccgagatcacaccactacactccatgcactccagtctggtgacagggcgagactccatctcaaaaaaaaaaaaaaaaaaagaaagaaaagaaaagaaaagaaaaaagtccttttcataaagtaataatgggaataaaatttggagctcaaaatactactttgcctaataactttcttagaaagcactaattgacatgccgttgattttgtaactaaaatatcaatgggatatgccattacaattgatatt

SEQ ID NO: 808912 - DNA, 606 bp, Homo sapiens
tatagcgaaccttgttctatttgcttctgttttcaggtcataattttaatgcaagatagaataatcagtaaattagactcagaagaacagtataccattttaacagaaaccaatttcttacttgtagaaatagaaaaggtcctcagtactttgggaggctgaggcaggcgaatcacaaggtcaagagatcgagaccatcctggccaacawggtgaaaccccatctctacaaaaacaaaaacaaaaacaaaaaaaaaattagctgggtgtagtggcacgcgcctgtagtcccagctactactcgggaggctgaggcaggagaatcgcttgaacccgggaggcggaggttgcagtaagccgagatcacaccactacactccatgcactccagtctggtgacagggcgagactccatctcaaaaaaaaaaaaaaaaaaagaaagaaaagaaaagaaaagaaaaaagtccttttcataaagtaataatgggaataaaatttggagctcaaaatactactttgcctaataactttcttagaaagcactaattgacatgccgttgattttgtaactaaaatatcaatgggatatgccattacaattgatatt

SEQ ID NO: 808913 - DNA, 606 bp, Homo sapiens
tatagcgaaccttgttctatttgcttctgttttcaggtcataattttaatgcaagatagaataatcagtaaattagactcagaagaacagtataccattttaacagaaaccaatttcttacttgtagaaatagaaaaggtcctcagtactttgggaggctgaggcaggcgaatcacaaggtcaagagatcgagaccatcctggccaacaaggtgaaaccccatctctacaaaaacaaaaacaaaaacaaaaaaaaaattagctgggtgtagtggcacgcgcctgtagtcccagctactactcgggaggctgaggcaggagaatcgcttgaacccgggaggcggaggttgcagtaagccgagatcrcaccactacactccatgcactccagtctggtgacagggcgagactccatctcaaaaaaaaaaaaaaaaaaagaaagaaaagaaaagaaaagaaaaaagtccttttcataaagtaataatgggaataaaatttggagctcaaaatactactttgcctaataactttcttagaaagcactaattgacatgccgttgattttgtaactaaaatatcaatgggatatgccattacaattgatatt

SEQ ID NO: 808914 - DNA, 632 bp, Homo sapiens
tagaacttcaaggactttctcattatcttaataatagaagtattttttttgttgtcagtttgtttcattttggtttccgccactggaatattttatgacttttctataacacctgaagttctgaaattttgaaaatgagatatttagaagtgagtctgttaattttgctaaatacctgacaagactattccatggaagaattaaatcctttatatctggaamattttcccttattatttgttctgatcattttctcccttcatcttccctgttggtctctctagctttgtcacttgatgtttgacttccttggtctgttctccatcttattttttctaccatatattatatttttttttttgccttttaaattactgtgagattttcttgatttaattttccaatctttctattaaattttccaattgtttttagcattctattattacttttacagatcaagaattctaattagaatgactttaaacttgtttgctgttacatgaactttctctattaaatctgtgataattttcatgttattttattctcatcttctctttcatattgtaagagtttctcaaacatttgctctggcctcttcaaccttgtcctttacctactgtatacca

SEQ ID NO: 808915 - DNA, 621 bp, Homo sapiens
ggtgtgtgtgtgcagggggcgtacagtgctcagctgcatgtataccaggagggcatgtggccagggactttggacctttggtgtgatggggaaaccaaggcccagagagggcctgttttggagtggaatcagcctcactggcagtggcggtgagcagcaggcttgtgacctgttctatccctagggccgaagcctttcttttcagctgggaagacttttgggattggacgcctggaaatgctgggtggcttcaaggggggcgccatccagatcctgaagcagagggcctaccagtgcagcaggcagtgttcccagcacgcagggcaggatgagagctgacccttccccttctctgcctctccataggctgtgggtttgagccatgctgcagaggctggcccaggcagtgcccctcctccagccaccctgtggagcagggactggacttggctcctccttcactaacaggctyttttccaatcaaaaaaaaaatttttttttagctcaccgagtataagagagagttttatgctgaattttaaaataccttattttttccagtctctaaactgctaatctcccgggctgagggattctgggacaaaggcaaggcctcgaagt

SEQ ID NO: 808916 - DNA, 635 bp, Homo sapiens
cgagggctgagtggtgtgatagtgactcagggcaggctgtttttgaggcctctccagagtcccctgggagctgagagacctagaatctgtcaggctcccagtgtgagtcccgtgctgtcctccagtgagccaagaagctggccctgcaagatgccttcccaattcgtatcattccatgcacaccccttgtcctcaagatctaagcagactgacatttcttttaaaaaaaaaagagtgctttatcctctgagactttttcctccctgggggaaggctgcccttttctctgtgttcctttaacccccygattgcaccctgaatcccaggtaattgatgagtctattgtcttgcaacaccagcacccagaaagcagaacataaaccccagccagagctggcagaaacaaggggatacccagccaggtggaggcatatcccaccactgccaccaccaacaattagtaatgataacaatgataataggtgccctgttttgagtcccagctctgtgaccactgtcccaggaggctggcatgcattatttcactaaagtttcatgatgataccactaggtgaatgttacaatccaaaattataatagcaaggaaacaaactcagaggggtcagtaacttgtc

SEQ ID NO: 808917 - DNA, 648 bp, Homo sapiens
cttttagaattacagtatttatgtttggcttattatagtctgtgattaatgcttttgccaccatccgaacaatgcaaaaagtttaaaacaattcagctgtatctgcctctctagcctttgtgctaaagttgttgtctattttcagtataaaaatgctacagtatccttgttgaatagtcatgttctcatatttacccatagattttccatttttgctctgttctttttttaagaatcattatgtgctatcatcttagttcatttttcttctttttttttwaaatttcttgttttcagcactttgactgtggtatgcctaggtatgattttcattttatttaatttgcttggagtttactgactggttgatgtctttcatcagttttgaaacatttttggctgttatctcttcacatattctacactattttctctttctgacattccaattataaatctattagattgcttgtatcccatctgcctttaagtgtattttctgttctttccactttttctctgtgtgcttcattttggatatttctgttgatccatcttcagatttcttttgctgtctgttcttcccgttaacttttcaattagttattaacttcaaatactgtatttttcaggccagtgtggtggctc

SEQ ID NO: 808918 - DNA, 556 bp, Homo sapiens
aggcccatgatcgactaatgcagttggccgactgggacttttcaacattggattcaatggtcaaggagaatatttctgagttgctgaagaagagcaggtgaccctaggcgcagcctgtcccgcagggcctggctggcttagcaatctgagccaccttccttaaaggaaatgttaaaaaaaaaaaacaaaaaaacaaaaaaacaactgttctttgcctaataaagaactggaacaaccatcacagctgctgagcagcagacagttggcatatgcatagggtctgatgtgggagtgggtggtggttacagatccttccagtttccaaaaagaattttaaaagtaaagggttaaatatggttacattgtgagtaataatagttggtgacttcaatacyccactttcagtaatagaaaaactacagaagaccatcaaggaaatagggaatttgaaaagcacgattaaccaatcgcatacactagacatgaacagaacgttccacccgacaggagcagaataagcattcttctaaagagcacatggaatattctccagtat

SEQ ID NO: 808919 - DNA, 593 bp, Homo sapiens
gaatgagaggcagaaccagagtcaggacctatatcttgtcttctccttcctaaaactagaaaagtacccacaaccaggcaatgcgtttggtgcagaaaaagcagtagtgaacaaaataggcaaaaatgtctgcctttagtgctcacattgttgtggagaaagacaaacaataagcacagtagagaagtaaaaattagaatgttttgctaaaaagtccataaaattgaatattattcagccataagaagggatgaagtaccgttatatgctacaacatggatgaaccttgacaccattatgctaaatgaaagaagccagtcataaaaggycacatatttcattattccatttgaatgaaatctccagaataggcagctacttcctatccacagaggtagaaagtagatgaatggtaaccaggggctaggggaagaggggaatggggagtgactctttattgggtacagagtttctttttgggtgatgaaaatgatctagaattagataactgtgatgttgacaaaactttgttaatatactaaaaaccactgaattggctttaaaccaattgaattttaaagtatactttgaaa

SEQ ID NO: 808920 - DNA, 634 bp, Homo sapiens
agatattagatcctaaagttcctctcctactttctattcgaaatactggaattcttatatcttattttaatgattatattagatttaggaccttgaatgattttctgatatgcaaagtaatgcctgaatatactgtcatcatcggacttacataggagataatgtagggcttagcacttggggttygatggattataattctaatatcaaatatattaaaagtggactactaatctctactttatataatttggtaaaaattactttcttaaggagatactgcaaatcagaatttaaaaatcaatttttaagagtttattctgaactccttctgaaaaactaagccataagctatattattttttaataattctaaggaattactcagattacagataaaaaataaaataatagtttgagttttttccttcccctttctcttatacttgtttttaagtaagatctctcacagatatctaaattttttttgagagaattgccaaataatgggggattgatcacctatcataggtatgatataggctgaagctttgtatttctttaggcaaaaatattattcctaaagtgctcatgcttcccttttcctgacattatctgtttacaaatatgattt

SEQ ID NO: 808921 - DNA, 611 bp, Homo sapiens
tggtactgggaaaactggctagccataggcagaaaactgaaactggaccccttccttacaccttatacaaaaattaactcaagatggattgaagacttaaatataaaaccccaaaccatgaaaatcctagaagaaaacctaggcaataccattcaggacataggcatgggcaaagactttatcactaaaacaccaaaagcaattgcaactaaagcaaacattgacaaatggaatctaattaaactaaagagcttctgyacagcaaaagaaactgtcatcagagtgaacaggcaacctacagaatgggagaaaattttgacaatctatccatctgacaaagggctaatatccagaatctacaaagaacttaaacaaatttacaagaaaaaaacaaaccccatcaaaaaatgggtgaaggatatgaacagatacttctcaaaagaaaacatttttgtggccaacaaacatatgaaaaaaaactcatcatcactgttcattagaaaaatgcaaatcaaaaccacaatgagataccatctcatgccagttagaatggtgattattaaaaagttaagaaacaacagatgctggtgaggctgtggagaaataggaac

SEQ ID NO: 808922 - DNA, 620 bp, Homo sapiens
aagtagatgtatagaagaatgttcatagaatattgtgaagagcaaaacagtgaagacagcactcacgtatgccaaaaaatgaaaaaaaaagaaaggatgattgtgctatattaattcaacagaatgctaccttaaagtgaaaatacataatatagattcacatatgtcagcatgaaaatattcaaaatatagtgttgagcaaggcacaaagttgcaaattgtaccatttatatgcagttataaatactcaaaacagagggagatggagaaagatggcagaatagaaagctccactaattgtacaccctgcaaggacaccaagttaacaagtatctayacagaaaaaacatcttcataaaaactgaaaaccaggtgagcagtcgtagtacatggtttttaacttcatatcattaaaagaggcactgaagagataaaaaaataaaataaaatacaataaaaaacagtcctgaattgccaatgtcacctctcttcccggccccaagagcagtggcctagtgcagagcatctctgggcactgggggagggagaacacagcaattacgaggcattgaattcagtgatgtcctgttagaacagaatggaaaaccggaccaaactca

SEQ ID NO: 808923 - DNA, 555 bp, Homo sapiens
ctgataaaagatactttaagccaacaaagatcacaaaagacaaagaagggcattgcataaggtaaagggatcaatgcaacaagaagagctaaccatcctaaatatatatgcacccaatacaggagtacccagattcataaagcaagttcttagagaccwacaaagagactcagactccaacacaataatagttggagatgttaacacccaactgtcaatattagacaaatcaatgagacagaaagataacaaggatattaaggacttgaactcagctctggaccaagcacaactagtagacatctacagaaccctccacccgaaatcgacagaatatacattcttttccgcaccacatcacacttattctaaaattgaccacataattgcaagtaaaacactcctcagcaaatataaaagaatggaaatcttaacaagcagtctctcagaccacagtataatcaaattagaactcaggattaagaaactcactcaaaaccacacaactacatagaaactgaacaacctgctcctgaatgactactgggtaaataa

SEQ ID NO: 808924 - DNA, 350 bp, Homo sapiens
agacagaaatgtgcacaagcttagtctagtcccctcagcttttagcatctgagaaagcatccattcctaaccttagaactrgacaggacctgtgaagctatcctgcaaacctctgcatcctctggtcccacggatgggcctggcttcctaccataagtagtgggatgctgcataacccaaaagatctatgtgggttccaaacagcctaccttgaaatttcaaacgaaagtttatatataggtgcatttttatggaaatgggtactacaactcaggatattcacagagggtccatgggaccaaccctgctctcgacagtttgcagtgcaaggctccgcaccaagtaccacc

SEQ ID NO: 808925 - DNA, 509 bp, Homo sapiens
tttaaaggtatatttttaaaaagcattgtttagctaagaaagtaaataggactagatgaataaaaattccaaagaagaaccatgcaaatgtaagctgacgtttggacatcactgtttctcttggtagcatttgctgtttgcaagtgtacgctgcgttttagtgccatttttctgctaccgttttctgctgtagaaaagttttctgctacaattttcctacagttttctgctgtaagaaagaaatcagcagcawttatggggccagtgtgatgtaactagaaaactgaggcatctcaaacactctggtttcttcaaaacacgttggttaacttctgatgctacggtagaaggtaaaacaaaaaactaaagtgtcaacttctgaaaggcagtgcaaaatctttcactgtccagtggtgttgaggaaacaaagacctaccattgataagggccctaaaacaaaacagacgtaagtttcagaagaactggtgaattgatgccaagtagcaaca

SEQ ID NO: 808926 - DNA, 553 bp, Homo sapiens
tctaagaaatgtgtcattaggtgatttcatctttgtgtgaacatcacagagtgtccttacgcaaactagatgttatagcctactatacatttaggctatatggtacaccctattacccctaggcgacaaacctgtacagcatgtgactgtattgaatactattggtaattgtaacacaatgctaactgtttatgtatctaaacatacaaaaggtgtggtraaaataccatatgaaagatttttaaatggtagatctttctaggacacttaccatgaatggagcttgcaggactggaagttgccctgatgagtcagtgagtgagtggtgagtgaatgcgagggcctaaggcattactatacattactgtagactttataaatactgtaactaagacaacattaaatttatgaaaaatgtttttctacaataattaaccttagcttactctaactttttaaactttatatacttaattttttaactttttgactgttttgtaatagcacagcttaaaacacaaacactatacaaaaatattttctttatatcctt

SEQ ID NO: 808927 - DNA, 553 bp, Homo sapiens
tctaagaaatgtgtcattaggtgatttcatctttgtgtgaacatcacagagtgtccttacgcaaactagatgttatagcctactatacatttaggctatatggtacaccctattacccctaggcgacaaacctgtacagcatgtgactgtattgaatactattggtaattgtaacacaatgctaactgtttatgtatctaaacatacaaaaggtgtggtgaaaataccatatgaaagatttttaaatggtagatctttctaggacacttaccatgaatggagcttgcagractggaagttgccctgatgagtcagtgagtgagtggtgagtgaatgcgagggcctaaggcattactatacattactgtagactttataaatactgtaactaagacaacattaaatttatgaaaaatgtttttctacaataattaaccttagcttactctaactttttaaactttatatacttaattttttaactttttgactgttttgtaatagcacagcttaaaacacaaacactatacaaaaatattttctttatatcctt

SEQ ID NO: 808928 - DNA, 553 bp, Homo sapiens
tctaagaaatgtgtcattaggtgatttcatctttgtgtgaacatcacagagtgtccttacgcaaactagatgttatagcctactatacatttaggctatatggtacaccctattacccctaggcgacaaacctgtacagcatgtgactgtattgaatactattggtaattgtaacacaatgctaactgtttatgtatctaaacatacaaaaggtgtggtgaaaataccatatgaaagatttttaaatggtagatctttctaggacacttaccatgaatggagcttgcaggactggaagttgccctgatgagtcagtgagtgagtggtgagtgaatgcragggcctaaggcattactatacattactgtagactttataaatactgtaactaagacaacattaaatttatgaaaaatgtttttctacaataattaaccttagcttactctaactttttaaactttatatacttaattttttaactttttgactgttttgtaatagcacagcttaaaacacaaacactatacaaaaatattttctttatatcctt

SEQ ID NO: 808929 - DNA, 584 bp, Homo sapiens
ttatgaatttaactataaataaccatatagtataaataactataattgatatgaaaatatataaagttattcagttgttaatggatacttaagttgttttgatgttttgctattaggaatgaagttgtaatgaacttgcaatagttcttgatgtatgttctagagtagcattgtagtagtaatgtagtatgataatgtatatatattttcaaccttactatgttatgctgacttgttttccaaaatgatcctaacaatttctatttccttcagaartctgttggtagaaacattgacccacatccttgctaggttttgatatttttattgttttttcagtgtggcatttatttacatttctctgacttataatgaagagtttgaaattttttcacatattcacatgtcatttatacatgttactataaaatgtttcttcttgcctttaccattttttttctcagaaaaatatagtcctttactaattgatttgtaggaggcctttctatgttctgggtactaatccttttcatagtttaatatgttgtaagtatctttatccagtttaccaaaaaaatttcctc

SEQ ID NO: 808930 - DNA, 584 bp, Homo sapiens
ttatgaatttaactataaataaccatatagtataaataactataattgatatgaaaatatataaagttattcagttgttaatggatacttaagttgttttgatgttttgctattaggaatgaagttgtaatgaacttgcaatagttcttgatgtatgttctagagtagcattgtagtagtaatgtagtatgataatgtatatatattttcaaccttactatgttatgctgacttgttttccaaaatgatcctaacaatttctatttccttcagaagtctgttggtagaaacattgacccacatccttgctaggttttgatatttttattgttttttcagtgtggcrtttatttacatttctctgacttataatgaagagtttgaaattttttcacatattcacatgtcatttatacatgttactataaaatgtttcttcttgcctttaccattttttttctcagaaaaatatagtcctttactaattgatttgtaggaggcctttctatgttctgggtactaatccttttcatagtttaatatgttgtaagtatctttatccagtttaccaaaaaaatttcctc

SEQ ID NO: 808931 - DNA, 366 bp, Homo sapiens
aaataaaaatatgaagtataaaaagcacttagtgcaattctgagtataaagtaaaatgctcatttttacggcagcatgatgagaatcctgcccctggaaacactaaggcctataaggaatgagtgcctatgtggtagcrtgtgaattaatgcagaacgctataagtatagttgtactttgaagtccattctgaatcttagatgttacatttatattaataaaaagcataataattatctaaatgtatataatatgtttaatattatatggttacatcaactgatgtaattcatagttttccctagtgttctctttcctgaacattcaaaaatgtattagttagcaaagtcgtcttatatcctccct

SEQ ID NO: 808932 - DNA, 573 bp, Homo sapiens
aaagagtgctggagtttgagccccttcttgctttccaggatccaaacagtgatcagttcctagatccctggtttattcatgtaaaccacacttatttttctcagcagctactgtgtactcggctccattccaagttcaaatcattgtatttgattaagatagagagggtcccgactctcatggaagttacacaacaatagaggagacagacattaacccaatatgcaattaacaaagaagataacrttagagagtaatagtgcactgaagaaaagacatcaggtttgtggaaaagagagaaatggattcacccaactttagctcatgtgtttagaaagctctgcctgagaaagtgacattcagctgagacaacaaaataagtagagagccatgtgaagatctaagggacgaaagttccagggagacagaatgtgggggcagggggggtgggaagccctggtgtgggaaattatgtgcagggacagaaagaaggctagagagactgaactatagcattcaaagaaatgcagaggcagaggatgaggtaggaagcagagaggaagtcaggagcct

SEQ ID NO: 808933 - DNA, 589 bp, Homo sapiens
aaatgttaattcagaaagaagacatagcaactctaaaagtatgtacaccatacaactaagttacttataagtagagcaaaaaatggtcagaactggaaggagaaatagacaaatacacagttaaactttgggactccacaaaccaactctgaaaagttaataaaacaactggataaaaactcagcaagataatgaaacccaacaaaactatccaccaataagatctaatggacattggcagaccaccacaccagacagaagaatacacattttttaactgtccatggaatatttaccaacatctctcataccctggaccataaaaggaacctcaacaaatgtaaagaattgaaatcwtacagactgtgctccctggaagcaacggagctgaaccagaaatcagtaacatgaagaaaatcagtataactccaaacacatggaaacttagtaacatacatttaaattacccttggatcaaaaaatgtcttggccaggtgtggtggctcacgcctgtaatcccagcactttgggaggctgaggcgggtggatcacgaggtcagttgttcgagagcagccagaccaacatggt

SEQ ID NO: 808934 - DNA, 561 bp, Homo sapiens
tgcaggtgtgaaatcctgagatggatacaccatcccccgtggattattctggacaagaatgcatattctgaatctcaaggaacttctcaggcaaacactaaatgaggaacattctattaaccttcaaatatattggcttactgaagcactatggaaaattatgaagatgttctagattttttttaaaaaggctaaaacgtgcagacaactaaattcaatactttaccatactggatcttataatgcagaagaaaaaagttatgaagcaattattgggttaactaacaaaattggaatacaaacagctgattaaactattttatctatctcacattataatgaagttgattactgtatgatctttatgtaagaayacatccctgttcataggaaatatgcactaaagaatttagtggtaaaagattagaaagagggaaatgtttacaactgaaaaatgtaggtgacattatgtgaatgtactttgtaattttcttgtgactttaagtttgaaattatttacatgtaagaagacttgaaaaaagaatagtagttttataaaaa

SEQ ID NO: 808935 - DNA, 614 bp, Homo sapiens
gcacaggcgaggccccattgactgctctcctgagccacagaactaaggccgtatagctaccttactggggtagcagcccaagtgcactgtctccatgtgtctggtgggtctccagattgaagggctgccaggagtgattaggaaatcatattttttaagtattggactgaaaaagagcactttaataaatggtttaatttttgcctgagggaaaaatagctacttttctccaataatacaaaacataatgttctaaatgaaatgaaaytgaaaaagcagcatgatgctctgttaaaatcagaggtttctttctcttttccttgttttctaacataagtgactttatgtgaggtctaaactgaatctttactgtttctcttagttttaaactccttatacatattttctttgcatttctcactgttgagttaggacctgaatctttttctgccattttatgttgctggtattagaaatgatgaaattttgactttgcagaaaactaacgaggttaccttttaactgctagaatactgatactgtgttttaaaagttacataaagggtactagtgtccatttaaatacctataataacgcactagagaaaaaaaag

SEQ ID NO: 808936 - DNA, 645 bp, Homo sapiens
ggcacttagaagaaaacaccaaacccaagtttcacatttttaaaattacaaatgcctcttacccatctggccaggaaccaactctgaagggggtgacctcaacccagcccttgtttctgtgaggtcctgcttttgcagaatggcctgcccctgggactggagcagrcttgggtgagctctaggtggagggtggtgggaggggcatagaaataaaccttcctctccatcagaaggaacctgtgatcccagcttttccttcagtcaccaccacctcgtgacactagaaagcctaccgtcacagatttccagcttactcaaaccccacaggttggggtcaaatgcatgttaacctaatttgggggaaaaaagactcaatcttgaaagcctgagcaaagtaaagggttacacaggacagtgtcaagtatatgccatacttcatacctggcattttccctaagcaagaactaattagttttcatttttaagtgttagctgtggcatggtttacacttaaatgttaacaatacataagctgtgtaacagaagttatacatagttatcatggaatatacaaacactaggtaattcaaatttcctttgtaatggcatggaagtctactgagaagcagaaaagaagcaccattt

SEQ ID NO: 808937 - DNA, 645 bp, Homo sapiens
ggcacttagaagaaaacaccaaacccaagtttcacatttttaaaattacaaatgcctcttacccatctggccaggaaccaactctgaagggggtgacctcaacccagcccttgtttctgtgaggtcctgcttttgcagaatggcctgcccctgggactggagcaggcttgggtgagctctaggtggagggtggtgggaggggcatagaaataaaccttcctctccatcagaaggaacctgtgatcccagcttttccttcagtcaccaccacctcgtgacactagaaagcctaccgtcacagatttccagcttactcaaaccccacaggttggggtcaaatgcatgttaacctaatttgggggaaaaaagactcaatcttgaaagcctgagcaaagtaaagggttacacaggacagtgtcaagtatatgccatacttcatacctggcattttccctaagcaagaactaattagttttcatttttaagtgttagctgtggcatkgtttacacttaaatgttaacaatacataagctgtgtaacagaagttatacatagttatcatggaatatacaaacactaggtaattcaaatttcctttgtaatggcatggaagtctactgagaagcagaaaagaagcaccattt

SEQ ID NO: 808938 - DNA, 552 bp, Homo sapiens
attcccagttacttgaacatacagtcagccctctgtatcttcaggttcctgcaaccaactgcagatcaaaaatattttttaaaagaataaaacataatacagcataacaaccatttacttatattgtgttaggtataattaatgtagagttkatttaaattataggggaggatgtgcatagattatatgcaaatactacattttatataagggacttgagcatccttggattttggtatcctcaggggtcctggaaccagaacacccaccacaaagagatcaccatacaagttcctacactttcctcaaagtggcttaagccactttgagttagattttttcctgtcattagacatcagaaagattctaaatacaaatattcttttttattttattttacagaggtgggggtcctgctatgttggccaggctggtctcgagctcctgggctcaagtgatcctcctgcctctgcctcccaaagtggccaccacaccaggccaagattccaagtacaaaaattattctgacacagacttctcactatctcaagt

SEQ ID NO: 808939 - DNA, 616 bp, Homo sapiens
gagtgtcccggggagagacagcagcagagagagcccagcccacccaagtctggggttgggggttgggtagtgaggaatcctctggggtgggttggaagcatctcggctccaggctctcttctcccttctgcctgccctcctcttcctaggagagcctgatccctgcccctgaaaggggggttcattaagatcaagaaatgagggccccmgcgaggttctgcatggaccttggctctgaagctggacaggaccgtgtaagcctgggaggcaagcctcttagtggctgtgaggctcagcttccccatgggtgtcctgtgcatgctaatagccatctcccagggggatcaaatgagatcacacatgtgtgacatcttgcgcaggggccagcatgtggcaggcctttgctagatggtggctatgatcgatcttcctgtggtccttcccacgatgtccaagtcaggtcaactcaaaacacatgtgttgtgtgtaaggtaatgcatgtgtcataccatgtagaagacactgtgctgagataatgggagacccacaaagagctggccatggctccctgccctccacaggctcatagtcatgggagagatcagataaagtcact

SEQ ID NO: 808940 - DNA, 646 bp, Homo sapiens
aagacatcctacagcatttttttaaattgtagttttgctgtaattctcttcacttccatttatttaaagacttctttatttaactctcatttttgaagaatgcttttactgattatagaaatctagattgacagtttttttttatttcagaactttaaaaatatcatccctttctttctgtttttcattgtttctgcttaagaagcccatcatggctgggcacagtggctcacacctgtaatcccagcactttgggaggctgaggtggatggatcacctgaggtcaagagtttgagaccagcctggccaacatggggaaaccccgtctctrctaaaaatacaaaaattagctgggcgttgtgacgggagcatgtaatcccagctacttgggaggctgagacagaagaatcacttgaacctgggaggaggaggttgcagtgagctgagatcgtaccattgcactccagcctgggcaacagagcgagattccctctcaaaaaaaaaaaaaaaaatccatcatgaatattcttattgcgttttcctgtatgtgatgtgacttattttctggctgcttttaaaattttatctttttatttggtttttagaagcttgaatatgatgtgacaaagcgtgttttttccttcta

SEQ ID NO: 808941 - DNA, 646 bp, Homo sapiens
aagacatcctacagcatttttttaaattgtagttttgctgtaattctcttcacttccatttatttaaagacttctttatttaactctcatttttgaagaatgcttttactgattatagaaatctagattgacagtttttttttatttcagaactttaaaaatatcatccctttctttctgtttttcattgtttctgcttaagaagcccatcatggctgggcacagtggctcacacctgtaatcccagcactttgggaggctgaggtggatggatcacctgaggtcaagagtttgagaccagcctggccaacatggggaaaccccgtctctactaaaaatacaaaaattagctgggcgttgtgacgggagcatgtaatcccagctacytgggaggctgagacagaagaatcacttgaacctgggaggaggaggttgcagtgagctgagatcgtaccattgcactccagcctgggcaacagagcgagattccctctcaaaaaaaaaaaaaaaaatccatcatgaatattcttattgcgttttcctgtatgtgatgtgacttattttctggctgcttttaaaattttatctttttatttggtttttagaagcttgaatatgatgtgacaaagcgtgttttttccttcta

SEQ ID NO: 808942 - DNA, 610 bp, Homo sapiens
tcaagttcttaatcaccgtgccttacaacttacatgccctaagaagcacttttaaagccaggaacagtggctcatacctggaaccccagctactcagaaggctaaggcagtagtatggtttgaggccaggagtttgagaccagcctgggcaacayagtgagacctccatctctaaaaaaataacaatttaaaaaatttaggcctgacgctgtggctcacgcctgtaatcccagcactttgggaggccaaggtgggcagatcacttgaggccaggagttcaaaatcagcctggccaacatggtgaaaccccgtctctaccaaaaacacaaaaattagccaggtgtggtgatgcatgcctataatcccagatactcgggaggctgaggcaggagaattgcttgaacccgggaggaggaggttgtagtcagccgagaccgtggcactgcactccagcctgggagacagagcaagactccgtctcaaaaaaaaaaaaaaaaaaaaaaatttaaaaagaaggaccacggtacatttattttcttctccttaaaatgtgctggattttccaaatctcctagaattaacatattgtcttttttagtcagaaaaaaat

SEQ ID NO: 808943 - DNA, 602 bp, Homo sapiens
aaccttcacagcaaccagaggatccacttaaaagcaaggtcaggtcgtgtcgctcctctgcttaagaccctcccctggctcccatctcattctacggaaaaaggacttgctgggctttgggctctgctcgtgacctgacttcatctcctctctcgccctggcactgactccattccagccacactggcccctcactggccctgcaggcacctgcctcagggcctttctatttgctactccctcagcccggaccactctcccctgggtccctgaggcccctcaggtctctgcctcaatgccctctccttgaagaggctttcctggtcacactacccaacatagtaccacgttgctctcactccccttacgcgcctttatttttcttcatagcatgatccttgcctgtttcccccactaggatagaagctttctgcaggcaaggactttgtcttsttcattgttgcatcccaagcccctagggcagggcctgacacatggtaggtgccccgtttgtgaggtgactatgtccaaatccactgttggcctccaaaacagtgactccttcatgaggacccctggtgagcacgtgtcagtctcagaca

SEQ ID NO: 808944 - DNA, 630 bp, Homo sapiens
agatttttgcattttaaatgttgacagatattatacacttcttttcataaaagttgtaccagtttatattcctgccaataatgtgtgaatgtgtttcctacatcctttatgacataatatatcactttttggatcttactaattgaatagctgaaaatgatgtctcrgtgtagttttattttttatttttaccctcatcttctttgtgatggtacgtagttttatcttttatttctcttattatatttttataaacagaaatgtttacttttataaatatttttcatatgtttaaatccattgatatttatttttccatgaattgtttattcacatatggtgccaatttctctaatgcattattggtctttcattgatctgcaggagttctttacagagggaggaaattaacttattttctatgatacgtaagtattttttcagagtttgccttttgacttatcagtggtgacctttttttgccattcagttttatttatttttaaaaagtttccgtatggttgaatggctcaatattttcttttgtggcttctaatgctttgtgatatatctggaaaggccttgcctaatccaagattatttaaaaattatcccatgatctctttcttc

SEQ ID NO: 808945 - DNA, 565 bp, Homo sapiens
tttaaatttttttagaaatgggtgtctttctatattgtccaagctgatctctaacttctggactcagcttcccaaagtgctgggattacaagtgtgaatcatggcacccagctatgactctctagagtgctttcctagtgctcgrtatagctgtctgcacttagcacagagtaagtagctcttgtgaccatttcaacatgtctgcaaggaaggttctgttacatcctaaaaaccaaagtacaaaccaattaagacttgctgagggctacacacctcgtaagtgtagcctgggagtcagacttaagagcctgtggtcctatctcagacatttggacattctaatgaatgagattattttatgtgcagaaacaactctagtgttaactaatattatgtctaatagggggaaaaatgaaaatgagtgataattaaatattggttttaaagttactgttcatccaatatacacatatgccagtattatctattatagctatacctctacagtcccagttggtgatagggcctctggacatcaaatggtcatttcctgttctcctaaaga

SEQ ID NO: 808946 - DNA, 657 bp, Homo sapiens
tcatgcctgtaatcctagcactttgggaggccgaggcgggcggattgcctgagctcaggagtccgagaccagcccgggcaacatggtgaaaccccgtctctaataaaatacaaaaaattagctgggcgtggcagcatgcgcctgtagtcccagctactcgggaggctgaggcaggagaattgcttgaacccagaaggcgaaggttgcccaagccgagatcacaccactgcactccagcctgggtgacagagcgagactccatctcttaaaaaaaaaaaaaaagaaaaagaagtaataataacacttctgttacttatacacaaatttggttttcatctaaatcccttttccccttcttcatgaattgcatttttccactcttaagcatccctttattttcttcccagggatcacagaagagaaagatgaagagcaaatatttttcctttactttgtgtattttctacaaacttggggcctgccttggtggctgtcaaartgtcctttttttagagcagaaagagttgcaggaaaacatgatgtggtgtttcatgcaacatagtggaaatgcagttttaggtcatcaggctgcacttcctctcagtccgcagccccagagctctgtaacgaggatcccagttttccagactattgtta

SEQ ID NO: 808947 - DNA, 636 bp, Homo sapiens
cagttttccagactattgttatggtacaggtccaaacccgcctgccatctggggaaatgtgttgcttgagccaaagtaggagctccacactgtgcttaaatcatttacctgtctaaatagttctcacctgaggggtgggggaggggttaaactctcccctcatttcagatttttggagtttaatatgggccaagcaacaagcccagtgtgcctgttagtccctgaggaacattggaaactgtctctggggggctgggggagaaattttactttcccaaactttagccaggattttgaatcctttctttttgctttccartatcagtaaatgcctaacatgtattcattttccccctatattaaatgcttaaagacttttcaattccatgttcagttttaaatcatgaaaagtggttgttggtcatttatgttgtaacgtgatggctttccgtcttctttaggaataaacattacaacggtggctattccattggtgctccttgttgtcctggtgtttgctggaatggggatctttgcagcctttagaaagtatggtgactttacatgtttaaatttcttctctaattatgcgaacaataaaaaaccaaaaagtttattcttcagaaatgcatatgt

SEQ ID NO: 808948 - DNA, 606 bp, Homo sapiens
tttttggttgttttctttattttctcctggaaatcctattggatgctcattagagcttctcatcctatctttgattctgatacctgagtatttccatttatttatttatttatttatttatttatttttagacagagtctggctctgtcacccaggctggactgcagtggcactgtctcagctcactgcaaactccgcctcccaggttcatgccattctgctgcctcagcctcccgagtagctaggactacaggcgcccaccacgaggcccagctaattttttgtatttttagtagagacggggtttcaccgtgttagccaggatcgtctggatctcctgacctcrtgatccgccatcctcggcctcccaaagtgctgggattacaggcgtgagccaccgcgcccggcttccctttatttcttaagacattagctaggccttgtgaagaattctgatttatttggtctgacattcctaggaattcataatagacaggttttcttcttatttagtccgccgtcttgctggaatgatgcctccccaacaggtacaagaaagcatatttattaaaatatcaggccaggcacggtgtatcacacatccca

SEQ ID NO: 808949 - DNA, 606 bp, Homo sapiens
tttttggttgttttctttattttctcctggaaatcctattggatgctcattagagcttctcatcctatctttgattctgatacctgagtatttccatttatttatttatttatttatttatttatttttagacagagtctggctctgtcacccaggctggactgcagtggcactgtctcagctcactgcaaactccgcctcccaggttcatgccattctgctgcctcagcctcccgagtagctaggactacaggcgcccaccacgaggcccagctaattttttgtatttttagtagagacggggtttcaccgtgttagccaggatcgtctggatctcctgacctcgtgatcygccatcctcggcctcccaaagtgctgggattacaggcgtgagccaccgcgcccggcttccctttatttcttaagacattagctaggccttgtgaagaattctgatttatttggtctgacattcctaggaattcataatagacaggttttcttcttatttagtccgccgtcttgctggaatgatgcctccccaacaggtacaagaaagcatatttattaaaatatcaggccaggcacggtgtatcacacatccca

SEQ ID NO: 808950 - DNA, 602 bp, Homo sapiens
accaaaaagggatctgctgtgcaacagatttattaacggcaatgccagtgaggaaaaataggtaggaagctggagttgattggaggctggaaggcaatgagatcacaatggagttaagacccaaggtgaatgaaaggaggaaggaaggttgggtgaaagcaacttggactacaatgtaatcctaagggagtttggcaagaccatcgtggagtgctccagctaaagttgaggagtcatcatataatatccctgtcataatcagtcactgactggcagcagcatggaggagcatagcctcaccatgtacacagggatggatttcagaccrcagcagctggaccttcagtaagctatgctccctcctgcacgagaactgacagatgcattctcatggctgctgccgtggtgattatagctctcaaatcacacctgaaaaaggttcattattgaacaaatattcagcaccaacagtgcacggtaatttgcaatacttttaaagtgtttctttaaggttagttataaaaccacctaaaataaaatactgattaacaatgaaaatacaagttctctttaaaatttcataaactgaccaaaaaaaaatt

SEQ ID NO: 808951 - DNA, 602 bp, Homo sapiens
accaaaaagggatctgctgtgcaacagatttattaacggcaatgccagtgaggaaaaataggtaggaagctggagttgattggaggctggaaggcaatgagatcacaatggagttaagacccaaggtgaatgaaaggaggaaggaaggttgggtgaaagcaacttggactacaatgtaatcctaagggagtttggcaagaccatcgtggagtgctccagctaaagttgaggagtcatcatataatatccctgtcataatcagtcactgactggcagcagcatggaggagcatagcctcaccatgtacacagggatggatttcagaccacagcagctggrccttcagtaagctatgctccctcctgcacgagaactgacagatgcattctcatggctgctgccgtggtgattatagctctcaaatcacacctgaaaaaggttcattattgaacaaatattcagcaccaacagtgcacggtaatttgcaatacttttaaagtgtttctttaaggttagttataaaaccacctaaaataaaatactgattaacaatgaaaatacaagttctctttaaaatttcataaactgaccaaaaaaaaatt

SEQ ID NO: 808952 - DNA, 626 bp, Homo sapiens
aagaaaggtggacctgttttaaaaggaccagtggtgaatgaatccatgttaacaacctaaactaagtaactctgtgtctggttacagactagaatgtaaaacgttataaaccgtaacagcactgaagtaataggggggaaaaaaacgagatttgagggagaggagttaagagaaagtaagtgctaatttcctcatgttttagagaaggggaaaaggaaagagaaattgattttgttgcaagctgaaaagtgtaaaaaggagcatactaatgccaacttcttactgtgctccaaaatcatgttatttatcttaggggagaacatgttgagaaataatmtctcttgaactgaagaattgttgatcagttcaatagttctttagttctttccattttactttatttttgtttttttctataaagtgttaatattaattattgatattttattatgtaatactattgttatggtaatatttttctagcatatttatgggtaagtgtaaactggaaatgttgcttacttaatgttacaatgattgtccgcagggggttttggcttttaaaattttttagctttctacatttttaaagatagctttaaaaactaaatatatttataccatag

SEQ ID NO: 808953 - DNA, 514 bp, Homo sapiens
atctttgtcaagaatgccattaaatgaaattaaccccaaataatcattgtaaatggagtttcctgcttccctacatagagtaattgtgtgttaggattaacagagacagaaacaaggaaaaattatgaattgtctcattcactaaaaggttaacagatccctgtcttttgaatatggaaatggtacctyatcaataagactttctaaatacttaaagggaaataaagatatagatgttcttcaattaactgatagctgcttcttttcactagcagttagtcttggttttggctagtcgtcttaatgttattttaatcaagtagtcatctagtgtctatggcaaaggtaatcagtgtatatttgcatagagttgagtacctaagtatctctgaagacgtacgtcatgaactagtaaacaatatgccacttataaagaaggaaaaatgatgtcagacagctatcatttcaatatggcagaaaaattgcagtgcaaccttaaaatatttacagtgtt

SEQ ID NO: 808954 - DNA, 601 bp, Homo sapiens
taatcactgtggttgccaaatatttacttcagaagcaaagattttcaaacaagcatacacgatgcaaaataccagtctggcttctagtctatttactgtttttgtttcactcagattagctcagttttctcatcaaagcagaatgctatcttgcgtgtgtgtgtgtgtgtgtgtgtgtgtgtgtgtgtgtatgtgtgtatatatatatatatatatatatatatatwtttttttttttttttttttaaattacaaaagccatgagctgcttttatgctgaaaatgatcatttctctgttcacttactgacactcaaagaagggtttcttgctttcttaaacattgccgtaaggcaggctagaaatgtaatacttcaaatgttagatgattatggtcttttgataagagcagattctgcttggtatatccaggcactctctaaggtctagggttgatattaacaaaggaatgtatttcagaatagcagtacattttatgcaaatatggaaattattttaagaaacaatgacacattaaaactgcttttcatttacatgattttgaaatagactagaaagctttccctataaacatattaata

SEQ ID NO: 808955 - DNA, 646 bp, Homo sapiens
taataactaagcttacatgatcagaattataaccttagtgaattgactagatgatagataagctaatatgcaaaattttcttcacagcaggtttgttttgtaacttcgtggaatatggcagtcagtgaaaactagagttatcacccacaggcagaaactcttttataatgtaacatttaatgtgaaaagctaatgtgatgtggcaatatacacaaatggtggtgacaccacaaaagatatagctctgcaatctttctgcacatggactattgactcttatagtaagacttgtgagaaaatgatcaggagatataaatctctatatagacgatgctatagattgaatatttgtatccccccccattaatatgttaaacctgaactcccagtgtgatggtgtttggaagtgggggctttggggagggggtgattaggtcatgaaagcagaactytcatgaatgggattagtgcccttataaaggagactccagagaaatttctcaccacttctgccatgtgagggcacaactagaagatggccatgtttgcaccaggagaaaggccctcaccaaacactgaatctgctgattccttgatttgggacttcatagcctctagaactgtgagaaataaatatctgttatta

SEQ ID NO: 808956 - DNA, 582 bp, Homo sapiens
aaagctggaaggtagtttggtaccaacagtttttatcatttacactttgattaagagcctacagatgtgttttaagagtggcgaggagggagaatcatggtcaattaggtttcaggcaagcctgtggatggttctcctagcctttcttggtattgacattattttcttttcttttctcttttttttttttttttttttttttttttgagacggagtctcgccctgtcgcccaggctggagtgcagtggcacgatctcggctcacggcaagctccgcctcccgggttcaygccattctcctgcctcagcctcgcgagtagctgggactacaggcgcccgccaccacgcctggctaattttttgtatttttagtagagacggggtttcccgtgttagccaggatggtctcgatctcctgacctcgtgatccacccgcctcggcctcccaaagtgctgggattacaggcgtgagccaccgcgcccggccggtattgactgttttcaagtaaaacagtcatgctttatgagctagagagtatttgctcttcttcctttgaaaagataacaatgttttctcttatac

SEQ ID NO: 808957 - DNA, 638 bp, Homo sapiens
cagtttagatctgctttgatatttattttcactcctggagatctgataactagcttgtgaagataaatcttgtaccacaagccattgtgtattctccttgaataatcaaaagtcacagaaaggaaatcttgatggcaatgtgattgttttactccaagccaaacaatataaatgggtattacaattttacattaactttccttaaaacttttaattttctattcattgtagggcctcagtgcttcagaattataacatagttttatatgagatggcactctcactttctttctcccccaaccccataagaaagacatgataatgagaaactattccagcaggaggagccggtttagawacaaatggattccatggcaactcctgactccacatgacttctaataactggcatttcagttgaaaattgtctgtctgttattctgctcaatgctggtgctttatatggggttttccctagtttacatctcagaaatggaacgttaatctccagtttcatgaataagcaccggcagcagcagcagcagcaatgtgtcatcacctgtaaccacaatgtggccagtgatttgtcaagtgtttctggctccaattttcagactagctgacagaggtgaacactg

SEQ ID NO: 808958 - DNA, 577 bp, Homo sapiens
ttcttctttctcatgaggtgctttggatattcgggatcttttttggtcctatatgaatttgagaattttttttctatttctctcttttcttattcctggtcttagagggaaagttttcagcttttcaccattgagtataatggtagcctgccctatataatctttactatgttgtgttacatttattctatactaatttgttgagagtttttatcatgaaaggatgttgaattttatcaaatgctttttcagcatgtrttgagatgatcacatgatttttatccttcattcagttaatgtggtatataacatttattgatttgtggatggaaccaaccttgcatcccagggataaatcccacttgatcatggtgtatgatcctttcaatatgttgttcaattttgtttgctagtaatttgttgagaatttgggtgtctgtgttcaccagggatactgacatgtcattttcttttcttgtggtgtcctttttggcttcagtatcagggtaatgttggccttgtaaaatgagtttggaaatgtttcttcttcaattttttggaagagtttgagaaagat

SEQ ID NO: 808959 - DNA, 634 bp, Homo sapiens
gttgaacaatgagaacacatggacatggggcggggacatcacacactggggccagtcagggggtagagggctgggggagggatagcattaggagaaatacctcatgtaaatgaggagttgatgggtgcagcaaaccaacatggcacatgtatacctgtgtaacaaacctgcacgttctgcacatgtaccccagaacttaaagtataatttttaaaaaaggaagaattagtgtgtttctcgcttcccktggattcacctgcatttttaaaatgtttttaaatttttaattttcagtttttgtagatacatagtaggcatgcaatatgaaataagcacatcatggagaatgaggtatccatcccctcaagcatttatcctttcagttacaaacaacctgattacaatctcagttatttttaaatgtacaattaagttattattgattgtagtcaccctgttgtgctatcaaatagtaggtcttattctttctattttttgtacccactaaccatcctcaccacccccaccaccccccactacccttcctcatctctggtaaccatccttttactctctatctcccttcatgttgtatttctattggctaccacagctctaggctcttcctccttgc

SEQ ID NO: 808960 - DNA, 578 bp, Homo sapiens
tgcctggaaactgcacactcgctgctcgtaggcagcctgccaaggtcccctctgctgaaaccttgcaaccggtctatcaccatcttgtctcctctttgcctctttccaaccaccaaattagaaaggaaaggcaatgctagcgaagcttatccatggtattttcttatctttctctcttttagagggtgtgtgtgtgtgtgtgtgtgtgcgtgtgtgtgtgtatgtgcctacacaccctgtcaggactgcctcaatgcctcaaccggctttaaaggctgaatcagaaatcctgaaattcagataatgggacttccagaataaatactgcacaaaggtcctattcccttcaatcatcgatatcatcttccccaaatagcakctctgtatttgatttttaaaagaattcccctgtaatactacatagcttctgaagtgattttgacagaaacagacatattttgcttcagcagtaaaaatgacccaaagtaatgccctcattaaaagcaatagcaacaaataaacaaacaaaaatcagcttaaacactacagatggaaatcaccttacgaagtcagtaaaa

SEQ ID NO: 808961 - DNA, 515 bp, Homo sapiens
tgatttctaacctagcctaaagataagacaagggtttctgcagctttattttgaaaaacaagaattagatgaggcaactgggcacggtggctcacacctgtaattccagcactttgggaggccaaggtgggcagatcacttgaacccaatagttcaagaccagcctgaacaacatggtgaaaccctgtctctgcaaaaaatagaaaaattagtgggcgtggtggtgcacacctgtagtctcagctactagggaggytgaggcgagaggatcacttgagcctaggaggtagaagctgcagtgcaccatggtatcaccactgcactccagcctgggtgacagagtgtgagactccatctcaaaaaaaaaaaaaaaaaaatgagtcaaggagagaggaaaggagtatgagacagaaggatcagcatgagcagaggcacagaggcataaaccagcctattgtgcaagagaaacgtgcatcaaaaaacctcccggggagtgaaggagtagtggcaggaat

SEQ ID NO: 808962 - DNA, 584 bp, Homo sapiens
ttgtgtaattccatgtacataaaatgtccagaataggctgggcatggtggctcacgcctgtaatcccagcagtttgggaggctgaggcgggaggatcacttctggccaggagtttgagaccagcttgggcaacatagcaaaaccccatctctacaaaaaaaattaaaaattagccaggtgtggtggtgcacacttgtagacccaactccttgggaggctgaggcacaaaggatcgytggagtccaggagtttgaggctgcagtgagctatgatcataccactgcacttccagcctgggtgacagagcaagacccagtatctctctctcaaaaaaaaaaaaaaaaaaaaaaaaaagtccagaataagcaaatccatagagatatcaagtaggttagtagttgccagaagctgaggggagggagagatggggagcgactgttaacaggtacaggatttctttcaggggtgatacaaatgttgtggaatgagatcgtggtgatggttgtacatctttgtgaatataccaaaaatcactgaatcatacactttaaaagtatgtgaataaagaattcacacactttatg

SEQ ID NO: 808963 - DNA, 632 bp, Homo sapiens
ttgtattatgtgaaagaaaagtatagctgttttgttatctaagttagaaataggtcccaaaactgtgagttttaaacaccagcacatagacaacttgaaatattgtttaaagtatttgaaataaatatggtttatatagacagttacttcaacaaggcatgctgtgcagcttcaatcctgctgttcagtgatgcttcaatacccttttgttgactattcaggaaattcactataggctcttttgctttcttcatactcactcagcttgcttactttcagcagttgacttaatcttttattatacaagaaaatataaatyattagttttaagtttcctgtcatttgcctcaaccccagtcagcctctcacctcaaaatatatttgcctatacctttgtctctgctgctgaatctgtcggtagctcttcccacctctttctttctcctcttaggaagatataatccttttgcactttgaactaagacttattgacatgtacttcttttaacttacacccaagttaaaaagtcaaacaatgttgaaaggttaattcaaaaataatcaatcctttggttttaaccctttcaactctttcagctattttttcattcatttgacatttcaccttcaca

SEQ ID NO: 808964 - DNA, 642 bp, Homo sapiens
cttagaaatcaatttcagagctgaaacgccactgcaagtatttctgaatactccttttagtcatctgctcaatcactgctgctgtactatcagaaattttgcatttgagcagtcagacaggcacagacaagaacctaggagcgcttaccagtaacaaccaygaaatggggaaaaagtagttggaagcttaagctatttgagcatacttttgatactatagctggtaattggaatttttgagaaatgtaaaatgtatatacaccatttaagcctcaacctattttcctttgttgtgagttaatttcatgcaattacaaatgatcttctgaattacacggcactatggatgtgtatggtttctcaaacattaaatgggtcattttcgtaagtaaatcatactcaattaaaatttttatctctatatggagtaaagtaggtatttaatttttttctctataggtaacctattttccatcactacatattcaatggaaggtggaaaatcatttaccctgtaatttgaaaggccatttgtttcctgcatcaagttctatttatacagaactgccattctggtctatttttaatttctctagctttgtgccaaaaaaaacacttaattaattaggatttatctcttaa

SEQ ID NO: 808965 - DNA, 622 bp, Homo sapiens
atgatttatatttctttgggtacatactcagtaatgggattgctgggtcaaatggcatttctgcctctaggtctttacaatggttgaactaatttacccttccacaaacactgtaaaagtgtttatttttccccacaacctcatcagtatctgttgttttttgactttttaatagccattctgactggcatgagatggtatctcattgtggttttgatttgcatttctctaatgatcagtgactttgagctttttttcatatgtttgttgacagcatgagaagtgtctgttcatgtcctttgctcgctttttaatggattgtttttttcttttaaattcgtttaagttccttatagactctggatattagayctttgtcagatggatagatttcaaaaattttctcccattctgtaggttgtctgttgactctattgataatttctttttctgtgtagaagctctttagtttaactagattctgcttgtcaatttttgcttttgttgaaattgcttttggcattttcatcatgagatctttgcctgtgcctgtgtcctgaatggtattgcatagagttttttctaggatttttgtaatttggggttttacgtttaagtcttt

SEQ ID NO: 808966 - DNA, 588 bp, Homo sapiens
ggtattaagcctagcgtactttagctatttttcctaatgctctccctcccctcgcctcacctcctgacaggtggggtgtgttgttcccctccctgtgtccatgtgttctcattgttcagctcccagttataagtgagaacatgcagtgtttgawttttctgttcctgtgttagtttgctgaggataacggcttccagctccatccatgtccctgcaaaggacataatatcgttcctttttgtggctgcatagtattccatggtgtacatttaccacattttctttatccagtctatcactgatggacatttgggttgattccatgtctttgcaattgtgaatagtgcttctatgaacatacatgtgcatgtatctttgtaatagaatgatttatattcctttgggtatatacccagtgatgggattgctgggtcaaatggtatttctggttctatatatttgaggaattgccacactgtcttccacaatagttgaagtaatttacattcccaccagcagtgtaaaagcattcttacttctccacaaccttgccagcatctgttgtttcttgacttttcaataatcacc

SEQ ID NO: 808967 - DNA, 588 bp, Homo sapiens
ggtattaagcctagcgtactttagctatttttcctaatgctctccctcccctcgcctcacctcctgacaggtggggtgtgttgttcccctccctgtgtccatgtgttctcattgttcagctcccagttataagtgagaacatgcagtgtttgatttttctgttcctgtgttagtttgctgaggataacggcttccagctccatccatgtccctgcaaaggacataatatcgttcctttttgtggctgcatagtattccatggtgtacatttaccacattttctttatccagtctatcactgatggrcatttgggttgattccatgtctttgcaattgtgaatagtgcttctatgaacatacatgtgcatgtatctttgtaatagaatgatttatattcctttgggtatatacccagtgatgggattgctgggtcaaatggtatttctggttctatatatttgaggaattgccacactgtcttccacaatagttgaagtaatttacattcccaccagcagtgtaaaagcattcttacttctccacaaccttgccagcatctgttgtttcttgacttttcaataatcacc

SEQ ID NO: 808968 - DNA, 642 bp, Homo sapiens
cctcttatcccataatacctgagggcctggcgcatgctctgcttttattccctgttccagtgtgaaagagaagatttatatgccaatcacatcatcatcacagtgtgagagctgcaagaaagagcagaagccctgaatcagatatgtgttccataagagagaccttcagctcgctacaattaatcgattatttgagatgtctcagtgtggtcagctgccaaaaacaactgaacaggaaaaatgcgatactaatttgaagtagaaaaatccccctactcacaggcattgctgctctttgtaggggcattgttatgtttttatgttgtcttaagggaaagyggaggatgcaaatgaattctttcaggctgagaaatgcagcagcagcactcactgtggtcaggggagcagcagtgagcagcaagtatcaacaaagaaaatagaagctcagattttatgtggttgtctaaaaccaaaatgcttagatatttggtgctatcaagagatctcacttgcttttctctcccaattgaggtacagaaaaagacctgagcagtggtgttaccaaatgtcacagtaaggcttcattttacctgctttgaaactctagaaggaaaagcaaccaaatcaagacaaccctctgat

SEQ ID NO: 808969 - DNA, 632 bp, Homo sapiens
atcagcctctggggtatgtcctcctctccctcaacaagaaacacaccttcctggtatatcagatggtcagagcagggctctcagaagccccggagtgctgagcacagcgcagcttgggctgcctgcagttctcatggcagccrctacctcaggatgcctagcaaccagcctgtcctgggagacacctcgggctgccatggagtagccaagctgccactgttctcaagagggctaatcaacggaaatctgaaagaagccacgccatggataaaaccgagccagcccagaacctggctgcttgctaacttcccttctgcaggatgcccattacctgcaggatgcccattacctatccaggactgcccatctgcagtcatcccatttctcgtcatcaatcaccaaaatccagagtcagaagcctcagctgcagcagcaacgtgacttccagggttttctgcagaaaactaggacgctaggtttcttgctgaactgggtatggctttcctcatgccataggtaacccagccagattgtcagtgtggacctaaggagcctgagagaggaggttacctgagaaagttcaccactctccagaacttctgccagtccaaggacattgacaccctccatag

SEQ ID NO: 808970 - DNA, 632 bp, Homo sapiens
atcagcctctggggtatgtcctcctctccctcaacaagaaacacaccttcctggtatatcagatggtcagagcagggctctcagaagccccggagtgctgagcacagcgcagcttgggctgcctgcagttctcatggcagccactacctcaggatgcctagcaaccagcctgtcctgggagacacctcgggctgccatggagtagccaagctgccactgttctcaagagggctaatcaacggaaatctgaaagaagccacgccatggataaaacygagccagcccagaacctggctgcttgctaacttcccttctgcaggatgcccattacctgcaggatgcccattacctatccaggactgcccatctgcagtcatcccatttctcgtcatcaatcaccaaaatccagagtcagaagcctcagctgcagcagcaacgtgacttccagggttttctgcagaaaactaggacgctaggtttcttgctgaactgggtatggctttcctcatgccataggtaacccagccagattgtcagtgtggacctaaggagcctgagagaggaggttacctgagaaagttcaccactctccagaacttctgccagtccaaggacattgacaccctccatag

SEQ ID NO: 808971 - DNA, 594 bp, Homo sapiens
attctgagcccagaacacccagaactttggaaattggctattgctatgtctggactgcgagtatgggaagggaaaactattctgtctgttgtccccactaccgtccccctctctcagtatcaacgtagatccagacattctgctttactaacctccaacctgattgttcccatacggagttgtgttaagcctccttacatgctgttagtgggaaatatcaaaatytggacgaacaatcaaactgtccaatgcattaatttacacttgtattaactcccattttgactccaagaaaagtgtaatgttggctcgaactcaagaaggaatctggattctggtaactttgcccagaccttgggaatcctccccttcgatacatgtaattaatgaagtgttacagtgaattctaaagagatctaaaaattctaaaaaggtctaagatctaagagattaatcactgtgatcatgggcctaattacagtcactgcactggccaccactgtcggaatggcgttacatcaatctattcaaatggctcattttgttaatgattggcaagccaattccacccaaatgtggaattctcaacaaggc

SEQ ID NO: 808972 - DNA, 653 bp, Homo sapiens
ttaagatcttgaagcccacaggaaaagaaaatcattttgaaagcgagagcaagattgcttaagaggaaaatctcttgatagagagagaagtacagtttctactgtaataattaactggaaagaaaattgtactcacaataaaatgaatgagatgaatgtattctcctaagatagtgcacacaccccagtttcctagttcatgtaatttttcatgtaatatttcatgcaatattgcctttgctgtcgtgtttctctctcccagcaccaatggcaacattagaaataagggacacatgtggctgctagaatttttgctcatgctcttagcacgaatcgcagtttggggaaaagtattcactcatgctaattgaagcttaaagaatgggaattttagtgggtgagcttctatgctctgatattggttatgcctcctcttargcatcatctccagctcttcctaagatatataccgcaactaactgtagtggtgagttcaccactctctcttgtccataaaggactcgaactcgaagatgatgggttgcaagatgaaaatgacccagatcccagtaagtgttgaattagaaccgccaaggagaactcacagacctgcatcagattgtgagcaaaaaccaaacttttgttgtgtaaat

SEQ ID NO: 808973 - DNA, 630 bp, Homo sapiens
ttactcatcattgcttttggttcctgtatcctacatgttccttctggattattgctaaaggatatcctttcattctttctgcaaggttctgtgaatagtaaactctcctggttatcatataactctaatgcctttattcaacatagaattctagtgtaataaatactttccctcagtactttggaaatactattcttctgtgatagctggccaaaagtttatctttctttctagttgagctctcttttctcctcgactactttaacttttttctcttttcctttgttgttctacacatgtattacaaggtgtctaggtattgatttgttttttattaattccgcctgagactcagcatgcaattttagtttctattttctccttgactcaaatgataagactttttttttctttaattttcaggatacagggtttttttctgattatawttttaatatctagttttatttgcactggaacaaaagcatttttttaatttactgaggtttttgtgtatattttcttcataaaccaatacatcttcatttttttcaagactgtttaatgagtacttgaaaagcagatatattctccattttcaaaatggagtttgatatgtatgagttagat

SEQ ID NO: 808974 - DNA, 638 bp, Homo sapiens
aatgataactctgttgaagaaaaggaagagagaagttaaatacgaagtttttaaacataattacatttatttgacccctttctcttacatcccacatagcatctataagcaaatcccataatctctattttaaaatatacccagaattccagaatctgactatcccaccttatttcatcactaccaccctagtatagtgaattattgcaatagcctcctcactggtctccctgtttccaccattgtccccttaatgtcaacttgccagaaagcaaacagaaagatcctttaaaaacaaaactcacatcttgccactctgctcaaaatcctccagtggcttctcttgtctctcagaagaaaatcttaaccatggtctctgagtctggcccctggatctctcttgacttcacctcccaactctctttccctggctccttctactccaggtactccttgctggacctctaacatgctaacagctccmatcttctgggcctttgcatttatgattccctctcctagaatgctaggatttcccctctagaaatcctcactcacttacttcgtcatttgattcaaatctctacttacagataatctttagtggactttgaatacttgatataaagtatcttgaa

SEQ ID NO: 808975 - DNA, 601 bp, Homo sapiens
cactggtctccagctgggtggtccattacaccctagtctcaggcttaatcagctctgcatgggttaggggtgggctcagctagcccacaatttggcctcacagcatcttcttatccaggtttgcagcctttcctccccactatcaggtttccttattgccaggtgggtgatgggtagttcaagggacttctgtttctcagagtagttctcagctrggcctgcatacagaccaggacacctcaccccgtcctgcccccagtctcccagtgagtctgtccctccactcactcctcttttggactgtcttatgaactgaatgttcatgtccccgcaaaactcatatgttgaagcgctaacccccagtatggctgtatttggaaatgggacctttacggaagtaaataaagttaaatgtggcatatgggtggagccctgatctaataggattagtgtccttataagaaagacactagagctcactttctctctttttctgtccctgggcacacaatcaaatcagccagaaccttgattttggacttctaacctccagaactgtgagagaataaatgtctgttgtttaagtcacccagtctatggt

SEQ ID NO: 808976 - DNA, 564 bp, Homo sapiens
aagattcttttctacatttaacacatgagaaatctgatgcttgtctatggttacacaacagatcatctgcctgtgttgtctcctccatgcccatttggctcagttattaaccagttcctgtgggatttatacctgggcttcttagcagctcctggtgattatcaactatgtaagaaaatagatgctgagtgagttagtacccatgggtaactcaaagtgtgcaggatactgacacaatttgaaatgcaatgtttacaatttttaaaatatgaatatttaaaacaaatattwttaaaaggtggccactgaagccatttggagtattaggggaagggggcagaggggctctcttgtctatggttttcacaactagatgtctgaattagtcaaggttctgcagagaaataaaaccaatagggtgtgtgtgtgtgcataggctcatggaatagattcatgcaattatggagactgacaagcccaaaatctgcagggtaggcaggcagcctgcagacccaaggagtgttgatgttgcagtgccagtctgaaggctgtttgccagcagaa

SEQ ID NO: 808977 - DNA, 562 bp, Homo sapiens
cacgcccagctaattttttttttttttttttttttttgagatggagtctcgctctgtcgcccaggctggagtgcagtggcacgatcttggctcactgcaagctctgcctcctaggttcacgccattttcctgcctcagcctcccgagtagctgggactacaggtgcgcggcaccacaccctgctaattttttgtatttttttttttagtagagacagggtttcactgtgttagccaggatggtctcgatctcctgacctcgtgatccgcccgcctcggcctcccaaagtgctgggattacaggcttgagccaccaygcccggcctcctggctaatttttttgtatttttagtagagacggggtttcactgtgttagccaggatggtctccatctcctgacctcgtgatctgcccgcctctgcctccttaagtgctgggattacaggcgtgagccacagtgtccagccctttttaattttaagttctggggtatgtgtgcaggatgcgcaggtttgttacataggtaaacgtgtgccatggtggtttgctgtacctgtcaacc

SEQ ID NO: 808978 - DNA, 601 bp, Homo sapiens
aatgtaaacagaccgaactctcctattaaaaaatggcagcctaccaactgcctacaacaaaatctaacaactttttgcaaacaagagacgcacaaaccaaaatcatcatcaagagagtagcaatgtttgaggatattcccatgtgaacagaagaaaagctsggattactattttagtagcagataaagcagatgtcatgtcatagcaaaaggcagtacaataaataaataaggtcattacataatgctcaaatgtatattacattatgaaaattgaaaatactgaatgtatgtgttacaaaaaccattgtaacaaacccataaaagaaaatagacaaaaaggcaagaagaagtaaatatgattttaattggaaccctcaatattccatttctggaaaaaatagacacaaactaaattgaaaaatactgtataattgaataattctttcaaaaaactgttttcagggcttactagattttaagtctgtgctacatgctagaagacaagtccatgaacaatatgaatttaacagacttatggagagattagagatgggacaagttaatattgtctcttttcaagtgtacatagatcataccat

SEQ ID NO: 808979 - DNA, 601 bp, Homo sapiens
aatgtaaacagaccgaactctcctattaaaaaatggcagcctaccaactgcctacaacaaaatctaacaactttttgcaaacaagagacgcacaaaccaaaatcatcatcaagagagtagcaatgtttgaggatattcccatgtgaacagaagaaaagctcggattactattttagtagcagataaagcagatgtcatgtcatagcaaaaggcagtacaataaataaataaggtcattacataatgctcaaatgtatattacattatgaaaattgaaaatactgaatgtatgtgttacaaaaaccattgtaacaaayccataaaagaaaatagacaaaaaggcaagaagaagtaaatatgattttaattggaaccctcaatattccatttctggaaaaaatagacacaaactaaattgaaaaatactgtataattgaataattctttcaaaaaactgttttcagggcttactagattttaagtctgtgctacatgctagaagacaagtccatgaacaatatgaatttaacagacttatggagagattagagatgggacaagttaatattgtctcttttcaagtgtacatagatcataccat

SEQ ID NO: 808980 - DNA, 608 bp, Homo sapiens
caggagactggacctagaggagtgggttcagaacctgttgggcagtgaattcccaggtcgcaggtatccagaacgtggttctgggtgggtaagtgtcttggcctcaatgactccttgccctgtgtctccctgcctcttgccctgtctgaaggcgacaccagccagacattgtgggagtgcagacttggatcaagcacagcccctccaaggaggccagccatccaaacactatgaactttgggcgcagtggctcaggcctggcgtggtggctcaygcctgtaatcccagcactttgggaggccgaggtgggcggatcacttgaggtcaggagtttgaggccagcctggacaatatggtgaaaccccatctctactaaaaatacaaaaattaaccggacatggtggcgcgtgcctgtaatcccagctactccggaggctgaggcaggagaattgtttgaacccgggaggcggaggttgctgtgagccgatagcgcaccactgcactccagcctgggcagcagagcgagactcagtttcaaaacaaacaaacaaacaaacaaacaaacaaacaaacaaacactgtgaacttcgaggcagatgcctgcaagt

SEQ ID NO: 808981 - DNA, 608 bp, Homo sapiens
caggagactggacctagaggagtgggttcagaacctgttgggcagtgaattcccaggtcgcaggtatccagaacgtggttctgggtgggtaagtgtcttggcctcaatgactccttgccctgtgtctccctgcctcttgccctgtctgaaggcgacaccagccagacattgtgggagtgcagacttggatcaagcacagcccctccaaggaggccagccatccaaacactatgaactttgggcgcagtggctcaggcctggcgtggtggctcacgcctgtaatcccagcactttgggaggccgaggtgggcggatcacttgaggtcaggagtttgaggccagcctggacaatatggtgaaaccccatctctactaaaaatacaaaaattaacyggacatggtggcgcgtgcctgtaatcccagctactccggaggctgaggcaggagaattgtttgaacccgggaggcggaggttgctgtgagccgatagcgcaccactgcactccagcctgggcagcagagcgagactcagtttcaaaacaaacaaacaaacaaacaaacaaacaaacaaacaaacactgtgaacttcgaggcagatgcctgcaagt

SEQ ID NO: 808982 - DNA, 611 bp, Homo sapiens
gaagtgaggcccagcattgcacgtgcgtcagcagtggccagcctggtgcactgtcacagccacagctggccacgtcttctgcaccgttgcgttcatcactgttgcaaatggcatggtttcgaggatcaggcgttaactctgtctctgaggcgttcctctgaatggtatagagtgtcctgtcccagagcttacctaacattcttcttgctgggattttgggccatgttcatatttcatgcacaaagctggaaatcagtatcctcctccatgtagaggaggaaatcaaggcctgaaaagggcagtgacttgtccagacccacatgggctgggcttaggactcccagggcccggctccctctgacctctgtgagtstccaccctgagctgtctttgagctgtagggatggagcaggtcccaggtcttcaattcaatccagcatcagagaaaatgttcaagagttccgaggggcagctggatctggttctgtgactttacctctgtgtccgcccctccccctcagccccctgcctgggtgctggctgcacacataagtaggcaccttgctcacatcctacgtgcgctaagtcaacttcagctgtcacatcgggtt

SEQ ID NO: 808983 - DNA, 458 bp, Homo sapiens
gaatcctcaagttgtaaacttgtgttttccctcttacaaactgtaaatataccacagggtgatgaaatggcaccctgtaaatattcagaagccatggataatcattgccagaatcaattatttcattagggtttgcaaaacccagtgggttttaattttaattatatttcaggtataaattatgctgaccaagrtgaacactttgaggaggcttcctgcttggggaagagcatatcttttaaaaaacatttatttatttattctgtagaaaagtttagtctatttatccagatcttttaaaatgtcatttaataaagttttagggtttcctttcagaaaatttctgtacatctctagatttatttgtaggtattttatattttattcactttgataatgttgaataggattttttttttttactattaggttgtcttagcaggtttgggctgctataa

SEQ ID NO: 808984 - DNA, 599 bp, Homo sapiens
cttcttcttcttttttttttttttgaggcactgtctcactctggaatgcagtggcgcgatcctagctcactgcagccttgaattcctggggccaagcaatcctcctgcctcagccacctgagtagctgggaccacaggcatgtgccaccacacctgtgatttttttttttttttttttttttttttttttatagagatgggatctccctgtgttgcccaggctggtctggaactcctgggtgcaggtaatcctccttcctcaacctcccaaagtactgggattacaagtgtgaaccaccaagcctggccaaggtttttttcttattaaracctccaatacagtgttgcatagtagagctggtagtggacattcttgtcttgttgctcactttaaagaaaattcttgggattttttaccatggagtctgattttgcagcagaatttggtcgataccccttaacaggctaaataagttttggtttatttttagtttaagaggttttatttaaaaaaaattctttaattaatgttgttttgtctttttttaatttgaatagttagctttttaattttcttgcttactaatacatttaatcaa

SEQ ID NO: 808985 - DNA, 599 bp, Homo sapiens
cttcttcttcttttttttttttttgaggcactgtctcactctggaatgcagtggcgcgatcctagctcactgcagccttgaattcctggggccaagcaatcctcctgcctcagccacctgagtagctgggaccacaggcatgtgccaccacacctgtgatttttttttttttttttttttttttttttttatagagatgggatctccctgtgttgcccaggctggtctggaactcctgggtgcaggtaatcctccttcctcaacctcccaaagtactgggattacaagtgtgaaccaccaagcctggccaaggtttttttcttattaagacctccaatacagtgttgcatagtagagctggtagtggacattcttgtcttgttgctcactttaaaraaaattcttgggattttttaccatggagtctgattttgcagcagaatttggtcgataccccttaacaggctaaataagttttggtttatttttagtttaagaggttttatttaaaaaaaattctttaattaatgttgttttgtctttttttaatttgaatagttagctttttaattttcttgcttactaatacatttaatcaa

SEQ ID NO: 808986 - DNA, 543 bp, Homo sapiens
gataatctcaggtacaatgtatacagaaaagacagaatatgcacttgattttttgatttttattataattttcaaaataatgtattggttccctggcattctccaaagatataaccagggattttttttgtatcataaattcgtggatttaaaaatatttgatctgtttcaatcctttcawctatttcttatgttcaaatggttccatcttgatataaccccagtagttacttttaaatgttttattgaggtatgctttatatactccctggtagtttgtgagagcatccttgctttctagtatgatgagatgtgagatgttccaggctcatcttgtccatgtcttgctccaaacctggaaacagaccttttttttttttttaaggaactcaggtttttaaaatgggaaatggtaattagagaccacagtctgggtgcaagttgtgctcattgcagttaggtcatttttttctaagccttttcaatgtatgaatccaggaaatgtgtttattacaaactcatgcgttcttatgctatttccag

SEQ ID NO: 808987 - DNA, 579 bp, Homo sapiens
tatggttccaaggggcaagtctacaaaacaaagttgttcagatttagtttctattcctatctcctctgtttcctcctttttttaatgtttgggagatatacacaagacacatgtatgcatgcatgcatgcacgcacagacaaatacatgtatgtttgtactaccattctgagataacagtagtgtcctgtccatacttttctctgtttgttttttgttaattatatatcctagaaattactccatagccatacatagagatagtcctcattcttttttcctatgcttagtattctgttgtgaggatgtattgtagtttattcagccagtcctctgatgatacacatttaggttgtttgcaacagtttttaagttgattgcttcataaacctattcataaataggkaatgcaattttttatgattgttttggttttttaggttcatgctttgtcagttttgagaagcaagttacatgttttaagcgtgtttagcttttttttttttttaaacagcaaggagtggatttattcagaggtctccctctgccacattttagtgctgtttgtataaagcagccc

SEQ ID NO: 808988 - DNA, 601 bp, Homo sapiens
cttgaacccaggctttggagactgcagtgagctataatcgggccactccagcctgcgggacagagcaagacttgttctcccagtccttgctattcaggggctaatccatggatcaggagtggcagcagcccctggaagcttgttagaaatrtagactgtcaggtcccatttggcaaatctccacattcaagtctgaaaatcactgctctctaattcatgtgtgcagtcagcccttccgtgtctgaaggtttgcaaccttggattcaaccgaagaccaaagatgtagttagacctatgattgttctgtctgtcccgaacagactttttgtccttgccatgattccctaaacaatacagtatcacaactacacaggatcacattatgtttaatattgaagtaatttagaagtgatttcagtatacaggagacgatgtaagttacaggcaaattcattttattatccaaatttttatataacatcatgttatataagagacttgggcctctgtggattttgttttccacagttcttgaaaccaatgccctatggatggatacggaggcgacaactgttaatcatctcaccactctgcattagtc

SEQ ID NO: 808989 - DNA, 601 bp, Homo sapiens
cttgaacccaggctttggagactgcagtgagctataatcgggccactccagcctgcgggacagagcaagacttgttctcccagtccttgctattcaggggctaatccatggatcaggagtggcagcagcccctggaagcttgttagaaatgtagactgtcaggtcccatttggcaaatctccacattcaagtctgaaaatcactgctctctaattcatgtgtgcagtcagcccttccgtgtctgaaggtttgcaaccttggattcaaccgaagaccaaagatgtagttagacctatgattgttctgtctgtcccgaacagactttttgtccttgccatgattccctaaacaatacagtatcacaactacacaggatcacattatgtttaatattgaagtaatttagargtgatttcagtatacaggagacgatgtaagttacaggcaaattcattttattatccaaatttttatataacatcatgttatataagagacttgggcctctgtggattttgttttccacagttcttgaaaccaatgccctatggatggatacggaggcgacaactgttaatcatctcaccactctgcattagtc

SEQ ID NO: 808990 - DNA, 644 bp, Homo sapiens
caggctagaatgcagtggtgcgatctaggctcactgcaacctctgcctcctgggctcaagtgatcctcccacctcagcatcctgaatagctgcaactacaggcacgtgccaccattcccagctaattttttgtatttttttgtagagaagggggttttgccatgttgcccaggctggtctcgaattcctgagctcaagccatctgcctgccttagcctcccaaagtgctaggattacaggcaggagccactgtacctggcccagttaggagccctatggaatattttgttgagtttagatcttattctgtaggagatggagaatcatcaaaggattttaaatgggaagtgactggctcatatcttcatttttgtcagattacgcagctgattggaagatagattcaagaggttacaagagtgggaatagtaaattcatttagaagactattgcagtagaccatgttagaattgacctcagctgggtcagtggtaaggmcagagaaaggcagatatatttgtgagatatttaaaagtaatactgagaggatatgaggaatgatagtgagagaaatcaaagaaaatgtttgggtttccaactctgttaggatgatgtttgggtctttagctgttaggctcttgcag

SEQ ID NO: 808991 - DNA, 647 bp, Homo sapiens
tgtagcaaacaaagatagagtgaagtatctttaatcaaaaaacattcaacagaatcactctaacaaatataaataatcatgaaaaattgagacatttcctcctgagaagagaaaaataagatagtgcagcaccatttctattcaataatgtactagaaaaactaaccagtggggggaaaaaaagaaaacaagacagataattttaaaggtcaagttaagtggctcactcctgttatcccaacagtttgggaggccagggcaagaggattaaggccaggagttcaagatcagtggaggcaacaaagctggacacccatctctacacaaaatttttaaaaattagtggtggtatatgcctgtagtctcagctaccttggaggctgatcctacccttcgatatcttcggttaaggaattcgaggttacagaggttacagtgagctaagattgcaccattgcacttcagcctaggtgacagagaaaaacygtctcccctgcttaaaaaaaaaaatcaaaaggactaaaaaataagtaatataattgtcctattgcagtaataccacatgtatgaagaaaattcaaaataatctaaagattgtttcatttctcaatgtaataaaatatgctagaagataccagtgaaactta

SEQ ID NO: 808992 - DNA, 532 bp, Homo sapiens
cagcattatagatggaaactgaaaacctgctgttgtttgtgccactgctgtttaactgctaacataggtattctggtctgtggcatcatgtcggcactcaaaaagcttcagattctggagcatttcagattttggatttttggattagggatactcaatttctattggtaactagttaaacatgcttcaggcttgaacagaagctgggtcgtcgtagagagcaaaaggagaaaaaattttctgtmattgggtaaagaccagaagatggatgtgagtttatgcttctggggaaaaaaagcagggtacatgctccatagttttagcgtttcacaaataaaatcttattgggaagcaggttgagtgataggtttaaaactcttaaagtaggtcaggaaaagagggaaatatgtggctgaaggtagtggtgcaacttataagcaagcaaaatatggacttttctcattgagcaggggaaatagcccccagctacaggggccacctctgcccagatatcagaggaaaacaaactgct

SEQ ID NO: 808993 - DNA, 588 bp, Homo sapiens
caacttgattgtggtggataagctttttgatgcgctgctggatttggtttgccagtattttattgaggattttcccattgatgttcatcggggatactggcctaaaattctcttttttgttgtgtctccatcaggctttggtatcaggatgatgctggcctcataaaatgagttagggaggattccctctttttctgttgtttggaatagtttcagaaggaatggcaccagctcctctttgtacctctggtagaattcggctgtgaatccatctggtcctgtayttgttttgattggtaggctagtaattattgcctcaatttcagaacctgttattggtctattcagagattcaacttcttcctggtttagtcttgagagggtgtatgtgtacaggaatttatcaatttcttccagattttctagtttatttgtgtagaggtgtttatagtattgtctgatggtagtttgtatttctgtgggattggtggtggtatcccctttatcattttttattgcatctatttgattcttctctcttttctttattagtcttgctagtggtctatctgttttgttgatcttttc

SEQ ID NO: 808994 - DNA, 588 bp, Homo sapiens
caacttgattgtggtggataagctttttgatgcgctgctggatttggtttgccagtattttattgaggattttcccattgatgttcatcggggatactggcctaaaattctcttttttgttgtgtctccatcaggctttggtatcaggatgatgctggcctcataaaatgagttagggaggattccctctttttctgttgtttggaatagtttcagaaggaatggcaccagctcctctttgtacctctggtagaattcggctgtgaatccatctggtcctgtatttgttttgattggtaggctagtaattattgcctcaatttcagaacctgttattggtctattcagagattcaacttcttcctggtttagtcttgrgagggtgtatgtgtacaggaatttatcaatttcttccagattttctagtttatttgtgtagaggtgtttatagtattgtctgatggtagtttgtatttctgtgggattggtggtggtatcccctttatcattttttattgcatctatttgattcttctctcttttctttattagtcttgctagtggtctatctgttttgttgatcttttc

SEQ ID NO: 808995 - DNA, 623 bp, Homo sapiens
ttgttcgttcgtttttgagacagagtttccgtcacccaggctggagtgcagtggtgcgatcttggctcactgcaacatccgcctcttgggttcaagtgattctctagcctcagcctcccgagtagctgggattacaagcacgtgccaccacacccggctaatttttgtwtttttaatagagatggggtttcactatgttggctaggctggtctcgaactcctgacctcaggtgatccacctgccttggcctcccagaatgctgggattacaggcatgagctgccgcgcctggtccgcaagaatgttttgatcatcatttcccctaatttctcttaaaaacccctgatccagaggcacaagtaggaaagctggtctttcaacgctaatttaatgcctgcctcaggttgctggcttctcagataaaactaactttcctttcaacaaagctcatctcttaagtttttggctttcaggtgacgagtggctcagacctgagctcagttacaacaccacaattctcccgagccctggagccctctttaatttctccgtagtcttctggatgcaacagtagccaagtcctatcaacaatttcccagtttgttttcattgcttcccttatt

SEQ ID NO: 808996 - DNA, 591 bp, Homo sapiens
caagtctgctctgtccgaaattagtatagctattcctctattcctgcttttttttgattagtattagcatggactttctccatccctttacttgtagtttatatgtgtctttatatttaaagtttttttttttttttttgtagccaacatacaattggttgttttttttttttttttttttttttttttgagacagagtcttgctctgtcgcccaggccggagtgcagtgagtggcgcgttcttggctcactgcaacctccacctcccatgttcaagtgattcttytgtctcagcctcccaagtagctgtgactacaggcacacatcaccacatctggctaagttttgtatttttagtagagctggggtttcaccatgttggccaggctggtctcggactcctgacctcaggtgatccacccgccttggcctcccaaagtgctgggattacaggcacccagcctaaagtaattcttgatatagttggattaataactactgtatttattgctgttttctgtttgcccttgttttttattcttatttttgttttctacattttctgccctttgtggttttagttgaccattt

SEQ ID NO: 808997 - DNA, 591 bp, Homo sapiens
caagtctgctctgtccgaaattagtatagctattcctctattcctgcttttttttgattagtattagcatggactttctccatccctttacttgtagtttatatgtgtctttatatttaaagtttttttttttttttttgtagccaacatacaattggttgttttttttttttttttttttttttttttgagacagagtcttgctctgtcgcccaggccggagtgcagtgagtggcgcgttcttggctcactgcaacctccacctcccatgttcaagtgattcttctgtctcagcctcccaagtagctgtgactacaggcacacatyaccacatctggctaagttttgtatttttagtagagctggggtttcaccatgttggccaggctggtctcggactcctgacctcaggtgatccacccgccttggcctcccaaagtgctgggattacaggcacccagcctaaagtaattcttgatatagttggattaataactactgtatttattgctgttttctgtttgcccttgttttttattcttatttttgttttctacattttctgccctttgtggttttagttgaccattt

SEQ ID NO: 808998 - DNA, 602 bp, Homo sapiens
tgatatcccaataatggtacttgagacatttgtttacttaaaagtttttatatttggaagtgggagaaagttcaaggtctgcatttgttaccataaagtagatgttaaataatgctatggctgagtttttgaaaacaacagtaaacagtattasaaaggcaagagagttttcaaactctcaactcttgtcgtatttccttatttgtatattaatttaatctatattttcttaagcaagcctatagaatagcttttaaaaactggctggaggtttgccccggtgttcttttgttccacccacggtgctgttgtctagatgagtctaccttgggagaattacaagtagaaacccctctcggaaaggatctagtgagcccacgtagtgctttggaggatatggcattgtgtggctttgaggaattgcttagagaaaacaagagatgctaaaagaaaaaaggcaaagggccaacggctgtcacctgtcaggtctcaggtgagcggtttgtccggcagagttgtccaaggcagagtggttagaatgtaccttacctccctgtttgcctcagagcatgcccctctgccctgtctgttgtctgatctta

SEQ ID NO: 808999 - DNA, 631 bp, Homo sapiens
gaaactttctgtttaataacatggagaatatttcttaagatgcatttatttattgtgtttaatcatttatttatttatttataacttttatatattcttagcttttcgctgtggcctgcagtttttaggcaacattgcctcacggaatgaagattcccagtctattgtttgggtgcatgctttcccagaactgtttttgtgagtatattgataagcatttttctaacttgtgagaagattgtggctatatttttccattttatataaagttcgaaaacaggaaaaagtaacccactgtaatasagttcaggatagtagttgttcttggtgggtgggtaccagctgggagagggcactagggaaacacctgggtcctggaagtgttcgtctatatcttgaccttggtggtggttacatggatgtatacatatccaaactttgttcattgagctgtatgtacacttaagatttatgcccttgattgtatatcagtttacttttacaaaaataaagtcatggataaagtaagtaatattgttaaggacactgaaatttataagaaacacaattaaaatagagcatcaaagtatgggcaatgaattaaaattgtttatgtattgaatactgatat

SEQ ID NO: 809000 - DNA, 625 bp, Homo sapiens
tacctgttttgtacatcagtactggctgacttgtcagttactcggataattgatcgagtgattgctctgcagagaaataaataaatgcttaactaatatgtgttagtgtttttctttttgcaactgtaaaataggccggggtggcatggcccttggtgctcaggcagggccagcttctatattctcagcctatactagcactgtgtggacttcccaaccttcatactttccctgagtgaccttaacttggccttcagaactcaaggtcacaggtaccctgttgacctgtgcagaaacactttctcttctacgctcctcactatactcttctgccctctrctcaccccctgacttacactctacctataatcagtttctgtgggtaaataggttatgggttgttgattctgatgcatatttcagtatacgtgtgctgttgtttttggttttacttaataagtgtttagtgtgatacacatacgtaaactgatcaccagcagaactgtgacatatgaaacactttatttgggtatcactcaattttactgtagcagcctccatcccttcttagttataccaccgttaccaccacttttgtccttgctcctcccttgatgttttgtct

SEQ ID NO: 809001 - DNA, 550 bp, Homo sapiens
ttaattaaaattttaaaaaattagaccattgtgttagattttttaaaatgttggctaaaacagaaaaggttgatttcagtgcagttgggctgaaactatacttaaatagattaaagtataatctggcttttaaaaaaaacacatctgactgggatgaagtagktgtggtcttaactgaagcaggtgaatggaccatattcgcctttaagagccttctgactcccaggttttctgatttttaaaaacttcctatttagtcatatgtttttacttcactttatggtttaagtgagccaaccaacaaaagttactcataaaagatagtattttacttgtaacaattgcagaaaaagtgaaaagcttgacattacaggtagaaaggaagtcagtctctgtcccctgtgcgtttccgagactgtgtttctatttatttgccctttgtctgtttcccctgaccagcgtgcgtttctttctggaggcgcagggacctcggcttatttttctctgtctttgcattgcttgacagagggcctgacccagggtaggcact

SEQ ID NO: 809002 - DNA, 524 bp, Homo sapiens
tccccagcacactataggcaattagtgaacatttgttaaaagatgcatcctgggcaggaatatttcctcaagctcagtgcctctgcatctctctctgtcaaacaagaagtttgacacacagagagaggccagcatgacgtaatgataataaggaaaaatgagaaagcagtttttattcccttgtcccttaggtctgcggcctcacactcggtcatctggaattcttagctaatggaaggcataggcccctggggacctgtctattgtctcrgtcccacctcctgtgtgccagattggatctctgagtgctgagatcatagcaggatcagcttcatgagaggaaagatcccttcttgtgagaggctgtagctatgaccaaatgtttggctgacatggtgaagagatacagctttcctagggtgctggaagcaggctcttggggtatagaagggagaaagggaggtaaagaactgggtaagctgcactaggcgttcacaaacagcaggagaggtgggaattggaag

SEQ ID NO: 809003 - DNA, 507 bp, Homo sapiens
actgtttcctgtagtaaaagagtcttaattaaataaagatggaattttggggaatgtacacaggagttcttattattcaaatgttcattatcaaagtctacacagtatgttcctgcagagagcaaaagtttccatgacatataaagtgtttattaatgaactagccatagtaaaattacagcccatttaaacatycctctttgactaacactagtgtctatcccttgccattgcagcaatgatcttttcttcctgtaaatatccaacatcgtgcagtgaaaatttgcaaagtgaaactgaaaattttgtaaaagatgcagaagtataaagaagataaaagatgttggagaactgctcaaataacttacaaagtcaatgacaaatgatccctcggcaaagttagataagttaacaattgaagaagagaaaatgaacaaggatgatgacagcactgacatttcaaaagaggactatttgaataataaaagcttaagaaaggtccttgga

SEQ ID NO: 809004 - DNA, 601 bp, Homo sapiens
tagaaggcagtgcttctaacaagctcccgggggatgttgatgctgctggtcagcacgcttcaagtggcaaagattttaaaccaaagtgtggtccttacaccagaagcctcagtatttcctgcttgttagaaatgcaggctctcaggcgccaccccagaatctgcattttaatgcgtatttgacttggggaagcactgctcaaatcctgagctcccctgcaggtgctggggttgaattacaaatatgccaaagtattgcctcccctcttaggaacttgcacagtgaaccccggggcccagctgtaagcagcctcattgactccatgtgtgtacaaatataagtttcagtgtcggtagccatggagaaaaggttgggaagtcctgctctaatagtcttactgccaccttctctcatggccccarcaagcctttgctcaccctgtttctcccacccgggcagcctttgacgggcctcacccgattcctgaaggtccagctcatgtcctaattcctcctccatggaaccattcccattttcacatggccatttcaaccccatggacttttccttcacataaacacataatggcacctcctatgtg

SEQ ID NO: 809005 - DNA, 519 bp, Homo sapiens
tagtcccagctacttgggaggctgaggcacgagaatagctggaacctgggaggcggaggttgcagtgtgctgagatcactccactgcactccagcctaggcaacagagtgagtagtctcaaaaaaattattattgatatttttattcaaatttttcttttgagacggtcttttagtagagatggggtttcgccatgttggccaggttggtctcraactcctgacctcaagtgatccgcccagccaatatttaatttttaattgacaaaatttgtctatatttatggtacacaacataatattttgaaatatgtatacattgtgggatggctaaatcaagctaatcaacatatgcttgcctaacatacttatcttttgtgtgtgtgcgtggtgagaacacttaaaatctctcttagtaattttcttttttttttgagacagagtctcacgctgtcacccaggctggagtgcagtggtgccttctcggctcactgcaacctccacctcccgggttcaagcg

SEQ ID NO: 809006 - DNA, 592 bp, Homo sapiens
aaacaataactttaagcaagtctatgtagtctatgtaggccaggcacagtgtctcatgcctgtgatcccactgctttggaaggatcaagtttgatgctgcagtgagctatgatcacgccactgctctccagcctgggcaacatagtgagaccccatctctacaaataataaacttgttttttrttattgttatacttaacaaatagagcattcaaagcaaacagtgctaaccaacagaagcaagaacaagcagaatgctgcaggggccctgctcctgtgtagtcacagaccagtagcatcttcatcacctaaaaagaaatgtgttggaaatgcagagtcccaggccccacctcagctctattaaattagaatgtgtactttaagaggtcccaacttatttcatttgcacattaaattttgaaaagcagtaatgtgaaacagaacacattaggggactggaaagcttgctggtttttgttttgttttgttttctaatatacattctgaatcattttctgtaccctagtggagagccaggctgttttctttaccccgggcctctcaaacctcagacatcctgggaagcaacccc

SEQ ID NO: 809007 - DNA, 573 bp, Homo sapiens
ttgtttatggaaatagttactaggaggcctgaatttggatcccttgtctgattgccatcaatggcctttggccacaatgagtggtcttccttcatgaaacttttaaataattcatggaaccaactatgaaaaagtttatcgtttaaaagtctgggcctggctgggcgtggtggctcacgctgtaatcccagcactttgggaggccaaggcgggcggatcacgaggtcaggagatcgagaccatcctggctaacacagtgaaaccccgtctctactaaaaatacaaaaaattagccgggtgtggtggtgggtgcctatagtcccagcgactcaggaggctgaggcaggagaacggcrtgaaccctggaggcagagcttgcagtgagcggagatcacgccactgcactccagcctgggcaacagagcgagactccatctcaaaaaaaaaaaaaaaaaaaaaaaaagtctgggcctggaaatttagacataattacacagatgcttgtgctatggtagaaagtgcattatctaactcagaaagtctagatgcttccactaacttgtgtaattctga

SEQ ID NO: 809008 - DNA, 627 bp, Homo sapiens
cgtcagctcctccactgccaggttctgttgctctgcctgggagcagctccagctaatgcaccattagccactgcctctcagctttggtcacttggaaaaaccttttccctttctgtcccttaaaaatggacccagtgcataatataagatcaactctcaccactgggttacattaagtaagaccccagtcagggaacagccccaaaaagagagtcgtgatgggagcttcttccagtccagttccaggagcacaggcagtcaggaagtgcagagataactgagtaacggtgtagggtaagcaccgcaaacccagacatgctctcccatgctggagtgggcagggggatattaggagcctgtctgggggaggtmgtatgacaacagaaattatccaagggaaaaaaaagaggtgggagggagcctcatgaaccagggtcgggggcatgaaacggcagagcctgctggaacggggccaggtgtggtttagtactcatgtttgcttgaagttcaataacagagccaggaacagactgggcattgtgaagacccaagaccacaaaggagagacctttctccatcttccatgttaaaagggagaaataatgagtgctttaaagaaggaacaga

SEQ ID NO: 809009 - DNA, 654 bp, Homo sapiens
gttccatttcaatgcctcaataaccacatgtgactaatggctactatgttggactgtatagctctagagcctatggaccataatagcaactttggtttttactgtcagtgaagtggaatgacattagagatttttgcatagaagaatggcatcatcactgcagctgctgtgttaagaatagagtaggaggcaagtatggaagcagaatgtccagtgaggaggctagtacaataattgaggaagaaattatggttgcttaaaccaggggatgtagcaatggagttggtgaaagtgatctgtttctggatatatttctaagcatagctggcaggatttcctgatggattggttgtggaatggtaaaagtcaagaatgactamaatttctcccaagccctgacttttgaaataagaatcttttaaaattgaggtataatttatataccataaaatacatcttttaaaggtatacaatttggtggttttagtatactcatgaggttgtacaacaatcactaagacctaattccaaaacatttttccactccaaaaagaaacctcttacccattagcagtcattcccagtattcccttcctccaacccctgaaaatcacacatctactttatatctctatggattttcccattctggac

SEQ ID NO: 809010 - DNA, 654 bp, Homo sapiens
gttccatttcaatgcctcaataaccacatgtgactaatggctactatgttggactgtatagctctagagcctatggaccataatagcaactttggtttttactgtcagtgaagtggaatgacattagagatttttgcatagaagaatggcatcatcactgcagctgctgtgttaagaatagagtaggaggcaagtatggaagcagaatgtccagtgaggaggctagtacaataattgaggaagaaattatggttgcttaaaccaggggatgtagcaatggagttggtgaaagtgatctgtttctggatatatttctaagcatagctggcaggatttcctgatggattggttgtggaatggtaaaagtcaagaatgactacaatttctcccaagccctgacttttgaaataagaatcttttaaaattgaggtrtaatttatataccataaaatacatcttttaaaggtatacaatttggtggttttagtatactcatgaggttgtacaacaatcactaagacctaattccaaaacatttttccactccaaaaagaaacctcttacccattagcagtcattcccagtattcccttcctccaacccctgaaaatcacacatctactttatatctctatggattttcccattctggac

SEQ ID NO: 809011 - DNA, 596 bp, Homo sapiens
gccttccttggttttgtcaggattttgtttgtttgttttcttgtttgtttgtttaacacaagtgacctcattttgattctgaaagctttcacatttcccctttttgatcaagatctttctccaaaagcaccagtgatcaatcatcctgtagttaggttttcattgtccctggatgctgggatggacctatcccagactgttggtctggttcctcatgggaaggagtgaatggtgcctaggagacrtgtcaaaatccctttaaccacatttgagcaacaagggaggtttgaagggagtagctctcaggctacatctaccccaattcattattaggttcaattttgtctgttccatagtcttttatcatcatctcaagtgttgggcctgcattattttctcaggagttatatgtctgcaaaaatttaacaagtaacagatacaaagttttaaaaataaaaatacaaagtaaaattaattgtaatatgccaatcccagtttgcataacagttttcagccatgaaccttggcttaaaaagacaaccaattaaataaatcatacaaccattatcctgccaaatgaaaaaggtagaaattaa

SEQ ID NO: 809012 - DNA, 558 bp, Homo sapiens
aggttcaattttgtctgttccatagtcttttatcatcatctcaagtgttgggcctgcattattttctcaggagttatawgtctgcaaaaatttaacaagtaacagatacaaagttttaaaaataaaaatacaaagtaaaattaattgtaatatgccaatcccagtttgcataacagttttcagccatgaaccttggcttaaaaagacaaccaattaaataaatcatacaaccattatcctgccaaatgaaaaaggtagaaattaagaggcgtaagactctcattatgatatggaatactgttctaatatcttggtaaaagctgtctacagcataaaaacatcaccttcttgtactggtttgcagttcgaatgtctttgttgatggcatcagacagtttgatgaactttgtatgacctatacatcaaccctgagacttgttccttaaaatttacctattaataacttcagtgtatagggcttccagaacaaagcatttcttatttttggtaattctatggaagaaaattgaactggaagaaactagaagaatttaggat

SEQ ID NO: 809013 - DNA, 558 bp, Homo sapiens
aggttcaattttgtctgttccatagtcttttatcatcatctcaagtgttgggcctgcattattttctcaggagttatatgtctgcaaaaatttaacaagtaacagatacaaagttttaaaaataaaaatacaaagtaaaattaattgtaatatgccaatcccagtttgcataacagttttcagccatgaaccttggcttaaaaagrcaaccaattaaataaatcatacaaccattatcctgccaaatgaaaaaggtagaaattaagaggcgtaagactctcattatgatatggaatactgttctaatatcttggtaaaagctgtctacagcataaaaacatcaccttcttgtactggtttgcagttcgaatgtctttgttgatggcatcagacagtttgatgaactttgtatgacctatacatcaaccctgagacttgttccttaaaatttacctattaataacttcagtgtatagggcttccagaacaaagcatttcttatttttggtaattctatggaagaaaattgaactggaagaaactagaagaatttaggat

SEQ ID NO: 809014 - DNA, 558 bp, Homo sapiens
aggttcaattttgtctgttccatagtcttttatcatcatctcaagtgttgggcctgcattattttctcaggagttatatgtctgcaaaaatttaacaagtaacagatacaaagttttaaaaataaaaatacaaagtaaaattaattgtaatatgccaatcccagtttgcataacagttttcagccatgaaccttggcttaaaaagacaaccaattaaataaatcatacaaccattatcctgccaaatgaaaaaggtagaaattaagaggcgtaagactctcattatgatatggaatactgttctaatatcttggtaaaagcygtctacagcataaaaacatcaccttcttgtactggtttgcagttcgaatgtctttgttgatggcatcagacagtttgatgaactttgtatgacctatacatcaaccctgagacttgttccttaaaatttacctattaataacttcagtgtatagggcttccagaacaaagcatttcttatttttggtaattctatggaagaaaattgaactggaagaaactagaagaatttaggat

SEQ ID NO: 809015 - DNA, 564 bp, Homo sapiens
atcatctacctctcatttctatcaaaccaaatggagtcaagctcgccacagccaggagcctgctcttcccgcttatgtgactgtggtgaaatcgtgagcatgagggctcatttgcttttcaggctagaactatcagtgacggagcaaaggctgaagccacaactaagcaggcagtgtatcttcaatataggtcattagatgtatgattagagttaakaatcacctaggatttaaattctgctaacctatgtgggtcacaaggagtttaacttgagcgcttaatgcctttaagatcataatcaggagaactaaaatgagctcttgagtttcttggataatttgtattcactctttcctccccctggacttggttctttagtgaaaggaaattccgaagtttaaagacaacgacatctggagccgcacattccgttcactggcaggtgctgcacacacgcccctgcgacctccgtgaccctctgtccccgctctttcccctctgcaggctgctctcagtttccctccgtgcctctccttgaagctgggagtctgccagttatgcga

SEQ ID NO: 809016 - DNA, 530 bp, Homo sapiens
ttttgaaatgtaaagcactataatatactataaattgttatagacatgtagcacagtataaaactcaagagttggtgaatgcaagccaactttgccatagttactcactctttaaaaagagctttcctaggaagatttggatrcaaatatgactaaatgttggcatgttgaatgtagtggtggacatggaagtacttgttatttttttcttggtactcttttacatgtttgaaatatgtcatcattttttttttgaaaaacctgaccaatgctgcaaacagaaccattaattcaatttctagaggtttccactcttgctttctctcgtcgtcttctcttttatcatctcaggccaagtgtcaaggctgtcatctttatcctgatctattctgaaattgcttttctggaagtactaagctctacatcctgaatggatacatggaggccgtgaagtaagcaggcagaatcgcctatttgtgggggcaaatggaaggaaagtggactgagttcagagaggactttctcaagag

SEQ ID NO: 809017 - DNA, 549 bp, Homo sapiens
cctccacctcccaggctcaaacgactctcctgcctcagcctcctgagtagctgggattacaggcacccaccaccacgcctggctaatttttttttgtatttttagcagagatggggtttcgctatgttgtccaggctggtcttgaactcctgacctccagtaatcctcccgcctcggcctcccaaagtgctgggattacgtgtgtgagccacctcgcccagccaggtcagaatatatgttaattcccattgaggctgtgtccgtgactcatggattcctgaaagatgggttccttaatttccaaatgtttggatgttttcctgtcaactttctgttattgtcagtttaattacattacarccggtataaagtcacactttttatgaattctgttttttaaagtttgttaaggtttgttttataatccaggatatggcctctcaggaatgcaccaggtgcacctgaaaagcacatgtgtttgctcttgctgggcggcacgtcccgtaagtgctggttagggccacttagccgatggtgttatcgggcctc

SEQ ID NO: 809018 - DNA, 526 bp, Homo sapiens
aacaacaaaaacaaaaaataaaaaacaacttttatctgacatattcaaccattattattttcctatatttgtggctgaactttatcttattcaatacacatgacttaaattacctgtttctaatggttgtaggacttcattatmgctgcactgtcacatcactacatgtgtgacaattggtctcctctgatggtattggcatctcaattcacattctccagatgcattaaaaaacattcgtgatccaagaactgttccatctaggtgctgagggtcaggcttaacttgacttccttcctagtatcttacctgtcagtagactttgatggtacgtattaataatatatcctgataccaaattcaagaccttttttttttttattttgagatggagtttcgctcttgttgcccaggctggagtggaatggcgctatctcagctcactgcagtctccacctcccgggttcaagtgattctcctgcctgagactcccgagtagctgggattacaggcatgtgccaccatg

SEQ ID NO: 809019 - DNA, 526 bp, Homo sapiens
aacaacaaaaacaaaaaataaaaaacaacttttatctgacatattcaaccattattattttcctatatttgtggctgaactttatcttattcaatacacatgacttaaattacctgtttctaatggttgtaggacttcattatcgctgcactgtcacatcactacatgtgtgacaattggtctcctctgatggtattggcatctcaattcacattctccagatgcattaaaaaacattcgtgatccaagaactgttccatctaggtgctgagggtcaggcttaacttgacttccttcctagtatcttacctgtcagtagactttgatggtacgtattaataatatatcctgataccraattcaagaccttttttttttttattttgagatggagtttcgctcttgttgcccaggctggagtggaatggcgctatctcagctcactgcagtctccacctcccgggttcaagtgattctcctgcctgagactcccgagtagctgggattacaggcatgtgccaccatg

SEQ ID NO: 809020 - DNA, 605 bp, Homo sapiens
agttggccctgtggaacctgtggatatgaccattcgcatcccaagaatactgtattttccacctattcttggtttcagttgtggaacccactgatatggagggccaactgtatatattgaaaacaatttgcatataagtagacccacactggttcagacccctgttgttcagggtcagctctatatctttccaactttgtgcattgattgaaaaaccaacaacagtatgatattagggctataacagatctgttaggccaagcccacatgcccctgaacagaacattctgcacattgggccaacttccaactgccggcacctgaagttatttgcattatcagctatcttygtccaccagagcctgctctgcctgcattttgggaagacctaaagtgccaaggaattaacacaccctgcaagtatgctcaattgaaggcaatgaatagaaaaagacccctgactccttcacccctggatttcagggaggtaaatccaagatgtatgctaaggaggtgacacttaatgtcagacacacacacctgttatgagagtttcctgattgaataagaaagaggcattccaggcagaagtacccgaacataca

SEQ ID NO: 809021 - DNA, 605 bp, Homo sapiens
agttggccctgtggaacctgtggatatgaccattcgcatcccaagaatactgtattttccacctattcttggtttcagttgtggaacccactgatatggagggccaactgtatatattgaaaacaatttgcatataagtagacccacactggttcagacccctgttgttcagggtcagctctatatctttccaactttgtgcattgattgaaaaaccaacaacagtatgatattagggctataacagatctgttaggccaagcccacatgcccctgaacagaacattctgcacattgggccaacttccaactgccggcacctgaagttatttgcattatcagctatctttgtccaccagagcctgctctgcctgcattttgggaagacctaaagtgccaaggaattaacacaccctgcaagtatgctcaattgaaggcaatgaatagaaaaagaccccygactccttcacccctggatttcagggaggtaaatccaagatgtatgctaaggaggtgacacttaatgtcagacacacacacctgttatgagagtttcctgattgaataagaaagaggcattccaggcagaagtacccgaacataca

SEQ ID NO: 809022 - DNA, 605 bp, Homo sapiens
gcagtcataaagaagaacaagatcatgtcttttgctggaacatggatggagctggaggcgattatccttagcaaactgacacaggaacagaaaaccaaataccacatgttctcacttgtaagtgcgagctaaatgataagaaatcatgaacarcataggttggaaacaagacactggggtctacttgatgggggagggtgggaggagggagaggagcagaaaggataactattgggtactgggcttagtacctgcgtgatgaaaaaatctgtacgacaaggaccccgtgatgcaagtttcccttcacatgtaccccaaacctaaaataacagttaaaaaaaagtttacttgagccaagttgagaggacagccacctggaagactcagacccaggtcaccttggatatgagctctgttaggcctttgacagaagcaggttttccaaagcaataagagggacagggagtgggctgatacagctgtttgtcaggaattcccattggttagacaaataagattgattagtgattgactatacattggtgaactgtggggtatggagtatggtgtccagtgagtggccttgcttggttagttgatagctg

SEQ ID NO: 809023 - DNA, 605 bp, Homo sapiens
gcagtcataaagaagaacaagatcatgtcttttgctggaacatggatggagctggaggcgattatccttagcaaactgacacaggaacagaaaaccaaataccacatgttctcacttgtaagtgcgagctaaatgataagaaatcatgaacaacataggttggaaacaagacactggggtctacttratgggggagggtgggaggagggagaggagcagaaaggataactattgggtactgggcttagtacctgcgtgatgaaaaaatctgtacgacaaggaccccgtgatgcaagtttcccttcacatgtaccccaaacctaaaataacagttaaaaaaaagtttacttgagccaagttgagaggacagccacctggaagactcagacccaggtcaccttggatatgagctctgttaggcctttgacagaagcaggttttccaaagcaataagagggacagggagtgggctgatacagctgtttgtcaggaattcccattggttagacaaataagattgattagtgattgactatacattggtgaactgtggggtatggagtatggtgtccagtgagtggccttgcttggttagttgatagctg

SEQ ID NO: 809024 - DNA, 578 bp, Homo sapiens
aacccccgaagctttgtacattcgtgaattctgctggtcaagaattctcaggaggcagagtgggcaggcccctgctccgtgatgcttgtggcctcggctggaaagagctgagtgtcgaggtcactggggcggccagagcaggccccgggcttcctcactcccatgcctgcccggggccacccaggggtgaggcgagctgcgaccgtccccgtgcacctgcacgcagcctgtctgtgtggccaggcttctttatacccgacacctcagagcggtcacctcagggctctgagggggagtgttcctgcgctcagggtgggacttttatgatgggacctttatgggagccacccagggtcccttctgaygtacgctgttggctatagcagtcacagccctcccagattcagaaggatggaacacaggccccatctctccatgaaaagagggtccaataatttgtgaccttgtttcaaaattgccacagagatggccctcccttttcactgctcagctcagccgtgctgtgacccagtgcttgggctcagcttgtcctagagcaccatccctcccacccctgc

SEQ ID NO: 809025 - DNA, 561 bp, Homo sapiens
tgatccagcaatcccactactgggtatctacccagaggaaaagaagttattatatgaaaaagacacttgcacacacatgtttacagcagcacaattcacaattgcaaaaatatacaccagtctaaatgcccatcaaccaacaagtggataaagaaaatgtggtatatatttaccayggaataccacttagccataaaaaggaacaaaataatggcatttttggtaacctggatggagttggagaccattattctaagtgaactaactcaggaatgggaaaccaaacattatatgttctcacttataagcaggaactaagctataaagacgcaaaggaataaaatgatataatggactttggggacttaggggaaagggtgggagaggctgaaggataacagactacacactgggtacagtgtacattgcttggatgatgggtgcaccttaatgtcagaaatcatgactaaataacttttccatgcaaccaaataccacctgttcccccaaaactattaaaataaaaaaatttttaaagaatattatcttgtgataatatta

SEQ ID NO: 809026 - DNA, 642 bp, Homo sapiens
gaacaagcatgagcttttggagtcagagtaattaggctcaaatcccagttatgacagttattagctatgtgactttggataagtaacttaacttctcttaacctgggtttcctcacctccaaaatgaatatgaccacattgctgtgggaattaagggttgaagctttgcaatcttggtaactggcacatagcaggtactcagtaaaactagtttcacaaaaatggtaatgataatgtcatctatacaaataggatctkaactgaactaataaaatgctttaaatcacttgaacaccaattctatagcatactgaaacttttaaaatacattcacatgtattaccacttaagacttattgaagaacacaggatgaatctgtcacaaagaaaggattgtgtttgtttgtttgtttgttttagagacaaggtctctctcacagtaaccttcaactcctggacttaagcaatcctcctacctctgcttctcgtgtgattaatactatgggtgcgtggcaccacacctggctagttattttaatttttgttgcagagacagggtctcgctacattgcccaggatggtcttgaactcctggcctcaagtgattgtgccctctaggcctctcaaaatgctgagattata

SEQ ID NO: 809027 - DNA, 585 bp, Homo sapiens
ttgcttgctagtatcttaattttaattgttctcccatcattatgtgttctaatacataatagatgaaattaataatctctccctttctgtcaaaactatagggcatcaatgatattgaagctacaaatatacagattatgaagacctaagttttgactcctacataattcccacaacagacttaaaatcaagagagctgtggttacttgaagttgacagttgagtagttctccctatagaaatattaattcatatgttaatttcatcagaagatgtcctatatttgtgagccataccatcacatcaataggcctaaaaatcgttrcaatcccagggcatttaaaccaagcaaccttaacatctatacgaccagacctttactacagacaatgcccagaaatctgcagatccaaccatggctttatacccattgttcttgaactagtccccctaaagcacttcgaaaattggtcagcctctgtatcataatatcactgtgaagctaattagcattaaccttttatgttaaagaccgagagccaggatttctccacattaaaatgtcccaactaaacacatctacat

SEQ ID NO: 809028 - DNA, 612 bp, Homo sapiens
ccaataaaggacagatgattaagaaaggcagcttacttacctgtaaaatgagctcaataagatctattctgcataaatcacagagctgtttctataagtcaaatggaagtaaagttctaaaagataaataattcttttcaaggccgggcgcggtggctcatgcttgtaatcccagcactttgggaggccgagatgggtggatcacaaggtcaggagatcgagaccatcctagctaacacggtgaaaccccgtctctactaaaaatacaaaaaattagccaggcgtggtggtgagtgcctgtagtcccagctacttgggaggctgaggcaggagaatggcatgaatccaggaggtggagcttgcagtgagccgagatcgcgccactgcactccagcctgggcgacagagcgagactccatctcaaaaaaaaataataataataattctaytcaaggttaaatatgttttgtacaacatagatatgccacagtacttattcagtatgggaaaaaataagttaaagtcatcttccgatgctctttagtggctatgtgtttgataaagatggctcctcatgcaagggaggtcaatgccatcactaccagggtgtgt

SEQ ID NO: 809029 - DNA, 642 bp, Homo sapiens
gcattatctccatttgtaactgaagaaaagttcagctgctcactgcttgcaaaggcaaatgaacaaggatgagaagcagtgaaaggaaagtgacttcattccaaaagcccatatctggggatgaggtcaggctagtgccttagagaaaccatttcagattttgaactgagggcaggtgtttcaaaagggaaacttgatatgaaaggcatgcaagagtggtgaagaagtgccagtctacatgacttgtccaatgaccatcttgagttattgccccatcgggtgtatggactggggacatctccaggatagccaggttgaaaattcaatgtagccttgaggyaattctgtagcttcctggatggtttcaagatttcttctactgggggaacacactcccaacatttcaatggaggttctttctattttccataaatgttggccagctgagaaataaagagagacagtacaaagagaggaattttacagctgggctgctgggggtgacatcacatatcagcaggactgtgatgcccacctgaatctcagatcagcaagtttttattcagggttttaaaaaggggagggtgtgtaagaacagggagtaggtacaaagatcacatgcttcaaagggcaaaaagcaga

SEQ ID NO: 809030 - DNA, 642 bp, Homo sapiens
gcattatctccatttgtaactgaagaaaagttcagctgctcactgcttgcaaaggcaaatgaacaaggatgagaagcagtgaaaggaaagtgacttcattccaaaagcccatatctggggatgaggtcaggctagtgccttagagaaaccatttcagattttgaactgagggcaggtgtttcaaaagggaaacttgatatgaaaggcatgcaagagtggtgaagaagtgccagtctacatgacttgtccaatgaccatcttgagttattgccccatcgggtgtatggactggggacatctccaggatagccaggttgaaaattcaatgtagccttgaggcaattctgtagcttcctggatggtttcaagatttcttctactgggggaacacactcccaayatttcaatggaggttctttctattttccataaatgttggccagctgagaaataaagagagacagtacaaagagaggaattttacagctgggctgctgggggtgacatcacatatcagcaggactgtgatgcccacctgaatctcagatcagcaagtttttattcagggttttaaaaaggggagggtgtgtaagaacagggagtaggtacaaagatcacatgcttcaaagggcaaaaagcaga

SEQ ID NO: 809031 - DNA, 642 bp, Homo sapiens
gcattatctccatttgtaactgaagaaaagttcagctgctcactgcttgcaaaggcaaatgaacaaggatgagaagcagtgaaaggaaagtgacttcattccaaaagcccatatctggggatgaggtcaggctagtgccttagagaaaccatttcagattttgaactgagggcaggtgtttcaaaagggaaacttgatatgaaaggcatgcaagagtggtgaagaagtgccagtctacatgacttgtccaatgaccatcttgagttattgccccatcgggtgtatggactggggacatctccaggatagccaggttgaaaattcaatgtagccttgaggcaattctgtagcttcctggatggtttcaagatttcttctactgggggaacacactcccaacatttcaatggaggttctttctattttccataaatgttggccagctgagaaataaagagagacagtacaaagagaggaattttacagctgggytgctgggggtgacatcacatatcagcaggactgtgatgcccacctgaatctcagatcagcaagtttttattcagggttttaaaaaggggagggtgtgtaagaacagggagtaggtacaaagatcacatgcttcaaagggcaaaaagcaga

SEQ ID NO: 809032 - DNA, 650 bp, Homo sapiens
aaaaactcaagggggtgccaaaaaactcagtaaccaagatcaataatgtttcaatgcaatcttttttagatcagtggaaaaaaatccatgacaaacaaaaaatataaagtgtttaaataggacaagtgatgttgcgctgtgctaagccacactggagccaaggcagaaagaaaaaaatcagtaatactgatcctgacattatttacaatttttatatgttgtttttcatggatatttttgcatttagattgtttcataacagctttactgagggacaatgcacatatcatataactcacctatttaaagtgtacagttcatgggcccggcgcggtggcccacgcctgtaatcccaacactacgggaggccgaggcaggcgatcacctgaggtcaggagttcgtgaccagcctggccaacatggtgaaacyctgtctctactaaaaatacacaaattagcagggtgcagtggcagatgcctgtaatcccagctgctcaagaggctgaggcaggagaatcgcttgaacttgggaggcagaggctgcagtgagccaaaattgcgccactgcgctccagcctggacaacagagcgaaactccatctcaaaaaaaataaaaaaataaagtgtacagttcaatggtctttagtata

SEQ ID NO: 809033 - DNA, 650 bp, Homo sapiens
aaaaactcaagggggtgccaaaaaactcagtaaccaagatcaataatgtttcaatgcaatcttttttagatcagtggaaaaaaatccatgacaaacaaaaaatataaagtgtttaaataggacaagtgatgttgcgctgtgctaagccacactggagccaaggcagaaagaaaaaaatcagtaatactgatcctgacattatttacaatttttatatgttgtttttcatggatatttttgcatttagattgtttcataacagctttactgagggacaatgcacatatcatataactcacctatttaaagtgtacagttcatgggcccggcgcggtggcccacgcctgtaatcccaacactacgggaggccgaggcaggcgatcacctgaggtcaggagttcgtgaccagcctggccaacatggtgaaaccctgtctctactaaaaatacacaaattagcagggtgcagtggcagatgcctgtaatcccagctgctcargaggctgaggcaggagaatcgcttgaacttgggaggcagaggctgcagtgagccaaaattgcgccactgcgctccagcctggacaacagagcgaaactccatctcaaaaaaaataaaaaaataaagtgtacagttcaatggtctttagtata

SEQ ID NO: 809034 - DNA, 611 bp, Homo sapiens
aagatcttaaagtttctttcaaagttaaatatgcacataccttaaaactcagcaatatcacgcctggatagttacccaagataaatgaaaacctgtgttcacatcaagacttatatatgaatgttcatagcagcattattcataatagctccaaactgtaaataatctaaacgtccattaactgatgaatggagaaataaagtacagtatatccatactgtggaataccactcagcaataaaacgaagagacatattaagacctactggctgggcacggtggctcatgcctataatcccagcactttgggaggccaaggtgggtggatcacgaggtcaggagttggagaccagcctgaccaacatggtgaaaccccgtctgtactaaaaatacaaaaattagccgggcatggtggtgygtgcctgtaatcccagctactcaggaggctgaggcgggagaattgcttgaacacaggaggcggaggttgctgtagtgagccgagatcgcaccactgcactccagcctgggcaacagggcgagactctgtctcaaaaaaaaaaaaaaaaaaaaaaaaaagacatactgttatatacaacgtggatgaatctcca

SEQ ID NO: 809035 - DNA, 611 bp, Homo sapiens
aagatcttaaagtttctttcaaagttaaatatgcacataccttaaaactcagcaatatcacgcctggatagttacccaagataaatgaaaacctgtgttcacatcaagacttatatatgaatgttcatagcagcattattcataatagctccaaactgtaaataatctaaacgtccattaactgatgaatggagaaataaagtacagtatatccatactgtggaataccactcagcaataaaacgaagagacatattaagacctactggctgggcacggtggctcatgcctataatcccagcactttgggaggccaaggtgggtggatcacgaggtcaggagttggagaccagcctgaccaacatggtgaaaccccgtctgtactaaaaatacaaaaattagccgggcatggtggtgtgtgcctgtaatcccagctactcaggaggctgaggcrggagaattgcttgaacacaggaggcggaggttgctgtagtgagccgagatcgcaccactgcactccagcctgggcaacagggcgagactctgtctcaaaaaaaaaaaaaaaaaaaaaaaaaagacatactgttatatacaacgtggatgaatctcca

SEQ ID NO: 809036 - DNA, 582 bp, Homo sapiens
aatgctgattactgttaatgacggggtaagttaataaaggcaagatgcctgtttccgggcaaatccgccccagtgcgatggaacctgcagctgatctgcttaggagggtggcttttcttccagatggccgtggcctttgtgtcagggaagggcttttttttccatgcatggtgcactctggttgtgatgcagattagaaattcattttcatttgccactcttaaaaaaaataaacattctgggcgcatgaaagggagcttttgaaccccaagagtgtgctgtgtgtttgattgcgtgcggcgggaccctctcctagatcattagcaagtgcgcctggctctgcggctttattcgggcttcagccctggcgtcattccgacagctctgttcttaaagatgaactcccatgcacccagtaacttgctgtagagaccaraggggaaaacttgatgatatggatttacaacaattattttactaggtttgtgtttctcctgcactatattcttctttcaaagagtcagaagggagagattgatgcctatttgccattgtttctttaaagttgtcattgctggtgta

SEQ ID NO: 809037 - DNA, 617 bp, Homo sapiens
atcacggagtcttcatcttggtgatgggccacaatttatggggggagccttacaagaggagagttagttggatgatccaccattctcaccttttatagcttgtctggaggcaaaacagatattcattacaaccctcctgggccccccatcctcagctggctggcacttccactggttgtttcctaatggggtgacccagcccgtcatccttgaggagtctaagctcctggttaccatggctgtggttgctataatgacctggtcacagttaaccctgggcatgggagtgacctagagatgccctgcgttccacacatcctccccccggctccattgtaacagggacagagcctcctcctactgactggggccaatcatgcctgccagtatggtaactcctttctttgcctgatggtctgccaggatgaggggaccawcctcaaatgacaaggtggttgccatcgatttcggtttcgtgggactctgtccctggtagaagtgtctcccttcccttctaggaattaggacttctagaccaccgaacctaaagttgtggcagcaggaagcacaacttcctccaagtaggtccctgggaatggtggggagcaggaccaccc

SEQ ID NO: 809038 - DNA, 597 bp, Homo sapiens
atctctctttagaatatggggccacttgtttcacatctcagctttggtcatgaggagaaattctcaaacagaaaaatttcagcttaactttctgctattcactcattcattcatattattcagcaaacatttatccaatgtgtactatatgcccaggactatgccaaggtgcacccagtaagaagcaaaactgacacagactctgccctttcctagatatgctgggtgaatcyaccaactgctggctgcttgaaacctttcaagaacatctaaatttgatgaactcaacctcctatcaactggaactgttactctgtcacttggtgcatgactacaaagatagttctgacttcatgtttataataatgatccccaatgctgcaagatcctgaagtgcctttgagtcatcaccaataacttactcatcagaattgctttcgtgttgagtagattttgctgatatctgattgttcagcaagtacaaacttaattaagcttctattttagtactagatacatgctctaagatcaagacagaattccctataaacagaatatttgctagatcatatcccattatttgagcaaactggatcc

SEQ ID NO: 809039 - DNA, 597 bp, Homo sapiens
atctctctttagaatatggggccacttgtttcacatctcagctttggtcatgaggagaaattctcaaacagaaaaatttcagcttaactttctgctattcactcattcattcatattattcagcaaacatttatccaatgtgtactatatgcccaggactatgccaaggtgcacccagtaagaagcaaaactgacacagactctgccctttcctagatatgctgggtgaatctaccaactgctggctgcttgaaacctttcaagaacatctaaatttgatgaactcaacctcctatcaactggaactgttactctgtcacttggtgcatgactacaaagatagttctgacttcatgtttataataatgatccccaatgctgcaagatcctgaagtgcctttgmgtcatcaccaataacttactcatcagaattgctttcgtgttgagtagattttgctgatatctgattgttcagcaagtacaaacttaattaagcttctattttagtactagatacatgctctaagatcaagacagaattccctataaacagaatatttgctagatcatatcccattatttgagcaaactggatcc

SEQ ID NO: 809040 - DNA, 554 bp, Homo sapiens
agaaatcagcaagtaaaacttgggatgctagaatggtactgtactttcagcaagtggcaaaggaaacacaggaaagaatccaacagaagcaggatggggattttctgggcagactagtaggctgggtgagggagaataacccagtgttgcactctatgtataatccacattttgtttgcccattttgctcctgaaggacctgtaggagacaggagctaggccagaactgttctcttagccccaccaactaagggttagtagcatcagttcctaagtgaagaagaactggcaaccgataccagaatccatcgaatgtcctttagggttctttrtacataaaaacataaatagtgccaaattctcattagtagctcagttgctctttaaaaaaacactccttttatcttttatgaagtgtaagttcaagagtctttctagatgttgtaatattcggacacctggtttaggaggcctctctctccccccttcatatatgtgaaccataaccaggaagatctgagtatctttaacgtatattagtaaattatatatac

SEQ ID NO: 809041 - DNA, 593 bp, Homo sapiens
actgttggcatatactcagttggtgcaaacgtaattatggtttttgcattgttggaatttgccatttgatattggaatacattcttaaataaatgtggttatgttatacatcattttaatgggcatttcttgctttattttttttgctaatgacttattacttgctgtttattttaagtttattttagactatggaaatgatgttagacaaaaaacaaattcaagcgattttcttattccagttaaaaatgggttgtaaggcagcagagacaactcgcaacatcaacaacgcatttggcctaggaactgctaacaaacatacagtgcagtggtggttcaagaagttttgcaaaggagacragtcttgaagatgaggagcatagtggccagccattggaagttgacaacaaccaattgagagcaatcattgaagccagtccttttacaactacacaagaagctgtggaagaactcaacgtccaccattctatagtcgtttggcatttgaagcaaattggaaaggtgaaacagccaataagtgggtgcctcatgaactgagcaaaaataaaaaaaaattgtcattttgaaatgtt

SEQ ID NO: 809042 - DNA, 518 bp, Homo sapiens
aaaatttgaaaaagcaaaaaccactcatcagctttttctattacacgaaaagcatgttcaagagaggaagttagattttacccttgcattaatttgctattaatgttaaacctaattttttaatgaaaccttatagacaattctattcaatcttaaccagtttgaccataaggtgagatttttacatacctgttataattgatgagttttgctaaagagcagattrgcattttaagaaaaccttgttgcgcttttatttcagagtttaatttacagaaaaaaatacccttctgaattttgttaatagtttcacacagagtttcctttgcaagattaatttttacaatcttttcacaatttgcttaaaccttccactttaatttaatttaagacaattctttatttctagggagaatgtacatgtccatgccttcttataatctttaactaaaaacatcttttactgttttttttactcacctcgtatgcaaatccatgttcagtagtctcaattacat

SEQ ID NO: 809043 - DNA, 518 bp, Homo sapiens
aaaatttgaaaaagcaaaaaccactcatcagctttttctattacacgaaaagcatgttcaagagaggaagttagattttacccttgcattaatttgctattaatgttaaacctaattttttaatgaaaccttatagacaattctattcaatcttaaccagtttgaccataaggtgagatttttacatacctgttataattgatgagttttgctaaagagcagattagcattttaagaaaaccttgttgcrcttttatttcagagtttaatttacagaaaaaaatacccttctgaattttgttaatagtttcacacagagtttcctttgcaagattaatttttacaatcttttcacaatttgcttaaaccttccactttaatttaatttaagacaattctttatttctagggagaatgtacatgtccatgccttcttataatctttaactaaaaacatcttttactgttttttttactcacctcgtatgcaaatccatgttcagtagtctcaattacat

SEQ ID NO: 809044 - DNA, 605 bp, Homo sapiens
ttgactgactttgtagcctcctctctttagatgtgagctacacatttctactcttctggaaccagggaatccatccttaagttgttccctcattctcttggcatctcttaaaagcagcttttaggtgtaagaggaaaacatcttagatggctcagcattcacaatgtcttttaatgtgaaaaggctcctccatgtgtagcatttacaggttaattggattattattgttttcagtccaaatgagaagattcacagagcatctttttttatgcaacttacaaattcctttttcagctaaatcacaattttccataggggaaaactaccttttgactttgayaatgttaaaaatacaaagagaagcctctaaagtctcagcaattcatgcagaccaattatttatctacattgaaaagccatcttaaagtactaggagggctttttatcttgcataaaggcacagattcatgaactctgagtcacaaaaggctttggagctcgtctagttcagaggttggcaaactttttccataaaggaccagattgtaaatattgtaggctttgcaggccaagaggcaatgtcctcaattcttgaagcaactgtt

SEQ ID NO: 809045 - DNA, 585 bp, Homo sapiens
atactagagactcagactgtgaaacacctgctagaagcagaaaactaccaaatagcttcaggctatgcagaaaacccgatgagagttgaacagtgccaggtggactctgactctctgcaacactggatggactttggttcagtaaaaatgcttggtagattctgactctgaaaaatatctgtattctgacaatgaaagactggggatagactcagactctgaaaaatgccccatggcctctgcatctgtgaaacacttgctgaagacagagaaatgccaaatggcctcagattctgtaaaacacctgatggactctgaaaaaatattgactgagactgaaaaactctggatggtctctgcttcttagaggtatctgatggactcagacacagagatgggtgaaacggtctcagcctctttacctggggtacatctgatggargaagaaaaataccaggagaaggctagatctaaaagatatatgatggactttagctctgaaccatgtgggatggacttagattcaggaagatatgggctaggcttagcagctttcaaatttctcatgaatgctaatacattcca

SEQ ID NO: 809046 - DNA, 638 bp, Homo sapiens
aagttctttttaggatacaaagtacacaatctctgtaaactggccagaaccaggtcatggtcagtgcacttcttatcagaagaaagtttctgaaatcaaagccatagttacagctaactcaacatttgtggactggatgcattgtaattgtcttaatattgctcaccttggggccagtgattgtttaactgctagagaaaaaaattcttgtggcagttagagcataatttattttaagtgtaggaatgcatgaatttttccatgcctggcatgccctcaggtcctgttcataatttggtgtctattgccacagaaagtttgttctgtcagtcttttatgatttctatgtcaacattaatgctggtcagttgtatctaaaccaccaaagggaaggagtataataaggcttgttctcatcatggctgggaactaagtttttaaggtgtttctggggtccccttggcccagaggggacaagacttaggatttcatttatagtttacacttcttatgcctgacactttttcctaaatattatacttaatataaattccccaaagagaaagwtaacaggcccagagaagcaggagtaggagaccttaatactgtggatgcattatgaaattcctgtgctctgg

SEQ ID NO: 809047 - DNA, 626 bp, Homo sapiens
tgttctcatcatggctgggaactaagtttttaaggtgtttctggggtccccttggcccagaggggacaagacttaggatttcatttatagtttacacttcttatgcctgacactttttcctaaatattatacttaatataaattccccaaagagaaagttaacaggcccagagaagcaggagtaggagaccttaatactgtggatgcattatgaaattcctgtgctctggtgcacgtagaaaggagtggaatagtttaagataacattttctgattcactgtttttcytgaggcttacattgtatcactgtgtagaatcataagtctcctaaggcattggaatacatgtttagaggaaatgatgccttgttttcaaagtggcagctccaagaattttctactctattttaggtgatagaactttgtagtcacttgatatgtacaattctatgtagaaaccagtgctttatttatagttgcagctgatccctccttcctagctgtgagaagcatgtgtagtttgataagggaggttagtattttttatttcaatactttttgggaaacaggtggtatttggttggatagaaaagttatttagtggtaatttctgagattttagtgca

SEQ ID NO: 809048 - DNA, 626 bp, Homo sapiens
tgttctcatcatggctgggaactaagtttttaaggtgtttctggggtccccttggcccagaggggacaagacttaggatttcatttatagtttacacttcttatgcctgacactttttcctaaatattatacttaatataaattccccaaagagaaagttaacaggcccagagaagcaggagtaggagaccttaatactgtggatgcattatgaaattcctgtgctctggtgcacgtagaaaggagtggaatagtttaagataacattttctgattcactgtttttcctgaggcttacattgtatcactgtgtagaatcataagtctcctaaggcattggaatacatgtttagaggaaatgatgccttgttttcaaagtggcagctccaagaattttctactctattttaggtgatagaactttgtagtcacttgatatgtacaattctatgtagaaaycagtgctttatttatagttgcagctgatccctccttcctagctgtgagaagcatgtgtagtttgataagggaggttagtattttttatttcaatactttttgggaaacaggtggtatttggttggatagaaaagttatttagtggtaatttctgagattttagtgca

SEQ ID NO: 809049 - DNA, 498 bp, Homo sapiens
ggttaaaagaattaaagaaaaatatgtgaacagacaatgaagatcaacaaagaaatgagaactattaaaataaacccagttgaaatactagaatttggaaaccacagtaactagcatgaaagattgattggcagcggggcttaaaagcagactggagatggcataggagtcaatgaacataaaaagagattttaaaaagtactcaacttgagaaacagaggaaaaaagaatttaaaaaaatgaaaagagttttgggtatctgtgccacaatataatgatataaaatatttctcctcagagttccggtaaaaaaagaataatactggggtaggaaaaaaaaawttttttcaaatagataaaaatgtctcaaatctgataaaagcagaatgggaacttacaaaatcttgaaaggctaccaaacttcgagcaatataaatgtaaagaaaaccacacctaggcacatgatagtcgaactgatgaaaagcacagataaagaga

SEQ ID NO: 809050 - DNA, 581 bp, Homo sapiens
aaataactatagtcgaactacagtgattttttcagtgatatgaacatcacaataaaaagtaaacaatggaatatttttcttagggcaaacaagttcattctattttcagagactttctgtaatttaaaacacttcagaagtcaacgacctcaattctcatcattttacagtgaaatgactgggcctacagtggtaaagtgacttgtccaakgtcatatggccaattggtagcttggatacaaaagtgctttgaattcgtttcccccaaccagacactttcatcaaaaggaagggcgactgtttctgattattctgagcctgtgctaacactctgctcagtgttctgcattcagtaagtagtcaacaagtagtaatgagatttgcttccaagaggtaaactcagttattgtttataaaaaacagtatccagctagagttaaatagaaagaacggattcctgctcaacagccatagtatttattgaataaatgaatgaatgaatggttgaatgaatgaatgaaaccttagttcaaaggtagatttgtagttgctgggtccttacatggatgaaggagccaaac

SEQ ID NO: 809051 - DNA, 585 bp, Homo sapiens
aagaggtaaactcagttattgtttataaaaaacagtatccagctagagttaaatagaaagaacggattcctgctcaacagccatagtatttattgaataaatgaatgaatgaatggttgaatgaatgaatgaaaccttagttcaaaggtagatttgtagttgctgggtccttacatggatgaaggagccaaacaaaggcaccactatsagtaacacttaaccttctaaatagacactggccttaattaaggtcttttcacataggaaaaataggttcttaatccggttccagaatgcccaattaggccaaaatacagcattttgcactttgcacaagtcagcaaatcatttcctttgttatataaatccatccttagtatacctaaaattttgggatacagctcagatctaactcaaatgttttccaaagtaattcacaaacacattacttcagcatttcttctacatttaggaaaactatttttaaaaaccatcattctgtaacattcccttttccaactatagcatacagtagggctcaacaaactgtaatatacatgcccctgagtaacatccagtaatctc

SEQ ID NO: 809052 - DNA, 573 bp, Homo sapiens
aaaattatgtgttgttactttatagttataactcctatctgacctaaaacagtagtatcaccaacctgattgccttatctttcttatcagacttgagtccaaattccctaaattatttggattcaaatgaactgttattccctaaaatcaaatctgctctcaaaaaaatgaagatggatggccagagacggtggctcacccctgtaatctcagcactttgggaggccaaggcaagtggatcacctgaggtcaggagttagagatcagcctggccaacatggtgaaaccctgtctgtattaaaaatacaaaaatcatccgggcatggtgttgcgcacttgtatcccagctacttgggagcctaaggcaggagaatcgcttgaacccatgaggtggaggttatagtgagcagagatggtgccaytgcactccaacttggacaacagaatgagactctgtctcaaaataaaaaagaagaagaatatcacaggctccaaagtggattctaaaagaagttccaaaaaatgttttctgccacacctaaaaaggtactcattgaaagaacaacttcaggc

SEQ ID NO: 809053 - DNA, 664 bp, Homo sapiens
actgtgaatagtcacagtcctgcttcctggtcttacattttatgggggaaacagacaatggacaaacagacaaataatgaatcaggtgctggcaagtgccgtgaagaaaagtaaaaggtaaagggataatgatgtctgctattttagaggagttacaagacttgtattgagcacttaacccttcatctggacttcttcatatatgctggatagtgagcattttcagtgaaaattgttgattaatactgtccacctcttgatcattttcctacaacataacacaactgaatataaagaaaactaggcctcccagcaggacacctgggttctagtcctggctctaataagtatcaaacagcaaagactgtttaaacttctgggttttgttgtctccatttgaaaaatgaaaagaatacrcataaaattatacaactttgagaaagagttttttacaactgaaagatgctatgcaagtgtaaaacattattatataggaattttatttccttaaaaatatgccgaggatctggattactgaaaatgctcttttatttgctctctttccactcatccaggaatggcacaactagagaggagcgccatctctggcttcagctctaagtccaggcgaaactcattcgcatatgatgttaagcgtgaagta

SEQ ID NO: 809054 - DNA, 608 bp, Homo sapiens
tttttaaatatacaattcagtggcatgattgacattcgcaatgttgtgaaaccatcaccgctatttccaaaactttttcatcacctcaaacagaaattctgttaagcaataattccctatttccccacccctcagcccaagtaacctctcttctgctttctgtctctatgaatttgcctattctagctatttcacttaagtagaatcatacaatatgtttgtctttttgtgtctgacttctttcacttagcataatgttttcaagrttcatccatattgtagcatgtattagaacttcatttcattttatggctgaataatattccattgtatttatataccacatttttgtttatccattcgttaacagacatttgagttgtttctaccgccattaggctactgtaaataatgctgccatgaacattggcacaggagatctgtttgaagtcctataactaggactagaattgttgaatcacatcataaatctgtggtaaatttaactttttaaggaactgccaaactgttttccacagtagctgcaccactttacattttcactggcaatgtacaatttttccatgtgctctccaacatttgttatt

SEQ ID NO: 809055 - DNA, 643 bp, Homo sapiens
aggtcaaaaagagtagtaatgtcaggagttggatctaaaactaactgaccccacagaccatgatcttaatcacagcacatattcttccaacaattctttcagctgatacaaaatttacatcaagggaatgacctttttaaaactctttaaaygtcacaataactagggaagcaatatgtctgaataatttccttagtaattctcaatactgtatttactatcaaagttaatcttaacaaagttctcaggctggcaagaacatagcagtattctgtcctaatcacagttactgtattttttaaccctaaattgatgcataagctgaggaagacagaatctaatttcggtcatataagactactttgcacataattatattttttgacattggataataagagggttattctttgaacttttctaaataattttatggagaagagacaaacataacttatttttaaataaaaataatactagtcctaactaataggcctgagccagttcacaaaggttaggcaaaactactaatgaaaccatagcaacttcaagtacagctattatgtgtaaatggttaccagtgagttaagaaatcttaggcagccagaggaccactgactgcatggcaacagagagagagaga

SEQ ID NO: 809056 - DNA, 610 bp, Homo sapiens
tgtgcaaaattatttggaattcttctaaatgagagatttgccttttctgtcccatttatgtatttattcaattacttatttatatcagcatagacttctaggtgtttattttatactttgggttataatccagtactacaatatttattttattgcttaaattgtttcagctttggccattgggaactctttcagtaggctcctgcgtacctttgacatgcccccaacattgtggattttttcatacacttccttactttcttgcactggatgttccagactcatcttgtatatttcctgctccagtcctggagtcagaaaccatttcttcaagttgtggttaggagaatttttgatctgctcaatcctaagaaagtgctaaaggtggccaaaaaagagggycagagagtctctcttggtttcattttcttgtttgtctcctaaattttccatcatcctagtaatgcacataagtcttattctctcaccatatgaatttgcccattactcttataacatccagcagcaagaaaagaatgaaaagcctcatagtcttctacagtcacacaccttaattttcatgcataggtttagaaatatgctatgtaac

SEQ ID NO: 809057 - DNA, 515 bp, Homo sapiens
aatgctagaaaacagaaatgttttagttaaaaaaactctgtatgggataatggtggcctaacattttccacaggtgttggtcggagtcagaaattctctaatgatagttaattttatggcattgctgttattcacactctgaaatagcaattttctccccatctgtatctctcttgctcaaaaaatacagactttaaggcttatataaaatatgtgtttcggtgagaaagggagggcttaatattagactatacagtactatgactttactgccttatggatttattattattccctgacmccacacctgaaactactgctttctttcaaaagctagactactcattcgtagtatcaactggtactttcatttaaattattcactacagttttccaccaaatatcttagttctttatttgattgaaatgaatagatggacactcttgcaagtatgttcttgacaattttgcaactttattaggtaaaatataaccatcttcttttaaatgatcag

SEQ ID NO: 809058 - DNA, 575 bp, Homo sapiens
cttgctagattggggaagttctcctggataatatcctgcagagtgttttccaacttggttccattctccctgtcactttcaggtacaccaatcagatgtagatttggtcttttcacatagtcccatatttcttggaggctttgttcatttctttttattcttttttctctaaacttcccttcatgcttcatttcattcatttcatcttccatcactgataccctttcttccagttgatcgcatcggctactgaggcttgtgcattcatcacgtaattctcatgccgtggttttcagctctatcaggtcctttaaggacttctctacattggttattctagttatccattcgtctagtttttttttcaaagtttttaacttttttgcsattggttcaaacttcctcctttagctcggagtagtttgatcttctgaagccttctctcaacttgtcaaagtcattctctgtccagctttattccattgctagtgaggagctgcgttcctttggaggaggagaggcgctctgagttttatcatttccagtttttctgctctgttttttccccatctttg

SEQ ID NO: 809059 - DNA, 643 bp, Homo sapiens
gctttaaacctgaggtatttaacatgataggcactaggtgcatgtagctattgagattttgaaatatggctagacaaaattgagatgtgctgtgagtgtaaaatacacactaagtttcaaagatagtatggaaaatgttaaataactcattaataatttttaatgttgattatatgttgaaattataatattttggatgtatggggttaaactattaaaattaacttagctgattaattatacttttaagaatgttagctactagaaaatttaaaattagatgtgttaccgacatggtatgtctttctacgtgacaatgcgtttccaaattgttttaactgaattatatctaaatctggcaattctcctgtgggtacaacgtaggcactggctttatagaagaaactgaccatgaaggtcttagccrtaaggccatttcctacagccagttgaaaatgcctattatcgtactggtcatttttggttgagtgattatcttttcttaattcaccttctctaacaatgaagcatggaaggataattaaggatcccaaaaagcattcttctctccttgctacacaaaagatgcagtgtgctcacgtaactcaaacctatccccctgttttaaacaatagtaataaga

SEQ ID NO: 809060 - DNA, 532 bp, Homo sapiens
gtcaaagatctgaaattacttggatttacccaaattttgacataggataaaatgaaggaagttgcgtcttggttcaggctgctgtaacagcatatagtcataggcttcataatgattagagtcaatgatggacggcacatataacagtggtcccataagattttaatggagctaagaaagtcttatcacctagagacgttgtagacttcatagtgtagtagcgcaatgtattactcagacatttctggtgatagtggtgtaaacaaacttctatgctggcagtygtacaaaagtatagcacatacaattatgtacagtaatacttgtactatataattacgtattataatacttgatagtaaacatgttattggtttatgtatttactatactatacttttaatcttttagagtgtattccttatatttttttttttgtataaaagttaactgtaaaacagcctcaaacaggtccttcaggagatatcccagaagaaggcattgttatcataggagatgacagcttcatggg

SEQ ID NO: 809061 - DNA, 559 bp, Homo sapiens
gtcttcctgttaacaccagaagcagagcacttgctcaaggatgtgtcctcccacttatagtctcagtcaaatacagatacagagaaagtattctcagccattccaataaaggtagagataaatccaaagaaacccctatccaaccttaaacactatcctctgcaaaaggaagccatagatggaattgytcctgtcatacaagattatctgagaaacgggctcattattccctgcacaatcccctgaaacagccctatattccctgtaaagaaactaagcgggagaggatggaaatttgtgcaggaattgagggcaataaacaatatcataattctcaggcacacagtagtccccaacccacaaacccttctatcacctatatccactaccagccagtatttctcagttgtggatctctgcagtgccttctttagtattcctgtagaaccagacagccaatatttgtttgtctttatttggaaagaatggcaatatacgtggactataatgccccaaaggtatacagaaagtcccacttagtgttcccaaatattagaag

SEQ ID NO: 809062 - DNA, 615 bp, Homo sapiens
aaagtgctaggattacaggcgtgagcccccgcacccgagccctgatattaatttttaaattaaaagactttatttttaaaagcagtttgaggtttacagaaaaactgagcagaaagtacagtctctatataccccctactccctgcccccagttttccctgttattaacatttgtgttaatgtggcatatttgttacaatcagtgaatcaatattgataaattaaagtccatatgttagtgttcactctgtgtgttatacagttctatgggttttgccaaatgtattaatatgtcatgtatccatcattacagtatcatccagcataatttcactgtcctgaaaatgccctgtgctccacttattcatcttttccccacttgctatcaccacaccaaagccctcacaaccacttatctttttaatatatcyatagttttgccttttgcagaacatcatatcattagaatcacaataatatgtggcttttcagactggtttctttcactcagcaacatgcagttaagggtcttccgggtcttttgtggcttgacagctcatttctttttatcactgaataatattgcattgtatagatataccacagtttttttta

SEQ ID NO: 809063 - DNA, 604 bp, Homo sapiens
aacggaacaatgacacaccaaaactctttgaaactgtgccttctacagagctgtaaatctccttttggaccattccattacacaaggtgtcctcttggtcacacagtgattgcaaatgggactctagagtcatggaaatgggtatactcttctcaaactttccatctttaccagaattacttcttaaagtgatatgcttcatggtgtaaactagcacttattaattttttctaaatatttatcatatttcatatacttttattttggagatggagtttcgctcttgttgcccaggctggagcgcaatggcagatctcggatcaccgcaacatccatctcccgggttcaagcgattctctggcctcagcctcctgagcagctgggattacaggcatgcgccaccacgcccggctaattttgtatttttagtagaaaaggggttctccatgttggccaggctggtctcsaactcccgacctcaggtgatgcgcccgcctcggcctcccaaagtgttggcattacaggcatgagccaccgcgcccggcccatatacttttaatacatgtggaattaataaaaacgtccatgcctccaattccgtggc

SEQ ID NO: 809064 - DNA, 573 bp, Homo sapiens
agtgaagcaagtgctcagtattccaggtaaatgggaaatgtgccaggttgcagattctgccaagaagaagacagacataaagtacacattcacattaatcccaaaaataggctaaaaacctaagccattagatctctggatcattcgacttgtttacttggtcagaagctaagattttgcttattgtgttatttagtattttgaagcattgagtggtattgtttcataagcactaggcccaaagtgtttggcaacctttttttatacctataataataaatgttctatgatttgcacttaaaccaaaatatgccaaaataatttgttcatataaacatgtaatgttagacctgtattatgagcatttcaggcccacgattttcacatagcctgttgtgtttcttagcagcatctcttcaaaaaatctacrtatgatgcctacttcttacccaaatgaaaacaaaacaaataatcagggattaagggagcataaaattgaattgttcaataaattttgtttttattgtcttccttacggacatagatcaactgcaaatagctgccacaaagtgg

SEQ ID NO: 809065 - DNA, 682 bp, Homo sapiens; identical to SEQ ID NO: 730126

SEQ ID NO: 809066 - DNA, 498 bp, Homo sapiens
gaactactgagctcaagcaatccacccaactcagcctcgcgaagggctgggattacaggcatgagccaccgcgctctgccaatgtgtctgttttcttataaagctactaacttcttgaaaggaaagatcataatttttcatttacatgcctaaaaccatccctgaaacatagcaggtgttcagcatatatttgaagcagagagggagaatcaggatggtggggaacaagggaaagagggagggaggcaraaaaaagtagctgtgactttttctcacttagatgaggacatcaagagtcccaaggtcctatctgatgacaggcagaaccaggactcaaagccagatcatttgacataaaaagcccttgtctatcataatgcttaatataacattctctggaatatttcaaatgtccctcaacaacataatcacaatattaaagtttagaatcttgaaactacatgccacaggtaggccaccctactcaacccatgctca

SEQ ID NO: 809067 - DNA, 622 bp, Homo sapiens
gacggatagcattaggagatatacctaatgtaaatgttgagttaatggatgcagcacaccaacatggcgcatgtatacatatgtaacaaacctgcacgttgtgcacatgtaccctggaacttaaagtataataataaaaaaattaaaaaattgtaaaatcatttagtattagttacaattactaactataaaaatatcatatgaaaaaatagaaaaccatacagagatgaaagaagatgggttttagattttcaaaaaggtgttattagatagcacattacatactgatcacttggagagtcatggtaaagttcacagttctgagttctggcaaggttttgctcagcatcctaccaactggactttgaaaagcagcctaaccatgcactacagcacaaccagacttccttcctaaggcaaataatgagtaattggtttagcattgwctaagtgtgtacagatatgattaactcttttaatatgaagtgagtgggtgcttgctttgccagcacatatactaaaattggaacaatacagagaagattagtatggcccctatacaagaatgacatacagggccaagtatggtggcttacacctattatcccagcagtttgggaga

SEQ ID NO: 809068 - DNA, 556 bp, Homo sapiens
gattcatatcctaaatatatcaagagaacttagaaatcaataataacaaacaaacatctcaatagaaaatggtcaatggacaagaaatgtacaattcttagaagaaaaaaatgaaaacatataaaatatattcaacctccaaagtaatcaaataatgtgaamaaaaccacaaacaaacaatgagctacatctctaacctatgtaactggaaaagattttaaaaagacaacattcaatgagctgtctcactttcagaggtgttacatactggcccgctaatcatttctggagagtagtttagaactaggtattgaaatttttaaaatacatatttttttgatccagattttcactattaagtatttaccctaaagatataatcagacaacttttcaaaaatgtacatctaagagttcccacagtggtgttattgatcaattcaaaatacatgaggtagcctaaatatccactaacatattattctttaaattatattttggtacattcaaatagtaaaatttatgaagtgataacaattgacatgaaatattctata

SEQ ID NO: 809069 - DNA, 600 bp, Homo sapiens
aattttaaaccttaaaatagctccaagggcaacaaggaattctctgggtctgggtttcaggtctgaaacaattgatgctaatgatgtccacattccccatcacaccgtgattttggaaagttggtttggggaagtttaacagaagagagaaaactcaggaaacagtgaattgggagaagttgttgcatttcctcattctctctccgtctgtctcgttctcatccacttagtcacacacggcaaccaagcaaaagtgtaaatattacttttcatgcatttatctaggcatagttaggcaagcagaattgagcaaggccccaggtaaagggaccctttgaagtaatagcacttttttggctgttttgttggtcaatttttgggtgcattatgcttttaagatagaacttaataccaaccattaaaaaaccacctccttttcaaaakgaatattctcccttgtatggcttctttggtgatggtaagatatttggcacctcccaagtgtggtttgaactttgaacactcttgttgaaaatgtgagaggaaataaaaatcagctcacagctctccaaagcatactgcaaattaactgtgtatcgg

SEQ ID NO: 809070 - DNA, 488 bp, Homo sapiens
ttgcttcttatacacacacagaacagatgcacccactggggtcaccccaacccagcccccagcagttgcccataactggccgcaggatcccacacacctgctgacttccagagtcaccaaggggttaaaaggggctgggaacagcctcttagtctccagagcctcccgcaggaatgatttgtgaccctcttaggctgctggtctgcaccttctgaaaagcctttaatatcacygggcacattcataaattattcttttttaaaaatgaaatgttttagccaaacagcagtagaggcatgttgtgcaaaattagcaaaaaaaaaaaaaaaggaatgacgatgatatgaatcttttggcggcctctcctaaccgtctttaaatctgcgaaaggatctcagtgcccgccattacctggccagcaccgggaggatgtcaggtgcttccaggcggactctgctaggaacattccatctgtggccaaggctatc

SEQ ID NO: 809071 - DNA, 602 bp, Homo sapiens
aaagaaaaaccaggacaaactcagctgatatctgcccacagagagagcatttaaaccagccttagccagaggggaaccctaatccaagtgatcggaacttgagttcctgcaaaccttgccaccaaaggctgaagtgctctcggtctctaagtaaacttgaaaggcattgtaggccataaggatttcaagtcttaggtgactcccaacagtgaactgggcccagagagagtggcctggaggaagcatgagacctaccgagacacyagctgggacaactaagggagtactggcattacccctctcctaaacccagactgcacagctcatggttccaaaagaggccccttccttcagcctaagcagagaagagggaagaggagggaagactatgtcttccatcctggataccagctcagccacaataggataaggtactattcagaatcataagatcccttttccaggctctacctttctggtgacatttctagacacacactgggccataaggggacctgctgctttgaaggaaagttgcccagtcctggcatcattcgtcacttgctaactgcagagcccttgggccctaaataacaaacagc

SEQ ID NO: 809072 - DNA, 485 bp, Homo sapiens
gctatgatctaagctatatctgctttggtgtggggccccttaaaccctgtaatgctgtggttcttgaagactcatagaggtactgccttgatggtcttgcactagatccaggagaattctattaccaggcagagactcttgttgtattttcttactttctcccaaatatacagtctctttctctattctaagccactgaatgcttggtgtggactgacacaaatacccttgtggccaccatcactataaatgtacygggtcagacctgaagccagcacagcactgggtttcacacacggcctgctgtaactactccctggctactgcctgtgttctttcaaggacttgacttgaaagacagccaagactgtgtctttcccttcaaggcagtgaggtcccccaggccctaggtgggtccaggagtactgtctggttgacagggactactgtcgaaactctttagaaacctacctggtattttactg

SEQ ID NO: 809073 - DNA, 485 bp, Homo sapiens
gctatgatctaagctatatctgctttggtgtggggccccttaaaccctgtaatgctgtggttcttgaagactcatagaggtactgccttgatggtcttgcactagatccaggagaattctattaccaggcagagactcttgttgtattttcttactttctcccaaatatacagtctctttctctattctaagccactgaatgcttggtgtggactgacacaaatacccttgtggccaccatcactataaatgtactgggtcagamctgaagccagcacagcactgggtttcacacacggcctgctgtaactactccctggctactgcctgtgttctttcaaggacttgacttgaaagacagccaagactgtgtctttcccttcaaggcagtgaggtcccccaggccctaggtgggtccaggagtactgtctggttgacagggactactgtcgaaactctttagaaacctacctggtattttactg

SEQ ID NO: 809074 - DNA, 553 bp, Homo sapiens
ctcctactcaacatagtactattctatctatccaaggggggctgcacatcagccctgtctcctgtctgccatcttcctggcaagagctcataaagcaagttccaaaataatcttatatttagaaaaaccaaacactccaccagaacactcttagaactgataagccaattcagtagacttggcaggatacaaaattaatatgcagaaataagtagcatttctattcaccaacaatgaaatagctgaaaaagaaatgaagaagagaattccatttatgatagctacaaaaaatatgataaaatacttggaataaattttaccaaagagrtgaaagatccctacaaggaaaactacaaaacactgatgaaagaaattgaagtggacacaaacaaatggaaagaaattccatgctaatggatcagaagaattaatatcattaaaatgaccatatggcccaaagcaatctacagatttaatgtgatccctatcaagataccaatgtcactttccacaaaaatataaaaaacaatcctaaaatttgtatagaaccata

SEQ ID NO: 809075 - DNA, 553 bp, Homo sapiens
ctcctactcaacatagtactattctatctatccaaggggggctgcacatcagccctgtctcctgtctgccatcttcctggcaagagctcataaagcaagttccaaaataatcttatatttagaaaaaccaaacactccaccagaacactcttagaactgataagccaattcagtagacttggcaggatacaaaattaatatgcagaaataagtagcatttctattcaccaacaatgaaatagctgaaaaagaaatgaagaagagaattccatttatgatagctacaaaaaatatgataaaatacttggaataaattttaccaaagaggtgaaagatccctacaaggmaaactacaaaacactgatgaaagaaattgaagtggacacaaacaaatggaaagaaattccatgctaatggatcagaagaattaatatcattaaaatgaccatatggcccaaagcaatctacagatttaatgtgatccctatcaagataccaatgtcactttccacaaaaatataaaaaacaatcctaaaatttgtatagaaccata

SEQ ID NO: 809076 - DNA, 564 bp, Homo sapiens
tgatcctactgtagggaaatgccagaaactgttttttttttttttttttttttttttttttttgacagagtttcgctcttgttgcccaggctggagcgcaatggcgtgatttcggctcactgcaacttttgcctcccgggttcaagtgattctcctgcctcaccctccctgagtagctgggatyacaggcatgcaccaccacgcctggctaattttgtatttttagtagagacggggtttctccatgttgctcaggctggtctcgaactcccaacctcagataatccgcccgccttggcctcccaaagtgctgggattacaggcgtgagccactgtgcctggcaaccagcaactgttaataagaactgcttttaatttccattgagtaaaacaagaaaaaagtggaatttcatcattttcatttcaactcgaatacattctcagtgacttccctgcaactttctgcattaactcagtggtagtaaatagtttgtcagttattgacaaacgttaataaattgttctacatcaagagcgacaaatgttcctcacctgcgtattaca

SEQ ID NO: 809077 - DNA, 541 bp, Homo sapiens
atacatgtccagatttgggagaaaattctgggctaaaattgtacatttgcaagttgaaagctactagtatgcagatggtatttaaaactatgtgacttgttgagatagtctaaagagtgcatataaactgaaaagagaagaggattccttctgggaggagtcctggggcacccagttgttttgaggtttatgaaagaaaccaacaagagtcttagaaggagttgccagtgaggtaggaggaaaatcaacagagtagtggcccagaagacaaatgatggaagtgtttcaagaaagagtgtgtgatctgtgatgtcaaatgtgactggcwgttgaataaaatgaggaaagaaacttgaccattggacatggcaagatggaggttatggtctccctgaaaaaaactgtttaaaaatggaataatgagatccacagtctaactggagtagactaaaaaggtaatttgaaaccaaaaatatagacagcacttttgaagggtttttttctaaagagcaacaggttgaatgaaggaatagagtaaaaa

SEQ ID NO: 809078 - DNA, 568 bp, Homo sapiens
ttatttgataatgaatatataaacgtgtatatcaatcttagtataatgcctggaaaactctatgtgctcaataagtgatagccttgttattattatgagcaacagcaacatttatgaaattatttgttaatgtgtaaaacagraagactagaatttgactcatagggttgtcatcggtattaaatgaaatattaaaagcaaagtattcagcatagtatgtgtcacatatgcagacaatcagtggtagcttatattgtaattattttcaattgcatcttaggattcacttttcctaagagtgactgaaatctggtctcaaatttaagtaaagatgaggacttattggctcaagtaatttaacaatgaagggatatatcttgcttctggtgtgcctaaataaaggctattaaatgatatcttcagaatcactcccaccacgtgccctgcttctctttgttgactccattatcaaggagtttcaaggtagctttcatcagttcccacatctacatactccaacatgtttatctggtgggaaaaaacaaaaatgtttattcaagcattccca

SEQ ID NO: 809079 - DNA, 613 bp, Homo sapiens
aaataaatacatgccatttagatttttttttcttggatcagtttttgtagtttgtgtctcaaatgtattttaagttctaaaatttagtgacataaagctgttcagactatttccttatcctttttacatctgtgaacatctgtagctatgtcacatcttttagtcttgatattgttattttgtgcctgttctcttttctcccctgactgactagtctagatataggataatcaattttattaattttttttagaaaactagctttgattctattgacctttctctctstgtgtgtgtgtgtgtgtgtgtgtgtgtgttgttttctatttcattgatttctgttttggtctttgttattttctcttttctctttgggtttaattttactttttctaaatttttaagtttaaagcttaggtcattgatttagacctttttttcccctaatatgattactaatgatataaatttaccccaagctcattttcagaggcagctcacaaactttagtgtttttattttcattcagttcaaaatactttctgattttccttttgatgtctgctttgacccatggattatttagagcatgttgactttttatcatgggttt

SEQ ID NO: 809080 - DNA, 623 bp, Homo sapiens
ccttaactatccctgggcaacttcctgttctttctttgttctattccccttacctaattaataaagttttaaactaatagccaactgggtaaagtgtaaaatgtgaggtcttattccagccaatggaaactggacacagcagtagggtagacacataaggttataagtaactctgtctcctttgttcggtgtgttcttctggctggacagctattgagtagcaccctttctgcagaaagtaaagctcaccttgctaagagatcatttgttcccaygttaattcttttttttttccttttttggaacatcaaaaacttcattcccaacagcactctgagaaaagccagcctgatacctagattacagggttcacagccttacaggttagtaaggaaggtcatttcctggtaggcccaggaatttagggatattttgggggcctcaagaagagaggaattcacacaaagctataaggactgcagctgaaatttgatagtatgttcttagcttggcttttagctgaataaggcctttaaaagtcaaatctgagattctatatgaaaacttccagcaaagaaacttgaaagcacctatgtggtcatcgcctgttcttgctgcagtta

SEQ ID NO: 809081 - DNA, 623 bp, Homo sapiens
ccttaactatccctgggcaacttcctgttctttctttgttctattccccttacctaattaataaagttttaaactaatagccaactgggtaaagtgtaaaatgtgaggtcttattccagccaatggaaactggacacagcagtagggtagacacataaggttataagtaactctgtctcctttgttcggtgtgttcttctggctggacagctattgagtagcaccctttctgcagaaagtaaagctcaccttgctaagagatcatttgttcccacgttaattcttttttttttccttttttggaacatcaaaaacttcattcccaacagcactctgagaaaagccagcctgatacctrgattacagggttcacagccttacaggttagtaaggaaggtcatttcctggtaggcccaggaatttagggatattttgggggcctcaagaagagaggaattcacacaaagctataaggactgcagctgaaatttgatagtatgttcttagcttggcttttagctgaataaggcctttaaaagtcaaatctgagattctatatgaaaacttccagcaaagaaacttgaaagcacctatgtggtcatcgcctgttcttgctgcagtta

SEQ ID NO: 809082 - DNA, 589 bp, Homo sapiens
agggcatgagaggagcgatactagccaggagggggcagatgggagaagagtttgtatttaatgctgctggaaatctgatgatgccactccacttgcataaaaccctcggtggctccccaatacccttgcaaaagccataaatcctcactagggcttcaagatccaccttggccctgcttccctcagcagcctcatctctccctgtgctggcacatgctcacttcatcccctgcaggtcctcagtctcactctgggacctttgcctaccaaccccttctctctggagtgttctgccccactcccctggatgactcaccccccactcattctcctcatctccacctaaatgtcacctcctccaggaagacttccttgatctcctgagtgctcgcagccccctcggctttcctgtcactccgatctaattattatatctttagtgtctgttccrtaccccctgcctgcccccaccttagtctgtgagccccatgaagggcaaaaaccaagtctgtttatcactggatccttagtgccaagaatgaatggtgccggcacatagcagatacccaactgaaatttattgaataaa

SEQ ID NO: 809083 - DNA, 622 bp, Homo sapiens
tcttaagttacccaagaaggtgccttttcagtgattaggaaaaaatcttaagcagatttcagaggggaaaagaagtcagagaagaaatagcacagttggagcaaaagcgctgacttgggtcagaaaacctggagttgaggttttctgaaaagccacccacgtggaatatgggtttagcaagtcactcaccctctctgactctgtttcttcagttataaaatggggatgttttagataccccaggacagggtcacagtggaaatgaacagagatcatgaagacaacttatattcaccaactgtttttgcagcgtggcagaaaaatattctggaatattaactaaggtcttgttgtatgtgtgtgtkttttaaattccatgcaataatttatgtcctgtgaccagtgtcctccttcaggcagcagccgacagaccatgcggcatttattgcctcagggaaagaatgacacagcacaaagcagttagagaccaagtcaaattcttggctttcgaatttgaaaagccagccaaggtctgggcagatgacaaaagatatggaaggatgcaaaagtgaagcctccctgtttccaagaacagaaaagactctctgagttgcagaacaga

SEQ ID NO: 809084 - DNA, 653 bp, Homo sapiens
tttggtagttttccttctcacagtcaggaccctcagctgcaggtctgctggagtttgctggaggtccactccaaaccctgtttgcctgggtatcaccagtggaggctgcagaacagccaatattgcagaatggcaaatgttgctgcctgatccttcctctgaaagctttgtctcagaggggcacccggccccatatgaggtgtcagttggcccctactgcgaggtgcctcccagttaggctacacgggggtcagggacccacttgaggaggcagtctgttcattctcagatctcaaactccatgcttggagaaccactactctcttcaaagctgtcagacggggacgtttaagtctgcagaaatttctgctgccttttgttcagctatgccctgcccccagagayggagtctacagaggcaggcaggcctccttgagctgcgctgggctccacccagttcgagcttcctggctgctttgtttacctactcaagcctcagcaatggcagatgcccctcccctagcctcactgctgccttgcagttcaatctcagactgctgtgatagcagtgagcgaggctccgtgggcatgggaccctccgagccatgcacgggatataatctcctggtgtgccatttgctaagaccattgga

SEQ ID NO: 809085 - DNA, 734 bp, Homo sapiens
agaagaataacatgttctggaataggaagactaaatactatgaacatgccaagtttttcaaaactcagatgtaagtttactgtaatttggattgaaatcccaataggatttttgaagcttgggaaaataattttaacattcatctggaagtttttaaacatgagacagccaagacatttttgaattagaaaaatagaggatgyttgcttatataaaaatgtatcaaagaagcattttctaaagcagtgtggtgttggaacaggaatatgtggacatagaaaaagactggaaaactcagaagaaaaatgaatattctaatagaaaagtggtaatgacatgaaaagaaaaatagtttacacagacattataatcatgtcaaacttaatgggtaatcaaaataatgaaaatcgaagtgagatatatagatatatatctatgtagatatatatttgacagagattttaaaaataataatcctcaatgatggtgagtgtggatactccttctgctaataggaatgccaatggcctaagtgttgtcaaaatcaatttagcaaaatatatactaagagctttaaaatattaatatctgtcttagcaattccatataaggaatatatcctaaggaactattcagaggtggagctaaagatgaacatcaaaaatggccattttttgtttatttaagctgtgaaacattggcacttattaaaatgcctatatatcaatgctcag

SEQ ID NO: 809086 - DNA, 734 bp, Homo sapiens
agaagaataacatgttctggaataggaagactaaatactatgaacatgccaagtttttcaaaactcagatgtaagtttactgtaatttggattgaaatcccaataggatttttgaagcttgggaaaataattttaacattcatctggaagtttttaaacatgagacagccaagacatttttgaattagaaaaatagaggatgtttgcttatataaaaatgtatcaaagaagcattttctaaagcagtgtggtgttggaacaggaatatgtggacatagaaaaagactggaaaactcagaagaaaaatgaatattctaatagaaaagtggtaatgacatgaaaagaaaaatagtttacacagacattataatcatgtcaaacttaatgggtaatcaaartaatgaaaatcgaagtgagatatatagatatatatctatgtagatatatatttgacagagattttaaaaataataatcctcaatgatggtgagtgtggatactccttctgctaataggaatgccaatggcctaagtgttgtcaaaatcaatttagcaaaatatatactaagagctttaaaatattaatatctgtcttagcaattccatataaggaatatatcctaaggaactattcagaggtggagctaaagatgaacatcaaaaatggccattttttgtttatttaagctgtgaaacattggcacttattaaaatgcctatatatcaatgctcag

SEQ ID NO: 809087 - DNA, 632 bp, Homo sapiens
atctcagtatgattgtcatttttggaggtaacatatcttttctcagattacttttaatatttttcttttatttgatatttcacaggttttttttttactttatttccatgtatcaattgaatttgatttatcttaattgaatcttcactttttcaatttgagtgctcttctacgagttctggaaaatcatccctgatttttaccgttgcttctctgtattatctagatttttcttttggaatgcttgctagatatgtgttataccttctcattcacattttatgtattttaatctctgcttataatttccatctcaattctgcatcaactcagtttttaatatcagtgacattatttttgtctctagaasttctgtttgatccttgcaattattattattttattttttccctatagtttccactcctttgaatatcttcaatcagtttagtatatttatttttagctgtgtaagtattgttcttctatctcgtgatcactgtttattgcatttgcagaactaagtgtagattatatatgtgtggtttatattgtgtgtttattgtatgagagtgtgtatacactcattcatgttcattattgaggcagttttgtcttttatttttcctgtg

SEQ ID NO: 809088 - DNA, 632 bp, Homo sapiens
atctcagtatgattgtcatttttggaggtaacatatcttttctcagattacttttaatatttttcttttatttgatatttcacaggttttttttttactttatttccatgtatcaattgaatttgatttatcttaattgaatcttcactttttcaatttgagtgctcttctacgagttctggaaaatcatccctgatttttaccgttgcttctctgtattatctagatttttcttttggaatgcttgctagatatgtgttataccttctcattcacattttatgtattttaatctctgcttataatttccatctcaattctgcatcaactcagtttttaatatcagtgacattatttttgtctctagaagttctgyttgatccttgcaattattattattttattttttccctatagtttccactcctttgaatatcttcaatcagtttagtatatttatttttagctgtgtaagtattgttcttctatctcgtgatcactgtttattgcatttgcagaactaagtgtagattatatatgtgtggtttatattgtgtgtttattgtatgagagtgtgtatacactcattcatgttcattattgaggcagttttgtcttttatttttcctgtg

SEQ ID NO: 809089 - DNA, 575 bp, Homo sapiens
tacccacaaatattaaaaataaataagtaaataaatcaaaagcagtgacaaagtgggcattaccacaaactcaacagaaatacaaaaaaccctcagaagttattaagaatgcctctgcacacaaactagaaagccgagaagaaatttctggaaatgcataccttgcacgattgatccaggaagatactggaactctgaaaagaccartaatgaatttcaaaatttcatctgtaataaaaagcctaccaaccagaaaaaagcaaagtgagcatccttttcatgttcccaatcttagaggaaaggctttcagtttttttttttccattctgtaggataaaagctatgggtctctcatatatgtctttattgtgttgagatattttccttctatacccagttttgttttaagcgtttttattatgaatggatgtggaattttaggaatttttttatcatcaattgaaatgatcatataatattgtccttcaaattgtttatttgatgtaacacattgattaatttgtgtatgttgaatcattcttgcatccctgggataaattccacttggtcatgat

SEQ ID NO: 809090 - DNA, 575 bp, Homo sapiens
tacccacaaatattaaaaataaataagtaaataaatcaaaagcagtgacaaagtgggcattaccacaaactcaacagaaatacaaaaaaccctcagaagttattaagaatgcctctgcacacaaactagaaagccgagaagaaatttctggaaatgcataccttgcacgattgatccaggaagatactggaactctgaaaagaccagtaatgartttcaaaatttcatctgtaataaaaagcctaccaaccagaaaaaagcaaagtgagcatccttttcatgttcccaatcttagaggaaaggctttcagtttttttttttccattctgtaggataaaagctatgggtctctcatatatgtctttattgtgttgagatattttccttctatacccagttttgttttaagcgtttttattatgaatggatgtggaattttaggaatttttttatcatcaattgaaatgatcatataatattgtccttcaaattgtttatttgatgtaacacattgattaatttgtgtatgttgaatcattcttgcatccctgggataaattccacttggtcatgat

SEQ ID NO: 809091 - DNA, 586 bp, Homo sapiens
tggccattttgaagacattgatttttcctatccatgagtatggaatgtttttacattattttgtgtcctttctgatttctttgagtagtagtttgtagttctccttaaagaggtccttcactttccttgttagctrtattcctaggtattttatttttttgcagcaatttggaatgggagttaattcatgatttggctctctgcttgctcttgttatataagaatgctagaaatttttgcacatttattttgtatcctgaaactttgatgaagtttcttattatcagcttcagaaacttttgggctgagacaatggggttttctagatataggatcatgtcaactacaaataaagataatttgacttcttctcttcctattttaatatgctctatttcttcctcttgcctgattgccctgaccagcacttccaatactatgctgaacaggagtggtgagagaagacatccttgtcttgtgccggttctcaagtggaatgcttgaagcttttgcctattcagtatgttattggccatggatttgtaatatatggctcttattattttgaagtatgttcctttaatac

SEQ ID NO: 809092 - DNA, 617 bp, Homo sapiens
ctgcttgacccattctgccaataaaggatcctgatgcattcttcagtatgtcaatttgccaattcagtaagattcttttaaattatttcaatgtctttgttaagtttatctgataggattctgagtttctctgtgttatcttgaatttatttgagtttcctcaaaacagctattttgaattccctatctgaatggycacatttatctgcctctctgaaatttgtgcctggtgtattatttatttcatttggtgaggtcgtgttttcctggatggtcttgatgcttgtggatgttcctcagtgtctgggcactgaagagttaggtacttattgtagtcttgtcagtgtgggcttgtttagatacatccttgttgggaatgttttccaggtattcaaagggacttaagtgttgtgatctaaaattttggtcactgccccatatttgtgttagagggcaccccaagcccagcaatgctttagttcttgcagactcagtgttatcacctttatggtccttgataacatttggaaaaattctctggattaccaggcagggactcttgttctcttcccttactttctcccaaacaaattgagtctccccctttctctatgttc

SEQ ID NO: 809093 - DNA, 582 bp, Homo sapiens
cccattctgccaataaaggatcctgatgcattcttcagtatgtcaatttgccaattcagtaagattcttttaaattatttcaatgtctttgttaagtttatctgataggattctgagtttctctgtgttatcttgaatttatttgagtttcctcaaaacagctattttgaattccctatctgaatggccacatttatctgcctctctgaaatttgtgcstggtgtattatttatttcatttggtgaggtcgtgttttcctggatggtcttgatgcttgtggatgttcctcagtgtctgggcactgaagagttaggtacttattgtagtcttgtcagtgtgggcttgtttagatacatccttgttgggaatgttttccaggtattcaaagggacttaagtgttgtgatctaaaattttggtcactgccccatatttgtgttagagggcaccccaagcccagcaatgctttagttcttgcagactcagtgttatcacctttatggtccttgataacatttggaaaaattctctggattaccaggcagggactcttgttctcttcccttactttctcccaaacaa

SEQ ID NO: 809094 - DNA, 582 bp, Homo sapiens
cccattctgccaataaaggatcctgatgcattcttcagtatgtcaatttgccaattcagtaagattcttttaaattatttcaatgtctttgttaagtttatctgataggattctgagtttctctgtgttatcttgaatttatttgagtttcctcaaaacagctattttgaattccctatctgaatggccacatttatctgcctctctgaaatttgtgcctggtgtattatttatttcatttggtgaggtcgtgttttcctggatggtcttgatgcttgtggatgttcctcagtgtctgggcactgaagakttaggtacttattgtagtcttgtcagtgtgggcttgtttagatacatccttgttgggaatgttttccaggtattcaaagggacttaagtgttgtgatctaaaattttggtcactgccccatatttgtgttagagggcaccccaagcccagcaatgctttagttcttgcagactcagtgttatcacctttatggtccttgataacatttggaaaaattctctggattaccaggcagggactcttgttctcttcccttactttctcccaaacaa

SEQ ID NO: 809095 - DNA, 617 bp, Homo sapiens
ctgcttgacccattctgccaataaaggatcctgatgcattcttcagtatgtcaatttgccaattcagtaagattcttttaaattatttcaatgtctttgttaagtttatctgataggattctgagtttctctgtgttatcttgaatttatttgagtttcctcaaaacagctattttgaattccctatctgaatggccacatttatctgcctctctgaaatttgtgcctggtgtattatttatttcatttggtgaggtcgtgttttcctggatggtcttgatgcttgtggatgttcctcagtgtctgggcactgaagagttaggtacttattgtagtcttgtcagtgtgggcttgtttagatacatccttgttgggaakgttttccaggtattcaaagggacttaagtgttgtgatctaaaattttggtcactgccccatatttgtgttagagggcaccccaagcccagcaatgctttagttcttgcagactcagtgttatcacctttatggtccttgataacatttggaaaaattctctggattaccaggcagggactcttgttctcttcccttactttctcccaaacaaattgagtctccccctttctctatgttc

SEQ ID NO: 809096 - DNA, 645 bp, Homo sapiens
ccaccacactgttgctgtagccaaattcatcgtcataccaggaaatgagcttgacaaagtggacgttgagggcaatgttttttgttttttactgactgtcagcggacagtgccaactatcattgggcaacatcttcaggactccttttcccagggagctcccttgcctgctcatttctggctatctgcttactctaacacttcctcttttctgatttggatgatttggtttctttttcttgcctaattgctgtctctgagacttctagtacaacatcaaatagaaagggttctcagtaattttraagtgcaatatttttaaaagttttaagaccaaaaattgtacaagagtctaagaggaagaagacaagattgtaagaaaaaaaagtctgttcctctttcccttaaaccatgattatctttttttatgcaaagtaaatagtcttcttttaacttcaagattttgcctatttcttaaaaataatgtaatagagtatggttgcaaataattaacaaaagttaaatgagggaatattttccttgttttattttgtgtattaacaatcattatacttaaatatctatatataataccaaaatattaaattcaggatcttaaactgtacccttcagatacagtttaagt

SEQ ID NO: 809097 - DNA, 504 bp, Homo sapiens
tggtgaaaccgtgtctctccaaaaaaaaaaaaaaaaaaaaaacaacaactccccccaaaaatattagctgggcatggtggcacgtgcctgtaatcccagccactcgggaggctgaggcatgagaattgcttgaactcaggaggcagaggttacagtgagctgagatcatgccactgcactccagcctgggcaacagagtgaggctctgtctttttttttttaaaaaaagtgatataacatacccgaraaagtctgaaagttgcatgaacatcatgggatgaatgaaaccacaaaatccaatctacatattagggttcataggcaatgaagtacagtgattccctgaaaagcaggttttggaggcagatacttgcactttgaagcctgacacaacttcacagcatatgaacgtgcttattacttcacttctgtaatactcagtttatttatacataaactgaggctattagaattatacttcatttggttgtttttagcattgaa

SEQ ID NO: 809098 - DNA, 522 bp, Homo sapiens
ttcttgatcactggatccaatctacataatgtcatcaatgtaatggaccagtgtgatagcttgtggaagggaaaagcaatcactatctctgtgaacaagattatggcacaaagccagagagttgatatacccttgagataggacagtgaaggtatattattggccttgccagcggaagacaaattgcttctggtgggccttatggacaggaatggagaaaaaggcagtttccaaataaatggctgcataccagttaccaggagatgtgttaatttgttcaagcaatgaaaccacatctggtacagcagctgcaattggaatcaccacttggttaagcttataataatcyactgtcattctccaagatccatctgtcttctgcacaggccaaataggagaattgaatggggatgtggtgggaatcactacccctgtgtctttcaagtccttgatggttgcgttaatctctgcaacccttccagggataggatagtttttttatgatttttctagggagaggca

SEQ ID NO: 809099 - DNA, 599 bp, Homo sapiens
atgggatgaggctcccatgcctttggaaagcagagggaaaagtgggaaggactgcatcttgtggtttgagtgccagatgagctgtagtgcaatataataccaggtagattttaatgtttttgattcaaatttctgagtcctggacagaacttttggacctgcccagggactggacattgctactttaaagggaaggaaacagggctagctggctttgccacctgctaattgtagagcgtcrgggctttgaataaacatattcatcagaaagtgagtggttacagcaggccttgggtgaagccgagtgctgtgttggcttcaggtatgaaccagtgcagtcatggtggtggtgtccactgcagtgcttgtgtcactccactcttagctttaggtggctaagaacagagagaagactctgcatgtttaaaagacagtaagaaaatagaacaagagtctctgcctggtaatccagagaattctcccagacctgtccaagatcatcaaggtggtattgttccgagtctgcaaggaccacagcattactggaattcaggtgcaccctaaagcagaaacagattatatcaaaatactaaagtcct

SEQ ID NO: 809100 - DNA, 481 bp, Homo sapiens
ccttgaagagaaggatccagtcctggcggcattcatcacctgctaactgaaaatctcttgggtccctgaataaccagcaatgatatccaggtactacatcaagggccttggatgagactctaagacttactggcttcaaatgagactcaccacattccaagctattgtggttatarcgcaagactccttctacttgagagcagcaaagaaaatatgaagaagattttgtcatgcgccttaggtaccagctgggccataggagtatagagcaccaagtagggtcttggggcctctgattccagaatgtaggaattggatggcatttaaggacctgtcctgggcaagagagaagcccactgccctgaaggatgagtcccaggtcaggcagcaatgaccacaagctaactgaagggcacttgggacttaaaagaatattggcaacagtctggcagtgctcattgtgtgcctgtggtggtaatgg

SEQ ID NO: 809101 - DNA, 598 bp, Homo sapiens
aatgtgaaaggaaaatagttcgggatcccaaaatcattaaggaaaactcaagctggaaactgcttagggcaaacctacctatcattctattcaaagccacccctctgctctctgagatagttgcatattggattgcctcctttggaaaggctaaccagaaactcaaaagaatgtaactgtttgtgtaccacctatctgtgacctggaagctccctccctacttggagtctttttgcctttgcttcaagtcgtccctccttttcagactgtaccaatgtactttttacatatattgattgatgtctcatgtctacgtaaaatgtataaaaccaagcagtgccctgaccaycttgggcagatgttgtcagcacttcctgaggttgtgtcatgggtgcatcctcatcctttgcaaaataaactttctaaattaactgagacctgtctcggattttctgggttcacagtaggatatgttcaccagatatattattttagggtaaaagttttcttccttcagcactttaaatatgttctctctctctctcctagcctgtaacacttttattaggaagtctgctgccagatgtattggaactcc

SEQ ID NO: 809102 - DNA, 610 bp, Homo sapiens
aggctgcttcctgggatggtctcatctccagccaggtcaatggctaccacggtctgctgctggtacttcttacacagctccaccaccttgggggaccagtctgtgggcgagatgcccacccaggctctgtcaccagcaccatggagagacctcccagcctacctgcctgctgtcccacccaaaccccccatgggaggccagcacaaaacagggctcagtgtcttcaaatcctaactgctatgtcctaaccacatggcctgyggaaaactgctctgcttatggcctcagtttccgcccttttcagaaagaaccctgccagctattgcacagggtcacggccaggctttgccgaggccatgtgtgtaaagcaccaaggacggggcctgagctcagtaaatgacacggacccttctctcacctggtgtttccaacaacactcatggtaggcttattcccatgcgcagatgaggaaacggaggaccgtttaacacgtcatctaaaatagaactcacactagtattgggaagtatctcgctaatgtattaggtactcttaaccaataaagttattctgaagtgtttaagaaagaatgaatgaacacaggctttgg

SEQ ID NO: 809103 - DNA, 602 bp, Homo sapiens
agcacttcaggaggcaaaggcgggcggaccacctgaggtcacgagttctagaccagcctggccaacacggtgaaaccccatctctactaaaaatacaaaaattagccaggcatggtggcaggtgcctataatgccagctactagggaggctgaggcaggagaatcacttgaacccgggagggggaggttgcagtgagccgagatcacgccattacactccagcctgggtgacaagagtgaaactccatctccaaaaacaaamcaaaaaaaaaaaaaaaaaaaggagagaattagaaacataggtaaaaggtggtcaggagtcagaagcaatagaatatgtaaatcagtagcacatatatattcactgacttttgtacactgtttaaatttatcaggtacatgtttatctttaaacaacagaaagaaaaaagtgtgtgtgtacgtagtatctagcatagtgcttcaactatttaacaggtgttcaataaaaatctaagaacatgaagcaaaggaatttaatagaagaaaataaaaagacaagaccccctatcccctccatgttacagcaatctaactgaaaatgacattaaaacaatttcaca

SEQ ID NO: 809104 - DNA, 536 bp, Homo sapiens
gtcctagggccctgcacttacattcttagtctcccaaactccctgctacaggaagaggtgactgggaggggcttgggggcttcttggatgctggaaatgcttcgtaggtcgctctgattacatggttgtttacccgcaaaaaacttccccatgtgaatgtgattgcattcacaatccacgtacttgaccatgtgaatgtcataaagcttaaaaaataagccttgggctgggcagggtggctcacatctattctccccgccctttgggaggccgaggcgggyggatcacctgaggtcgggagttcaagaccagccagccaacatggcgaaaccccgtctctactaaaaatacaaaaattggccaggtgtggtggtgtgcgcctgtaatcccagctactcgggaggctgaggcaggcaaatcacttgagccaggaagcagagtttgcagtgagctgagatctcaccactgcactctagcctgggtgacagagtgagactctgtccccccaacaaaaaaaaaaagaaaaagaaaaattc

SEQ ID NO: 809105 - DNA, 536 bp, Homo sapiens
ccacccagccaggctcatttgcatgatcttttgcatatatttgcatgacttccctggttccaaataaagcctgttagtccttatcctcacttctgctgggtgctgagcaaagcttcttccctcccgccctcccctagcactgcccccgcccagacctggctggcctggactaaccccgtccttctcacctcctagccccagtcaaatatgtcatcctttgaccccatctccactttctcctagtcccccaaggcctggcacacacacatcacctcccccaccccagagccgaaagcctgttctcagtcccacactcgttttttttttttgtttgttttgctttgtttttgagacagggtctcactctgttgtgcaggttacagtgtagtggtgtgatctcagttcactgtaacctctgcctccagggctcaagcgatcgtcccacctcagcctcccaaatagctgggacgacaggccctcgccaccacrcctggctaatttttgtattttttgtagaagcaaggtttcgctatgtt

SEQ ID NO: 809106 - DNA, 500 bp, Homo sapiens
ttttaaggcataagatcattcttctgcaagatttaaatattcccctccccatcctatcttttgctgactacatactaaagttgtatatctggctctttccagtcacctgtttgctttcaaaatcaagggggaaagtctcctttcaattaataatacaatcattgttcagtcgatttataaactgaagaaaaactctatattgattacaaaagaaagaaacacttcttcagtataactgagatgctttatgttatccttatttgatagaggtagaagtaaaagtaactattaytcctaatgctgattcaagaaatgtctagagtctacatttccagtccatttaactacattttaaattccaaaggtttccagacacaccagaaaataatggaacaccaatacagaaacactacacgagtctgttaaaaacctagcttctgagtctgggggagcttttctataggaagtacagtcatgtggaggtcagaaacaagttttgt

SEQ ID NO: 809107 - DNA, 500 bp, Homo sapiens
ttttaaggcataagatcattcttctgcaagatttaaatattcccctccccatcctatcttttgctgactacatactaaagttgtatatctggctctttccagtcacctgtttgctttcaaaatcaagggggaaagtctcctttcaattaataatacaatcattgttcagtcgatttataaactgaagaaaaactctatattgattacaaaagaaagaaacacttcttcagtataactgagatgctttatgttatccttatttgatagaggtagaagtaaaagtaactattattcctaaygctgattcaagaaatgtctagagtctacatttccagtccatttaactacattttaaattccaaaggtttccagacacaccagaaaataatggaacaccaatacagaaacactacacgagtctgttaaaaacctagcttctgagtctgggggagcttttctataggaagtacagtcatgtggaggtcagaaacaagttttgt

SEQ ID NO: 809108 - DNA, 500 bp, Homo sapiens
ttttaaggcataagatcattcttctgcaagatttaaatattcccctccccatcctatcttttgctgactacatactaaagttgtatatctggctctttccagtcacctgtttgctttcaaaatcaagggggaaagtctcctttcaattaataatacaatcattgttcagtcgatttataaactgaagaaaaactctatattgattacaaaagaaagaaacacttcttcagtataactgagatgctttatgttatccttatttgatagaggtagaagtaaaagtaactattattcctaatgctgattcaagaaatgtctagagtctacatttccagtccayttaactacattttaaattccaaaggtttccagacacaccagaaaataatggaacaccaatacagaaacactacacgagtctgttaaaaacctagcttctgagtctgggggagcttttctataggaagtacagtcatgtggaggtcagaaacaagttttgt

SEQ ID NO: 809109 - DNA, 636 bp, Homo sapiens
atatatatttatagctttatgattatttgtccatatacatatatgtctgctttctccacaaaatattcctgagaggtacagaaataattataaccagtcctcattttgagatgagggaattaagccccaaagagtttgaatgattaccttaaaggcatacgaataactcactgttagaaccagcattgcatgtaggttattcaatccacattcaatgctyttatgtacaataaggatgtagtatatgattcaaaatagtttgaaacactttacaacagaagctacatataaacaaaaatcattattctggaaataaataccagtaatataataaatatgcatgtagtcataagctaatctatatcctgtggacaagcatttactatagatcttttttttttttttttttttttttttttttgagaccaggtctcactctgtcacccatgctggagtgcagtggtacaatcttggctcatgcaacctctgcctcctgggctcaagtgatcctcccatccagcctcccaagtagctgggaccacaggtgtatcccactacagccagctcatttgtaggtctaaatttcattgtaacaaagtcaaaaggcgttacataatttgtatcatctgagaaata

SEQ ID NO: 809110 - DNA, 546 bp, Homo sapiens
gtaacctctaggacaatcaaggagcctaatatacatgcaattggaggccacaaaagaatagaaaaatacttgaggaaataatggttaaaatttttctaatttgatgaaaaccacaaactcacaaatctaaaaagctggatgtttcctaaccaccagaaatattwaaaaaaatcaagatacattatattcaaattattaaaccaaggctaaaaagaaaatctgaaaactagccagagggggaaaaaagacattatatagagtaacaaagttaaacaggtagcagatttttcattagagataatccaaggcaaaagacaatagaggaacatatttaaagtactgaaagaaaaacataattgtcatgtagaaggctatacctagtgaaaatacctcttgaaaggagtgattttctcatacatgcaaaggctgaaagaattaattatcaatagacctggactacaagaaagactttcaagcagaagaaaagaaacagatttatatgaggaatgaaaagtaccagagatggtaaatataaaagacctcttt

SEQ ID NO: 809111 - DNA, 614 bp, Homo sapiens
gtcaactggagatgtgactagggccagaagactcccaagatggctaattcacatgactgttggcaggaggccgaagttccttgctaacttttggcaaaaggccaccatttcttgcctgaaggtttctccatagggttatacttgagtgtcattacacgtaacagctggcttctattgaggaggcaatccaagacacagattaaggaggatgccatcagtgtcttttatatcctaatcttggacatcatacaattttaattctgccrtattttatttgatagaagccagtcatttagcactactcaaacatgggggggtggggggcagaatttagtgtctgtctctttaagggaggaataccaaattatttgtgaatctattttaaaaccaccacatttaataagggaatattatgaacaactttataccaataaatttgacagcttttatgaaatgaacaaataacttggaagacagaattatcaatgatcactcaaaaagtaagagataaccagaatattcctatatctactaaaaaatttaacttgtagtttaaaaactttcccacaaaatcaaaacaaaaacaaaaactctaggctcagatagctgctcta

SEQ ID NO: 809112 - DNA, 632 bp, Homo sapiens
caaagataaacaagtcaggaaatcctcccagtttgttctgaaaaggcattcccagctcgacaaggatttctcagttctttctgctgctggcacttctattgattgggaaggaagatcccaggagggaaagcatcaaggtgatctgaataatattcttgaaaatgccggtgcttttgtaaatgctaaagataaaacatgccgactatagagaggaacaagaggtatcttttgtcaaatgaaagaaatcgtttatgttgtgtgctccacgtttacattttttttacatcctctttcatggagtgttttgtaaattagttaaggtagttataactgtggttcctcaatttcaagacccattttcccttttccaggtcaacttcacacaaactaactttaaggaattcctctctatgggaattttgtaatactcagaaaaatgtgacttttatgaaagtgttagaygagaaatttaatgacttaaaatcagctgtgttatttgagaacataaagagaatttcaagtccaaaaaaaaaaaaaaacaggccaattattggttcgtataaatcattgagcacacagataatgaataaacacctacatgtgtttacataattttgtatgaacaaatctca

SEQ ID NO: 809113 - DNA, 595 bp, Homo sapiens
atatatgcttatggcaatatcatagggatccttcttctaggggacccaatatccccttattcaagatgttctgattctgtgacctggctcaggtctgtgaacagagtgagagaccatgattttcactgtaataattcaagtcaggtctctctccactagacctagatttttccccctggttatatagatcccataaaacttcagtaggtgtgtgggtactttggtacttttcacaagcccaacccttcttctaagactggagcattcattaccacaactgatgagggtgttggcagcaacatctcagccaggtccttctttggagcttgcctgggcctgaggacagaacttgcttgcccaagattatgcctcttgctgggggcagcctatatcaaatggcaggtcagtacagaggcataaaagccaggcacctttgctccaaatcrgaacactctgcagatccatctcagcttttttttttgcctagtgctgcttccttcactttcccatgggtactgatcccaagagcatttcccaagaaaatttcgtaatgcaaattttgtatcagagtttggtcctgaggaaggtgaaccat

SEQ ID NO: 809114 - DNA, 619 bp, Homo sapiens
ggtcgtgacagaggttgaaatgcctactattccagtaccgagagcaatagtggaggcagaaagtcctaaaccgacaagcaagggaattagcggaataactcttttttgttgtgtcggtgtcatgaggggaacaggaagatgttcagtcccatttgcaaattgattttgggagtaaggaaaactagtgtgcatgtgcctgtccaattagcaggtagacacatgtaggtagaggatccacagaggaagaagagaccttgtgcggagcaaaaccggaaatgcaaagtaaaaagatgagaaggagtgctgaaagaggtgtcttgtacccagactcctagggatccagctarggcggcagccgtcagaggttgtaatggggactgatggggtaactacgtagagggggaggtttgattttcatggtgtatgagaaaactttgagtgtctacgagcaacctttcactgttatttacggggctgagtataagcaaacaagaagagggcctgggaggagagtctgacaagcaaggggaaggtagccaaggatggagtgaaatacagggtaagtgtcttcctaagcaataataactgctaatgtgtttaagtttgccagtattgatag

SEQ ID NO: 809115 - DNA, 605 bp, Homo sapiens
gggctgaatgttcaaataccttgaaagctgggctttgttctgtaggtgagagcgaaccatcagaagttcttttggagggcgtgttattctaaaaagcctgtttttattatgtacatatttattttttgagacggagtttcactcttgtcacccatgctggagtgcaatggggtgatcttggctcactgcaacctctgcctcctgggttcaarcaattctcctgcctcagcctcccaagttgatgggatcacaggcacccacaaccacgccccgctaatttttttttttttttttttttgtatttttagtagagatggggtttcaccatgttggccaggctgctctcgaactcctgacctcaggtaatccactcgcctcagcctcccaaagtgctgggattacatgtgttagccaccatgcccggaaaaagcctgttattttacttgattcttttaaaagataggcaaaggtcagatctttggactagtgaggaaaatacaggttaaatgatttttccaagttaaccagcaagtccatgatagtgatgaaggtaatgaaaatagtaacagctaacatttatcaagtattttctatatgccaggccc

SEQ ID NO: 809116 - DNA, 644 bp, Homo sapiens
cagcctaggagccagtgcccctccagcagctcacggtggagtaggagccgggaaacgcatgtgtgtgatgtgttcatgtcattccatttttctctgtccttattcttcccaaagaaaagtaactgtgcagccacaggcgcccctcaccagtgaactcgcaggctcagtctctgagcctcgtatgcctggcaccatgttcccggagctttgctggactctactcacctcccaagcccctgtgcctttggaggcagcaggtgtcaaccattcaacactcacgctcatttccaggcatgcagagcctttgcrggccacctgtttggagttggctaaaaaggattcgtgacaattttttttgttgttttttttaagatagagtctcgctctattgcccaggctggagtccagtggtgcaatctcagctcactgcaacctccacctcccaggttcaagctattctcctgcctcagcctcccaagtagctgggactacaggcatgcaccaggtaatttttttgcatttttagtagagacagggtttcaccatgttggtcaggctggtctcgaactcgtgacctcaaatgatccacctgcctcggtctcctaaaatgctgggattataggcgtgagccatcgcacccggcc

SEQ ID NO: 809117 - DNA, 597 bp, Homo sapiens
aagtcaaaagaactatatgtgagtatcatggctaaatattaaatacacgaagccatgtccaaggactgaaatgaaggccaccttcaacctcctttatcagcacagattctgagaggagcggtggggattccgaggctccgagggaaggacacgaggccccagccaggctgttgtgttggggtgaagagcgggcggcctcacacaggccctggggccgcagcgtccacrgccccgctgcgaaggcggggaaaggaccctcagcagggaacgcagcccagcagcggggccctcgggatgaagagctcggcaaggagcctgggagcaaggaacacatgactcacaaacctctggaaaatgcccgggaatggaaggaaccgagttccagtagacaggaggcaggaggagggaagaaccggccggaaggtctttatctttctaggtttccattcgacagacgccccaccagtgacgcctgaccacatcaacgctgtgcaacaaagatccccaactccatgctgagagggaccccaccgccacgacgtgtcaccggggcctgtgcatcgcagggcccagctcctcatgggagctccttgagga

SEQ ID NO: 809118 - DNA, 536 bp, Homo sapiens
attgtctgtcttgtgaactattcctccctgacctctactaagaggtcatctcccttgtgcaatattccttgaaaacaggtttgccttttttctttttttttttttgaggtggagtctcactctatcgcccatgctggagtgcagtggcatgaccttggctcactgcaacctytgcctcctgggttcaagcaattttcctgtctcagcctcccaagtacctgcgactacaggcacacaccaccacacccaggttttttttttttttttttttttttttttttttgtatttttagtagagacggggtttcaccatgttgaccaggctgttcttgaactcctgactgcaggtgatccacccgccttggcctcccaaagtgctgagattacaggcataagccactgcgcccggcccctgtttttttcatctgtgaagtccaatatctttcatgagttagacacctaggcagaaacagggaaatacgctgcaaagattctgataaaacctgcttctgttgtaataaaggctaacgatccac

SEQ ID NO: 809119 - DNA, 536 bp, Homo sapiens
attgtctgtcttgtgaactattcctccctgacctctactaagaggtcatctcccttgtgcaatattccttgaaaacaggtttgccttttttctttttttttttttgaggtggagtctcactctatcgcccatgctggagtgcagtggcatgaccttggctcactgcaacctttgcctcctgggttcaagcaattytcctgtctcagcctcccaagtacctgcgactacaggcacacaccaccacacccaggttttttttttttttttttttttttttttttttgtatttttagtagagacggggtttcaccatgttgaccaggctgttcttgaactcctgactgcaggtgatccacccgccttggcctcccaaagtgctgagattacaggcataagccactgcgcccggcccctgtttttttcatctgtgaagtccaatatctttcatgagttagacacctaggcagaaacagggaaatacgctgcaaagattctgataaaacctgcttctgttgtaataaaggctaacgatccac

SEQ ID NO: 809120 - DNA, 536 bp, Homo sapiens
attgtctgtcttgtgaactattcctccctgacctctactaagaggtcatctcccttgtgcaatattccttgaaaacaggtttgccttttttctttttttttttttgaggtggagtctcactctatcgcccatgctggagtgcagtggcatgaccttggctcactgcaacctttgcctcctgggttcaagcaattttcctgtctcagcctcccaagtacctgcgactacaggcacacaccaccacacccagsttttttttttttttttttttttttttttttttgtatttttagtagagacggggtttcaccatgttgaccaggctgttcttgaactcctgactgcaggtgatccacccgccttggcctcccaaagtgctgagattacaggcataagccactgcgcccggcccctgtttttttcatctgtgaagtccaatatctttcatgagttagacacctaggcagaaacagggaaatacgctgcaaagattctgataaaacctgcttctgttgtaataaaggctaacgatccac

SEQ ID NO: 809121 - DNA, 536 bp, Homo sapiens
attgtctgtcttgtgaactattcctccctgacctctactaagaggtcatctcccttgtgcaatattccttgaaaacaggtttgccttttttctttttttttttttgaggtggagtctcactctatcgcccatgctggagtgcagtggcatgaccttggctcactgcaacctttgcctcctgggttcaagcaattttcctgtctcagcctcccaagtacctgcgactacaggcacacaccaccacacccaggttttttttttttttttttttttttttttttttgkatttttagtagagacggggtttcaccatgttgaccaggctgttcttgaactcctgactgcaggtgatccacccgccttggcctcccaaagtgctgagattacaggcataagccactgcgcccggcccctgtttttttcatctgtgaagtccaatatctttcatgagttagacacctaggcagaaacagggaaatacgctgcaaagattctgataaaacctgcttctgttgtaataaaggctaacgatccac

SEQ ID NO: 809122 - DNA, 597 bp, Homo sapiens
gtagcattcataacttaattcctttctgctaactccaagcttttagacaaatttttgttcctttaattgcagattatagaatatctgaatccacctatgacttgtaagcccttgcttcaagatatcccaccttttcgggctgaaccaatatatactttccaggtatcgatttatgcttttgcctgtaactcctactacctccttgaaatgtataaaaccaatctgtaatttaaccacctcaggaccaaacttgttgggtttgtgtttttccttgggctgtggtcactcatactggctcagaattaatattttaaaaatattttacagactttagtttttctattaacacacacaaaaagtattcctggtgtatcacaaataagcatttcagtacartgattagaaataaccttctttgatctaatctccactattacaaagatcttaaattggtaactgtgacttgagcacattcaaacctggatttgagtttttcccttgttcaggagaacctcagccctgttggagagggtttatgcatgctaaggtttctttctcctttgcttagaggaagaggtgcagcatgcagaggaaggg

SEQ ID NO: 809123 - DNA, 642 bp, Homo sapiens
gagatttctaaacataaaagtggctgagaatgtgccagagacagactgctttattcaaaaatttatctaaagttgactctgctccaagggaagatgcaggaaactgtaactcctcctgaatagcatgattgctgttctaaatcccctaaatccagctagcgctattgtatgaatgaactgtgctamaggggctgcatcagaacaaagctgcctgccaaagacaggatttttgtttttgagaaaaagtgtactgtgggagactcctattcattcttgaaaaccctgaatagtctttttcttcaaggaagacttccttgatatttactttcactgccccttcactccccatcagatctatttctgtttatattgattacattctgttgtcattatttatttatttgttgactccttaaagacaggtcttatgtatttctttttttttctttgtagtttacctaagtacctggcccatggcagacaatcaatcaatatttgttgaaataaacttaatttattttgaaactattttttaatatatgttagagaatatctgtttacagttgtctagcttgatggtcctacttttaaggggcttgaaggtgttaattagagagtaatgcagataacagaaggactaca

SEQ ID NO: 809124 - DNA, 624 bp, Homo sapiens
cttatgcctgtattcttagttctagtggactgggaccctaaggcacttgagacatagtgaggggggtggggccattcatttcatttaacaaatatttattgaacaytgatggtgtaccaagcacagggctgtgctaaggagatgggacatgtattcatattctatgtcattctagaactgctgttggtttcatttcaacaaaaattttttagtaccttagataaaacatctggaacttgaaacaaaattggcaaattcatattcttcttggatgaagtcagaaaagtcgcagaggtatgaggatatctaagtaattaaaacaagagaacgttagaaccgcagtcccatgtttgaagagccaggcccttggttgtttctgagagaatacaagggacaccacagggagctatcttccactccagttctggagcactcaggccattggggagctcccaaaagatggatttgccctcctatgtcactttggcttttctgtcccttttgttttgcactaaccaattttggattgtcagacactgtacaaacaaggcaggataaagattgttcacaacagtagatgtgtaatgagcgaaatgaatcccaggtttcctctttgaaagggtc

SEQ ID NO: 809125 - DNA, 511 bp, Homo sapiens
atgtcacccagcctggactgcagtggtgccatcatggctcactgtaaccttgagctcttgggttcaagtgatcctcccatctcagcctcccaagtggctggaattacacgtaccagtaaccatacccaactaatttttttttttttttttttgagatggagtttcgctcttgttgtccaggctggagtgcagtgggatgatctcggctcactgccacctctgcctcctgggttcaagcagttctcctacctcagcctcctgagtagctaggactataggtgtgtgccactccacccagttaatttttttgtatttttagtagtgacagggtgtcaccattttgggcagtctggtctcgaactcctgatctcagrtgatccacccgcgtcggcctctcaaagtgctaggattacaggcatgagccaccgcacccgaccttttttttatttttatttttgacagagacagagtctttctatgttgcccaggctggtcttgagttcctaggctc

SEQ ID NO: 809126 - DNA, 596 bp, Homo sapiens
tattcttgcctcagagaaagaaggtaactatgtgagacgatagagatgttaatttgttccactatagggaccattttactatatatatatatatatatcttgtaacagcatattgtataacttacatgtacacgataaaatttattttaaaaaaggaaaatctggctgggtacagtagctcatgcctgtagtctcagcactttgggaggctgaggtgggyggatcgcttgagctcaggagtgcaagagcagcctggacaacatgtaagacctcatctctacaaaaaataatttaaaaaattagtcgggtgtaggaactcatgcttgtagtcccagctattcaggaagctgaaacaagaggatcacttcagcctggaaagttgaggctgcagtgagccatgatcgtgcctctgctctccagcctgggtgacaaaacaggaccctgtctcaacaaagaaaagacaagagaagagaagagaagagaaaaagaacatctggaatatccaccaaaattaaaaggaaaagtaaaactacctgtagctactccatcaagtaataattactgttaacattctgatatatttccttttagtattt

SEQ ID NO: 809127 - DNA, 596 bp, Homo sapiens
tattcttgcctcagagaaagaaggtaactatgtgagacgatagagatgttaatttgttccactatagggaccattttactatatatatatatatatatcttgtaacagcatattgtataacttacatgtacacgataaaatttattttaaaaaaggaaaatctggctgggtacagtagctcatgcctgtagtctcagcactttgggaggctgaggtgggcggatcgcttgagctcaggagtgcaagagcagcctggacaacatgtaagacctcatctctacaaaaaataatttaaaaaattagtcgggtgtaggaactcatgcttgtagtcccagctattcaggaagctgaaacaagaggatcacttcagcctggaaagttgaggctgcagtgagccatgatcgtgcctctgctctccagcctgggtgacaraacaggaccctgtctcaacaaagaaaagacaagagaagagaagagaagagaaaaagaacatctggaatatccaccaaaattaaaaggaaaagtaaaactacctgtagctactccatcaagtaataattactgttaacattctgatatatttccttttagtattt

SEQ ID NO: 809128 - DNA, 608 bp, Homo sapiens
tgtcattaagtgactcatgactgtatctctatttcacaactgaggaaactgaaactcagcgaagtacatcacttgcccaaggccacacagtgggtaaatgggactaggcatgggatgcaggcagcctgtcttagatcccacrctcggatcccataccctgcctccagggtctcagactttacgttttactgaaaagacagcctaattcatgagcagctggatctcagaaagggagccaagctccttggtacacagatggcccaaccacgaatggtatctgaagggctcaataacaggagccagccgggtatcttcttcaccctctggggtgaccaaagacacgaaggactgagagaaagcctttagaggcctcccccaaaatttaatccgtttttgtgattgtttctcctggactagactgccttgaggataaaataaacatgagcgcctggtggcagtgcaatacctgagtggtacgtgggctctgcaggccaactgcctggagggaggaagccccatcaccactacttgtgtttctgttccccatttgcaccacacccctcctttgagggtaactgaagcctctgagttgtcaagatccttaaaag

SEQ ID NO: 809129 - DNA, 631 bp, Homo sapiens
agagctgggagcacatttcatcagagtagcaggcccacctggtgccagagggcctgcccctcctgcttctgttcctttgccttgcagtctcctggagagagcctctcttttcctgtacagcctttgggccaaaatgcccttctagcttctccaaagaagatccgagtttatttcattctatgttttaagaggtaaaaggacataacaagtgaargaagttttgggctaaagtaggctatgtctccttatgtattactcaatactgttttgcagagaaaacatttttcaagcatgtgcttcctgaagacacctcagtctttgggccatttgatttccaatacatagggtggaagaatgtgattttggggctgaccataaactggaaatttgtgaaatggcagtgattgggcaatcttcagtttattttttcagttgaagtggaactcatttctggaatggatttaataggctgtgtctaatgtacaaactgggtgagtcctgccttagtgtgtcctgccccaccggtacgcttccaggatactcttttcccctctgtaaagtcactttcttctgatggccagtgtcactatgatgtcagtgaggtctggggatgaggacagtgtgtcctgaa

SEQ ID NO: 809130 - DNA, 592 bp, Homo sapiens
tttccaaaatgactcagtgaaatatagaaataagaccttagagctgatgattgactggtagaagggggttttcattctcttatctggtgtagcatgcctttggatgtccctgtgttttagggcagtataaacagtattaatacatgatgacttggctgttgaacaaaaagggcctgagatatgggcaattgtgtggtgagaggtattcttcaaagacaagctcttcaagatgatttcctgcagagaatcctatcaagcctgaatgaacaatgcaaggggtgactgtcttacaagcttcagcrcaaaacattttggtaccacagtctgtgggttgttcacctgcaggacagtagcaaggtaagtcataataaagcactctagtgaaaaaagaagtgtccacacaagctgaagagcagatatggggtgtgtcaacaacactgtcatatgatatgtgttccaaatttctttggtggaaacacagatgcaaagatattaaccgaaagagagagaaaaagagagagagcgcgagagagcgcgaaagccagctgaaacatttttatagatcattatgatattaattccccagactcaa

SEQ ID NO: 809131 - DNA, 592 bp, Homo sapiens
tttccaaaatgactcagtgaaatatagaaataagaccttagagctgatgattgactggtagaagggggttttcattctcttatctggtgtagcatgcctttggatgtccctgtgttttagggcagtataaacagtattaatacatgatgacttggctgttgaacaaaaagggcctgagatatgggcaattgtgtggtgagaggtattcttcaaagacaagctcttcaagatgatttcctgcagagaatcctatcaagcctgaatgaacaatgcaaggggtgactgtcttacaagcttcagcgcaaaacattttggtaccacagtctgtgggttgttcacctgcagracagtagcaaggtaagtcataataaagcactctagtgaaaaaagaagtgtccacacaagctgaagagcagatatggggtgtgtcaacaacactgtcatatgatatgtgttccaaatttctttggtggaaacacagatgcaaagatattaaccgaaagagagagaaaaagagagagagcgcgagagagcgcgaaagccagctgaaacatttttatagatcattatgatattaattccccagactcaa

SEQ ID NO: 809132 - DNA, 621 bp, Homo sapiens
atgtatctggagccatgacaaagaaagtttttaaaacaattgcttatttatccttaattcatcgtaataaccattactgttctcaaacctaaaaaaaaatcacttctgccattttgcttcctcttcgaccttttatcttccttttcttgtactcatatgtaaaatrtttctgtgacaacttgagtagtagttaatctgcttatgccattctggacagacacaaagagatggtgtccccatgtgtgggaattactcccagtgcagcgggaatgaaattaaactacaatctcaagtcctctgaagaagtccctgaagagtacagcccctggttaaaatccatgtgtgaattttcaggcctgaccataggcaattacaatggctttacctggcaggcctcgtggggaaatctgcctttccctcaccagactttatagccaatgcactgcagcctcaggagagagtggcagtcaaggactcaggtcccccagccaatcatgctctttcacatatttaccttcgtaacccaggaaccttcattccaaggtctctgacacctccgacagagaccttcttcaggttcctctgctgaaaccttcttatgcaggaggagggaaaaacctt

SEQ ID NO: 809133 - DNA, 602 bp, Homo sapiens
agaaattatatccttcctattcgtataagtgaagacaaaaggcatcactcttccaaccctggaaatcccttccctccctcagggtatggccctccacttcatttttggggcataacatctttatagcacaagggtaaagtcccaatactaacaggagaatgcttaggactttaacaggttttccagaatgcatcaataagggccactaaatccgatttttcttggtcctctttgtggtctaggaggacaggcaagggtgcaggtttttgagaatgcattggtaagggcsactaaatctgacattccttggtcctccctgtggtctaggaggaaaactagtgtttctgctgctgcatcagtgagcgcaactcttctgatcagcagggtctagggactgttgtgggttcttgggcaagaggtgtttctgctgctgtgtcggtgagctcaactattccaatcagcagagtccagggaccattgtgggttcttgggcaagaggtgtttctgttgctgcgtcggttagcgcaactattctgatcagcagggtccagggaccgttgtgggttctggggcaccgggagaaacaaacaaacccaaaccgc

SEQ ID NO: 809134 - DNA, 602 bp, Homo sapiens
agaaattatatccttcctattcgtataagtgaagacaaaaggcatcactcttccaaccctggaaatcccttccctccctcagggtatggccctccacttcatttttggggcataacatctttatagcacaagggtaaagtcccaatactaacaggagaatgcttaggactttaacaggttttccagaatgcatcaataagggccactaaatccgatttttcttggtcctctttgtggtctaggaggacaggcaagggtgcaggtttttgagaatgcattggtaagggcgactaaatctgacattccttggtcctccctgtggtctaggaggaaaactagtgtttctgctgctgcatcagtgagcgcaactcttctgatcagcagggtctagggactgttgtgggttcttgggcaagagrtgtttctgctgctgtgtcggtgagctcaactattccaatcagcagagtccagggaccattgtgggttcttgggcaagaggtgtttctgttgctgcgtcggttagcgcaactattctgatcagcagggtccagggaccgttgtgggttctggggcaccgggagaaacaaacaaacccaaaccgc

SEQ ID NO: 809135 - DNA, 635 bp, Homo sapiens
cttttctgtaagagggaagggaaatggagtgaaataccatatgtccaggctttcttttcattgaaggagaatccacaactatgtaaagcttgcaatttacatcccacaggaggacctgtcagcctacctccatatcccagcctccctatagctccccttcctattaatgataagcctcctctaatctcccctgcccagaargaaacaagcaaagaaatatccaaaggaccacaaaaacccccaggctatcagtcatgtccccttgaagctgtagagggaggggaattcggcccaacctgggtacatgtccccttctccctctctgatttaaagcagatcaaggcagacctggggaagctttcagatgatcctgataggtatatagatgtcctacagggtctagggcaaaccttcgacctcacttggagagatgtcatgttattagatcaaaccctggcctttaatgaaaagaatgcggctttagctgcagcctgagagtttggagatacctggtatcttagtcaagtaaatgatagaatgacagctgaagaaagggataaattccctactggtcagcaagccgtccacagtatggatccccactgggacctcaactcagatcatggggactggag

SEQ ID NO: 809136 - DNA, 597 bp, Homo sapiens
gcaaggaaaacactaatgtttaaagattgagtggggaaagcaaagtttggttgagaagtgttaggaggcaggagcaaagcaagagttaaggaatcatagtatcaaaggggaaaagatattgaatggaatgatcacctatatcaagggataaagtatttctcaaagactgttccaaggaataactcttccatgatttactgttttggaaaactggtcaacttagtgagataaatgctgaagtctacatacttctcttgcagaatcccccaaaacattagcataataatgtctctgagaagtcttgctatacagacaacatagattttaatttccaaattaaagtttccamagctcatggtctgggcacatatctcttccttttccccctacataacaactgttaataatagtacagggaactggatcccaaggaacactgtgaaacaatgctattgcataaacgattaggtaaccattaagaggattcctttggatttgacaattacgggccttgtctgagtggtttccatagagttgtggggtcttaagggtgaatagggaggggcagaattaaagcagtaggcataatctgctcct

SEQ ID NO: 809137 - DNA, 615 bp, Homo sapiens
tttaagctcaatcttgaaaatatatctcaccaccttcgctcttcttttgacctttttttttttttttgatacagagcttctctctgtcatccaggctagagtacagtagcacaatctcagctcactgcagcctccacctcccaagttcaagcaattctcctgcctcagcctcccttgtagctggggttacaggtgtgcaccaccacacccagataatttttgtatttttagtagagacggggtttcaccacattggtcaggctggtctcaaactcctgacsttgtgatccacccgcctcagactcccaaagtgctgggattacaggtgtaagccaccgtgcctggcctttttttttctttaagagatgaggtcttgctctgttttccaggctggatcctgggcttgagggatcctcctgcgtcagcctctcgagtagctgggaccacaggcacgaccaccgatgcctggctaaatttttacttttttgtagagatggaggtctcgccatcttgcccaggctggtctcgaactcatggactcaagcaatcctcctgcctcagcctcccaaagcccatgtctggcctgggctgtctattctgtctcactgctctatg

SEQ ID NO: 809138 - DNA, 625 bp, Homo sapiens
tcaccagataataatgcatctagaggaatttggttgacatcaaagatcatacaatataatgaaaaataaataaaatggggtcagagcagctccaagccacagttttcctatctgtaaaatgaaaataattagccctatcttcttaaaattggctttatagaacatagcagcatctgcacattttcttaaagtttgtgaagcagttttatgttttatcccaacttatctttcatattaagaattttattaattctttatgacaaagtaagtcatctaaataaaccagcagtctgagtatattaattcagctgaaatgattatatttcaaggactgcatagattggatttcctggccttcaaggtagctctgattctccaaatcaaaaagcccaaaacagttcagaaaacagatattctcaccacccagaaaaaaaaagaatgtgargtaaagaaaaaaaaaagagaggggagatataaatttaaatagcagtccgtatattctgagtaagaacgatcataccaggaaaaatttcttccctgaggaaagctaagaacagactgtaacagtcaaatgtggagtgatattattttctatttcccttgtcagaagggattcagtctttga

SEQ ID NO: 809139 - DNA, 486 bp, Homo sapiens
tttatttatttatttatttaatgtcattagtttttttttttttttttttttttgtgagggagtctggctttgttgccaggctggagtgcagtggcatgatctcggctcactgcaacctctgcctcccgggttcaagcgattctcctgcctcagcctccagagtagctgggagtacaggcatgcaycaccacacccagctaatttttgtgtttttagtagagacggcattttaccatgttggccgtagctggcatggactacaggcatgcgctaccatgcccagctaatttttgtgtttttagtagagatggcgttttaccttgttggctaggctggtcttgatctcttgaccttgtgatctgcctggcttggcctcccaaagtgctgggattacaggcgttagccactgtgcctggccagtattgttgtttttactatggtttgaataatgtggctttttgctattgaaaagaatatgaatgccct

SEQ ID NO: 809140 - DNA, 589 bp, Homo sapiens
gtatgagtgcttcccaaaatacacaacttttgcaaatacttgaaattaacatttgtgaaaaagacaaattgcagattgagtgtcaagcctaccaacctgtaaagtacttgaaagtaaattgcacttaggaaggaagaaagccttccccccactcttgggagtggtttctcaataactgtagaaaytgatagtaattttcctaggaaaaggaaagcttaaattaaggtgaacatggagtgaaataactcataacagtaaaagagcaagagagaccttttaacctgccccccttacggcacattcccttactagcaaggcaagtgtgttcctgatgaaactcactgtgtccctccctggcagagcaggcctacatcaggtggcagatgtaggctctgaaatacatccatataggagatttcaaatttccctgtagaaactcaggatagtctccaaagaaatggaatgacagggacctaaccagagcactcatgtatacagaatgggtgttagaaacagaaaggaggtagagattccagagttacttttcatagaaaattagcttgaaatgctttcttccaatctggaaact

SEQ ID NO: 809141 - DNA, 602 bp, Homo sapiens
ataaaacctgaaagtgtaaaacttctagaataaatcacaggggaatggttcatgacatttgtcttggcaatgatttcttgcatatgatactaaaagcacaagcaacaaaagcaaaaatagacaggtgggacaatatcaaacattaaaaaaaagcttctgaagcaaacaaaaataatcaacagactgagaaggcagcctacagaatggagaaaatatttgcaaaccatgtgtctcataaggggttaatatatcccaaatatataaggaatacttgtaactctgtagaaaaaaaaaaaaacaggtaacataatttagaaatgggctaaggacctgaatagacacttattcaaggaagacatacaaatggcccaaaagtatatgaaaagttgccgaaatcactaatcatcagggaaatgcaaatcaaaaycacaatgagatatcacctcacatctgctaggatggctatcattaaaaaaatgaaatatcatatgtctttgaggatgtggagaaattgaaactcttgtacactgttgataagaatgtaaattggtgcaccccctatggaaaacagtttggaggtttctcaaaaaactgaaaacaga

SEQ ID NO: 809142 - DNA, 588 bp, Homo sapiens
aagtttgagttttaggaaaggctaagtagctcttcaacttcctgtgaagttgaactgtggcctgagcttagcatctctccaacacctgctcacacttaccatccaccgcccatccctcccttcttttctgttcctgtatactactatgttctgtgaatgagatatcactacaaacttatgtccacagaaagagaaagcatgaggtaaraaataacagaatgactccctataagtgacttaagacatctgatgaaggtctaaaagcaggtccttcttccctctcaggctaagtcttcacctggccaaaattcatgcaaaagaagcaggtgactagagtagtgtggaccaatgtatttttgtcaaccactttaaagcaaactgctagaaatattgtctttctttcttatcttctgatttccctgaaaacagccaatagcaaagcagaagttctatcttcctttctaaaggacagaacaatcattgcccaagaatcagaagatgcaggttcaagttcgacatcgacaagataccagccatatagcctggggcaagtgatttagcctccccaaatatcagtttcctcagaca

SEQ ID NO: 809143 - DNA, 588 bp, Homo sapiens
aagtttgagttttaggaaaggctaagtagctcttcaacttcctgtgaagttgaactgtggcctgagcttagcatctctccaacacctgctcacacttaccatccaccgcccatccctcccttcttttctgttcctgtatactactatgttctgtgaatgagatatcactacaaacttatgtccacagaaagagaaagcatgaggtaagaaataacagaatgactccctataagtgacttaaracatctgatgaaggtctaaaagcaggtccttcttccctctcaggctaagtcttcacctggccaaaattcatgcaaaagaagcaggtgactagagtagtgtggaccaatgtatttttgtcaaccactttaaagcaaactgctagaaatattgtctttctttcttatcttctgatttccctgaaaacagccaatagcaaagcagaagttctatcttcctttctaaaggacagaacaatcattgcccaagaatcagaagatgcaggttcaagttcgacatcgacaagataccagccatatagcctggggcaagtgatttagcctccccaaatatcagtttcctcagaca

SEQ ID NO: 809144 - DNA, 625 bp, Homo sapiens
gcaggtaaaagtaccaatgtatcattatagctaagtatttgagaaaagaataattgttatacatttgtgcccttaaaatttatttatataaaacagctgttcttgattaggctgttctcataaccaagaagtgatgtttcatggggcagagttcagctgaatgtatatctgtggcagagatctgggggatgtgttcccttcacccagttcttcttaagctctgtgccccatctccttcccatttagtacaaaaatytgaaaactgtactgttagtctttctcctcatctatagaatacataataaacttgcttacatgctccaggctgtaggctaggaagctatgtcctcctagtcagttctccagttcctccctacacttgcatttcaagttcttatcaacacagtagttcctgcttacaaaaggctcataaaagcaggctgctttgcttccacctctaagagactggggacttttttggtgggtgtggacgtaactagcgaaaggatgaagtagaggggaggatagagctgtatgcaattagaaatgcagaagccatttttcctaggggagaaatagcaaaaatgatatttaaattccatggagatattcattctataattct

SEQ ID NO: 809145 - DNA, 611 bp, Homo sapiens
tgatcctcactccggatctgcttatctggaatctgattcctgttcacggtagtttttaaagcactggactggaggatacattctaagctaattttcatggcctataggcaaatttgatctgaagaggtaacacagtattaagagtccagggtctggaactaggcagactttgagataatcctgatgtggccaattaygagctgtgtggctgtgtgggatttccttccctgctttgaacctcacagggttgtggtgcaaatcaaatacatttttacatgcaaagtgcttaaaagagtacatggcaaagagtaaacacagaaaatagcagtgtcttttagctcctgccaaaagtctgcacacaggccctttatttagggctaagtgtaaatgactgatacagccaactaataatcaacatgataatcattcttatatagctctgtttttcagaggaggaaacgatactcggagaggtgaagcaagtggtgaaaggggatgaagagggaatttgagcacaaaactgtcttactccagagtctgggtgcataaacttgacttatgcatacttgatttaatttttttttttttttttgcaaactacctggtgagta

SEQ ID NO: 809146 - DNA, 545 bp, Homo sapiens
tccatcaagtcctccccagaaaaacatctcaatgccctgtgagcaggaacagtcccaggtgaaactccagtctggccatttatggcacgtgaccttggggaggccaaggtcatacattagtctgtattctccatgacaactgtattattttcttagtttcaactaagaaacaactgtattagtttcttattgttgttttaacttaggagttaaaacaacacccacatttatcatcttaaagttttggaggtcagaaattcaaaatcaaggtgttggcagcgctaggttccttmtggaggctgcaaaggagacctcgttttcttgcctttttcagcacctagaggtcacctgcatcccttggctcatgactccaacctctgcctccacagtcacgtctcctgctaactctgctcttcttgcctccccttagaaggacccttgtgattgcaggataatccccccatctcaagatccttaacttagtcacgtctgagcagtcccttttgccatgtaaggtaacattcacaggttccagggattaggac

SEQ ID NO: 809147 - DNA, 582 bp, Homo sapiens
ataccttgaccactgataggaatagtcacagctctaaagcactagatacccaccatgtgttataaactggactaggtactggcacctttccatacatattcttacccaccctccctaaatatgattttaaaattctcctttgcaggtgatgcaastgaaagtgaggggtgaggtgattcacctatgtgggtacagttgggaagtggcagagccagcattcaaactcttgcacctccacagctgaactggtatttgccctggtgacatcttgtctctggggtaatgctgagagtgattggtcaaggatatacaataggtaaaatgagagtggttctaccttatccacaatttcgatttctgtggtttcagttacccatggtcaaccatggtctgaaaatagtaaatggaagatttcagaaataaacaattcataagttttaaatggcatattgttctgagtagcatgatcaaatctcacgctgtccagcttcatcccgcctcggatgtgaatcttccctttgtctaggtatccaatctgtctgcacaacttgccccttatccactagtggctgtcttggttac

SEQ ID NO: 809148 - DNA, 642 bp, Homo sapiens
agggatgcaatagtttgtgcaattataacccaacacatcacagaagtcagattggcgctcgctgcttgcataattcatcactcattttcttgtcatggcttaagacctttcatatctggtagacaaaaaaaattaagtttacattgctcaattaaaaattcagaagtttaagggcaggaaaaaaggagaatgtgagttgtatcatcgttaaatagacagatagaaataaagcactggaagaggaaacgtggaaaagggggcaaggaagagacaatggaaaaacgtgaaccttgttggtaacttgtcattctcagattaagaatgtcagtggagacttcattaattccttcttcctaatggtcaaaattcagggactgtggcaggatgggaagtgagaagctttgggaggmgggttttctaatcctccctccctctctctctccttccctccttccctttgtctctcttctttctccctctcttcattcctcttttccaaaattttatttaagcccctattctttaccagccatactgaaaagccctaaggatataaagtgaatgaatcagaatcttttattgacgagggacctgcaggttgtttggagaaaacacaattctagcccagagtgattagtgatg

SEQ ID NO: 809149 - DNA, 597 bp, Homo sapiens
tgctgtctgcagatacttcagtgttactgcaggggattctctgaatttctccgcttttggcttcccattttccccttcccccagctcaatcccccattgatccagtcccctgcactctggaggctgtttcaatggaaacttatgatctagatctaaatgacttttaagtcaccattgcctggttctgtgccaaacccatgcaaargaggaactgcaaaattacctaacttttcagagtcctggttccgaatctcttactccatgccattccttactgtgtactggactgtcttctgcttcccccaagtttcttgctccatctttcctccccttgatggcttgatgtttcctgcaacatgattctggatagattctcaagaaagagaatgagctgctgtatatgaagttctatgtgtcccaaatgctttcagctagtccaaagaccaggaaccatatccctaggttttacctcttccctgtatccctgacatctataaaataaaggcttaactcttcagcaatacaacagctagtctcaatgagtccttcccctctccatgccattgtccaggctgttctccctaattctctctaatt

SEQ ID NO: 809150 - DNA, 499 bp, Homo sapiens
aagccttatgtgctgtctgctggtctttcctgagtctcatggggcagaagggttttgagagcattcatcagttaatgcatcacttgttcattaaagattctttctagacattccacttttccaggcattcaaccccsattcccaaccgtgccgacaaattgctgcttgaagttcctggtcccagaggccttcttaaaatgttcaggaatgcaggcatggaaggtaaggaggggagtgtgggggcgtgctggctggaggccagcagccacagccgcgggaggaagggacagaagggtggggtgcaggcaccccgagattgctcagacagcaaggcggtcagtggcatcctgactttgaaagcaatccaaaacaaggcctgcgtcttagtctccagtgatgtcacagctaatcattagcctggtaattacattgaaagccttctgcgatcttatcctcagcagggtcattaatgcaaggcaaccacaccagtaaatgtctc

SEQ ID NO: 809151 - DNA, 517 bp, Homo sapiens
tttgacttagtcttgttctagctttttgagatggaacaataaattattaatttttgtctttcttttttaacaatatatgcattttgaggatagggagatccctgtattctctgctttacctggatctcatgttttgatatgccatagcttcagtatcattaattaaaataattttaatttttcttcttgatttttgaygcagagattggagtatatggtttaatttctaagcaactggagatttcttggtaatccatttggtatttatttaattcctatttcttttgggctccccagcatttggtcacgtggcatataaatgttacacgtggatataaaaagaatgtatcattgttgggtgtgatgttctctatttgtcaatccagtgaaagttaactgtgttattctgatctttgtcattgctgagcttttattttattgctctaccagttattgtgaaggatgtgttaaattctttccacattactatgcatttgtctatgtctctcttaattca

SEQ ID NO: 809152 - DNA, 517 bp, Homo sapiens
tttgacttagtcttgttctagctttttgagatggaacaataaattattaatttttgtctttcttttttaacaatatatgcattttgaggatagggagatccctgtattctctgctttacctggatctcatgttttgatatgccatagcttcagtatcattaattaaaataattttaatttttcttcttgatttttgatgcagagattggagtatatggtttaatttctaagcaactggagatttcttggtaatccatttggtatttatttaattcctatttcttttgggctccccagcatttggtcacgtggcatataaatgttacaygtggatataaaaagaatgtatcattgttgggtgtgatgttctctatttgtcaatccagtgaaagttaactgtgttattctgatctttgtcattgctgagcttttattttattgctctaccagttattgtgaaggatgtgttaaattctttccacattactatgcatttgtctatgtctctcttaattca

SEQ ID NO: 809153 - DNA, 482 bp, Homo sapiens
tcagtcatgtctcaatgaagtgattttaaaaataaataaaacttaacaatttttaaagaaataaaaaaacacatatataaataaatacattaaatatgccaaaaaaaaaaaagaagtgaatgggcctgctgtggctccccgacgtggctgtggtccccaagggtccgtggcgctgtaaatgctgagattcataggtctgtgccatgttcctccagctccggatgcaacttgggaattggtgtgttytggagtcacaagaccaggaacacatcccggcctttgcacttctgggctgtgtggccttgagcaagtcacctcacctctctggaccacagtctccttgtgtctgacaatggtctctagactccccttgttatgggatggatgctaccaagcagcagcttgtttttccttcaccctattttgtggatgggaaagctgaggcccagagaggccaggaggcttagctggggtccccaggg

SEQ ID NO: 809154 - DNA, 482 bp, Homo sapiens
tcagtcatgtctcaatgaagtgattttaaaaataaataaaacttaacaatttttaaagaaataaaaaaacacatatataaataaatacattaaatatgccaaaaaaaaaaaagaagtgaatgggcctgctgtggctccccgacgtggctgtggtccccaagggtccgtggcgctgtaaatgctgagattcataggtctgtgccatgttcctccagctccggatgcaacttgggaattggtgtgttctggagtcacaagaccaggaacacatcccggcctttgcacttytgggctgtgtggccttgagcaagtcacctcacctctctggaccacagtctccttgtgtctgacaatggtctctagactccccttgttatgggatggatgctaccaagcagcagcttgtttttccttcaccctattttgtggatgggaaagctgaggcccagagaggccaggaggcttagctggggtccccaggg

SEQ ID NO: 809155 - DNA, 482 bp, Homo sapiens
tcagtcatgtctcaatgaagtgattttaaaaataaataaaacttaacaatttttaaagaaataaaaaaacacatatataaataaatacattaaatatgccaaaaaaaaaaaagaagtgaatgggcctgctgtggctccccgacgtggctgtggtccccaagggtccgtggcgctgtaaatgctgagattcataggtctgtgccatgttcctccagctccggatgcaacttgggaattggtgtgttctggagtcacaagaccaggaacacatcccggcctttgcacttctgggctgtgtggccttgagcaagtcacctcacctctytggaccacagtctccttgtgtctgacaatggtctctagactccccttgttatgggatggatgctaccaagcagcagcttgtttttccttcaccctattttgtggatgggaaagctgaggcccagagaggccaggaggcttagctggggtccccaggg

SEQ ID NO: 809156 - DNA, 611 bp, Homo sapiens
gatacagaggcaggagattatcctgaaaagcttgatgggtccctaactgatacaaaaacaatattttcttgtgttgagaaagattgaagtgtggagttgggttgaggacagttgtgggcttgaagggctttggcctcagctctgtttatttgacatcttcccctttctaagcctgggtcctcatctgtaaaatgttaggattggcattctccagtccttttggaattttagagatttttttcttgatttttagctggaccaagctgactgaaagattcttcaagaatacaccttggcccgaggctgaagccattgctccacaggttggcaatggtaggtgtgagctctttatatcttgtgcactgagyggaatccagtggctgagtcattagacaggaagctcaagagggtctgtgtctgttttgctcaccattttgtttccttggtgcttggtatgtagtaggtccttggcaaaataacttgtcgaaggctggatgatttaagagaggacagagatctctcatatatggtgaaatttagatctttgtactgacttgtttctatttccttctataatttgggggtcattacagtcactctggaataagctc

SEQ ID NO: 809157 - DNA, 582 bp, Homo sapiens
atttccacccatatacacttttgggagccccagaacactctagaaaacatcttcaggcacttatgagtttgccgccattccagagtaccttccctccactttatccttgcatggaggccctgacttcctattccagattagtttttcaacatacaaacttaaatgtcaccctttcagaaaggccttccctcaacttccaatctaaagtttgtgaccctgttactttctgtgactgcaccctgtttatttccttcatggcagtaatactgtaatttatttatttcttaattcttacattcattcattcactattggtcttctttatcgttcagtaagcttggcgagagctgagatcatttctcttttgttcaccattatatycccaagaacttgcacagtgcctagcacatagtggccctgaaaaagtattattctaatgagtgcacacacttatttacacacaaacacacatacatatgcaccgttgcaaacatgtacacactcactaacacaaacatgcacacacacacacatacacacccttccccactgaacctttctaaatcgaagagagcaggatga

SEQ ID NO: 809158 - DNA, 603 bp, Homo sapiens
atggtttgatgtctcaaagtccattttgacttgatttttgtatatagcaagagataggagtctagtttcattcatctgcatatggatatccagttttcccagcacaatttattgaagggattgtcttttcctttatattcttggctcttttgtcaaaaattagttcactgtagatgtatgagtttatttcttgtttctctattctgttccactggtctatgtgtctgttttcatgccagtactatgctatttgggttgctatagstgtggtataatttgaagtcagataatatgattcctcctgatttattctttttgcttcagatagctttggctactctgggtcttttgtggttccatgtaaattttagaattttttttttctatttctgtgaagaatgtcattggtattttgttaggtattgcattgaatctgtagattgctttgggtagtatgaacattcttccaatctataagcatggaatatctttcattttttttttgtggcctcttcaacttcttgtgtcaacattttatagttttcacggtagagatctttcacttctttggttaattactaggtactttattttatttttagc

SEQ ID NO: 809159 - DNA, 636 bp, Homo sapiens
ctgtgactcttgtaaagctgtagaggtaccattttggtggtcttgggtaagatctgagagaattccctggtttaccaggcaaagtctcttgttcttttcccttactttctcccaaacaaatggagtctctctctctgtgctgagctgcctggagttggggaaggggtgatacaagcactcttgtggccacgaccactgagactgtgctgagtcacacatgaagccaacacagtactgagtctcacytaaggcctgtggcaactatttcctggctatccctgatatttattcaaggcccaagggcactttagtcagtaggtgatgaatcctgccaggacagggtatttcccttcagtgcagcaggttcctttctggtccagggtgggtctagaaatgccaccaggagctagggcctggggtcaggggctttagaaatctgcttggtgctttattttactggggctgagcaagtacccaggttgcaagacaaagtcctctttatatttctctcccctttcctcaagcagaattggccaccacagccccaagcccatagcgactatagcctggctaccaccaatgtttattcaaggcccgagggctctttagtctgcaggcagtgagtcctgccaggcc

SEQ ID NO: 809160 - DNA, 598 bp, Homo sapiens
aaccaagggccctgcgatgtcatccagtctcctggagcatcctacagggaggaaagaaggcatcgagggatgccccgccctcccattttttcattcatgtcttcctccctgaacactgcatggagccgctatagccaagagcccaggacccaacctccctgcccaagccttgccctttttggctcaggaggggccatctgggctccyggtgaggaggggggtgagctgatttagggggcagcgaggcagaggaactgagttgcccccttgccgggctctcaagtcctggcactgccccacctggctgcagaaccctgggcaactcacttacctctctgagcttccatttctttgtaaataggggtcacgatttccatctcacaggaatggtcattctttcatttaatacatgtgagaggggtagggatgaggcttggaggaagggtttgagctggcccctctaagctatccaaaaaatttcactctttatctaaagggccctggaaagccatagaagagtttctggtttgcttgcttttgtttttattattatttttatacagatgtcctcgtccatgtgtgtttttcgtccttaggg

SEQ ID NO: 809161 - DNA, 648 bp, Homo sapiens
catgagtgtgcagatgtatgtttgtgtgcaggcatgtgtgaagtatgcagttgtgtgcaggcatctgcaggtgtgtgttgtgcatatgggtttgtctttgcatatttaagtgggtgtatttgttcctaatggagcctgtatacaagtggacctgtcttgaggatgctgagggaacctcctttaagaaaaggattgtcggctcagaggcaagcatcaaggaacctctcccctggctttcagggtgtcccccacattccctccccatgctagggtctcccagtgtctaargcgttcggggaggggactaggaaggaacttgcagtgtctgagcatctgtcaggtgccagacaaggtggcaccttcctccagggctgtgctcctttctcctctgaacacatgagaacataaggctcggccaagcaaaggcatttgtccaagccacccagctggtccccaggaagccaaaccaggatcttcactcagggctgggacctcagacccacgtgtgctccagggcagatgttcccaccctgtgggacgagagccacctggtccagggggtgagagggggagggcgtagaatgtaaagcttttgtggagcaactgacacccaggactccctgaatcctggtggggctggatctggga

SEQ ID NO: 809162 - DNA, 570 bp, Homo sapiens
caaaccaaggaaaaatttagtggcttaaaactacttattattatctttcacatttctgtggattgactaggctcaactgggtgattcttgcttagggtttcccatatgctagtggtcagatagcaactgggattgrtttcatatgaaggctcaactatgttggatgacccacatggcagccatagatactgctggctgggagcccagctggagatgcaacagaaggtcctcacttggtctctccatgtggcttgagcttctcccagaatggaggctgccttctgagaagagtcatcctgctttttattcatcaagcaaatcactgggactaggattcaaggggcagggaattcaacttcatctcctgatgtgaggggcagcatgctcatccagggagagaagcaatggatggtggcatctgtggagactctgtcccagataggatggaggaaaggtcattagatgagtggagcccaaggaactgagaggctggggtgttgaaaggaatatctacatggatattgaatacaacaaaaatgaagagaagcagtgatgttggtgagagcagag

SEQ ID NO: 809163 - DNA, 380 bp, Homo sapiens
ttgcttttgccttgctacttggatgtgaagatgaaggctggggctctcacactagtccacccttgccttagagcccagattccatggctcttcgtgattcctctgtcaacatgagccatgaggagatcccatctcttactgaggataccaagtgttcaccctggagctggggaaataaccagtaagtggactcaggattgagcrcacagaggggctaaaagatctcaccaagtcaccacacccccacttgactccatttcaactaggggaccatgcggatgtgtgagcccagagccagtgcccaagagtccacattgcaggtacttccccttcctctgtgcgcagtaaagctatgaacagcatggatcccttgggaaagg

SEQ ID NO: 809164 - DNA, 380 bp, Homo sapiens
ttgcttttgccttgctacttggatgtgaagatgaaggctggggctctcacactagtccacccttgccttagagcccagattccatggctcttcgtgattcctctgtcaacatgagccatgaggagatcccatctcttactgaggataccaagtgttcaccctggagctggggaaataaccagtaagtggactcaggattgagcayacagaggggctaaaagatctcaccaagtcaccacacccccacttgactccatttcaactaggggaccatgcggatgtgtgagcccagagccagtgcccaagagtccacattgcaggtacttccccttcctctgtgcgcagtaaagctatgaacagcatggatcccttgggaaagg

SEQ ID NO: 809165 - DNA, 580 bp, Homo sapiens
ggcgcggtggctaatgcctatagtcccaacactttggaaggccaaggtgggtggatcacctgaggtcaggagttcaagactagcctggccaacatggtgaaaccctgtctctactaaaagtacaaaaattagctgggtatggtggcaggcacctgtaaccccggctacttgggagactgaggctgaagaatcgattaagcctgggaggcggaggttgcagtgagctgagatcacamctgttgtaccccagcctgggcaacaggagcgaaactctgtctcaaaagaaaataaaataaactggtctgaaaaggaacacatggcttttgagtatttagtaaataaacctggcatggcaagaaacaacttctaataaaactatggaattaataatctttaaaaaacaaaatggaccctggtgtttcaaacatgtcactatcaaatactcaaaacagcagataattacagaactcaactatgtgtccaactcaatgctgtgtatcccccttctgactatacgcccaactgaaatagttttattactttttaaataaccacaagtgatacaaacttcaagaggtac

SEQ ID NO: 809166 - DNA, 482 bp, Homo sapiens
aagaattttgcacttcttaaatctaatgatattgagcttggtttaattttcatattggctatttgtgtatcttctgtgaattattcccctctcctatccccattctctcccctctgcctttcaacacctcttttcgccccaaggatcctagatgtctctccccaaccccctaacagaaggaaataatacagagagcaaggggatggtgaaatgatgaaagaaagcaggtcctggggcaatagggacaaaaagtgttcccagtcaggagtgtttgccttttaaaggagcctgccccaatgggacaacgctcacctccaaagactggattgccaatggcgcygtttcagctccaacaacaggaaaagtattttccgtgggaagtattttccagaaggtcctgggaccttcattataacattgagtcagtgctttttttgtctatcacaatgaggctttcccttgttagtagtcagagtcagctg

SEQ ID NO: 809167 - DNA, 537 bp, Homo sapiens
agccctgcaaagtatcgtcacccagttggcattgtaattgtgatttcaaaaggccagtccactgttttatcaatccagctgcttcaggatgatggggaacatggtaagaccaatcaattccatgagcatgacccactgccacacttctttagctgtaaagttactgccttggtcagatgcaatgctgtgtgaaataccatgatggtggataaggcattccgtgagttcatggatggtagtcttggmagaaacattacgtgcaggataggcaaacccatatctggattaagtgtctattccagtaaggacaaacctctgccctttccatgatggaagatgtccaatataatcaacctgccaccaggtagcttgctgatcaccctgaggaatagtgccatattgagggctcagtgttggtctctgttgcttgcaaactgggcagtcagtagtggccatagccaggtcagccttggtaagtggaagtccatgttgctgagcccatgcgtaacttccatccctgccaccatggccactttg

SEQ ID NO: 809168 - DNA, 620 bp, Homo sapiens
tttgctacttcttgcttactggatccaatcagcataatgtcatcaatgtaatggaccagtgtgatatcttgtggaagcaaaaagtgatcaaggtctcttggattataacccaaagccagagagttgatacaccctgaggtaggacagcaaagrcatattgctggccttgccagctgaaggcaaattgcttctggtgggccttatggacaggaatggagaaaaagacatttaccaagtcaatgatggtgtaccaggtaccaggagatgtgttagtttgctcaagcaatgaaaccacctctggtacagcagctgcaattggagtcaccacttggttaagcttatgataatccactgtcattccgcaagatccatctgtcttctgcacagctcaaatgggagagttgaatgagaatgtggtgggaatcacaacccctgcatctttcaagtccttgatggtggcactaatctccacagtccctccagggatgcgacactgtttttgatttactgtttttctaggtagaggcagctctaatggcttccatttggccttttccaccatggtagccctcgccctaccagtcagggagccaatgtgggggttctaccagctgctaagt

SEQ ID NO: 809169 - DNA, 620 bp, Homo sapiens
tttgctacttcttgcttactggatccaatcagcataatgtcatcaatgtaatggaccagtgtgatatcttgtggaagcaaaaagtgatcaaggtctcttggattataacccaaagccagagagttgatacaccctgaggtaggacagcaaaggcatattgctggccttgccagctgaaggcaaattgcttctggtgggccttatggacaggaatggagaaaaagacatttaccaagtcaatgatggtgtaccaggtaccaggagatgtgttagtttgctcaagcaatgaaaccacctctggtacagcagctgcaattggagtcaccacttggttaagcttatgataatccactgtcattccgcaagatccatctgtcttctgcacagcycaaatgggagagttgaatgagaatgtggtgggaatcacaacccctgcatctttcaagtccttgatggtggcactaatctccacagtccctccagggatgcgacactgtttttgatttactgtttttctaggtagaggcagctctaatggcttccatttggccttttccaccatggtagccctcgccctaccagtcagggagccaatgtgggggttctaccagctgctaagt

SEQ ID NO: 809170 - DNA, 610 bp, Homo sapiens
ttgaaggaattcatacggggagctaagctaatattattttgtttaaagattatctaatttgacatggtattagaattttgttggaattaagaatttattactagagttaactttcttatgctatggacctcttttaaaatagtattttacatgcatacaacaaagtatataagattacaaggaaattaatgatattgaaatacagttattgaactatttgaaaaattgtgacatattaatatatattaacacattaaataacaagatctatcagcttctgcataaactaccatagtttaaaatagtgataaatgtaagtgctatctcaacaaatttgtataactttaatgtgataagaaaaatatctgtggtttccattatcagtcatatatactgctaatattactttggtttatttcgtacattmatgtaagaagagaatgtaaaatattagttagaagtaagcaaaaataaaggtgtttttttttccatctgagttcatgaaccccttgtattttatccatgggatccttgggatatatggacatcagttgataagtaataactctgagaaatgaaagtgggtaagataacccatcttcacttaatt

SEQ ID NO: 809171 - DNA, 638 bp, Homo sapiens
attgtccagagttgaaacattatttatttatgtagttattttttgagacaagagtcttactctgttacccaggctggagtgcagtggcacaatctcgggtcactgcaaactccacctcccgggttcaagtgattctcatgtctcgtgtctcagtagctgggactacaggtgtgtgccaccactcccagctattttttttgtatctttagtagagatggggtttcatcatgttkgccaggctggtcttgaactcctggcctcaagtgaagcacctgccttggcctcccaaagtgctgggattacaggtgggagccactgtgtctggccctgtattttaatatttaggtaatttagaatattttctgaattctcttgagacttcctttttgatcaatgggttacttagaaaggttttacttaatttccaaaatttttggaattttccagataccctcgttattaatttctaatttaattctcttacggtcaaagaaaacaatgctttctattgttttcaattggctatagtttgcttatggtgcagaagattggtaggtaaccttttctgtaaagggtcagatagtaaatacttttggtgttagggccatatggtctctcctgcactattcatctctgcc

SEQ ID NO: 809172 - DNA, 498 bp, Homo sapiens
aagtaggacttgggaactaaaaagtgtcttataacacacacacatacacacacacaggcaaatctcccaactttgctaaattacagccatcagggataatctctttaataattgagtacatattcttccagaatattttagtgcttgtgtgtgtgtgtgtgtgtgtgtgtgtgygtgtgttcgtagtgaaaagaaaaagaatgttatttaaaacaaaaaccaactacctccatttctaccttccacaggcatagtataaatctgtcttaagtaaagagtgttttgctgagaaaaatcaccttaattggtgtttttgatgagtaacctggtgagagaggggaaaacaaagggagaagttaattaccctgtgtagtaaagtatggagactaatatacatgggcagcctctctcacaggttcagaaaaaacaaaagggaggacatacatggaagggacatccaacatgaggcctgaggaaattgttggcatgtaaggcctt

SEQ ID NO: 809173 - DNA, 498 bp, Homo sapiens
aagtaggacttgggaactaaaaagtgtcttataacacacacacatacacacacacaggcaaatctcccaactttgctaaattacagccatcagggataatctctttaataattgagtacatattcttccagaatattttagtgcttgtgtgtgtgtgtgtgtgtgtgtgtgtgtgtgtgttcgtagtgaaaagaaaaagaatgttatttaaaacaaaaaccaactacmtccatttctaccttccacaggcatagtataaatctgtcttaagtaaagagtgttttgctgagaaaaatcaccttaattggtgtttttgatgagtaacctggtgagagaggggaaaacaaagggagaagttaattaccctgtgtagtaaagtatggagactaatatacatgggcagcctctctcacaggttcagaaaaaacaaaagggaggacatacatggaagggacatccaacatgaggcctgaggaaattgttggcatgtaaggcctt

SEQ ID NO: 809174 - DNA, 391 bp, Homo sapiens
taccaccatttagtggcttaaacaacccaaatttattatcttacagttctggaggtcagaacttagttcttaccaggctaaaataatgggtcagcataaattcctatctggaggagccatttctggtcaaggcataattcagtaccttgtggttttaggacggaaatccccgtttccttgctggcttcagctgaagggcattctcagcttctagagggtaycacactccttggcttgtggcccctttcttccaccttcaaagccagcaatgggagatccagtgatttctctctcccctgtgcccttttcagggtcatctcgctgacccagctggggaaggctctctgcgttttttttttttgctttttttttttttttgagacagagtctc

SEQ ID NO: 809175 - DNA, 647 bp, Homo sapiens
ggctgatctgaaaaggccttgtcaatcggcaggtatttgatcagggaacaggaggaaagggggaacaagtcacgtgggcatctaggggagaagcagtcctggtcgggaaccgcaaatgaaaaggtcctgatgtaggaccaggcctggagcgttccragatcagcaaggaggcgggaacagagtgagacggctcctggatgccacatggaagatggactttgggaagcaagggccctgggaaaccagctaggaggccaggacaatcatccaggcaaaagaatgatcatgagccaggtgtgatggctcacacctgtaatcccagcactttgggaggccgaggtgagcagatcacttaagtccaggagtttgagaccagcctgggaaacatagcgaaatcctgtctctaaaaaaattagctggtcatggtggcatgcaattaactactcaggaggctgagatgggaggatcgcttaagctctggaagaggaggttgcagatagcttgagctctggaggcggagctgagattgcactactgcactccagcctgggcaacagagtgagaccctgtgtcaagaaagagaacaatagtagcttggacaagagtagaagcgatgaatgtgatgagaaaaaaacagagaagtgttt

SEQ ID NO: 809176 - DNA, 647 bp, Homo sapiens
ggctgatctgaaaaggccttgtcaatcggcaggtatttgatcagggaacaggaggaaagggggaacaagtcacgtgggcatctaggggagaagcagtcctggtcgggaaccgcaaatgaaaaggtcctgatgtaggaccaggcctggagcgttccaagatcagcaaggaggcgggaacagagtgagacggctcctggatgccacatggaagatggactttgggaagcaagggccctgggaaaccagctaggaggccaggacaatcatccaggcaaaagaatgatcatgagccaggtgtgatggctcacacctgtaatcccagcactttgggaggccgaggtgagcagatcacttaagtccaggagtttgagaccagcctgggaaacatagcgaaatcctrtctctaaaaaaattagctggtcatggtggcatgcaattaactactcaggaggctgagatgggaggatcgcttaagctctggaagaggaggttgcagatagcttgagctctggaggcggagctgagattgcactactgcactccagcctgggcaacagagtgagaccctgtgtcaagaaagagaacaatagtagcttggacaagagtagaagcgatgaatgtgatgagaaaaaaacagagaagtgttt

SEQ ID NO: 809177 - DNA, 605 bp, Homo sapiens
ttaatccatcttgaattgatttttgtataaggtgtaaggaagggatccagtttcagctttctacatatggctagccagttttcccagcaccatttattaaatagggaatcatttccccattgcttatttttctcaggtttgtcaaagatcagatagttgtaggtaagcggcattatttcttttcttttttttttttttttttttgagacggagtctcgctctgttgcccaggccagactgcggactgcagtggygcaatctcggctcactgcaagctccgcttcctgggttcacgaagcggcgttatttctgagggctctgttctgttccattgatctatatctctgttttggtaacagtaccatgctgttttggttactgtagccttgtagtatagtttgaagtcaggtagtgtgatgcctccagctttgttcttttggcttaggattgacttggcaatgcgggctcttttttggttccatatgaacttgaaagtagtttattccaattctgtgaagaaagtcattggtagattgatggggatggcattgaatctgtaaattaccttaggcagtatggccattttcacgatattgattcttcct

SEQ ID NO: 809178 - DNA, 578 bp, Homo sapiens
gacgacactgacacaggcacactgggttctgctttccttatatcccccttctgagcccaggccctgttcctctcactttcaatcccaattcgggcttcaaaggactagcaaaaggagtccttttaataatatctagtgctcctttgtccygaaatctggctaagggaagatttcagggcctcagctggttgaggaatggtagagacaatccatccttgcccatctacgcacccaagcccagagcaagtgtgtacttggggctcgctggtacctagatgtgcaaggtcactctaccagggcccctgtgaaggaatgggatccctattttctgtcttttttataatagtcaatctaattggggtgaggtgatatcccattgtgattctgactggcatttctctaatgattagtgatgttgagcttttttttaagtatctcttggccaattctatgtcttcttttgagaaatgtctattcagagctttcatttttttaattatttacttggtttttgtttgttttgtttttgtttgtttttgctattgagttgtgtgagttgcttgtatattctggatatt

SEQ ID NO: 809179 - DNA, 628 bp, Homo sapiens
atttttccctagccctaagtttggacaattttcccctatgttttcttctagaagttttgtagtttatgttttatatttatgtctgtgatccattttcagttaattattgtataagagatggaatttaggttaaatgtctttttttctttgcctatgaaagtccagtgctccagcatcattcgtcaaaaaggctgcctttcctctattgaattgcttttccaaaagcagctgggtgtatttgaatgcttctattcctgggtcctctattccattccattgatctgtgtgtctaccccttcaccaatagcacaccatcttgattactgtagctatgtagcaaaccttascatctgtagagtgattcctcccactttagtgttttttcaaaattgggtattacaggtcttttgcttttccatgaaattttagaataaacttctctatacttaaaaaaatgcttgctcagattttgatgggagattatacctacaggtgcatttgtgaacacttaacatctttaccatgttggctcttctgagctgtcaacatgacatgtctctccatttatttagatctttgatttcttccaataatatgttccgtaatttttgacacacagatactatac

SEQ ID NO: 809180 - DNA, 628 bp, Homo sapiens
atttttccctagccctaagtttggacaattttcccctatgttttcttctagaagttttgtagtttatgttttatatttatgtctgtgatccattttcagttaattattgtataagagatggaatttaggttaaatgtctttttttctttgcctatgaaagtccagtgctccagcatcattcgtcaaaaaggctgcctttcctctattgaattgcttttccaaaagcagctgggtgtatttgaatgcttctattcctgggtcctctattccattccattgatctgtgtgtctaccccttcaccaatagcacaccatcttgattactgtagctatgtagcaaaccttaccatctgtagagwgattcctcccactttagtgttttttcaaaattgggtattacaggtcttttgcttttccatgaaattttagaataaacttctctatacttaaaaaaatgcttgctcagattttgatgggagattatacctacaggtgcatttgtgaacacttaacatctttaccatgttggctcttctgagctgtcaacatgacatgtctctccatttatttagatctttgatttcttccaataatatgttccgtaatttttgacacacagatactatac

SEQ ID NO: 809181 - DNA, 604 bp, Homo sapiens
atttcagattcccaggggagaaaaaagtaaggaaaattctaagcacaattttgccctctcttaagaggggaggactgttattattattattatatttttataaatcatcatctttatttacgaatgatgaaactaaggcacaaggcagcaaagttactcaaaagcgtattgtttggaggtggtgaaggtcagaatcctatgcttatcccaagataactccyggggtccccaggcctccctgggccagctgcatcctcaccagatgacagactccctgcatttcttcagcaagaagctacatccctgctcatggtacttaaggtgtttactcttcaagggattcatttcccatttaattgcataagatgacaaacaaaatgaaaatgtctcctccttaagccatctttgacttctgtctttctcaagccctttgtaaggtacgatctcactctgtctcttgcatttcagataaacatcacccttacctaacaggcatctgatttattacagatacacccgcctctgtatggtggagtcctctatgtgtttattaccagagttgcatttcttgaattacagatattcaaaaaggaggaaatagatt

SEQ ID NO: 809182 - DNA, 616 bp, Homo sapiens
ggtattgtatttattttggcttttgaccttttttctgcttgtttaagataatcatatttttttgtttgccttttaattttataatctttttgaatggccaatttgtaaatattttgtaactatgtttactgtgttatttcttccatagtttatatttaaaaaacaaaaaagattccccttccagacaccagataagtgttcaactttattataayttgttattgctttttttttttttttttttttgaggcagtgttttactcctgtcacccagcctcaacttcccaggctcaagagattctcccatctcagcctcccaagtagctagggctgcaggtgcacaccaccattcctggctaattttttgtatttttagtagagacagggttttaccatgttgctcaggtgccaagaccagctcagtggtggagaccctaacccagcagcgctagaggaattaaagacacacacacagaaatatagcgtgtggagtgggaaatcaggggtctcacagcctcagagctaagagcctcgaacagagatttacccacatatttactgacagcaagtcagtcataagatttactaaaagtattccttacgggaaataaaggga

SEQ ID NO: 809183 - DNA, 616 bp, Homo sapiens
ggtattgtatttattttggcttttgaccttttttctgcttgtttaagataatcatatttttttgtttgccttttaattttataatctttttgaatggccaatttgtaaatattttgtaactatgtttactgtgttatttcttccatagtttatatttaaaaaacaaaaaagattccccttccagacaccagataagtgttcaactttattataatttgttattgctttttttttttttttttttttgaggcagtgttttactcctgtcacccagcctcaacttcccaggctcaagagattctcccatctcagcctcccaagtagctagggctgcaggtgcacaccaccattcctggctaattttttgtatttttagtagagacagggttttaccatgttgctcaggtgccaagaccagctcagtggkggagaccctaacccagcagcgctagaggaattaaagacacacacacagaaatatagcgtgtggagtgggaaatcaggggtctcacagcctcagagctaagagcctcgaacagagatttacccacatatttactgacagcaagtcagtcataagatttactaaaagtattccttacgggaaataaaggga

SEQ ID NO: 809184 - DNA, 465 bp, Homo sapiens
tgtaaatggatggcaaacatgagaaacttttttttcatgcaaacaatattataagcactgatatagatatgaaaatcatatacatcttacaaacaataccctaaaggtccagcccataaaagctgagttacttatcaattgctgaaatatttaaattggcttaaatattttcttcataaaatccatcaatgtctttaagcagataccttgsccacaagatctgcctggggtgggaggtcttggctccctctggctggagttgggggctaccctgtgtggaggggagagggcgggtgggggtgagtctggtgactggtcagccgctcagatggagtgggggcaggcacagcactcaggaggctgaggctgggcatctgggggagccgcagcccctgggggtggcagggggcatctgtcaccaggaggaaggaagaggcggttctgtgcaggaagagggatcccacc

SEQ ID NO: 809185 - DNA, 611 bp, Homo sapiens
tataattcattgttgacctttctgatgattctgtagttagatttttaaaatatgattgaatgtggaatatctaggcatagactaacatgggtttgaatcttagctgtgacatttatgagctgtgggctcaacactttaaaagtaattaactgcatttttcatcttttaaatcattctctragaaaaagtcaactccttaattagtccttgtttgaattatgatcaaatagtattggtttgtacagaatgatgctaacttaggatccaggctatagatggctgcaaccggaatagagccatttagtcatcatatgtacaatagagtaagaaatgcaaaaaaaaaaaaaaaaaaaaaatagatacaagataagagcacttttaggttctaagaatttaaaatgtgtatctaggttagagtgaattggggtgaaatttcctgtgcttccaagttaaccagtagaagtgttgaaattgatttcaagaattgatagtgtcctattaaacaatcagaagacagaaggtactagtgagaagtcttgatttgactatggggctaatagggaggtgcttgttgtgcaagcttatgtgagagaatagctgtatcagtagag

SEQ ID NO: 809186 - DNA, 592 bp, Homo sapiens
ccaacatggtgaaaccccgtctctactaaaagtgcaaaaattagccaggcatggtggcggatgcctgtgatcccagctactcaggaggctgaggcaagagaatcagttgaagctgggaggcggaggttgcagtgtacatgtrtattccatatatacaagtgaagatatgaatccatactgataacttccagtccagcaccactgaatttattctagtcgtctccatttccttctcttcttcacccacagtgagaaacctggttcgcacctacagtatgtttacatatttgctcagttctagtatataaataaactagtttcagaaatccttacctttactcctgtaagaaacagatttaaaattacgtgcagcgtgtgccattcttgtctctagccttcacagtctccagtcaaaaccctctttgccaaggttatctaggacaggaccttactttccatgcccttagcgtggctgtgccatccatgcagctgcagtcagagccgtctgtctcagcttgcattcctcttaggttcacctcacatcctagttgattccgtttttatttacttacaatagaatttactttatggt

SEQ ID NO: 809187 - DNA, 575 bp, Homo sapiens
tatctaggacaggaccttactttccatgcccttagcgtggctgtgccatccatgcagctgcagtcagagccgtctgtctcagcttgcattcctcttaggttcacctcacatcctagttgattccgtttttatttacttacaatagaatttactttatggtgtatagtacgtggtttctgacaaatgcatagaattgtatgttcatcacatggacacaaggaggggaacatcacacaccagggtctgttgggggtgggggacaaggggagggagagcattaggacaaatacytaatgcatacggggcttgaaacctagaagacgggttgatgggtgcagcaaacctccctggcacatgtatacctccatggcacatgtatgtaacaaacctgcacatttgccacatgtatccctgaacttaaagtataataaattttttaaaaattgtgtgtttatcccacctttcttttctaatgttggtaatttgtatcttctctctctctttcttggctagtgttaccagagaatttttctaagaacccagcttttggtttccttgcctttctctatttttct

SEQ ID NO: 809188 - DNA, 575 bp, Homo sapiens
tatctaggacaggaccttactttccatgcccttagcgtggctgtgccatccatgcagctgcagtcagagccgtctgtctcagcttgcattcctcttaggttcacctcacatcctagttgattccgtttttatttacttacaatagaatttactttatggtgtatagtacgtggtttctgacaaatgcatagaattgtatgttcatcacatggacacaaggaggggaacatcacacaccagggtctgttgggggtgggggacaaggggagggagagcattaggacaaatacctaatgcatacggggcttgaaacytagaagacgggttgatgggtgcagcaaacctccctggcacatgtatacctccatggcacatgtatgtaacaaacctgcacatttgccacatgtatccctgaacttaaagtataataaattttttaaaaattgtgtgtttatcccacctttcttttctaatgttggtaatttgtatcttctctctctctttcttggctagtgttaccagagaatttttctaagaacccagcttttggtttccttgcctttctctatttttct

SEQ ID NO: 809189 - DNA, 575 bp, Homo sapiens
tatctaggacaggaccttactttccatgcccttagcgtggctgtgccatccatgcagctgcagtcagagccgtctgtctcagcttgcattcctcttaggttcacctcacatcctagttgattccgtttttatttacttacaatagaatttactttatggtgtatagtacgtggtttctgacaaatgcatagaattgtatgttcatcacatggacacaaggaggggaacatcacacaccagggtctgttgggggtgggggacaaggggagggagagcattaggacaaatacctaatgcatacggggcttgaaacctagaagacgggttgatgggtgcagcaaacctccctggcacatgtatacctccatggcacatgtatgtaacaaacctgcacatttgccacatgtatccctgaacttaaagtataataaatttttwaaaaattgtgtgtttatcccacctttcttttctaatgttggtaatttgtatcttctctctctctttcttggctagtgttaccagagaatttttctaagaacccagcttttggtttccttgcctttctctatttttct

SEQ ID NO: 809190 - DNA, 609 bp, Homo sapiens
gcttgaaacctagaagacgggttgatgggtgcagcaaacctccctggcacatgtatacctccatggcacatgtatgtaacaaacctgcacatttgccacatgtatccctgaacttaaagtataataaattttttaaaaattgtgtgtttatcccacctttcttttctaatgttggtaatttgtatcttctctctctctttcttggctagtgttaccagagaatttttctaagaacccagcttttggtttccttgcctttctctatttttcttttttcaatgtcatcatttctgttcttattttgattattttttccctctccttgctttgagtttagtttgatcttctttttctgatttcttaaactgaaaatttagatttatccgagaaccttcttttctaatgaaagttttgaatacgataaatttcccactgaccactgcattagttacatcccacaaaattygaatgttgtgttttaattttcatccagttgaaaatatttgacatgttttgagacttcctcattaacccaatgaatatttagagatgtgttcttttttttcttcaacttctaagttcaggggtacatgtgcagggtgtgcaggt

SEQ ID NO: 809191 - DNA, 585 bp, Homo sapiens
tacgataaatttcccactgaccactgcattagttacatcccacaaaattcgaatgttgtgttttaattttcatccagttgaaaatatttgacatgttttgagacttcctcattaacccaatgaatatttagagatgtgttcttttttttcttcaacttctaagttcaggggtacatgtgcagggtgtgcaggtttgtcgcacaggtaaacgtgtgccatggtggcttgctgcacaaaccatctcatcatctcagtattaagcccagcatttcttcctgatgttcttcccccacacccctatcaccycccaacagacaggccccagtgagtattgttccccccaatgtgtcctcgtgttttcgtcattcagctcccacttataagtgaaaacatgcggtatttggttttctcttcctgcattagtttgctgaggattatggcttccaaatccatctatgtccctgcaaaggacatgatctcattctttttgatgactgcagagtattctatggtgtacatgcaccacgttttccttatccagtctatcattgatgggcattcaggttgattccatgtctttgctat

SEQ ID NO: 809192 - DNA, 512 bp, Homo sapiens
tacgataaatttcccactgaccactgcattagttacatcccacaaaattcgaatgttgtgttttaattttcatccagttgaaaatatttgacatgttttgagacttcctcattaacccaatgaatatttagagatgtgttcttttttttcttcaacttctaagttcaggggtacatgtgcagggtgtgcaggtttgtcgcacaggtaaacgtgtgccatggtggcttgctgcacaaaccatctcatcatctcagtattaagcccagcatttcttcctgatgttcttcccccacacccctatcaccccccaacagacaggccccagtgagtattgytccccccaatgtgtcctcgtgttttcgtcattcagctcccacttataagtgaaaacatgcggtatttggttttctcttcctgcattagtttgctgaggattatggcttccaaatccatctatgtccctgcaaaggacatgatctcattctttttgatgactgcagagtattctatgg

SEQ ID NO: 809193 - DNA, 559 bp, Homo sapiens
ggattcttattatggcctggcaacctccaggttactcacaactggcacaagagggtatctgagtgacattgttaagcagtaattagaaacagttgattagtcagagtggtatttggtttgactcggggtaattttgtttttgtaagtcttgggtttttttttttttttttgaaacgaagtctcgctcttgtcccccaggctggagtgtgatggctgatctcggctcaccagaacgtccacctgcagattcaagcgattctcttgcctcagcctcccaagtagctgggattacaggcgcctgccatcatgcctggctaatttttgtatttttagtagagatggagtttcacmatgttggccaggctgatctctaactcctgacctcaggtgatccacctgcctcggcctcctaaattgttgggattacaggcgtgagccaccgtgcccggccagtcttgggtatgtttttaggagccgttggacttcagatataaaaagcaagcttgagctaactcctccagtttccccatttagtaaatgaagaaagcgatgtccaaag

SEQ ID NO: 809194 - DNA, 464 bp, Homo sapiens
ttttcctttggcttcaagagaaaataggcagtgttttcagcaaacatcatgatttttgatctctcaaagcctttgtattgagaatacagatgatatatttgtctctattttgtactcggatctggaatttcctagaatgttacctacaaaagatttagatataaatwtcttgaagaactttcagcacaaatgtcaaaattttttctttgtcacctgtttaccaattacagtatcatcacactaaacacagactcaaacttctcttcattccactattccagaatggaacacaaaaatggtatattttgatctgtatttattgccattgattaatgtggcattcgcaaacaatcccatttgggcagaccatgtttgcattttaatttcattgcaatcaacgtaatgaagctattgatcgtttcttccattttccctttcatttgcctcttaaatttgaaccgcag

SEQ ID NO: 809195 - DNA, 462 bp, Homo sapiens
aaaagacaaacttatgaagtcagaaggcagatcagtggttgtcttgggctgaagataagaattgaaattgactggaaacagtgtgaaggaactttctgggatgatggaaatgttcttacacaggattgtggtgatggtgacacaattctataatttcactaaaaccatcaaattgttaaaaaaaaaaaaaaggsgtatactaaccatacggtaaatgctacctaataaagcctaaagtcagttgattcaccagtaaattaactgcctgccagaataaaactcaacactaaagaaaggcaacaaaatccaaactctcagcaacatagcagctgcaatatcccatatgcgatgaaagttactagacatgcaaagaagcaagaaaatgtgaccaaatacccaggagaaaataagttgaaataaacagacctgagatgacccagatgatgaaattatgaaatagaa

SEQ ID NO: 809196 - DNA, 609 bp, Homo sapiens
tttggtcttgttctgggtgttttccgaggctgtgctcgctctgtgtggatgacatgagtgtgtgtggagtttatggctgtgataaaatacagctctggcatttgctgtggttccctatcgaaagccacgctttctcggcactggttgcctcccactgtagaatctgaaaatctcagataatcacattcctggtgtgtttgtagctcagcagaggaatggcacccaatcctgggcaaaggaatgtgaaggtttctggaaaacaggttttcttccccaattttcaaagagaggtttcttccggtccctgccttcgttcgagggagcacgtgatacttggcaytgcaaccacagtcttgtgaacctgtgggagcagcaccaaggaccacgaagaggctgccccagggcccaggagtcactgaatgactgagccaatctggaattgcttctctctagggcccttttagtcacatatcttgcttcttgcagaagaaagcattaacaatgaattacagcatatttagtcggctatgcgttaatgacaacgtagacccaaatccccctttcaaggcccctcagggcttctcactgcaggtagaataaagcatgagg

SEQ ID NO: 809197 - DNA, 609 bp, Homo sapiens
tttggtcttgttctgggtgttttccgaggctgtgctcgctctgtgtggatgacatgagtgtgtgtggagtttatggctgtgataaaatacagctctggcatttgctgtggttccctatcgaaagccacgctttctcggcactggttgcctcccactgtagaatctgaaaatctcagataatcacattcctggtgtgtttgtagctcagcagaggaatggcacccaatcctgggcaaaggaatgtgaaggtttctggaaaacaggttttcttccccaattttcaaagagaggtttcttccggtccctgccttcgttcgagggagcacgtgatacttggcacygcaaccacagtcttgtgaacctgtgggagcagcaccaaggaccacgaagaggctgccccagggcccaggagtcactgaatgactgagccaatctggaattgcttctctctagggcccttttagtcacatatcttgcttcttgcagaagaaagcattaacaatgaattacagcatatttagtcggctatgcgttaatgacaacgtagacccaaatccccctttcaaggcccctcagggcttctcactgcaggtagaataaagcatgagg

SEQ ID NO: 809198 - DNA, 609 bp, Homo sapiens
tttggtcttgttctgggtgttttccgaggctgtgctcgctctgtgtggatgacatgagtgtgtgtggagtttatggctgtgataaaatacagctctggcatttgctgtggttccctatcgaaagccacgctttctcggcactggttgcctcccactgtagaatctgaaaatctcagataatcacattcctggtgtgtttgtagctcagcagaggaatggcacccaatcctgggcaaaggaatgtgaaggtttctggaaaacaggttttcttccccaattttcaaagagaggtttcttccggtccctgccttcgttcgagggagcacgtgatacttggcactgcaaccacagtcttgtgaacctgtgggagcagcaccaaggaccacgaagaggctgccccagggcccaggagtcactgaatgactgagccaayctggaattgcttctctctagggcccttttagtcacatatcttgcttcttgcagaagaaagcattaacaatgaattacagcatatttagtcggctatgcgttaatgacaacgtagacccaaatccccctttcaaggcccctcagggcttctcactgcaggtagaataaagcatgagg

SEQ ID NO: 809199 - DNA, 483 bp, Homo sapiens
atgaacattttattatgctgtctttatcatagatctattcagctatccacccagcaatgcatcttgtgtttaaattgcatttcaaagtaagttgtagatgtcagcacacttcatccataaacactttggcaggcatgatagtgtctcgactttaacatttatttacagttcttttactcagcaaaacttacttacagtgcaaggtacacatagtaagtgtaccatcgaacaagctttgaccagtgcatgcacctgtgtgactcagacccctatcaagttgtagagcattgcagccagttcagaaagttctttcatgtttctttctaaccagttctttctccatcrtcttcagcagcaaccgctgttctgattttattctcaccatagattagctttacctgttctagcacttcatctaaatggaacatgtgcaatatacattcttttgtataaggatgatttcactcattattgtgattttga

SEQ ID NO: 809200 - DNA, 443 bp, Homo sapiens
tggatgcattgagagtttgcaaagtgtcagggaagaggggaggcagcgtaaggaacttccctcttgaggtgaccctggcctccccctgccaagctggcaggcccctcacagagcctggcttcaccccctccaccgacaaaccctgggtgtgtcagccttaatagaggtttgagatcattagatgggatcacaggtgtgcatgattcttgcatggttggggtcctgcaraaacatcttgggatcttgggccgacttcgggttttggcccttgggtaaagactggtttccttgctgttgttttcaccccacagactctcaaccttgggcagccatggagaaattcccttattcctctttgccatcgtttgagggcctgagccatgtgtcacagccgtagagggggagggcatgagtcaaggtgaagtcttggcctgctggttaac

SEQ ID NO: 809201 - DNA, 694 bp, Homo sapiens
aagcctccaaaatataaaacaaagtgatttgaagaatgttgcctatgtccattttgctgcttttcttactctatgaaagaaaaaatatagaaaggaggagagtggcaaatgcaacttacttaaagcatattaacttgttttggtaaagcacagagaaaggtacagtcagtagtcaagattcattaagccgccatgggtacccaggggaaggcagcaggtgctcacagagccctctgatcagttgtagatgctcagaaactcctgagggacagtttctgtctatcttgatagttcctccaaacactgatcaaagaccaggcagtgtcatctgcatcactaatttcgagttttttcaaatgataaacagaaccctcataccaacaatgaacagacccagtgtgcttgtgttcatcatctatgatcttcctgcttggtgcagtcagcctttcaatccaygagctcccattgactcctactgtatgctaagcactaattcagcttgagactcatagtctctgccttcaaggatatcacattgcagtgaagaactagagaggtaatggtcagatacaaaaatttctggtaagtgtaatggaagaggtagtcatgaggcaatgggagcaggggcggggggggtgtacttaactcatactggagagtggggagctcaataagtcctccttttaaaaggaca

SEQ ID NO: 809202 - DNA, 616 bp, Homo sapiens
ccttccatttcttgatctactaaaatccatacgccacatagtggctagaataattttttaaacacaaattcaccatgtttctctactaacttggaatgcttaatgtgttcccattgtacctagaataaatccaaacttactttccagggtctgctctccaagctgtacatgacctggcccatagccacctttctaaactcgtcacatccattctcctcattgctcatggtgctgtggacagtctggttcctttctgttcttctccactaccaagctcattcacactgccccttttccaaggcccttccctctttmcttacctggcttcttgcaagccaggtcttagctctaaagttacttgctcaaagagaccttttatgactccccagtctaagaatacacctctccatttgttcttctgtgccgtctttctttaatggcacttaatcacttaaactaatttaaattaaataattggttatttaaatcatctttttcatttattctctactttatttgtttgtcttccctgcctgaagggaggagctaactgcattagaggtgttgaaattcaccgttagatgatccctgggctagaattttaaaggatgtgggg

SEQ ID NO: 809203 - DNA, 634 bp, Homo sapiens
tattaatttcttcttgcttttttggtggaaataggctttgttgtaaacattaagaatataaaatctcctctatatagaaacaagaattttgttaaaaagagaatttgaatcccttcctatactataaaatgctctatagggagacaaagtgtttcttttttcttttatgtttactgtttatgtggagtgaratataaggctcttggatgtataacatactcaaaagctgttacactttctctgatctgctgtgatccactgaaaatgtgctggggtttgttctgctgtcactgtttatgctgctggaacttagcactgtcttgatttgaagcatatgattgagagccatttgaagcaatcttcattaatgcagataaaacaagtttacatgtgcagagttagaaaatgacatgttcaattctgtaagtggtgactttttgagcacctttcagtattatgtatttgtaaaaaccattgtttttggatataaagctaataagcactttaaaaaggaaaaggcagcctttactattttttctggttgagtcattgctctttagacctagcatcagcaatagatttcaaagataagtattaagcgctaccctaaagtgtgtaagtttttcattttgtc

SEQ ID NO: 809204 - DNA, 630 bp, Homo sapiens
gaaggggctggaacgcagactcaagtccttgccaaggccgcggtcgatccgtggaaagagaagttggaaatcgcaggcaggctaagccttttttttttttttaatgacacgtggggggaagggctgaatgtatgaaaatcatgtaaaatttctgttcttagcaacatccttgttattaggaatgatgactaaaccgccaggattattctggactgtaagttatcaagagcccactaatttcacattaaagcccattgactgcaacggcgtgattgaagggtttttaacaattaacataatcagaaaatgagctgagataatttttattcaactcattactttttaatcatgtatttcttttaattaatatcttctccgtgaacataacacaaagcggagccccagtgctggcccaagccagcytgcgggactgaatttgacacagccaaacatttcaccagcagcattcattgcatctctattgtggtgtgggcgaaatagaaaaatcttgtccaaaagtcaccatgttgttttgaaacacaattttaaaaacaggggagggcgttgggagcgcacaagccatacgctttcaattcgacttgactttcatatttgggcgcctctcttggt

SEQ ID NO: 809205 - DNA, 494 bp, Homo sapiens
tcttggcctaaattcttgcttccccactattccacgttttaatgggaaaaattgtcaaagtataattttcaaaaagttaaaaatgtgactcatacaaatatagaatgaaaatgtgtcgaatgtttattaactcattaatattaactcaatgtctctcaaaccrggtataggcactgaaaaagtaatgttagaattaggttgctggacagcatagaggatcatggtggacgggaggcgggactagattgcaactaccacgcagacagacagagcagtatgtggagactcgcactgtaaccttttgctccagaactactgcaggaataaaccaggaaagctgagaaaacccacagactctctgaagaaagcggatgactcctgtaggacactggagacaacccaaatactgtgaatgcccaagctgtggtagtgggaaaagagaactgtccacccctgaacacataccctcactggggaacctgaaggtctggatc

SEQ ID NO: 809206 - DNA, 505 bp, Homo sapiens
gctgaagacaaagggcatatactctcctgagttctagggctctgcccaccagctgatcctccctatactaccacagctgatgctctcttcaaagtgccacctcctggcaggaggccaatcagcacaaaaatagtgcattaaacaaccaaaactaaggaccctcacagagtccatttcacccccctgccacctcctccagagcaggtgstgatatccatggctgagacacctgcagactgttcacatcacagaacccggtgcagacaatccccagtaccagcccagagcttggtagacctgctgggtggctagatccagaagagaaataacaatcacaacagctcagctctcaggaagccacatccctaggaaaagggagagagtacttcatcaagggaacaccccatgggacaaaagaatttgaacagcagccttgagccctagaccttccctctgacacagcctacctaactgagaaggaaccagaaaaacaattctggtaata

SEQ ID NO: 809207 - DNA, 423 bp, Homo sapiens
aaaaacaattaatggtactaggcttaatacctgggtgatgaaataatctgtataacaaacccccatgacacaagttaacctaggtaacaacctgaaattagaataaaagctaaaaaaaaaaagaagaagaaacaaaaagcctgggcagaccaataacaaatatggaaattgaatcagtaatcaaatactcacacaaacaaaaaatacagggccagatggattcacaggtcaattttaccaaatattaagaattaataccaatcctttttaattgttgyaagaaaaagaaaaaggagggaagacttccaaacacataaggccagcatcactctaatgccaaataaaatcaaagacaccatgagaaaaaacactacagacaaataactctgctgagtttggtgcaaaatttttcaacaaaatatt

SEQ ID NO: 809208 - DNA, 568 bp, Homo sapiens
ctattaatatgctgcattgcattgattgagattcagttgttattttatagaattaaccagtgaagccatcgtctgataggtttttctttttggaagttcttttaatactattattagctcagtctttttacttgttatagattcatttagactttctrtttatcttcggtcatttttgtagtttatgcctttttaggaatgtctccatttaataagtcaatcaagtttctgttatttagtgaatcaactttgtgatctagtatgacaactagccttttggtctataattgtatataatattcattgattacacattttagtaatttttcttcccatattttcatcaacctagctgaaagtttattaattttgtggatattttcaattaaacagctacagcgtttgttgattttgtattctttgctttacatatatgcactaaaaattttatttatttcttcctatttcatttgggtttagcttgttcttttctctagtcttcaaaggatacagttaagttattcattcaaaatctttcttctttttaaatatagacatctgcacaaga

SEQ ID NO: 809209 - DNA, 647 bp, Homo sapiens
gtgaggcctgtaactgctggctttccccaacttccctgatgatccacatgacaaagcagaggcagccataatccctctgggaacataactcttttggcctgagaacaacaaccccacctccagcagcagccacagcaagccccacccaaatagagtctgagctcagacaagtctatacctgcatccacctgatggtctttctctacttgcccttgtagctgaagacaaagctcctgggagctctaggtcccactgcctgatcatccctatacaatctcagcmgatgttctctttggagcactcactcctggatggaagctaaccaacacaaaactagtgcaataaacaaaactgcaactaacgaccttcacagagtccattttactccccactgccacctgcaccacagcagctaatgctattcatggctgagagacctgaggatagttcacatcactgtggggttcagacagcccccagtaccagcttagagcctggtagtctgctgactggctagatccagaagagaaataacaatcacaacagtttggctctcaggaagccccatctctaggaaaagggagagagcactaaatcaatggagcaccctgtgggacaaagtaatctgaacagcatcatttgaatcc

SEQ ID NO: 809210 - DNA, 647 bp, Homo sapiens
gtgaggcctgtaactgctggctttccccaacttccctgatgatccacatgacaaagcagaggcagccataatccctctgggaacataactcttttggcctgagaacaacaaccccacctccagcagcagccacagcaagccccacccaaatagagtctgagctcagacaagtctatacctgcatccacctgatggtctttctctacttgcccttgtagctgaagacaaagctcctgggagctctaggtcccactgcctgatcatccctatacaatctcagccgatgttctctttggagcactcactcctggatggaagctaaccaacacaaaactagtgcaataaacaaaactgcaactaasgaccttcacagagtccattttactccccactgccacctgcaccacagcagctaatgctattcatggctgagagacctgaggatagttcacatcactgtggggttcagacagcccccagtaccagcttagagcctggtagtctgctgactggctagatccagaagagaaataacaatcacaacagtttggctctcaggaagccccatctctaggaaaagggagagagcactaaatcaatggagcaccctgtgggacaaagtaatctgaacagcatcatttgaatcc

SEQ ID NO: 809211 - DNA, 603 bp, Homo sapiens
gtgctgataggcccacaccccatgtttttggtcacatattgtgtttggttccacctatcctagtaagaatcatagatgatttcatcattccttttgctgtgcccatggattctccccatcccagataaataaattttgccctactttcttacygaaccaactgataattaacactctaacttctgtgttgcactttttaaagcgttgtttagcattaagtgtttcatcgtctgattatgcgttcattcaacaaatattttttgtgcatctacaactgcgtcaggcacaatcctagatatggaggatatgatcatgaacaagacaaagtccctgctctctaatagaagagacagataccaaaaaaaaaaaaaaaaaattctgtaaatgtaatggcaagcagtgacaaatgttatgaggaaacaaaaagctcaacaggaaaacagggagtgatggggtgaaatattgttcatttcaaacaatagtgttatgaatgaactaattaccaaggaagaaaaattgtagtcagtgtccaaggtttaagagaagccaagaagctgttatttcagcacctctgtcattagttcagctctttcatacaccaaa

SEQ ID NO: 809212 - DNA, 603 bp, Homo sapiens
gtgctgataggcccacaccccatgtttttggtcacatattgtgtttggttccacctatcctagtaagaatcatagatgatttcatcattccttttgctgtgcccatggattctccccatcccagataaataaattttgccctactttcttactgaaccaactgataattaacactctaacttctgtgttgcactttttaaagcgttgtttagcattaagtgtttcatcgtctgattatgcgttcattcaacaaatattttttgtgcatctacaactgcgtcaggcacaatcctagatatggaggatatgatcatgaacaagacaaagtccctgctctytaatagaagagacagataccaaaaaaaaaaaaaaaaaattctgtaaatgtaatggcaagcagtgacaaatgttatgaggaaacaaaaagctcaacaggaaaacagggagtgatggggtgaaatattgttcatttcaaacaatagtgttatgaatgaactaattaccaaggaagaaaaattgtagtcagtgtccaaggtttaagagaagccaagaagctgttatttcagcacctctgtcattagttcagctctttcatacaccaaa

SEQ ID NO: 809213 - DNA, 603 bp, Homo sapiens
gtgctgataggcccacaccccatgtttttggtcacatattgtgtttggttccacctatcctagtaagaatcatagatgatttcatcattccttttgctgtgcccatggattctccccatcccagataaataaattttgccctactttcttactgaaccaactgataattaacactctaacttctgtgttgcactttttaaagcgttgtttagcattaagtgtttcatcgtctgattatgcgttcattcaacaaatattttttgtgcatctacaactgcgtcaggcacaatcctagatatggaggatatgatcatgaacaagacaaagtccctgctctctaatagaagagacagataccaaaaaaaaaaaaaaaaaattctgtaaatgtaatggcaagcagtgacaaatgttatgaggaaacaaaargctcaacaggaaaacagggagtgatggggtgaaatattgttcatttcaaacaatagtgttatgaatgaactaattaccaaggaagaaaaattgtagtcagtgtccaaggtttaagagaagccaagaagctgttatttcagcacctctgtcattagttcagctctttcatacaccaaa

SEQ ID NO: 809214 - DNA, 575 bp, Homo sapiens
gtggaagggccatgtgaggacacagtgagaaggtggccatctgaaagctagaaagagaggcttcatcagaaatgaattctgccagcacctggatcttggacttccggtcctgcgagtggtaagaaaataaatttgtgttttaagccacccagattttgtgataccctgttatggtagcccaagcaggctaatgcacctccaatttttaatgggtggaatctctcaaggattaatcctggcccctttcttcatcccacactttagtactggtatatctaccccaggacttagatgtcacctatatgttggcaactgtaaaatatagcttaaacatggccacttctctccagccctgttgccatcaccttaattcaagccaatcttatctcttgcctagtatatcagtcagctaatgctatgmtaatgttgcataacaaatacctcccccccacaacacacaaatcccattgacctgccacaacaaacatttattattcttgccaataggtttgtgggtcatttcggaaagttctctgggctacaggtcagattctgatcttctctgtaggtctcct

SEQ ID NO: 809215 - DNA, 510 bp, Homo sapiens
ctacttagaaaagttgtcctcagttatccatagacatttgttaatactggcatgatggaagtatgctcacagtttctgcttttcaaagcttataagggatactgaccattattaaccagatctctggggaagtctctaccctgaggatgggcaccaaaacttttactttttttttttttgagacggagtctcgctctctcacccaggctggagtgcagtggcgcaatctcagctcactgcaagctccaccttctgggttcatgccattctcctgcctcagcctcccgagtagctgggactataggcgcccaccaccgtgcctggctactttttgtttttttgtatttttagtagagatggggyttcatcgtggtctcgatctccctgacttcgtgatccgcccgcctcggcctcccaaagtgctgggattacaggcatgagccaccgcacctggactacatttttttaacatttaaaaaattcaggtggcaacatgtacctgcactgggc

SEQ ID NO: 809216 - DNA, 473 bp, Homo sapiens
tcatctgggcactgagtggggagtggcaggtattaggcaagtcgcaaatggaacctgtctttgaaagacttctaatcaaggttctttctccagcaagccctcaccaggcctgagaggcacgaggactccatgaaactgtgcgtgcactccctttcatgaaaagggccttgggagatcacgctgytgaagatggccctgttggacactgctgggtgtgtgacttggcaagcagaccagggtgtgtctcgctggagaaccggtttggccggccccaccctgctggcagaagcttggtttcaaaatgggctaatagctggggacacagacactcttttcatcatacccagctcccaaggagtccagcagcttctgtctgtccagctagagttggatagaattctctgggctcaaccacccagctgctttgctcaggtcaagcggtaaagggaagcattctggacatcacagctgga

SEQ ID NO: 809217 - DNA, 620 bp, Homo sapiens
gatgaaaagtgaggataattaagagttttatggggttgatgtgctactggtagcaacagcagccacaccccacctgcaccaggctgatgagcccacattgcttggggatgagcccacattgcttgggagtgagcctactgctgggggcagaaacacacctggggtggagagggagcttctggtgcccarcccggccacccccagctccacttctgatccagcatcaacagggcttcttcctgtcccacagaaagagactgggcatgcgggagcttctggctcttgttccgcaaagggccactagtagcagggtgtgagccttgggatgcagctgcggagggaccgttgccacatggagccattgccagttataaagttactgggcagagtgaaggaggagaagaactgagtgcaaatgagacctcatttcagcctcagccagggccaggcggaattggctaaatggtttctctttccttccgttttcatcttttcctctcttcattcctttcctccctttcctcttctccttccttccttctaccacaacttccaatctccaccccgtcgtctcctctctgccctcccctctcctgcctgttctctctcctgcctgtccc

SEQ ID NO: 809218 - DNA, 569 bp, Homo sapiens
ttcccatctaaaattgctaagcctctatttctctctgatcagaggtaggggctggaggcaacattgagccaggggaggtgcctgctccctttctgtagttcctgtgtctattcagccctcatcaggggagaggggggcatgcttgtackaactccgcagcctgcacagtgaaggagctcgcctcaggagcccccactttgatggctttttgtatttgtgtttgactatgtctcagcatgagcttctgcccgagtgttctgctcattagagtttctagaaagttgtcctttcctgaccacaggcatcacttctggggttgttttcttgggaccgaagctgagattgcagatggtaatggctatgtgtgctttagcttgttccattggcgaaacataccaattaaacttcaaatgaaccaattcttgtttctttacaatgtaccttggcttgaagttggagttttagccagaatttccattggcctgttacaacacatgcaaaaatgctgggtattctagggtgttttgcagcaaatgctgcttctctggatcctgctccttgacagagat

SEQ ID NO: 809219 - DNA, 526 bp, Homo sapiens
aataacaaaattaaggcagaaatcaagaagttctttgaaaccaatgagaacaaaaagacaatgtaccagaatctctaggacacagctaacgcagtgttaagagggaaagttatagcactaaaggcccacatcagaaagctagaaagatctgaagtcgacaccctaacatcacaattaaaagagctagagaagcaagagaaaacagatccaaaagctagtagaagacaagaaataactaagatcagtgcagaactgaaggagacagagacacaaaaaacccttcaaaaaatcaataaatccaggagctgttttttttttttttccrgaaaaaaaaaaatagaccactagctagactaataaataaggaaagagagaagagtcagatagacacaataaaaaatgataaaggggatttcaccactgcccccacagaaatacaaactaccattagagaatactaaaaacaactctacacaaataaactacaaaagctagaataaatggataaattcctggatacacatac

SEQ ID NO: 809220 - DNA, 627 bp, Homo sapiens
atacctaagagtggagttgctggatcctaggttaggtgtatcatctacctcttgcagatgagataagttagataaactaacttagatgttaatttagatgttcagctttagtagattctaccaatctgttaagtgcctacaccattttacttccaccaacaatgtatgagagcttcagttgctctacatccggccaacacttggaaggaaattggaagggtagcagatccaggatttagggggagaaagactcaaatagaatgcaaatagctgggcctggtggggtggctcacgcctgtaatcccagtactttgggaggccgaggcgggtggatcaccaggtcaggagtttgagaccagcctgaccaacatggtgaaactctgactctactaaaaatacaaaaattagccgggcgtggtgtcgggcgcctgtaatsccagctacttcggaggctgaggcaggagaatctcttgaaactggaaggcggaggttgcagtgagccgagatcgtgccactgcactccaacctgcgtgatgggagcaaaactccatctcaaaaaaaaaaaaaaaaaaaaaaagaattcaaagagcctttcaggaaagctgaaggttgttggtcttaatttca

SEQ ID NO: 809221 - DNA, 620 bp, Homo sapiens
catctaggccaccccctcacttcttcctcccggaatgcccttcctccctttcttccttccttccttccttccttccttccttcctctctccctccctccctcttttcttttcttttcttttcttttttcttttcttttcttttctttccttccttccttccttccttccttccttcttcctccctccctcccttccttcctgccttccttcctgccttctgtcctgccttccttcctgccttccctcctgccttccttcctgcctttcttgcctttctttcytctttcctcactcgctcgttgcccaggctgaagtgcagtggctcaatctcggctcactgcaaatgccacctccttgggttcaagtgattctcatgtctcagtctccctagtagctgggaatacaggcgcccaccactacgcctggctaatttttgtatttttagtagaggcgaattttgccatgttgaccaggttggtctcgaactcctgggctcaagccatctgcctgcctcagcctcccaaagtgctgggcttacagctgtgcaccgccacgccaggctaattttttgtagagatgggtctccctatgttgcccaggctggtcttcaactcctggg

SEQ ID NO: 809222 - DNA, 556 bp, Homo sapiens
ttatgttcctcttcgttctgattggtgtgcattggtattcaagtttcttgccaattgcccatattaaatagcatctttgtacttccatgggtatgggataaactttgcaggtgttctgagcatttttttaaaagttgttaatttagccccataccaaagtagattctgtactaaggggcactcacatatgggatcttcacaggggcatccaagttatttcaaacatagacatcaattgtattctatgtttgagccatatctgtcctgtgtttaaaagattgggaattcccaattgtgggggacagttgctccactcctttcatccttggggaaactgttctagggcagccatttgtacagtttttttttttagatggagtctcactctatcgccyacgctggagtgcagtggcgccatctcagctcactgcaatctctgcctcttgtgttcaagcgattctctggcctcagcctcccaagtagctgggattacaggcaccgaccaccacatcgagctaatttttgtatctttagtggagatggggtttcaccatgt

SEQ ID NO: 809223 - DNA, 575 bp, Homo sapiens
gccgatttgagtggagaaagtcccaggtagagagcagttagatttctccatgggatcaaatgtggctttttttttttttccttttttagagagaggatctcactcttgcccaggctggagtgcagtgatgtgattacagctcattgcagcctcgaactcctggactcaagcaatcctcctgcctcagcctcctgagtaggtaggcataggcggtgccgccatgccccactaatttaaaaaaaattgtagagacagggtctcactttgttgcccaggctggtctcgaacttctaggctcaagcaatcctcagcccggcctctcaaagtgctgggattacaggggtgtgccaccttgcccagcccaaatatggttttggtaagaaytgtctttgctgtaacacccaagaactttgatggctcactgtgggcagccactgttgcaattgttgcagagcatagagcccatttccactgagtgtgatgtaaaacttgctgttgggattgtgagattaggttaggaaagaattcctaagctggttgtaatccctgatattgtagacatgccttggtgcaga

SEQ ID NO: 809224 - DNA, 643 bp, Homo sapiens
acgtgtttttgcctaatggaggaaggtgcttttcagtgttatcttgtaggaaattgagaccatggtttatagtgaaactatgcctttaacccgctgaagtaaaaatgcaggtgctcttaattctaactacataggagggggttccagaatcccttaagaatcttcytaaaaaaaaattaatttggcagtgagttacaaagcaatagatggataattctaaggaatctcaggctctgtgtccactattcaagtatttaattgccttgtctcaactcctgccagttataaagggtcaatatcagtggtaactttataacttacatcgaggattacatgtaaaattcataggacagtgtcggaacatataaaagcataataatagttatcagttggcagtggtagtcataatagtagtagtagcaaatggtaccactcttactcatttgccatggcagttccagaataggtttatctggtatttggtttcctacccagaggttctaacatcatgacccctggtagtgattatgactttggggaaggggtgttaggggaggaggagcatctcctttttatacatcccatggtttttccactcagccctctttgctaggaggccatcctagattaaaattccgtcctg

SEQ ID NO: 809225 - DNA, 641 bp, Homo sapiens
aaaatttatattataatccacagcttacactaccagaatattccattatatctttatttatttatttacttttaacgactactccagcagatcagggctacccccaggcagtgtgtggagcctattccattatactaaatgcattatgctaatctttgcagaaagacgtaaggtgacctaatcaaagttctagtattaatttcaactgcattgatgataagggtcaaagattgtcatatttttagctaaattaataaataatctattaaggtatataccttattaaggtctatcaatctattaaggtatattacaggggttgcttggatttgagaaaaaggaaaacgagtatgtggatgagggagacaaggagaataatttcattcattcattcactcaaaaatcatatttgcacgtcaagtaccaatcattgcgctaagtgcttaggaaacaatgacacaatgtccttgcctttgaaaatcgtgcagtttagtgcgaatayatgaatagagcagtaaaactggcactcttggttactcagaatatacattcattcattcattcatgaacatataactgaatgaaggaagccagggagaaagaaagcccggtgacaaaataattccactgaagcccctagt

SEQ ID NO: 809226 - DNA, 628 bp, Homo sapiens
agttttacttataatgactttacactccattctcacagtattattccaaatcactacccttaaagaggtaaaatattatcgcccatatctgtcccagctaagctaaaccagaattacttggtgattgtacaaattcccaagttcctaccctctttcacatttattaactctagggcagcagttattcgctctttcagccaggctggagtgcactggaacaaccttggctcactgcaacctccgcctcccgggctcaagcgattctcccrcctcagcctcccgagtagctgggattacaggcgtgtgccaccatgcccggctaatttttgtatttttagtagagacagggtttcaccgtgttggccaggctggtctcgaactcctagggcagcagttcttgaccctggatgcacttgagaatcatttgaaaatactgattttcagattccaccctagatcagttgcatgagattctctagttggcgtcacttgagtgtgtttcttaggattggacaagttgggaagacaccagaaaatagttttgcattttaaagattgtccaaaaaaggtgttagactattaatagacagttttatttcagcataagcctgtaggattatgtaaatct

SEQ ID NO: 809227 - DNA, 628 bp, Homo sapiens
agttttacttataatgactttacactccattctcacagtattattccaaatcactacccttaaagaggtaaaatattatcgcccatatctgtcccagctaagctaaaccagaattacttggtgattgtacaaattcccaagttcctaccctctttcacatttattaactctagggcagcagttattcgctctttcagccaggctggagtgcactggaacaaccttggctcactgcaacctccgcctcccgggctcaagcgattctcccacctcagcctcccgagtagctgggattacaggcgtgtgccaccatgcccggctaatttttgtatttttagtagagacagggtttcaccrtgttggccaggctggtctcgaactcctagggcagcagttcttgaccctggatgcacttgagaatcatttgaaaatactgattttcagattccaccctagatcagttgcatgagattctctagttggcgtcacttgagtgtgtttcttaggattggacaagttgggaagacaccagaaaatagttttgcattttaaagattgtccaaaaaaggtgttagactattaatagacagttttatttcagcataagcctgtaggattatgtaaatct

SEQ ID NO: 809228 - DNA, 618 bp, Homo sapiens
cagatgactgcggttataaagctgggtgcacataattacccaccatagtattatttgttagtacattttccttttcctttctttttttgagacagagtctcactctgtcacccaggctggagtgcagtggcatgagctcagctcactgcagtctctgcctcccaggttcaagygattctcctgcctcagcctcccgagtagctgggattataggaatgcgccaccatggcaggctactttttttgtatttttagtacagacggggttgcactatgttgtccaggctggtctcgaactcctgacctcaagtgatccactcgcctcaacctcccaaagtgctgggattacaggtgagccaccactcccagctgaatagcctgctattgactgaaagccttactgataacagaaacagttaattaacacatattttgtatgttgtgtgtattacacactgtattcttacaataaaggaagctagagagaagtaaatgttttaagaaaaccataaataagagaaaatgtatttacaattcattaagtggaagtgggtcaccataaaggtctccatccttgtcatcttcatgttcagcaggctgaggagcaggaagaagagga

SEQ ID NO: 809229 - DNA, 641 bp, Homo sapiens
aacaaactaagctatgcacatgatttccctttaaatagctgaagaaagctactgcttcatgatttgacaaagcattttctacccagcattgaaaaaatcaatgccttcaataattcttcaagaggcatgatgttctgatttttcaattctctagtcattattttgwgtaggcattttagttttataatgtatctcttaaaatataaatcctcaaactaaagccaataatctacatgttttattatccatatgtcttagctggtatgggattcactgccaatcatatttctattaatactattatgtagtatataattgaagtaaatgtgtttgtcttgatttacgtgaaatttcatccttttatttattgcttttagtttttaattttatttctgacttctttggaattattactttcccaaagtttagtgtcatttttaacttatgaagtctgttctctttaaattcatgcaagttatttataagtgcatattctagtaggataaaacatttaagtcttataataataatattttcatggtgatagtgttttattaatcaccttctgagtgaggttttacaaaaagatagggacaaatggaactgctttcacattttggtcattattgctccatattgta

SEQ ID NO: 809230 - DNA, 641 bp, Homo sapiens
aacaaactaagctatgcacatgatttccctttaaatagctgaagaaagctactgcttcatgatttgacaaagcattttctacccagcattgaaaaaatcaatgccttcaataattcttcaagaggcatgatgttctgatttttcaattctctagtcattattttgtgtaggyattttagttttataatgtatctcttaaaatataaatcctcaaactaaagccaataatctacatgttttattatccatatgtcttagctggtatgggattcactgccaatcatatttctattaatactattatgtagtatataattgaagtaaatgtgtttgtcttgatttacgtgaaatttcatccttttatttattgcttttagtttttaattttatttctgacttctttggaattattactttcccaaagtttagtgtcatttttaacttatgaagtctgttctctttaaattcatgcaagttatttataagtgcatattctagtaggataaaacatttaagtcttataataataatattttcatggtgatagtgttttattaatcaccttctgagtgaggttttacaaaaagatagggacaaatggaactgctttcacattttggtcattattgctccatattgta

SEQ ID NO: 809231 - DNA, 597 bp, Homo sapiens
aatatgatcaagttatcaaatatagaaagataaatatttttagttcaacatctccttctgaaagaaggatatattaatgatgataaagctccccactttcaccagatcagaaacaaaaggataaatgaattttattgctaaagtagatgaaggaagacagttactcacagattactggtggatatttaaagtgttataggctttctggtgagaaatayggcaatagtcgcttacaaactatatatattgtcaatctagcactgttactactgggaatctttcccagggaaaggaaactaacagtacctaaggacacatgggcaatgacgtttattgtagagttattttaatgaccaaagatagagaaaaatgtggttttttggtagataactttctaaataatacattcactgaacagaataatatgcatccatctaaaataaggaactataggtctaacagatggcttggagatattttcctggggtatggctgggtgagcaaataaagaagcaaaaaaggtacaaaacatggtcccagttttataaaataattatttaaggcaccctaaatatgattttctgtattgcgtgtctg

SEQ ID NO: 809232 - DNA, 615 bp, Homo sapiens
gtgagcattacaatgcttaaaagtagtgcagacccaaaaactgaaaagtggtaaggttttattgtgaaaagggaaagaacaaagatcccacagcacaaaaatcaatgctagcaggttgtcactgctgactggggcgggggtggtagccagcttttattcccttattcagccccgcccacatcctgstgattggcccattttacagagtgctgattggtccatctttacagagtgccgcttggtgtgtttacaaacctttagctagacacagagtgctgattggtgcatttttacagagtgctgattggtgcatttacaaatcttcagctagacacagagtgctgattggtgcatttacaaatcttcagctagacacagtgctgattggtgtgtttacaatcctttagctagacagaaaagttctccatgtccccaccctaaccggaagcccagccagcttcacctctcactactaggacatattattgcctctaggctccttcagtgtacaagagctagaatatatgaatatgttatatatataatatattatatataatacgtattatatattatcctatatatcatatattatatattatatataatacatat

SEQ ID NO: 809233 - DNA, 478 bp, Homo sapiens
gccgggcgcggtggctcacacctgtaatcccagcactttgggaggctgaggcgggcagatcacgaggtcaggagattgagaccatcctggccaacatggtgaagccccgtctctactaaaaaaaatacaaaaattagccgggcatggtggcgggtgcctgtagttccagctatcgggaggctgaggcaggagaatggtgtgaacccaggaggtggagcttgcagtgagccgagattgtgccactgcactccagcctgggcaacagagtgagactccgtctcaaaaaaaaaaaaaaaaaaaaaaaaaaaraactgcaagtaactgtcctagatcaatatgctaacaagagccttaggcagaaacaagatgggaataagctatctttggaattttggaaccagaagatgtcagaggccggcaaagcttatacccctttcaaaaatcaactgttagcttgctattgggccttgctggaaac

SEQ ID NO: 809234 - DNA, 515 bp, Homo sapiens
tactcataacagagcaaccagagggatccttctcaaacccacatcaaatcctgcaggactggggctttcctgcctctctgaccccacctcctgccactcttcccctcccctgctctacacctgccggtcactctctttctcttccttgaagacatcatgctcattcttgctgcagctcatctgcaggagctgcttctgctacctggaatgttctttgccctggttgccccttggtkgcatctgggtcccagagtcctcagctaaaatatcttgggagtcctgccttgacctcccagctgaggtggccaccccttatctcaagtcattttgattctctgcactgacctttcccttcctaatgtattttcttccttcctccctcctgcccttctccctccctcccttcctatctgctcgctaggatgaaacctacaagagagcagactttgtctgtcttattcctgcagcatcctgagcatctcaaacagtgttttgcatatatatgaacataataa

SEQ ID NO: 809235 - DNA, 583 bp, Homo sapiens
aatagtataccataaaaatattcttcaaatataaaagagaagtaaagactttcccagacaaaaagaaaagctgaggggtttcatcaacaccagacaagtcctaaaagaaatactaaagggagtactttaatcagagagaaaatgatgttaataagcaataagtaatcatctgaatgtacaaaactcactggtaatagtgagtacacataaaaacacagaatattataatgctctctttctgtggtgtgtaaactactcttatcctaagtagaaagactaaacagtgaaccaatcaaacaataacaactagcacaatttttgagatgtagacagtamaataacatataactagaaacaagaaaaagattaaaagtaggtagacaaagtttagacataaagtttttattagttttctttttgcttggttgcttatgcagagtgttaaattgttatcaggttaaaatgatggattataagatagtatttgcaagcctcggccaggtgcagtggctcacacctgtaatcctagcagttttggaggccaaggcaggcagatcacaaggtcaggagattgagaccatcc

SEQ ID NO: 809236 - DNA, 616 bp, Homo sapiens
aaagtgtataagaaaagtaaaatgtacctttagtaaaaagattataaaggggcataaaaacgtggatttttacctacattaaaaggttaaaaaaatattgttttaaaagttttaaaacgttaattgtaaagaaaattctgtgtgtaaacatattagctaaagttaaaaagktatcatccaatttttctgtgaactagacattaaagtaaaaatgcaacaggtttttcttaaagcatcaacctgctctttaacaaaaattataaaaagttaaaaagagtctataaaatcttaccttatggtcaaacataaaaaattagataaatatgtctacaaggttttattaaaattaagtttaacattaataacaccctaatataaaagtaaaatttaacttacgtggtataaaaatcatacaagaagcattattaaatataaaatagtgtttaactttctttggtctaaaaactaataaaaaatagatgctaaaagaaacattcattttactagaggatcatagaagttaaagacttaaaacaaactttggcaattaagacggcataccaagatgcaaatgcctggttgaaatagatcaaatattccatctgcacgttataaa

SEQ ID NO: 809237 - DNA, 645 bp, Homo sapiens
gtctaatgagatattatgcaggatcccatgaaggtaaaacaaacactttaagccctctgatagtggtgctagtttaggtcttgccctattttatatacaatacatgtcaattctagtcatccagtggttgggtggttttccagttgttttcmttagaagcctctgaccaatcatccaagccatttaccatcattcatgagtttgtatgtattcttctcttgggccacttctctttccacacaaagtagatgatcaaatgcattgcctgaaactgcccactgggaccaatttcccttgctgctatcatttagggccaccctgagaagagctgcagagcagcagttttgcaattcctgcttgcacttacctactgaattgacaaaaccaaacttgagggttttctttttttctctttaagctgactataagagactccttggacaaacatagggataaattcagggagaggtgctggtgcaatattagtgaataatatgggggtctgggctacctgcttgttcccttaggccctacttgtgcacaattctcaacgtaccacttccatcttgtagattgctgctgggcctgctcaaactcatgactttcaggatctaatagaactactcgaaatgggctatttcaagt

SEQ ID NO: 809238 - DNA, 716 bp, Homo sapiens
ggcttcgggaacagtttagtcatcctcgttggcctgccagcctctgcctctgctttccagccctcacgcccgatgtcgtgcaccagtccctcttcatgtcagccctgtcggcccaccctgaccgctcactctcagtgtgctgggagcagcactgcaagctcctgccaggagtagcgggcatctcagcctcgacagtcgccaagtggaccatcgatgaggtgaggagcgagggcccttctttatccttctcttcctctcctcctccctctcaccataccctggtggaaaggcccaggtcaggtagaacccggtaccactcctggcactacctcttgctcatctgtcctgtgcacagtcccttctagctgcccagtaggggctgactgagacccttcctgataggtmcattatggcagagggggcgggggctgtgctgctgtttcagccagaaatccagcaggagaggcaggcttcggtcccaggcctcagaagcaaggggcccaacttggcacatctgccagcatagaaaccctaggatccttttaggctggtgagaaaaagcagcattggcacagctcagaagcacctaggctgtggaggccagctctccctacatgcctaagctctgtcccctggtcaacatgtcatctttggtttccaaggtcttcggctttgttcagaccctgacaggttgtgaggaccaagcacgcctcttc

SEQ ID NO: 809239 - DNA, 628 bp, Homo sapiens
tttttcatctagttaaggtcttattcatggtatttcgggcaaaagtctttcaagtatattcatagattgcttttttcctttgtgtagtttgaaatcctgaagaaatatcttgacactggtggagatgtctttgtgatgctaggagaaggtggagaatccagatttgacaccaatwttaactttttactagaagaatatggaatcatggttaataatggtaattagtattattattttcagtagaggcagtacttttctatctattatttgatatcatagccctctaggtccagtggcataatggaaaaagccctgggctgtgtgtgcgtgttttaatgttccattctcatcagcagtctgagcctcctaggcttgggctgcttccatttataaagcgagatggattggaaccaagttccagggtgcccttcaggtcaaaattggtatgagtctataatatcgaatttatttctaacctaaaatatacctccttctctttttccctcatagatgctgtggttagaaatgtatatcacaaatatttccatcctaaagaagctctagtttccagtggagtcttgaacaggtaagcatgttgaaagcagaaatatcttggcaaggcatcgtc

SEQ ID NO: 809240 - DNA, 539 bp, Homo sapiens
atatacctgtgtggaggaaactcaaagaaattcaagataacaaagagaaggaattcagaattctatcaggtaaatttaacaaagagagtaatataactttttaaaatatcaagcagaaatgctggagttgaaaaatacattgacatactgaagaataaatcagagttcttcaatagcagaatgaatcaagcagaagaaaggattagtgagcttgaagacaggctatttgagaatacacagtcagagaagacaaaagaaaaaacaatgaagcaggcctacaggatctagaaaataacttcaaaagggcaaatctaagagttattggyctcaaagaggaggtagagaaggagatggggtagaaaatttactcaaagggataataacagagaacttcccaaatctagacaaggatattaatatccaaatacaacaagggtatagaacaccatgcagatttaatccaaagaccacctcaaggcatttaataatcagactttaaaggtcaaggataaagaaaggatcctaaaagcagcaagaga

SEQ ID NO: 809241 - DNA, 551 bp, Homo sapiens
ctctttttccagaattgaggtatatacccattgtttctagaagaagcagaatagaattagcacaatgagtataggttaatcaaggtctactgccagatttgagtatgggatcacctttggctacattttgggaaaaggatttctttataacaccaggtttctgagctcaaggaaaaaaagaaacagagatgttaggtgagcaaccagccttgtctgctaagtaraataagtagagtaaaaggaatatgtcaaggcctacaaaattgcatgaaattttacataaacttggatattggggtaggaagcactaaatcgatcaagaattgaagccaggttgaagcctggtcaaaggttgtgtcctgtatagagcaactcgactctatcaaaacacctggtgggaaaaaggcagagagcttcaatatgaaggttattagggtaataggaaagatttttcagctaagtaaaagaaatctcgtcctttttactgaaaagtactactaaggaagagaatagagactatagagagaaaagtaatcgttgggaaagaaatc

SEQ ID NO: 809242 - DNA, 551 bp, Homo sapiens
ctctttttccagaattgaggtatatacccattgtttctagaagaagcagaatagaattagcacaatgagtataggttaatcaaggtctactgccagatttgagtatgggatcacctttggctacattttgggaaaaggatttctttataacaccaggtttctgagctcaaggaaaaaaagaaacagagatgttaggtgagcaaccagccttgtctgctaagtagaataagtaragtaaaaggaatatgtcaaggcctacaaaattgcatgaaattttacataaacttggatattggggtaggaagcactaaatcgatcaagaattgaagccaggttgaagcctggtcaaaggttgtgtcctgtatagagcaactcgactctatcaaaacacctggtgggaaaaaggcagagagcttcaatatgaaggttattagggtaataggaaagatttttcagctaagtaaaagaaatctcgtcctttttactgaaaagtactactaaggaagagaatagagactatagagagaaaagtaatcgttgggaaagaaatc

SEQ ID NO: 809243 - DNA, 630 bp, Homo sapiens
tgaacgccagcacctggatttgactatcttgtgatatcagccggagtgtcttactgtgcagtggccagaccctacacttgcttacatacctctcattgttccatgcctgactcacagtctctcttggaggcatgggatccaggctaatagcatgagctgagcacagcctgccaggccaaatgggtggaatgaacccagcaagcctgagcaaaactcaggcaaagatactactggccacagatttctggccagaaaagtgacaccttgaagatcctgtaacaacttgggggctcattagggatctgtggamgggtaagtaaaagcagatcaactctttctgtccttttttcagagtccctaaactccacaatagccaaaatgcaagacaaataccaggcctctgtcagacaggtagaagtgactagcacagctgccagacttaagacatggaggacaggcttgctggggaggacagtgtcaatcccccatcacccttgagtgttgggaatgaggacactgtcaattccccattacccttgagttttgggaatgttggctttcttccaactcagtttcccttcttggaggtctagccatcatgtgacactggaaggaggtgctggggcaact

SEQ ID NO: 809244 - DNA, 541 bp, Homo sapiens
cctctttctgtgtttctgccttattccaggcagcttagtgatgccatttttttctagtgtttcctttagtgctgcttctcctagagtatttaccaaaatgagattagattgggatttctgggaagtgtcttggagtgttagggaaactagataactgtcttcagttttcatttcctcccgtagatactaagcacccacaaaaattctctccatttggttttattccaacttgagggagaaggatgggtgacatggtctaatttggaattcactcatttctgtgaacaatgtggttatcttaggtttgtttccaagtattgggsttttttaaaggatgttatggtgtgtggttagtcagcagttgaactttcttcgtgagaaagggagcctgagacatccagttccaccatctttctgattttctatcttcaatttcttttagtattaaaaaccaatatccgtgtgctggatgtggtagttaatattggtgtgcagttgcttctaggacctctcagttgacacagaaggaaatatttacata

SEQ ID NO: 809245 - DNA, 656 bp, Homo sapiens
gagaaagatataaacggcatccaaattggaaagaaagtactcaaattatccttgtttgctgatgatatgatcttatatttgcaaaaatctaaagactccacaaaaaacctattagaactgataaacaaatgtattaatgttgcaggacacaaaatcaacctacaaaaattagtatcattatatgtgccaacaacaaacaatctgaaaatgaaatgaagaaaggaatcccatttataataggtacaaatcaaataaaatatctaggaattaaccagaaaagtgaaatacctgtaaaatgaaaactgtaaaacattgatgaacgaaattgaggaagacacgaaaaagtggaaagatattccttgttcatggattggaggaaacaatattgttaataatgtctatactcctcaaagcaatctacagatgcatgcaatccctgmcaaaatatcaatgacattcttcacagagaaaaaaaaatctaaaatttatatgaaactgagagaaggttctagctgggctttctgggtcgagtaggggctcagaaaactgtgaaactcactcatttcctgcaacaggacttactttggtcctggataaatgatattaaagatatatgcttaaaatattcctaacattagcatttgtgtatgtgtttt

SEQ ID NO: 809246 - DNA, 591 bp, Homo sapiens
ttgttttaaaacctcttggtttaagtggtggcaatgactaggtaaaatttgtaatcttaaagtgatagcagactgttttgttggattgggcttgagagactgtttcaggcaagtgttcatgtataatctactagctgtccttttgstgatagatatggtttggaaaaaaaaaattgtgatactttctgttatcaggcaaatcacacatgtgagccctttcttcaacatcttctcaggttccaaattgccagagtttgacacaagtgattccattttgaatctgtcaagttttataatgaaaactccccaaaaattgcattacattgagcagcaagaagaaggaatggaaaaaaatgacaaaaaatgaagaaaagaaattcaggtgtgttggggcaaaatgaagaagaaaaacataaaatcatgcgagaaaagcagcagaaagagatgaaagagataaatctagaagataggcttgtttggtgttttctgaagagcaaactaagttcagccatttgtaacataacagcaggtatattgttctgagatatgctctgttgttaagaaatattgtcattgtgtgaatggcataga

SEQ ID NO: 809247 - DNA, 591 bp, Homo sapiens
ttgttttaaaacctcttggtttaagtggtggcaatgactaggtaaaatttgtaatcttaaagtgatagcagactgttttgttggattgggcttgagagactgtttcaggcaagtgttcatgtataatctactagctgtccttttgctgatagatatggtttggaaaaaaaaaattgtgatactttctgttatcaggcaaatcacacatgtgagccctttcttcaacatcttctcaggttccaaattgccagagtttgacacaagtgattccattttgaatctgtcaagttttataatgaaaactccccaaarattgcattacattgagcagcaagaagaaggaatggaaaaaaatgacaaaaaatgaagaaaagaaattcaggtgtgttggggcaaaatgaagaagaaaaacataaaatcatgcgagaaaagcagcagaaagagatgaaagagataaatctagaagataggcttgtttggtgttttctgaagagcaaactaagttcagccatttgtaacataacagcaggtatattgttctgagatatgctctgttgttaagaaatattgtcattgtgtgaatggcataga

SEQ ID NO: 809248 - DNA, 596 bp, Homo sapiens
ctggccatttgaatacattcttttgcaaattgtctatttatgtccttagcccactttttgataagattgttttgttttgttttgtttttattgctgatttctttatgttctttgtagattctggatattaatcctttgtcagatgtatagactgtgaataaagtatccacagatgtataaatctgtgaaggtttccttccactctgggttgtctgttaactctactgattattataattattttctgtgcagaaacattttagtttaatttagtttatttaagttcaatctatttatctttgtttttgttgcatttgcttttgggttcttggtcatgaagtctttgcctaagtcaatgtctagaagggtttttctgatgttatcttctagaatttttatggccataatcaaaaaawtaaaaaaaaatagattttggcatgaatgtggtgaaaagggaacacttttacactgttggtgggaatgtaacttagtacaatcacgatgaaatacaatacagagactccttagagaactaaaagtacatctgccatttgatccagcaaacccactcctgggtatctaccctgtggaaaata

SEQ ID NO: 809249 - DNA, 483 bp, Homo sapiens
acatgctatgtattttttacttacttttatatacccaatgcctagaagactattgaaaacatagtaattatttaataaatatttcttaatgaatttataagtgaaatgaaatctaaataaaggtagtatgcaaaatacatgtaaactatatctcctgatatgcctgtgccttacagttgaatcaaaagtttggcttttgttatcctagacataaatggcgttaatgaagacataactaattatatgaatcataattttaaagaagtaggaaaaggacggggaaaaagaggaagaggagggaaaaagaagaggacagaaaattctttgtragaagaaaaactttttagtcctatggcaagatgcctatttatcactcaggttattataaagaagacattgtgcaatgtagagaacagtattctcaataatataaacaatatgtactaaaacaatttcatggaagtattgtttgagacattcctc

SEQ ID NO: 809250 - DNA, 656 bp, Homo sapiens
atacttttcctatagagctatttgagcttcttatgtatttttgttattcatcacttgccatatgggtagtttgcaaatatttcctcctattccatgggttgtctcttcacttttttgacagcttcctttgctctgcagaaactttttaacttaatgtgattccatttgaccatttttgttatggttgcctgtgtttatcgcatattactgaagtaatttttgtccagrccaatgttctagagagcttccccaatgttttcttgtaatagtttcacagttgaaggtcttagacttaagtctttaatacattttgatttgatttttgaacatagtgagaattagacatctagttactctcttctgcatgtgaatattctgttttcccagcaccatttattgaagagactcccttttccccagtgtatgttcttggcacctttgttgaaaataagttcactgtgaatatatggatttgcttttgggttctctattctgttttatgagtctgtttttatgccagtaccatttttttttctactatagctctgtaggataatttaatgtcaggtaatatgattttttccagttttgttctcaggatagctttgactattctggatcttttgtggttccatatacattttagggatgttttt

SEQ ID NO: 809251 - DNA, 656 bp, Homo sapiens
atacttttcctatagagctatttgagcttcttatgtatttttgttattcatcacttgccatatgggtagtttgcaaatatttcctcctattccatgggttgtctcttcacttttttgacagcttcctttgctctgcagaaactttttaacttaatgtgattccatttgaccatttttgttatggttgcctgtgtttatcgcatattactgaagtaatttttgtccaggccaatgttctagagagcttccccaatgttttcttgtaatagtttcacagttgaaggtcttagacttaagtctttaatacattttgatttgatttttgaacatagtgagaattagacatctagttactctcttctgcatgtgaatattctgttttcccagcaccatttattgaagagactcccttttccccagtgtatgttcttggcacctttgttgaaaataagttcactgtgaatrtatggatttgcttttgggttctctattctgttttatgagtctgtttttatgccagtaccatttttttttctactatagctctgtaggataatttaatgtcaggtaatatgattttttccagttttgttctcaggatagctttgactattctggatcttttgtggttccatatacattttagggatgttttt

SEQ ID NO: 809252 - DNA, 637 bp, Homo sapiens
agatgatgatgtatgagttctctgatgagaattcaaaacagcaatcttaaggaaactctgtgaacttcaagataacaaagaaaagcaattcagaaatttatcagagaaatttaacaaggagataaaaattttaaaaaatcgaatgaaagcctgcagctgagaagtatatttgctgaacagaaaaatgcattagaagctgttaagagtagaatggataaaacaaggaaaaaaatcaatgacgttgaaaacggtatttaaagacactcagaggagaaagaagaaaagagaatggaaaggaataaagaacacctacaagatatagaaaatggcctcaagagagcaaatctaagaattgttgatgtccaagagggagttgtaaaggagccaggagtagtcttattcaataaaatagtaattgacaacattctaaaatttgagaaatatataaatattcaggtacagaaaggtcagagatcaccaaacraattcaacccaaataagactaacccaaaatatataataatcaggctctcaaaggacaaaagcaaagagatgatcttgaaagcagtaagagaaaagaagcaaatactatataaaagagcttcaattcattaggcattggagttctcaatggaaa

SEQ ID NO: 809253 - DNA, 646 bp, Homo sapiens
attatttcatgtttttatttctgtttttcatttagaggtatatgtacaagtttctaatataggtgaattacatgtcatggggtttggtatacatattattttgtcacccatgtagtaaacatagtactgataggtagattttcaatcctttttctcctcccaacctcaaataggccatgatgtctgttgttcccttctttgtgtcaatttttactgaatatttagctcctacttataagtgagaacatgtggtatttggctttctattcctgaattagttttcttaggattatggcctccagctccacccatgttattgcaaggaatatgatctcatgctgttttatggctgtrtaatattccatagtgcatacataccaaattttttttatccattctaacattgatgggcatttagcttcatactatgtatttgctgttgtgaataattctgcaatgaatatacacatgcatgtgtctttgtgttagaacaatttatattcctttgggcatatacctaataataagattactaagtcaagtggtacttatgttttaagttctttgagaaatctccacattgctttccataatggctgaactaattacatcccaccagcaatgtataagcataccctttcctctg

SEQ ID NO: 809254 - DNA, 626 bp, Homo sapiens
attgatgcctctattgtaacaaatatacagcacaaatgaaaatgttgataatacagaaaactggggaatgagatgaaataagagggtatttggaaactccactttctacttgttttttagaccagcctggccaacayggtgaaactccgtctctactaaaaaaatacaaaaattagacaggtgtggtggcaggcaccttaatcccagctacttgggaggcagaggcaggagaatcatttgaacttgggaggcggaggttacagtgagctgagattgagccattgcattcaagcctgggagacaagagcaagatttttcttgaaaaaaaaaataataatatatatattctattaactaatatatatatttatatgtcttataaatattctattaactaaaaacactaataaaaaatgagagacctatttttaaagaaaaacaaacccaaacttttttattctaaattatcactagttaccgaattattttaattattatatataaaacttaagcaaaaaataaactctatggaaacctttttaaagtacaaaattattcctagtggctctagaaaattatagttaataaataactttagaaaaatttggaaacacacatacatatat

SEQ ID NO: 809255 - DNA, 626 bp, Homo sapiens
attgatgcctctattgtaacaaatatacagcacaaatgaaaatgttgataatacagaaaactggggaatgagatgaaataagagggtatttggaaactccactttctacttgttttttagaccagcctggccaacatggtgaaactccgtctctactaaaaaaatacaaaaattagmcaggtgtggtggcaggcaccttaatcccagctacttgggaggcagaggcaggagaatcatttgaacttgggaggcggaggttacagtgagctgagattgagccattgcattcaagcctgggagacaagagcaagatttttcttgaaaaaaaaaataataatatatatattctattaactaatatatatatttatatgtcttataaatattctattaactaaaaacactaataaaaaatgagagacctatttttaaagaaaaacaaacccaaacttttttattctaaattatcactagttaccgaattattttaattattatatataaaacttaagcaaaaaataaactctatggaaacctttttaaagtacaaaattattcctagtggctctagaaaattatagttaataaataactttagaaaaatttggaaacacacatacatatat

SEQ ID NO: 809256 - DNA, 626 bp, Homo sapiens
attgatgcctctattgtaacaaatatacagcacaaatgaaaatgttgataatacagaaaactggggaatgagatgaaataagagggtatttggaaactccactttctacttgttttttagaccagcctggccaacatggtgaaactccgtctctactaaaaaaatacaaaaattagacaggtgtggtggcaggcaccttaatcccagctacttgggaggcagaggcaggagaatcatttgaacttgrgaggcggaggttacagtgagctgagattgagccattgcattcaagcctgggagacaagagcaagatttttcttgaaaaaaaaaataataatatatatattctattaactaatatatatatttatatgtcttataaatattctattaactaaaaacactaataaaaaatgagagacctatttttaaagaaaaacaaacccaaacttttttattctaaattatcactagttaccgaattattttaattattatatataaaacttaagcaaaaaataaactctatggaaacctttttaaagtacaaaattattcctagtggctctagaaaattatagttaataaataactttagaaaaatttggaaacacacatacatatat

SEQ ID NO: 809257 - DNA, 587 bp, Homo sapiens
tatccatggagttaatgatttacacatacttggccttcagtatacttattcttcagttatttactttaattcatcttgaaaattttgattctaaataaaaagtttatatttttccactaatattggtgagaaaatatttatttcatgacaaaccaaataacaaaacaattttcacatataaaaattatatatgcttgataataaaaacattttaaataaatatatagtttacacataaaaaaattttttttttgtatttgccaamagaggaacacttcatagtgtgtgatgattgatgaaagatggacacaagtgaggtattctttacaagattcattcttctttacttactatattttttatcattttgcaatttatggggcttacaggtttcccatagtgaaactgcactcagccttgaggtactctagctttttcatgttaggtaaatgagtaagaaccagacaaagcagctgagcaggaattaccactaaaataggagcaataccaggagagcaaaacagatacataactaactagagttagttcctaaaggccctagtatctaacaaaagattttacaaaag

SEQ ID NO: 809258 - DNA, 597 bp, Homo sapiens
aaaattataccatctctacaatgtctttcagaaaattgaaccagagggcctacttccaattaggccaatgaatgagtttattctaggccagaattaccctaaaaccaaaactagacaaatatattacaagaaaagaaaattttagaccggtgtctctcttgaatattgcaagaattgcaaaagtcctgaacaaaatattagcaaatcaaatcgagcaatatattaaaatagttttatatcacagtcaagtgggatttatcccagctatgcaagtttgagtcaacatttgaaaatcaattaatgtagtccactatatcaacagactaaagaggaaaaatcaggyggtcacattgatagatgcagaaaatgcttttgacaaaattcaacacggattcaggatgaaaaatcctcagcaaactaagaataggggtaacttccttgagaaagaacatgtataaaaaaacttgttgttaacatcattacttaatagtgagaaattagaggctttctcactaaatcagaaacaaggtaaggatgttccctctcccaatttcttttcaacactgcagtggaagtcacagcatgcaacaatacaag

SEQ ID NO: 809259 - DNA, 595 bp, Homo sapiens
aaaattcgtaagccaggctctttcttccacaatcttaaatcttgcctcagctttcttctctctgcaagagacatcaaggtgtttttcccggtgtaagaaactgtgatccttgagctcacagacgctgagatcatacaagtttcaatgttaaaagattaaaattgtcaagtgttcaggactttggtcagccaagagaaagaatctcagcacatgaacttcccccacgaacttcagaaaccaargagcatcagacactcccgcccttcatctcagacacccgtaactagagattttttccaagccaagatactgttttctttttattttgttttattttattttttattttatttattttattgtttattttcaagacactcttcctctgttgcccaggctggagtgtagtggtccgatctcggctcactgcaagctccaccccaaaggtctgagcgattctcgtgcctcagcctcctgagcagttgggactacaggcacctgccaccatgccctgctaatttttgtatttttggtagagacagggttttgtcatgttcccaggatgatctcaaactcctggtctcaagtgatccac

SEQ ID NO: 809260 - DNA, 583 bp, Homo sapiens
cttaggcatgagaattgcctgaacctaggaagcagaggtttcagtgagccaagattgtgccactgcactccggcctggatgatagagcaagactctgtctaacaacaacaacaacaacaaaagtcttgaaacaaatgaaaatgaaaacagaatatatcaaaatttatgggatacagcaaaagcagtgctaaaagggaagtttatagcaataaatgcctacatctaaaaagaagaaatatttcaaataaaaagcctaatgttgtacctcaaggaactagaaaaacaagaacaagccaaacccaaaattagtgaaggaaagaaataataaagatcaaagcatagtacattggctaacacctgtaatcccaacactttgggaggctgaagggggagcattgattgagyctgggagttttagatcagcctgggcaacatagtgagactccatcagtataaaaaattctaaaaaataggcaggcatggtggcacacacctatagtcccagctactcaggaggctgagatgggaggatcacctgagcccaggaggtcaaggttgcagtgagctgtgatcgtgccactgc

SEQ ID NO: 809261 - DNA, 595 bp, Homo sapiens
tcagctaggtccatgaaagaaaaaatgtcttccagccaccattcagagagcttttcccctatctttccaggcacctctcaacatgtcaatcatttgtgtaaggcagtgcaattatttgaaagataaagacattaatttaattcaccttttcagttacaatcctctaaagtcttctaaaaggcattttccagcagattacgaacgtcgtcctttctgagtattgtgtcatcgccgctcccttcccgttcactgcagagcctctccttatctccctagtgctccctcttccatctaatccatctggccactactgccagagaaattttgcatcatggatctcccacgtccgtaagtcaayggtttccagggcccactacaattaaatgacatttttcttgtttgtttatcctctttattcagtcttcttttcacttgtacccaacctgcaccctctaggtggtctgtgcacactgcgtccattttcactgctgtctttgttcatggtgtttgcccaacccttacttggaaagttcttttccactagtacccagctcaaatcccaccgcctttgtgacactcgtttattcgatatata

SEQ ID NO: 809262 - DNA, 622 bp, Homo sapiens
cgatcaggctgtgggtggcagagaaggggtgcaaactgcacccgccattagctgggcttctcggtggtagccctgagtgctccacggcctgtccccacctggctcctgcacccgcttcctttctgcgtgggcttcctttctgcgtgggcggtgrgtgatcctgggggccaccagctgctcgtggtggggaggggcctgccgggcggggctggctgtgggaaggagagccacgacagataggaagcacctgccagatgcaggacagcaactatctaaggaagacttgatttccaagtttctatggagatgttacaaacggtgtaggcttaaaaaaagcatttaaaacttttatgtaactgaagttttaaaataaaaatatgatcaggtgaaataacaaataatgccatcccatgacagttttcaagataaaggcgtgtccccgccccctgcagccagcaccccacccgtccttggggctcacctagccgtctagggctgtaggaataaaatggccacaccgtccaaatcttgactttatttttaatataaaaaatgcaaatttggaaacccaccctactttccccaacataatgctttacctcttaaaaataaaaataaagta

SEQ ID NO: 809263 - DNA, 633 bp, Homo sapiens
gacttcgtgatccacccgcctcggcctctctcttttttctttttttttttggagatagggtctcactctgtcacccaggcttcagtgcaatggcacaatctccgctcactgcagcctccacctcccaggttcaagcgattctcctgcctcagcctccgaaatagctgggattacaggcatgcgccaccatgcccggctaattttttgtrtttgcagtagaaacggggtttctgcatgttggccaggccggtctcaatctcccgacctcaagtgatccacccgcctcggtatcccaaagtgctgggattacaggcatgagccacagaacctggccctatccccagtctttaaaagagtacagcccatcctccaatcctcacaggtgccgagtgctgcgggaccccacgggaagcagggagcccagcactgctgccatgaggggaacagagggcgaagcaacgatggcccagcttggttgaatcccatgatggcgggaagcggaccccacgatggcgggaacgtggaccccgcgatggcgggaacgtggaagagaggaagagggccaggcctcatcccagaagaagcgacctagcacgggtcagtgattcatcaagagaaagggtaggccaagaa

SEQ ID NO: 809264 - DNA, 623 bp, Homo sapiens
gatatttatttcatacgtaactacgcataagagactttgctaagttttaggtaaaatacaagtcccagatacggagcaagtctcaaccactgtacatacctgaatgtgtaattacatcactgtgagaggtgccacagtaaatgccactgggtcttgtgttagtccattctcacacaaagaactacctagccaggtgcggtggctcacgcctgtaatcccaacactttggcaggctgaggcaggcggatcacttgaggtcaggagttcgataccagcctggcaaacatggtgaaaccccatctctaytaaaaaatgcataaattagccaggtgtggtggcacacgcctgtaatcccggctactcgggaggctgaggcaggagagtcgcttgaacccgggaggtggaggttgcagtgacccaagatcgcgccactgcactccagcctgggtgacagagtgagactccatctcagaaaaaaataaaaataaaaataaagaactacctgagaccaaatactttacgaaaaaaaagaggtttaattgactcacagctccacaggcttaacaggaagcctcaggagacttacaatcatggcagaaggcgaaggggaagcaaacacatct

SEQ ID NO: 809265 - DNA, 623 bp, Homo sapiens
gatatttatttcatacgtaactacgcataagagactttgctaagttttaggtaaaatacaagtcccagatacggagcaagtctcaaccactgtacatacctgaatgtgtaattacatcactgtgagaggtgccacagtaaatgccactgggtcttgtgttagtccattctcacacaaagaactacctagccaggtgcggtggctcacgcctgtaatcccaacactttggcaggctgaggcaggcggatcacttgaggtcaggagttcgataccagcctggcaaacatggtgaaaccccatctctactaaaaaatgcataaattagccaggtgtggtggcacacgcctgtaatcccggctactcgggaggctgaggcaggagagtcgcttgaacccgggaggtggaggttgcagtgacccragatcgcgccactgcactccagcctgggtgacagagtgagactccatctcagaaaaaaataaaaataaaaataaagaactacctgagaccaaatactttacgaaaaaaaagaggtttaattgactcacagctccacaggcttaacaggaagcctcaggagacttacaatcatggcagaaggcgaaggggaagcaaacacatct

SEQ ID NO: 809266 - DNA, 631 bp, Homo sapiens
tcaagaagggagaaattcttcttggaggagctggaggggctttgtggagagtttcagaatgctttgcccactaggtttgctgtatccatttctcttcatgtatcccaaagaccaagccaagaaaccagaagcctctggtcccactggcccatgggctccctcggtyccccccgtcactaatggccattttgcatgtctctctcccaggcctgctctcttgaacagtgccgaaaacttcactgtgctcatcaagaacaatatcgacttccccggccacaactacaccacgtaagtgcccaggctgcctggctgtcttagttatctactgctgagtaataaattatcccaaacctcagaagcctgaaacaacaaacgcctattgtctcccacggtttctgtgggtcaggaatctgggaatgactttgctgcgtggttctggctcaaggtctgtcaggttgtagccaagctgtcaaccagggctgcagtcatttctaggcttgactggggctggagaacacttttccaagctctcacacagttgctcgtgggagagctcagttcctcaccacgtgaacctcgccctagaccacttgagtatccttggtatatggtggctggcttctcccagagc

SEQ ID NO: 809267 - DNA, 631 bp, Homo sapiens
tcaagaagggagaaattcttcttggaggagctggaggggctttgtggagagtttcagaatgctttgcccactaggtttgctgtatccatttctcttcatgtatcccaaagaccaagccaagaaaccagaagcctctggtcccactggcccatgggctccctcggttcccmccgtcactaatggccattttgcatgtctctctcccaggcctgctctcttgaacagtgccgaaaacttcactgtgctcatcaagaacaatatcgacttccccggccacaactacaccacgtaagtgcccaggctgcctggctgtcttagttatctactgctgagtaataaattatcccaaacctcagaagcctgaaacaacaaacgcctattgtctcccacggtttctgtgggtcaggaatctgggaatgactttgctgcgtggttctggctcaaggtctgtcaggttgtagccaagctgtcaaccagggctgcagtcatttctaggcttgactggggctggagaacacttttccaagctctcacacagttgctcgtgggagagctcagttcctcaccacgtgaacctcgccctagaccacttgagtatccttggtatatggtggctggcttctcccagagc

SEQ ID NO: 809268 - DNA, 592 bp, Homo sapiens
gcctaatgaaatggtctctgcaatcagcagactccatttggttttggagttgaagcaggaaagatttgctgattgctgattacaccaacactaaatttctccaagctttctcctcagggtgcgcccactgagtctgatgcttccctagcagatggaggatgggatgcagagggcggcaagggggcaatggtggagggtggaaggtagtggcagatccacgaaccctgtccttggtccacatactctggcctaactaaygatggctttctggttctcacctcttcttgctgtgtctaagccaactcaccttctatgcagcccttgtttttttcatgtcttttctatgtaggatagtgaaaaatcttcagagccagagtcctgcattccaatgtttttatttggtttgtgaccttggcaaatctccacagtgacctggggatgacactgttcttcctgagactccttctcctatgagaattaaaggatagctatgccactgttggtcaagtttccactctgccaagctcatttactcctcgcaaaagccctgtgagggagggtctgctactggccccatttccccagtgagaca

SEQ ID NO: 809269 - DNA, 535 bp, Homo sapiens
ctacctttggccttggatgccctctcacttcatagccttcacatgtgctgttcactctgcctgaaacactcccttcatcctcttcacctggttaatacctcttcatcccttgtcactcattttaggtggcacttcctctaagaagccctcttcaacactctaagggtgggttagggccctactctgtgctaccactagccttgttgtttcccctcacaggattaattgactctttcctagtgacctcctttatctgtgtcccagctagactgaaatccctgttttcatccctgttcrtcaaataatcccagtccctggcacaggatagataaagaatggtcaaatagaaccattaaagttgggcagaaaaatccaacactgaacttcctagcagcgaaagctaagagggaaacaagctatttcatagacatattgcatgtagattgaaaaaaaaaaaagaaacacctgttacatgagataagagtaacttttctggctattgaggtgttagggaaatttattccatggattctca

SEQ ID NO: 809270 - DNA, 611 bp, Homo sapiens
gggagtttgatcatgggtcatgagtgtggcttccagcttgtctctagcaggaggtaggaaagtgacttgttggggtcacatggtcactggtaactgagcccagaccacatcccaggtctcctgactcctcgctccatagtcctgccacagcatcatgcttctgtgaggaactggactggtagctccctaatccccgggggaaattagacagcctggtttcttatctgtcttaggctattaggatctgttgagccttcactgttgggacatgctagggagtatctcytggtggacagtggaagagacatggtggtcatattcatagatggtcctggtggaagaaactaaggcctctcagctaaagaacagctggtgtattctttctgactgtgtgcctcagtttgcccatacaaaaccgagtccataatctcttctctacctgccttgtaacacagatgaataatctgggcactgtacaaggtaaggaatgaatgcagtgacctgaccttgtatgtccagtttggaggggcagagggtcgagccagcttgagttccagatggctgactctgtaccttcattgctacaagattgtgggcaaattcttcaagtc

SEQ ID NO: 809271 - DNA, 507 bp, Homo sapiens
acctgcaagactttttctatttcattttaaagctttgtaggggtgtgtgtgtgtgtgtgtgtgtgtgtgtgtgtgtgtatgcatgttcatgtgttttctttaaacagctggataattttaatgcaatattttagtctctagcttttcatataaaaatttaatttatttrcatttgttataatgactgatatatttgaaactattttgtgttttgttagtttcttgtccctttacattgctctccctctattgctttcctacttttggatagattgatgttttctatgttctcttttgacctattgattcagaagctataaactctatttctgttcttttggtggttactcatacatttccagatatatgcttaatcataattttttactaacattaattttcacagtaatgctgtgggatagatattattatttccttcatataaatgaaagaagtgaggctcggaaaagtaaagtaaagcaacttgcccaggattgcatagcaagt

SEQ ID NO: 809272 - DNA, 671 bp, Homo sapiens
agaggaaaataaactgtactcgggctctcctgctagatggacttaatcgcttcgaaaaaggaggagatgaggttgtggttctcaataaaagctgtttaagggattgtggatttggacatttgaagagtgagaacgaaatttcaaaaagctacagtagagaaagccctatggaatcaatacattttctttgcaggactctggaaagaggcaagcctagcattttgtttgaaaagctaagcttggaatgcttttatcagacatcacagtgaatctaattgattccatttttaaaattgcacctgccattggagttatgccaaaacacacataccaaattaaagcacaaaarccaataaaacataacaggagcagaatgctgcaaactcaattgcttattaaaaacctattagctttaaaatgttagcatgtcagaaaacagtttccttctactaacatcagctttgaaggccagctaatcggaaatacatagaattaggacaggcagtaaattcaataaagtagaccttgcagtaaaataaactttgctccaggcccatgctgttgcaattagaaaggcatcatcaggcacaggcctgcagatcagaggtcttagtaagccagtggtcattctggtatttagagtccgcttgttataacttaagtcatctttt

SEQ ID NO: 809273 - DNA, 671 bp, Homo sapiens
agaggaaaataaactgtactcgggctctcctgctagatggacttaatcgcttcgaaaaaggaggagatgaggttgtggttctcaataaaagctgtttaagggattgtggatttggacatttgaagagtgagaacgaaatttcaaaaagctacagtagagaaagccctatggaatcaatacattttctttgcaggactctggaaagaggcaagcctagcattttgtttgaaaagctaagcttggaatgcttttatcagacatcacagtgaatctaattgattccatttttaaaattgcacctgccattggagttatgccaaaacacacataccaaattaaagcacaaaagccaataaaacataacaggagcagaatgctgcaaactcaattgcttattaaaaacctattagctttaaaatgtyagcatgtcagaaaacagtttccttctactaacatcagctttgaaggccagctaatcggaaatacatagaattaggacaggcagtaaattcaataaagtagaccttgcagtaaaataaactttgctccaggcccatgctgttgcaattagaaaggcatcatcaggcacaggcctgcagatcagaggtcttagtaagccagtggtcattctggtatttagagtccgcttgttataacttaagtcatctttt

SEQ ID NO: 809274 - DNA, 641 bp, Homo sapiens
ggacaacacacacacaaatttatgttttgagattttccgtaatacccaagcaatacggagatggcttgacaatctgtgatagccagcctgtgtcatgacttctcacggacacaaatttttttctgttttcctccttgttctgctgagctccaagacaacttctgcgaaagttccttgagtttggaaatagggacgggtttccttctgtttcacccttaacatgaagatacagtcctrtggaatcccagatccatctggagagagtcggctattaaactcttttcataagtacgccctgggccttgactactgtctgtctagagataggaggctgatagttccttcctggcccatcagttttggatacaattaatgtttcttccattcagaattttcaattgtttgggaggtgatatggtttggctgtgtctccattcaaatctcaacttcaattgtatctcccagaattcctaccatgttgtgggagggggacccagggggaggtaattgaatcatgggggctggtctttctcgtgctattcttgtgatactgcataagtctcaggagatctgctgggtttatcaggggtttccgcttttgcttcttcctcattccctcttggcaccgccacgtaagaaga

SEQ ID NO: 809275 - DNA, 641 bp, Homo sapiens
ggacaacacacacacaaatttatgttttgagattttccgtaatacccaagcaatacggagatggcttgacaatctgtgatagccagcctgtgtcatgacttctcacggacacaaatttttttctgttttcctccttgttctgctgagctccaagacaacttctgcgaaagttccttgagtttggaaatagggacgggtttccttctgtttcacccttaacatgaagatacagtcctgtggaatcccagatccatctggagagagtcggctattaaactcttttcataagtacgccctgggcyttgactactgtctgtctagagataggaggctgatagttccttcctggcccatcagttttggatacaattaatgtttcttccattcagaattttcaattgtttgggaggtgatatggtttggctgtgtctccattcaaatctcaacttcaattgtatctcccagaattcctaccatgttgtgggagggggacccagggggaggtaattgaatcatgggggctggtctttctcgtgctattcttgtgatactgcataagtctcaggagatctgctgggtttatcaggggtttccgcttttgcttcttcctcattccctcttggcaccgccacgtaagaaga

SEQ ID NO: 809276 - DNA, 681 bp, Homo sapiens
ctgaggctttcacagaggcagaggatccataaacagggaaggctgtcagagaagttaaaggacaaaaccgcaccttgattataccagccaccagggcccatttctgtctttttttttttttttggaaaaaaataagaatagttggagaatgttaaaacattattgaaaaacatatcgactaaaaaagataaaaacaatcccaaatcactttaatactttaaataaattcacaatagaattctactcagtgttaaaatactggagaaggctgggtgcagtggctcatgactgtaatctcaatactttgggagcctgagaccggaggattgcttgagcccaggaattcaagaccmgcctcagcaacatggcaataccccatctctacaaaaaaatttttaaaaattagctgggtacagctgggcacagtggctcatgtctgtaatcccagcactttgggtggctgaggtgggtggaccacttgaggtcagttcaagaccagcctggccaacatggtgaaacctcatctccactaaaacaaaacacaaaaattagatgggtgtggtgatacacacctgtaatctcagctactcgggaggctgaggcaggagaattgcttgaacctgaaaggcagagcttgcagtgagccagaattgcaccactgcacttcagcctaggtgacag

SEQ ID NO: 809277 - DNA, 604 bp, Homo sapiens
gctagttaaatttctggcattctaagggaacatgctcaactcaaagttaggagaaaaatagagattccagagtagaggttggcaaacttttcctgtaaaggtccagacagtatatattttaggccttgtgggccatatagtctaagttgcaaagattcaactctgtcattattatacaaaacctgccatgggtgatacctaaacaaatgagcctggctgtgttccaagaaaacttaatttacagaaacaggctacagtttgtccacctctgttataaataatattgctgatgtcacaaccttctcttgttaatgtatttaatagtgctattaattttaactttcttaaatataattcactcatatccttctattatgttgaaaatgaaaattattattttatrtaagtaaaaaattgagctacaagaaatattctaaaatggcctgggcgtggtggctcatgcctgtaatcccagcactttgggaggctgaggtgggcggatcacttgaggtcaggagttcgagaccagcctggccaacatggtgaaacccggtctctactaaaattacaaaaattagcggggcatggtggtgggcatctgtaa

SEQ ID NO: 809278 - DNA, 612 bp, Homo sapiens
gaggaatttctgtactatgtgttgacaactcctaaatttatagttttctgcccagaacttctactaagcttagcctgcatatccaattgtgaacttcctatcatcatttggatggttaacattcaagatatttaaacctggactaataccccaccttctacccccaatttgttcttctcccactgttcatcttccatccagaagctcaagccagaaacccacaagtcaccattgtctgctcccccaaccaatgctcargcaatccatcactagattctatactgtacgcctcaaaaatatctatcttgtttttcttttaaacttcactggcaatgcccaattcaaggcataatcacctttcatcagaactagtgccataaattccaaagtggactccccatgttcatagttgctgtactaaatctttttgctattgggcagccaaagtaattttttccaggatgcaaatctgacatcattttccttcctaacattttccaattgcttcctattgcacttaggatagagaaatacttggctctgctggtcctacagaatctagtctctatctaccttcccttcactctctttgcctatattttgcaaaagtgt

SEQ ID NO: 809279 - DNA, 650 bp, Homo sapiens
tcatttacaacatggatggaactggagatcattatgttagatgagataagccaggcacagaaagacaaatttcacatgttctcatttatttgtgggagctaaaaatcaaaacaatagaactcaaggacacagagagtagaaggatggttaccagaggctgggaagggtagcrtgggagaagtggggagataaggatgattaatgggtataaaaaaattacttacaaataataagatctactctttcatagcacaacagggtgactatagtgaataataattatatatttaaaaataactagaagaatataattggattgtcgtaacacaaaggataaatgcttgaagggatggataccctattttactccatgatgtgattatttcacattgcatgcctgtatcaaaacatctcagataccccacgaatacatacacctactatgtacccattaaaaattaaaaattaaaaaaaattttaaaacaatcacactatccaaagcaatctacaggttcaatgcaattcttttcaaaatactaatgtcattttttcacagaattacaaaaaacaattctaaaattcatatggaataaaaaaagaacctaaatagccaaaagaatcctaagcaaaaagaaaaaagctagaggcat

SEQ ID NO: 809280 - DNA, 620 bp, Homo sapiens
tggaaagatctgctacagtagtctggtccattgtctgtttttaatttttgtggaatttccatgatagtaaaacaggaaagtaagtgtctttttatatgtgttgtagtcttgctggtttggcaagtagtccatataaaataagaatatgtatttatggtcgcatggacataagaaagtttgccaaatgtaggaacgtgggtgacgtctgtttgtcagattrtgttaggtgtcaaccctcaagggttaacaccagttttttgatgcggtagttgtagtacctggcactgaggacaatgttgtacaatgtccttggcctgattttacataatttgatatttgtttttaagtcctgttgtgttaaggtgtaaggtgtgttattgagtggaaactttgggcattagtaagtatgggggaaaccaacaagtcagcttgtttattagtcttagtcaagggtcctggaagattggtatgtgctcagatatgagttatatagaaaggaaaaccctgagtacgcacagctgtttgtaaagagttgaacaattgataaagctgtttaccaataatatatttaattaaggcagttttaatatgttgagtagcttgtacaacataagttgaat

SEQ ID NO: 809281 - DNA, 554 bp, Homo sapiens
ctcagataaaccagaacattggaaacgtggtcaactctcctgtttttggcaaaagccccaatatgggagaggagttctttctaattgttctgcaatatgccatttagtgggagacacatgaacagacacatcaaatgctgcaaatttccttacttctttctttgaaatcctgtcttggttttacaatggcttacttaagtgatgtatctactcaatttgcctctgtggttctcacaggatattctgttattgtcaactcagtgtctatgagggaaggagaacttttagctttctagtctgccatcttgctgaaatgaccttaagagtgggtgactttaaaatatcatacgtgtataggaaaaaggctgaacattgtaagggagctatacaaaaattgaattattgcctctttaatatyacaaaagaaaatatgtatgtgaaattttttgaaaacatgggaattctctgtaaatacaaaattagtttctgctgccccgtcatgtccacatgtgcagatgaaccctttagagattgaaaaatatgctatcactatt

SEQ ID NO: 809282 - DNA, 609 bp, Homo sapiens
tgtaaatggagatgggccaattaaatatttctctttgcagctgccatgatgttaagctttgttactaggtggtgttggagatacaccgcagaaggaagaggctttctttcttggttccaatgtgttcctttcgtcaggctcctacagtatgagtagcttctgcagcatgagtctctttctagtgcaggtaacttctcyggggcctggctttacagttcacgccaggtagcataacccagcggccagcagcttcctcagcatctccacatctcaggcagttttgttgttgttttgttttgttttgttttgagacagtgtcttgctctgtcacccatcacccaggctagagtgcagtggctcgatcttggctcactacaacctccaccccctgggttccagtgattctcctgcctcagcctccctagtagctgggattacaggtgtgtgccaccatgcccagctacttttttgtatttttagtagagatggggttttgctatgtttgccaggctcgtctcaaactccaggcctcaagtgatctgcccgccttggcctcccaaagtgctgggattacaggcacgagccaccacacccaacccatctcaggca

SEQ ID NO: 809283 - DNA, 617 bp, Homo sapiens
caaacagcatcatatgctacagagaaatattttgtgaaaggaggagtcaatcaatgggcaaacttcattgtggtcttagtttaaagatactaaaacagccatgccaacctgcagcaaccaacaccctgttcggtcagcagccgtcaacattgaggcaagacctcctaccagcaaaaagattacaacttgatgaaggctcagatgactgttagcattttttggaaataaagtactttcaaattaaggaatgtacattgtttttctagacataatgctatggcacacaacagactagtgtaagataaacaaaagttttatatgcaytgggaaaccaaaaaatcatgctttactgtgatgcttgtttcattgtggtgctctgaaactgaactcacagtttctcttaggtatacatgtaaccttcttataattttgttagtgatggaagaaactaagtgaaataaataatacatcaaagatcaaaactttgtactttattcctctagaagcctaatttttaagtaatttaatctcacaaaaagacaatttctggaaaaacaacaactgcagaacctttaggaacatgtaatataaataaaacacacctggttcattggtca

SEQ ID NO: 809284 - DNA, 624 bp, Homo sapiens
ctcctgtcatgggtgagattattaatgtgtggagttattaattgtattttagacaaagatttgatcaaagctttaagcccaaatgagagcatattgatagctgtccaaatgagtctttcaaattatttcacaggctaaatacaaaatgagggtttgttataatatgatgtgagcttttgctcattgatagttattttttggcagttgctgtttgccttctagagcgtgactactctaggtcattttcaccccacttccataagtcaggtggagaattttagaactggagggaccactgaggctcaaagggattaggtgacctgtctaaatattagcagactgaaatacktctttgaatccctcattcctactacatatgatgagaaggaaggtatgtaattgtcaccttgttctactgcagctccaagaggaagcattttatcttgctggcataaatgaaattgcgtgtctgtggtttactatgatctatgtggttgaccagacaagatgggtaaacaaacattggtgtcacataaatcataccaggataaggggttgtattttatgtggataatagcttgaaggtcgccagcggttattttagagatggttgggaataaggaa

SEQ ID NO: 809285 - DNA, 624 bp, Homo sapiens
ctcctgtcatgggtgagattattaatgtgtggagttattaattgtattttagacaaagatttgatcaaagctttaagcccaaatgagagcatattgatagctgtccaaatgagtctttcaaattatttcacaggctaaatacaaaatgagggtttgttataatatgatgtgagcttttgctcattgatagttattttttggcagttgctgtttgccttctagagcgtgactactctaggtcattttcaccccacttccataagtcaggtggagaattttagaactggagggaccactgaggctcaaagggattaggtgacctgtctaaatattagcagactgaaatacgtctttgaatccctcattcctactacatatgatgagaaggaaggtatgtaattgtcaccttgttctactgcagctccaagaggaagcattttatcttgctggcataaatgaaattgygtgtctgtggtttactatgatctatgtggttgaccagacaagatgggtaaacaaacattggtgtcacataaatcataccaggataaggggttgtattttatgtggataatagcttgaaggtcgccagcggttattttagagatggttgggaataaggaa

SEQ ID NO: 809286 - DNA, 536 bp, Homo sapiens
aacttaagagcttggctgttcaagcagaaaccctcctcttaaccccagggtcaaacaaatcaaaagcagcaaagaccaccgcaatttggaagacatagctcttctggctcagtttcctcatctgcaagatgacaaaatacaaccttctctaaggtggctgtgaagatgacagatgaagaatgtaaagcaacaaggacataagtgataattaatcagtggcactatttagctcagagctgtaatttctagctaaggaaaccgagactcagggaaatgagccaacgtgtcccaggaacacaatcggcagtggcagaagttggacaatgaccaccatgactcatactgtcacctgttaattcttattgagcatttactcagtgccaggtcccacactsaaaactttgcagtattatctcataacagttttatgagacaggtaactttattttctccattctgtacaagtggaaattgccacttggagaggtcaaagaacttgcccgggtgggtcacaaagtggtggagctgagattcac

SEQ ID NO: 809287 - DNA, 625 bp, Homo sapiens
atatgaaaaccattgaatgggatattgacttttaaaaatatttattttagccaaattttctctttgaccaattaccttccactaagttacttgtagatcttttacagctctttattattaagagactcctattatcacagcttgcctcctgctctaccattaagactgaattaatccataccatttacttctgcctttgaaaaataagagtgaaaattcccatttgcttactttgttatatttagtatgaggtctggcttsgagtaaaatcattgtatgtgtacttgcctaattttacatttatggaaatgagaactagatgtaactttatgaggaaatgagtgtggtgtatctacatgtgtcaattacatttaaaggaactgggatgacaggacatgttgttatcactgcagaaggaattatttccagaggtttatcatatgatcataatattatttatttcataagatatagttataatgaattaagattgtttaacaaagaggaccaagtgaatgacctttatacgagtatctgattatttttgtcttcatttgaagagccccttgagagcactagagtcataccaacaatactgtcattggatataacattttaaacattt

SEQ ID NO: 809288 - DNA, 600 bp, Homo sapiens
ttgtcaagtcacttgtttatagtagagattgttgcttatataacataacgaggcttcagtgctgccttttttcctttggtttttctagaaataaatctcctgctaacatctggctttctgctctgggttcatctcacatcacctcctgtaactggcttgttcttttcactcctcgccttccaagctatggttacacaacatagcctctgatgctgccagatttttttttttacatctgaaaactgactcagttttatttaatttactggggcaaatgccttggacacatttccaagaaaggaagagatgcggcacacaagsgttagcaataagaatgagtagagagaaaggacttcagaattataggcatttaggggattttgatttgactccttagctacttagaaggaatcaatgttgtgaggtgaaagacatctctgtcatcttcatctggtttttataaatcacagctaataatttactgacagacaccaagcactgagctaagtgctttttatggatgatccagtttgatcattaccatttaatgacctacagtcttgcaaaagtctgcctaaattacttttctttttataagaa

SEQ ID NO: 809289 - DNA, 608 bp, Homo sapiens
acatttaaaccatatgatattgatatttgcattaattacagaaggtctaaatttcagttaaaaggcagagattatcagattggctagaaaagaagatgcaactatgagctgtctacatgagcccaccttaaatactaagactcagataaattaaaagtataaaaggatagaaatagatatgccatgcagacattaatctgaagaaagctggagtagctatgttaataatagacaagaagatttcagagcaaagaatttacagaggtaaagagagacaattcataatgataaaggggtcaagacatcaagartacctaacaatcttaaatgtttatgccagagcttcaaagtacatgaagcaaaaactgatgcaattgaaagaagaactaactccacatttgtagttcaggatttcagctggtagaacaagtaaacagaatcagtagggatatagaggacatgacaattgatatagaacactttacctaggaacagcagaatactgtatattcttttcaagtgcacatggaaaatttaccaagtagaacatattgtaggccacaaaacaagtttcaataaattgaaaagtattcaaagtatggaagggt

SEQ ID NO: 809290 - DNA, 637 bp, Homo sapiens
aaaatgcttctataacaaagaattaatgcaacaaatctggtaaactagaatatgtgatactgcaagaatcccatctttcctatgtacgtagttgcaaagtatcaagtcaattctctaaaacagcagtgtctagaactgtgtgcatggaaaatgatgacaattaggaagtcagaacggcattatcttttacctttttattctgacttgctttaggcttggataaattttttccttttttatggaggagaaacaatggtgaagactcaatgggacactcataaagagaagtgtggaccttttcagtataccgttggaaatcttcaacctccacatctctatccaccctgtgtttgtaacagaggaaaaaataaatattaaaaatattgttcagaattacatgatgaatattatggaagtsaaagagctttggcaattaaaatgtgtgtgtgtgtgtgcatgtgtgtgtgtgtgtatgtgtgatgggtccttacccatcaaccactcttaaccagaaccctttaaattaacattcaacctgttaataactatgtgcctggcatcacatatttataataatgaatatcttttccctcaacacactctggatgattggaactgcctctgtttcttaatctat

SEQ ID NO: 809291 - DNA, 608 bp, Homo sapiens
atgcacagcttgacaaaaatgttcacaaaatgaacacaaaacataaccggcatccaagtcaagaaaatagaaacttattaccacctttgaagctccctagagcccctgtgataacccaaagataatcacttttttgaattctatctccatctgtttgtgtctgtttttaaacattattcaagtgaggatatggtattataatcttttatatctgtcttaattattactatatagagctataatacaccttgataatgtagtttgtcttccagctttgtttttattcttcaagacagtcttggctattcttggctttcccctctcatttccatataaattctagaatattcagttcaggtactttaattaatactgaattaaatctgtagatgaatttgggagaattgtcatttttacacattttaatcttctactcaawgaatatggtatttatttatcatttatatataaattcttgtttagatcttcatttatttagatctttatgcgtagcaaccttagcttcttttatcagatttattcctatgtatttgatgctattgcaaacactgttatttttaaaagttaatttcccaatgtcgtatgta

SEQ ID NO: 809292 - DNA, 608 bp, Homo sapiens
atgcacagcttgacaaaaatgttcacaaaatgaacacaaaacataaccggcatccaagtcaagaaaatagaaacttattaccacctttgaagctccctagagcccctgtgataacccaaagataatcacttttttgaattctatctccatctgtttgtgtctgtttttaaacattattcaagtgaggatatggtattataatcttttatatctgtcttaattattactatatagagctataatacaccttgataatgtagtttgtcttccagctttgtttttattcttcaagacagtcttggctattcttggctttcccctctcatttccatataaattctagaatattcagttcaggtactttaattaatactgaattaaatctgtagatgaatttgggagaattgtcatttttacacattttaatcttctactcaatraatatggtatttatttatcatttatatataaattcttgtttagatcttcatttatttagatctttatgcgtagcaaccttagcttcttttatcagatttattcctatgtatttgatgctattgcaaacactgttatttttaaaagttaatttcccaatgtcgtatgta

SEQ ID NO: 809293 - DNA, 647 bp, Homo sapiens
gtatagagggtatattttcccaactttctggtaaatggtttagaaaggacaaatacagaaagttcagagaaacaggtcaggaggttattcagctaagattgcaaggaaaagtattttgttagtatgtcactattttatagcagttccaaaaacagagtttaatctttgctggtcaggwcactaaacttacatattaagctataagttgatcagataatcttttatcaattttcacccaaacctaaaaaaataaaaaatatttttaaaattctaccccgttgaattctatagtatacaatggatgaataaaaagtgtttttgcagcggggcgcggtgactcacgcctgtaatcccagcacttcgggaggccaaggcgggcggatcacgaggtcaggagattgaaaccatcctggctaacacggtgaaaacccgtctctactaaaaatacaaaaaattggtcaggtgtggtggcgggcgcctgtagttccagctacttcggaggctgaggcaggagaaaggtgtgaacccgggagggcagagcttgcagtgagccgattgcaccaccgcactctagcctgggcgacagagccagacttcatctccaaaaaaaaaaaaaaaaaggtgtttttccatggttggtaattttt

SEQ ID NO: 809294 - DNA, 647 bp, Homo sapiens
gtatagagggtatattttcccaactttctggtaaatggtttagaaaggacaaatacagaaagttcagagaaacaggtcaggaggttattcagctaagattgcaaggaaaagtattttgttagtatgtcactattttatagcagttccaaaaacagagtttaatctttgctggtcaggacactaaacttacatattaagctataagttgatcagataatcttttatcaattttcacccaaacctaaaaaaataaaaaatatttttaaaattctaccccgttgaattctatagtatacaatggatgaataaaaagtgtttttgcagcggggcgcggtgactcacgcctgtaatcccagcacttygggaggccaaggcgggcggatcacgaggtcaggagattgaaaccatcctggctaacacggtgaaaacccgtctctactaaaaatacaaaaaattggtcaggtgtggtggcgggcgcctgtagttccagctacttcggaggctgaggcaggagaaaggtgtgaacccgggagggcagagcttgcagtgagccgattgcaccaccgcactctagcctgggcgacagagccagacttcatctccaaaaaaaaaaaaaaaaaggtgtttttccatggttggtaattttt

SEQ ID NO: 809295 - DNA, 647 bp, Homo sapiens
gtatagagggtatattttcccaactttctggtaaatggtttagaaaggacaaatacagaaagttcagagaaacaggtcaggaggttattcagctaagattgcaaggaaaagtattttgttagtatgtcactattttatagcagttccaaaaacagagtttaatctttgctggtcaggacactaaacttacatattaagctataagttgatcagataatcttttatcaattttcacccaaacctaaaaaaataaaaaatatttttaaaattctaccccgttgaattctatagtatacaatggatgaataaaaagtgtttttgcagcggggcgcggtgactcacgcctgtaatcccagcacttcgggaggccaaggcgggcggatcacraggtcaggagattgaaaccatcctggctaacacggtgaaaacccgtctctactaaaaatacaaaaaattggtcaggtgtggtggcgggcgcctgtagttccagctacttcggaggctgaggcaggagaaaggtgtgaacccgggagggcagagcttgcagtgagccgattgcaccaccgcactctagcctgggcgacagagccagacttcatctccaaaaaaaaaaaaaaaaaggtgtttttccatggttggtaattttt

SEQ ID NO: 809296 - DNA, 647 bp, Homo sapiens
gtatagagggtatattttcccaactttctggtaaatggtttagaaaggacaaatacagaaagttcagagaaacaggtcaggaggttattcagctaagattgcaaggaaaagtattttgttagtatgtcactattttatagcagttccaaaaacagagtttaatctttgctggtcaggacactaaacttacatattaagctataagttgatcagataatcttttatcaattttcacccaaacctaaaaaaataaaaaatatttttaaaattctaccccgttgaattctatagtatacaatggatgaataaaaagtgtttttgcagcggggcgcggtgactcacgcctgtaatcccagcacttcgggaggccaaggcgggcggatcacgaggtcaggagattgaraccatcctggctaacacggtgaaaacccgtctctactaaaaatacaaaaaattggtcaggtgtggtggcgggcgcctgtagttccagctacttcggaggctgaggcaggagaaaggtgtgaacccgggagggcagagcttgcagtgagccgattgcaccaccgcactctagcctgggcgacagagccagacttcatctccaaaaaaaaaaaaaaaaaggtgtttttccatggttggtaattttt

SEQ ID NO: 809297 - DNA, 491 bp, Homo sapiens
aaaacattctcatgcatgtatgcagcagaaggaaaagaaataaaaataaatgtctatgtgggttaagctatatttcttagataaacatgtgaaaagattgaaaaggtaaatgaaaagtataacatcaaatttgaggtctaaatgggagagataaaattgccatactcttcctagtaacatattactcataattgtgcagaaggaatggtcttatagagttgcttttggaagtcaatctcatatcattcctgaaggcttactraggggtgaaccccagctgctggttatgtaaaagttactgatcaatcatttgtaaaacttaaaattaggttgcctcaaaaaatagtcatattaaatttcatcaaccaattgcttggttttattgcaaagatacatctaaggaaaaaggtaaatttactttatcttctgtaattaaaaaagaaaatttaatattctagtaccaacctgaaaataagtgttagtgtaaatca

SEQ ID NO: 809298 - DNA, 594 bp, Homo sapiens
cttgattttaaactttattttagatatagggactacatgtgcaggcttttttacatgggaatattgtatgatgctggggtctggtatgtggatcctatcacccaggtactgagcatagagcctgaagggtagtttttcaatccacacctcctccctaccctcttgactagaccccagtatctgttgttcccatgtttatgtccatgtgtgctcaaaatttagctcccacttatgagtgagactatgtggtatttggttttgtttctgtgttaattggcttgggattatggtctccacctgcatacaagttgctgcaaaaggacatgatttaattcttctttgtggctgcatagtattccatagtgtatatatataccacatttttcttatccactctaccattgataggcacttggaytgattccatacctgtgctactgtgaattgtcctgccataagtatacaagaacatgtgtctttttggcagaatgctttattttcatttgggtatataccaaataatgggattcctggattgaatgatagctcggttttcagtactttgagaatctccaaactgctttccacagtggc

SEQ ID NO: 809299 - DNA, 564 bp, Homo sapiens
tacaagaacatgtgtctttttggcagaatgctttattttcatttgggtatataccaaataatgggattcctggattgaatgatagctcggttttcagtactttgagaatctccaaactgctttccacagtggcaggactaatttttcwttctcaccaacaatacataagcattctcttttctctgcagcctcaccagcatctgttgttttttgacattttagtaacagccattctcattggcttgagatggtgtcttattgtggttttgatttgcatttctctgatgactagtgatactaggcattttttcatgtttcttgtctgcttgtatgtcttttttagagaaatatctgttcatgtttttcaaccatttttaatggggttatttttttcttgcttcttgattttttaagttctctatggattctagatattaggcctttgttggatgcagttcacatatatcttctcccattctggaggttgtctgtttactctattggttatttcttttgctatgcagaagctcttcagtttaattaagtcccacttagacaaatatt

SEQ ID NO: 809300 - DNA, 564 bp, Homo sapiens
tacaagaacatgtgtctttttggcagaatgctttattttcatttgggtatataccaaataatgggattcctggattgaatgatagctcggttttcagtactttgagaatctccaaactgctttccacagtggcaggactaatttttcattctcaccaacaatacrtaagcattctcttttctctgcagcctcaccagcatctgttgttttttgacattttagtaacagccattctcattggcttgagatggtgtcttattgtggttttgatttgcatttctctgatgactagtgatactaggcattttttcatgtttcttgtctgcttgtatgtcttttttagagaaatatctgttcatgtttttcaaccatttttaatggggttatttttttcttgcttcttgattttttaagttctctatggattctagatattaggcctttgttggatgcagttcacatatatcttctcccattctggaggttgtctgtttactctattggttatttcttttgctatgcagaagctcttcagtttaattaagtcccacttagacaaatatt

SEQ ID NO: 809301 - DNA, 564 bp, Homo sapiens
tacaagaacatgtgtctttttggcagaatgctttattttcatttgggtatataccaaataatgggattcctggattgaatgatagctcggttttcagtactttgagaatctccaaactgctttccacagtggcaggactaatttttcattctcaccaacaatacataagcattctcttttctctgcagcctcaccagcatctgttgttttttgacattttagtaacagccattctcattggcttgagatggtgtcttattgtggttttgatttgcatttctctgatgactagtgatactaggcattttttcatgtttcttgtctgcttgtatgtcttttttagagaaatatctgttcatgtttttcamccatttttaatggggttatttttttcttgcttcttgattttttaagttctctatggattctagatattaggcctttgttggatgcagttcacatatatcttctcccattctggaggttgtctgtttactctattggttatttcttttgctatgcagaagctcttcagtttaattaagtcccacttagacaaatatt

SEQ ID NO: 809302 - DNA, 564 bp, Homo sapiens
tacaagaacatgtgtctttttggcagaatgctttattttcatttgggtatataccaaataatgggattcctggattgaatgatagctcggttttcagtactttgagaatctccaaactgctttccacagtggcaggactaatttttcattctcaccaacaatacataagcattctcttttctctgcagcctcaccagcatctgttgttttttgacattttagtaacagccattctcattggcttgagatggtgtcttattgtggttttgatttgcatttctctgatgactagtgatactaggcattttttcatgtttcttgtctgcttgtatgtcttttttagagaaatatctgttcatgtttttcaaccatttttaatggggttatttttttcttgcttcttgattttttaagttctctatrgattctagatattaggcctttgttggatgcagttcacatatatcttctcccattctggaggttgtctgtttactctattggttatttcttttgctatgcagaagctcttcagtttaattaagtcccacttagacaaatatt

SEQ ID NO: 809303 - DNA, 646 bp, Homo sapiens
gttctttaatggtaatataatattttggctacacagtagatatcccatgctctcttccagagagatgaaatccaacaaaattttctttgcaataaaagcagtttgttaaaataatattgtgaaaattttcatatactaaaacccagagcagatgtattttttctccattatctgtagtttaggaaactaatgttcagtacacttcacaaacattaagatttataaattaaaaatataagaaattaaattttcgtataaatgagtaatgaaattttagattttcaaggtataatttctgtatttgtgctatacttttcactttatgccagctctacttttccttttttttttttctgtaataggctactgataaacactgtggtatatacattattacatctcatttgtaaaacaaaagaatagaaataggaaatatttaytattttaaaaataatgaaattcatcttttcaaacaaagaagaaaatagtcatagctatttcactaaaagtagaataatatttgggtaaaattaaacattcattagcattaaatgttttgtagaaaactaagataagaacatttcttctctgaataagtctatttgatataaatatcaacaaaaatccttatggaaatatcatcttt

SEQ ID NO: 809304 - DNA, 503 bp, Homo sapiens
agaaagaccgacaccctggaaaagaggatccgcaactttccatgtcagtattttattttagccacagctacttctcccccaaattacaatgaatatgctcagaggtgaaatcattcccaacaatgagtccgcctcctttaagaggaaacttggccgggcacggtggctcatgcctgtaatcccagcactttgggaggccgaggcaggcggatcacctgaggtyaggatttgggaccagcctgaccaacatggagaaaccccatctgtactaaaagtacaaaatgagccaggcgtggtggtgcatgcctataatcctggctacttcggaggctgaggcaggagaatcgcttgaacccagggagcggaggttgtggtgagccgagatcgtgccattgcactccagtctgggcaacaagagcaaaactccatctcaaaaaaaaaaaaaaaaaaaaaaagaggaaactcacattgcagaaatggagtatcacttttgaggctagatt

SEQ ID NO: 809305 - DNA, 503 bp, Homo sapiens
agaaagaccgacaccctggaaaagaggatccgcaactttccatgtcagtattttattttagccacagctacttctcccccaaattacaatgaatatgctcagaggtgaaatcattcccaacaatgagtccgcctcctttaagaggaaacttggccgggcacggtggctcatgcctgtaatcccagcactttgggaggccgaggcaggcggatcacctgaggttaggatttgggaccagcctgaccaacatggagaaaccccatctstactaaaagtacaaaatgagccaggcgtggtggtgcatgcctataatcctggctacttcggaggctgaggcaggagaatcgcttgaacccagggagcggaggttgtggtgagccgagatcgtgccattgcactccagtctgggcaacaagagcaaaactccatctcaaaaaaaaaaaaaaaaaaaaaaagaggaaactcacattgcagaaatggagtatcacttttgaggctagatt

SEQ ID NO: 809306 - DNA, 605 bp, Homo sapiens
tattttgttttaaaaaccctctagagccttggcccctactgatagatttgtttctctctaaaaggattaaataacattttatgtataagtaaagtatttagcacagaatccagaacctggtaggtaagaatacaagttgaatttgaatctaaatcttgccttttcwccattctttgagaaactgcaaaggagaatgtggtcacctgtgagctgccctccaaagctgggttttcccatggtgaccccaccatagagctgccccatgcaacgccccggtctcaagcccctggaccatgggattaggttccagaggcagcagaagagtgagcagtgcaactgcagctgagctcacatgtgggaaacctttctgtaaatagcaaagggtgctcatcaatgatgaatcattaacaccatccacctgaccaatgaaaccagactgggccttctcatttgggtagttcatgagctaacatttcagtcctcaccatgagccaggcagtggtcagtgatttacctgcaacaagaaccccttacagtgtgaggcacccaccatcatcatcaccagtcttacttactaggggaggatatagaagatcagagaggct

SEQ ID NO: 809307 - DNA, 605 bp, Homo sapiens
tattttgttttaaaaaccctctagagccttggcccctactgatagatttgtttctctctaaaaggattaaataacattttatgtataagtaaagtatttagcacagaatccagaacctggtaggtaagaatacaagttgaatttgaatctaaatcttgccttttcaccattctttgagaaactgcaaaggagaatgtggtcacctgtgagctgccctccaaagctgggttttcccatggtgaccccaccatagagctgccccatgcaacgccccggtctcaagcccctggaccatgggattaggttccagaggcagcagaagagtgagcagtgcaactgcagctgagctcacatgtgggaaacctttctgtaaatagcaaagggtgctcatcartgatgaatcattaacaccatccacctgaccaatgaaaccagactgggccttctcatttgggtagttcatgagctaacatttcagtcctcaccatgagccaggcagtggtcagtgatttacctgcaacaagaaccccttacagtgtgaggcacccaccatcatcatcaccagtcttacttactaggggaggatatagaagatcagagaggct

SEQ ID NO: 809308 - DNA, 534 bp, Homo sapiens
ctgtcagccatttaaaagtgactagcgggccgccggactaaagacacgggtgtcaagctttctgggaaagggctctctaacaacccccaactctttggagttgggaccgttggtttgcctagaaccagcttccgcttttcctgtacttctgggctgagccgtgggttgacagtgaggaaagccatgcatctccggggtcccracaacatgttggttgaccctgcggccatgagtggaactctcaaaagcatgtcgcccaagcgacactcgcctatctatcctatctatcctgacccttgccctctgggtcctaatgcctgccagacaaacttcctctcgcctctcttctctgaggctagacccgcttctaaaaattgctacctgtctctggtgcttttctagtttctcctataagaatgatttctagtataaactccaggactctgttaccttctttaggcacccgggctcaccaatcagaaagacacagtttttgcccaaggccccatcgtagtggggactacctggaatttt

SEQ ID NO: 809309 - DNA, 389 bp, Homo sapiens
tttaaatttaggattataacttgatttcttcatttaaccctccacttactgttaagttatttatttgttgttatagataagacaatgataaatgtccttttatataaaatttagagtttctcagtatttccttggaataaattcctcaaagtggcataattggatcaatagttacaaactttgaaaagacttgccaaattgctttgcagacaagttatgmcaatttatattcttatcactcgactatgaaattacctatttcctcacacctctgacaatgccgaattttttttaacctttgctaatctgctagcttaaatagatctcattattttaatttgcatttccttggaaactagtgaggttgaacacatctaatgttattagac

SEQ ID NO: 809310 - DNA, 617 bp, Homo sapiens
ccccactgcccagtattcagagatgctcaaataacaatgtaaatttatctcaagaaaaatactctctcactcctccctaactcattttatgaaaccagcatcatcctgataccaaaactgggaagagacacaacaaaagaagaaaacttcaggccaatatccctgatgaacattgatgtgaaaatcctcaatagaatactggcaaaccgaatctagcagcatatcaataaacttatccaccacgatcaagttggctttatccctgggatacaaggctggttcaatatacacagatcaataaaygtaatccatcacagaaagagaaccaaaggcaaaaaccacatgattatctcaatagatacataaaaagactttgataaaattcaacatcccttcatgttaaaaactctcaataaactaggtattgatggatcatatcacaaaatataaagagctatttatgtcaaacccacagccaatatcatattgaatgggcaaaagctggaagcatttcctttgaaaacccatacaagacaagggtgccctctctcaccactcctattcaacatagtattggaagttctgcccagggcaatcaggcaagagaaagaaataaa

SEQ ID NO: 809311 - DNA, 526 bp, Homo sapiens
acagccaatatcatattgaatgggcaaaagctggaagcatttcctttgaaaacccatacaagacaagggtgccctctctcaccactcctattcaacatagtattggaagttctgcccagggcaatcaggcaagagaaagaaataaagggtattcaaacaggaagagaggaagtcaagttgtctgcagatgacaggattttatatttagaaaaccccatcatctaagcctcaaaactccataagctgataagcaacttcagcgaagtctcaggatacaaaatctatgtgcaaaaatcacaagcattcctttataccaacaatagacaagcagaragccatatcatgaatgaactcccattcacaatcgttacaaagagaataaaatacctaggaatacagctaacaaggagtgtgaaggacctcatcaaggagaactacaaaccactgctcaaggaaataagagaggatgcaaacaaaaggaaaaacattccatgctcatggataggaagaatcaatattgtgaaaa

SEQ ID NO: 809312 - DNA, 639 bp, Homo sapiens
tgcttgaggagacggataccccattctctgtgatgtgcttatgtcacattgcatgcctgtatcgaaacacctcttggaacctagaaatatatacagctactacatacccacaaaaattagaagttaaaaattttaaaaaaaagaaaaacctctctcctactggtctgcttggttctgatcctggttctttggcaaagctttttttacttctgcttttttttggcaactaggtagaacttcaggtaaaataaaacaaataaaaatgtattgtgaaatatacaatatatrcaaaggagactatgaaacgtttatgtgccatttaaagaataacacttaagaactagaatattgccagtatttcagaaccaccttcctcacctagtaaatctccatgatcatgtcctccttccccttgacagaggtgacagctctctttaattttctgtccattattaccagttctgcttttcagtttttcacacttgtgtgtatccctacaaaagatctctgctttttagggggtcagagggtgatttcatgtaataaggaaagaaaactgtcattcttctaagagcaaattgttctttttagagaaaaaaaattactaaaacctgatgtgctttccaaatacttaaccaa

SEQ ID NO: 809313 - DNA, 639 bp, Homo sapiens
tgcttgaggagacggataccccattctctgtgatgtgcttatgtcacattgcatgcctgtatcgaaacacctcttggaacctagaaatatatacagctactacatacccacaaaaattagaagttaaaaattttaaaaaaaagaaaaacctctctcctactggtctgcttggttctgatcctggttctttggcaaagctttttttacttctgcttttttttggcaactaggtagaacttcaggtaaaataaaacaaataaaaatgtattgtgaaatatacaatatatgcaaaggagactatgaaacgtttatgtgccatttaaagaataacacttaagaactagaatattgccagtatttcagaaccamcttcctcacctagtaaatctccatgatcatgtcctccttccccttgacagaggtgacagctctctttaattttctgtccattattaccagttctgcttttcagtttttcacacttgtgtgtatccctacaaaagatctctgctttttagggggtcagagggtgatttcatgtaataaggaaagaaaactgtcattcttctaagagcaaattgttctttttagagaaaaaaaattactaaaacctgatgtgctttccaaatacttaaccaa

SEQ ID NO: 809314 - DNA, 639 bp, Homo sapiens
tgcttgaggagacggataccccattctctgtgatgtgcttatgtcacattgcatgcctgtatcgaaacacctcttggaacctagaaatatatacagctactacatacccacaaaaattagaagttaaaaattttaaaaaaaagaaaaacctctctcctactggtctgcttggttctgatcctggttctttggcaaagctttttttacttctgcttttttttggcaactaggtagaacttcaggtaaaataaaacaaataaaaatgtattgtgaaatatacaatatatgcaaaggagactatgaaacgtttatgtgccatttaaagaataacacttaagaactagaatattgccagtatttcagaaccaccttcctcacctagtaaatctccatgatcatgtcctccttccccttgacagaggtgacagctctctytaattttctgtccattattaccagttctgcttttcagtttttcacacttgtgtgtatccctacaaaagatctctgctttttagggggtcagagggtgatttcatgtaataaggaaagaaaactgtcattcttctaagagcaaattgttctttttagagaaaaaaaattactaaaacctgatgtgctttccaaatacttaaccaa

SEQ ID NO: 809315 - DNA, 617 bp, Homo sapiens
tttagtagaattgttcaatttctctttaacattctgtcattcggaataaaggctttaattatataattatcatattatcgaaagcatgtaaaaaataggtatctgaaggatgaagcaaatgttcttttgacacagcatcaggccagtagagggctctccaagccagcgtgcaaggacaaataaaaatattagtatttggaaggatatgtaaaaggggttgttaaaaatattagtaggattttgaagtatgtgaggaattgaaatattattgagaaatctgattttaaaagatgagagcaatttgtaaaagagaatacaaggaaaatcttaatactaaatgggtatgataaatatataagataaacttctatcaatggatagatacagagagccaataaaatggtgagggttagaagaaacagcagatagagtaataaaatatttctttagcgaaggatttttttaacyttggatctttgaatgatgtaattttttatgcatagcattttgtataggtacatttttctgatccataacatattcatcctaattctatagacactagacaaagaaaattatgcttttaataataattattgaaattaatgtgtattcta

SEQ ID NO: 809316 - DNA, 622 bp, Homo sapiens
cagctcacacgacctgcagtgtgtagctcctttccacattcaggttgtctcaacaagtgttcagctcctagcagagaggagaccctggaataggaagctcctctcctcaagcagatcatcccattatcttcccagctctcagcagagaggaggccctggagtgatttgatcctctctgcagctggtagtcctgacatctctgcaggcctctgaagctctcagcagagaggaggccctagagtgtgtagctcctctctgctgctggtcatcctgacatctgctgctctcagcagcgaagacaggttccctttgcagctggcaggtcctgtcatctgctcagatctggctgagcctaggagttttatgggcctcagaggggaggaagtacatgcaggatggtccatgggtggccatgggaagcccagaaaagmcaccacaagttcccactccagtctgcgggactggcagcctggcccccagccatcaggagctccctggcctgaagatggtacctcactggggacttgcccccttctgcccagaaatctctctgccacccactgccatttgtggcactggggctcagccctgactttgcttcaaggttgaagtgggtgccaac

SEQ ID NO: 809317 - DNA, 549 bp, Homo sapiens
tacttaagactatatttagaaccatgtcatctgtgaatagagatagttttacttcctcttttctaattttaatgtcctttgtttatttgtgtgctgaattggtctaaaactttcgggacaatgttaaaattagtakcaaaagcaggtattctttccttgatcctaaccttagggaaaagattatgcctttcacctttgaatataatgttagtggtagattttttaaaaatggactttgcatgttgaggaagtacctttctatttctggtttgtggagtgttttcattatgggagagtgttagattttgtctgtttctttcagtgtcaatttaaatgagcttgtactttcttttttattctattaatgttgttcactacattgatttattgtcatatgttgagcaactcttacattccttcaacaaatccaacttggttattacgtagtccatttaatatgctattggatttcatttgctagtaattggctgaagattatttcattttttttaatttttattttttgtgggtacatagtaagtgtatata

SEQ ID NO: 809318 - DNA, 549 bp, Homo sapiens
tacttaagactatatttagaaccatgtcatctgtgaatagagatagttttacttcctcttttctaattttaatgtcctttgtttatttgtgtgctgaattggtctaaaactttcgggacaatgttaaaattagtagcaaaagcaggyattctttccttgatcctaaccttagggaaaagattatgcctttcacctttgaatataatgttagtggtagattttttaaaaatggactttgcatgttgaggaagtacctttctatttctggtttgtggagtgttttcattatgggagagtgttagattttgtctgtttctttcagtgtcaatttaaatgagcttgtactttcttttttattctattaatgttgttcactacattgatttattgtcatatgttgagcaactcttacattccttcaacaaatccaacttggttattacgtagtccatttaatatgctattggatttcatttgctagtaattggctgaagattatttcattttttttaatttttattttttgtgggtacatagtaagtgtatata

SEQ ID NO: 809319 - DNA, 549 bp, Homo sapiens
tacttaagactatatttagaaccatgtcatctgtgaatagagatagttttacttcctcttttctaattttaatgtcctttgtttatttgtgtgctgaattggtctaaaactttcgggacaatgttaaaattagtagcaaaagcaggtattctttccttgatcctaaccttagggaaaagattatgcctttcacctttgaatataatgttagtggtagattttttaaaaatggactttgcatgttgaggaagtacctttctatttctggtttgtggagtgttttcattatgggagagtgttagattttgtcwgtttctttcagtgtcaatttaaatgagcttgtactttcttttttattctattaatgttgttcactacattgatttattgtcatatgttgagcaactcttacattccttcaacaaatccaacttggttattacgtagtccatttaatatgctattggatttcatttgctagtaattggctgaagattatttcattttttttaatttttattttttgtgggtacatagtaagtgtatata

SEQ ID NO: 809320 - DNA, 639 bp, Homo sapiens
ttcttttttattctattaatgttgttcactacattgatttattgtcatatgttgagcaactcttacattccttcaacaaatccaacttggttattacgtagtccatttaatatgctattggatttcatttgctagtaattggctgaagattatttcattttttttaatttttattttttgtgggtacatagtaagtgtatatatttatggagtagatgagatattttgatacaggcatacaatgcatgatttatcacatcagcatgaacaggatatgcaacacctcatgaatttatactttatttgtcttacaaactatccaattatactcttttagttattttaaaatgtacaacraattgttgactacagttatcctgttctgctatcaaatagtagatcatatacattccagttaactatattttaaaatttcccttctttaagaattcttaatttttatgtgtatatagtaagtatatatatttatggattacatgagatattttgatacgggcatgcaatgcataataatcacatcagggtaaatgagatatccatcacctcctgcatttattctttgtgttacaaacaatcaaattaaacctctttagttattttacaatgtacaattaatat

SEQ ID NO: 809321 - DNA, 613 bp, Homo sapiens
tttccatccatgttgttggaaatgacaggatcccatttttttgtggctgaatagtactccattgtgtgtatgtaccacattttccttattctttcatttgttgattaacatttaggttgcttccaaatcttggctgttgtgaatagtgctgcaacaaacaygggagtgcaggtatctcttcaatatactgatttccctagttttgtgtatatgtccagcagtgggattcgtggatcacatggagactctatttttagattcttaaggaacctccaaagtgttctccataatggttgtactaacttacagtcctgtcaacagtgtacaagggttcccttttctccacttcctcaccagcattggttattgcttgttcttttgatataagccatgttaactgaggtaaaatgatatgtcattgtagctttgattttcgtttctctgatggtcaatgatgttgagcactttttcatatactggtttgtcatttgtatgtcttttgagaaatgccttttcaggtcttttcctcatgttttagttagattattagatatttcctatagtcatttgaactccttacatattgtggttattaatcccttttccgatgggc

SEQ ID NO: 809322 - DNA, 613 bp, Homo sapiens
tttccatccatgttgttggaaatgacaggatcccatttttttgtggctgaatagtactccattgtgtgtatgtaccacattttccttattctttcatttgttgattaacatttaggttgcttccaaatcttggctgttgtgaatagtgctgcaacaaacatgggagtgcaggtatctcttcaatatactgatttccctagttttgtgtatatgtccagcagtgggattcgtggatcacatggagactctatttttagattcttaaggaacctccaaagtgttctccataatggttgtactaacttacagtcctrtcaacagtgtacaagggttcccttttctccacttcctcaccagcattggttattgcttgttcttttgatataagccatgttaactgaggtaaaatgatatgtcattgtagctttgattttcgtttctctgatggtcaatgatgttgagcactttttcatatactggtttgtcatttgtatgtcttttgagaaatgccttttcaggtcttttcctcatgttttagttagattattagatatttcctatagtcatttgaactccttacatattgtggttattaatcccttttccgatgggc

SEQ ID NO: 809323 - DNA, 484 bp, Homo sapiens
agctgggtttccatggtcttggccagctccaatcttatggctttgcagggtacagcctccttcctggctgctttcatgggctggcattgtctgtgacttttccaggtgcatggtgcaagcagctggtggatctaccattctgcattctggaggataatagccctcttctcacagctccactaggcagtgcccccgtagggactctgtgtgggtgctctgaccccacatttcccttccgcactgccctagcaggggttcttcatgaagkccatgcccctgcagcaaacttttgcctgggtatccaggcatttccatacatcttctgaaatctaggcacaggttcccaaacctcaattcttgacttctgtgcacctgcaggctcaacaccatgtggaaactgccaaggcttgtggcttccaccctctgaaggcacagcctgagctctattttggctcctttcagacacagctggagtggctgagac

SEQ ID NO: 809324 - DNA, 602 bp, Homo sapiens
attaaatcttattcattttggaagcacaattcaagtattcttcattctgtaaatccttccttgagttcccttagctgagctgattattatcctctgtttctctatccttttatatatttctttatcctagtgctattatttttttctatctctccttttctgtctcacaagccagataatgctctcattgaaggcaggcagtttgcctgatttgtattagtactttcaacaactcacacacwcactctctctctctctctctctctctctctctggattgacacatagtaggtacttagtaaatatttgttgaaagagctgtatatgctgtcagaggatcagaaagaggagcctacttcttatctcttctttgtccttttagtaactttcttcatgttttgtacatgacagaaacattccactggctagttggaagaacataattgtgtttgttctattttaattaaatcttgttacaaaatatatgtgacataaatggagttatctcttttgcaaatgggtgatataatgggtttgcatcccattaagctttataaaatgttgttacgtcatacagtgtgacaagcaagaacagctcatag

SEQ ID NO: 809325 - DNA, 602 bp, Homo sapiens
attaaatcttattcattttggaagcacaattcaagtattcttcattctgtaaatccttccttgagttcccttagctgagctgattattatcctctgtttctctatccttttatatatttctttatcctagtgctattatttttttctatctctccttttctgtctcacaagccagataatgctctcattgaaggcaggcagtttgcctgatttgtattagtactttcaacaactcacacacacwctctctctctctctctctctctctctctctggattgacacatagtaggtacttagtaaatatttgttgaaagagctgtatatgctgtcagaggatcagaaagaggagcctacttcttatctcttctttgtccttttagtaactttcttcatgttttgtacatgacagaaacattccactggctagttggaagaacataattgtgtttgttctattttaattaaatcttgttacaaaatatatgtgacataaatggagttatctcttttgcaaatgggtgatataatgggtttgcatcccattaagctttataaaatgttgttacgtcatacagtgtgacaagcaagaacagctcatag

SEQ ID NO: 809326 - DNA, 630 bp, Homo sapiens
ttagaaactttttttttctttgagccagggtcttgcccaggctatactggagtggtgtgatcctggcttggttaagccttgacctcctgaactcaagctatcctcccacctcagcactcttcccaaagtagctgggacgacagacacgcaccaccatgcctrgcaaatttttttttttattttgtgcagagatgagggtctcacaatgttgcccaggctgatctcgaactcctgaactcaagggatccttccacctcagcctcccaatgttctgagattacaggcatgaactactgcacttggcccctagaaacttttatagcattttgatattgctgccacttgtgagcacatgaagagttggtcacactgttgagtcaaataattgttttaaaatggccttgtattttgtatttcttttacagtttttccagtaaatcatttttatgatgttttcccaaagtatttgtccatgtcagatagaaaattaaaaataatataaaataagctgattttactacagatagtttgagaagtatcgccctagtatatgcacagtactttggtctgtagtagtctcttagtaaaggtttttcaacgaagccctgtgatgcttttctttacaaaaat

SEQ ID NO: 809327 - DNA, 487 bp, Homo sapiens
cagaattctaagaatgatccccagtgacgcttgcccttgtataacccccacccatttgagtgtgaggtgaaacctatgaatttgatgaggcaatactcctgttattatgttacgttttatgacagatgtgagattttccaggtgggcccaatctaatcacaacagccctttaaaagcagagattttccgtctgctaakagcagaagaggaagtcagagagatttgaaggatgagaagaatttgacgtgctgctgttggagggggctacataccaagaaatgtgggcatcctatagcaactgaaactggctcctggctgacagccagcagagaatcaggatatcagtcccagaatcataaggaactgaattctgctaaaaacctaaatgagcttggaagtgggattcttccgagaagagcccagccgggtcaccatcttaattttggtctgcgaaaccgtaagcagagaatccactcaagcccacctg

SEQ ID NO: 809328 - DNA, 613 bp, Homo sapiens
ccaagaacttcgggacttcttttcatagtaccagctcttcttttcatcaaaggtcataaatagtaagacaaattctctcatgtccataggcatgttgctgtccttatgtagtattcctttttggcagattaggaggggacctatcaagcctgagtgaatatctttttcctggaaaaacagagtaaattgtattgcctctttctcaggaatttccttgctcttctgataatcactcatcatatagaaaaggaaactttctgataggctctgaatttgaagatgaagattataaatgaatggcrtaataagcctggatatttatcacctaattctgttgtattcataatcctccttcctctgattgatctttatcccagtaacaatgatgataataataaattgataatataagggatactatttattgagaatctattactatattaaatgatttgcctgcaatctcccatttaatcctgacaactatcttatatggtaaatataaattcattcattgaacaaatatttaccaagtgcttaccatgcactatgtactgttatctcatttttaacttctgataccaggctaagagaggtcaaggaatttcctagg

SEQ ID NO: 809329 - DNA, 577 bp, Homo sapiens
atcaaactctaagatgttccacttataagtataggtttcccctggttgaactgctctgatcatggtgttgttcctgcctgaaagaaaatatattcaaaattgttttcatttgcaaagttatttcatgataataaataaataaataagctttcgctggaaccaattaatattgcaaaaggaattcttttwtttttattttttttaaattatactttaagttctagggtacatgtgcacaacgtgcaggtttgttacatatgtatacatgtgtcatgttggtgtgctgcacccattaacttgtcattaacattaggtatatctcctaatgctatccctccccccgccccccaccccccccccccgacaggccccggtgtgtgatgttccccatcctgtgtctaaatgttctcattgttcaattgaattctttaaatattctacttggaacctggataacatgtagccattagataatgctccactagaggccactatgacactaataaaagacaccatattttgttaccactaagagacaaaactcctgaagtgagaagggtttggctgtgatttttag

SEQ ID NO: 809330 - DNA, 451 bp, Homo sapiens
agaggtggatccacaccctgaaatagcaggtgtttttttctcttgtcaaacaatgatctggtctccgtgccgtcttcctctgcttgatgtacaagaagttaccaagatgctcccaagctttgtcccatgacagaactcctgaccattccaacrtttagttgttgaatcttttggtgggggtgttcttaccttttttacagataagcaggggcccaatcagccccgagttgaaatcctcgatcagattttcatgggagtaatagatgtgtgtgaggcatggagggtcatcatgggtgggtccactgtcctcactgatactccattcataggtgtattctcggcctggagccacagcgtcgtccatcttctccgcagggaatgtgtggtcaaggtaagaagcacctggaggagtaacagccatcaagacatgtgggcagtttctgaggattgc

SEQ ID NO: 809331 - DNA, 549 bp, Homo sapiens
ggcatattctggtctccaacagttatattttgggatggcatgtccttaaccctatcagaggcccacatttaatacgtgattgaggccaagatatgaaggcccagcataaaagcagggagaaaagttaaggtgctccagtagttgtccaggagagagatgatggacacttggcctagaatagtgccagttgagacagagaaaaataggtacatatattgagaatatgctttggatgtagattcaataggactctaggatgagagaaagaatggagtaaatgatatgccataggtttttggcaaggtatgtagtgaagattttttttaggccatattaattttgagatgcctaatagacatytaggtagaaatttaaaggagataggtagatatatgaggttggaactcagaggagaaataagggcaaaaatgtagatttaggaataatctgtatgaggacatgggactagatgagatcatgtccctagaatatgggaagccagttctttgtcacttagttatggagaacagtgtttgttaatttcactcc

SEQ ID NO: 809332 - DNA, 659 bp, Homo sapiens
tcctcttccatctaggcagatgggatccaagagacagcagagatcctggagagaggtgatagaagagggagacacaggcttggtgtattggatcagctgcagctggtgctccctggagcagcaggctgcagcctggcagccctacaaacagacggtccttacccagccacactgaacccagggaaggaaaagagggatgcgcccacgttacgcgcgcgcgcgcgcgcgcacacacacacacacacacacacacacacacacacacacwgtcttaacccttacctttgtcacaaaaaaatgctgccatttaattactcagaactccagcattttttggctattttatttctagcccttggaagcttgtttcaagaaaaagacaccatatcataaacatcagatatcagttcactgacatgaaattattaacaatacaactctcaaatggaatctcaagtacttccagtaaacattcagttaagattttgacaaatattttcatcctgcagtctgtctcatactgtcaaaaaaatgtctgactataacgtaatagaactgaggttctaagtaccacacaagcccaggaacacacagctgagtgtcgctccctttcacgcagccaccactgaaaagcacagtgcttttacccccagacatct

SEQ ID NO: 809333 - DNA, 612 bp, Homo sapiens
gatctcggtgccataagtgcagtcctgaggagaaaggtgagcagttgaggggcagcgggctctccagccctccctgcccattgaaccaactcatcaagcaagggtaagcccaaccgagaggcagggataggttgattttcccarcaactcactttgaggggatcccactccttgaagtactccttcatgagtggatagacgatggccacagcaaggtccacacggtcggacatcctgtactcctcatagtacttgtcctgcagggtttcgaagatgcgggcacactcgtccagggtgagggggttgctgcagtcgggctgcatccgccgctcgcactcctccaccatctccaggaccttgctgaggttcgagatgacccgctcctcgtggtccaggacctcggtcatcttctccagctcgtggaagaggttgaccaccatgtcccgctcatactgtagctgccggtcattctggatgatctcctgctccgtgaggtcgatgagcagctgcaggttgtgctccagctcgggcagcgcgaagccgggggccttggcctctttgccagactgtggcagctgttgggactgtagcggcagcccatcatcgggaacg

SEQ ID NO: 809334 - DNA, 553 bp, Homo sapiens
ccaccctccccagcttccctgggggcaaatttcttcttccctttgaaaaatcacataaagattgggagtcccgaagactggtcagggccaaagtaatcaaaatgtacctggacttcggatgtgctaatatttacagtaatattggtacaaggtgagttctgaagaggtggcttcctggaggcttaggatcagggctgcagatgggaaattagaaacctaggatggggactcagsgtttgtggaggggagaggattaatgacgagcagagacaaagatgcaattttcaagaaactgtgagggagcaggtgggaagtgccccgcagctgtcaaagagtcaggatgatgcactggggcagaggaggcttgagaaatagcgggtgggacagtttcagggcaatgtgggaagaggagccctcctggacccctgggccctgggcgcacactcccaatgtggagagactggtctagctcaatgttctgggaaggttttgggtgaagtggatccaagagtaggtctgacctaaggcacaaaagactgttttcctggtgatc

SEQ ID NO: 809335 - DNA, 628 bp, Homo sapiens
ctagtagcaataggctacaccatataccttggtctatagcaggctctgccatctagatttgtgtaagtgcattctatgatgtttgcacaatgatgaaatgcttaacaatgcagttctcagaatgtatccctgtcgttaagcaatgcatgactatgttatacttcaagtacatgtagcacagcctgtcttcagcccrtggagacccaggactacttaggaaagaagtgacagtatccaaaggcagtgaggatcttctagctgcaatgcttttttttcaaggattgtcttttccctgaaataattctttgcatactttttctcacccaactcctactcagaatcctggaacagtttccccgtgtctgtagcccaaatgcctcatactctggtaggtgcctacccctccctctttgtcccctcccatgtcaccatgtcaccaaactcacctttcattcacccctatggaacttatttgggtctcagggactataatgtaagatactaaacatccctaagattatgtatatagaaaagtcctgctagcaatttcattttttaaactctcctactctgtaccaggctctgagataggcactgggaaacaagaacaaatgcaaaattcatgtga

SEQ ID NO: 809336 - DNA, 556 bp, Homo sapiens
tacctgttttgctttgttttgttttgttcatagtggaaaacctcaaccactgtgagtttgccctgcttcgagactttgtcatcaggtaagatgtctcccctccagctgtccagacagcaggttgaattatttggggtcagggtctatctgttcagattcacctcctgcatctccaggtctctctgacagagctttctgccccagttccagctcctgttgcaaaatggaaggtgctgtagaagaatccttagctcctgggagtggttcccattcactgggtccagtccctcgaagtgatgtgtgtcrccgcctcctcttcctgcccctaattgcagccctcttcttctcaccctgtgtcctctaggacccacctccaggacctcaaggaagtgacacacaacatccactatgagacttacagggccaagcggctcaatgacaatggaggcctccctccggtgagcgtggacacagaggaaagccacgacagtaacccatgacgaccacttctctgtgtcatcacacatacccacttcacacacacacatcccaaata

SEQ ID NO: 809337 - DNA, 502 bp, Homo sapiens
aatgagtccaggtaacgccaaggaactgcaccaacttcatggtagattctcggttgtgacacacatctccttcccacaggagaggtggatgcctggcccggccagcgagagcgggccaccgccatcctgctggcctgccgccacctgcccctctccttcctctcctccccgggccagcgggcagtgctgctggccgaagctgcccgcaccctggagaaggtgggcgaccggcgctcctgcaacgactgccagcagatgattgttaagctgggtggtggcactgccattgccgcctcctgaccaccaggctcagcccacccctccacctctctctcgatttctctctcyccccctcagcatcttcccgctgagagtggtggggaagagccttgtcttcttagctgtcacctgccgaggcttctgggccactcaggccagtgcacccctgggcagagccccttaaagctgctgtcactagatgcccatggtccagggcctggtg

SEQ ID NO: 809338 - DNA, 693 bp, Homo sapiens
ctcagtcttggtttttccttgtataacatatgacccccttgagctctactggtcactgattctctgtccccacccgcttgccatttaccccagcatctccctgctccccaaatggcagaccatcaaaccttagagttatcagccacggtcctctcctctctaggcccaccaggcttggggtcctgcagcctgctgggtgattccccctccccgcactcccccaatcctgccgctctgtcatctgctgtaccacgtgcacagtaccagggatccagaagagaaggctggttgccagggcaacggaagataaagcccttgctctgccaggctgctsattggctgagacaggtcccacctcctgccatcctgagagtgggggctagggggaagggtctctgatgggcagggagagataccagggtgctgagccagtccaggactgccccctcctggcccactcagagcccctgggtgtgagaagctcgtctcccgtgggttgcattggctctgccctatctctgcctccagcacccagggcggccgcagatggcagtgtctctggggacagcagctgcgaatgagtccacgggccaatgctgagctgctcaggctgaggcggtgtgctcagcacagagcccccggaactggcatctgcagggcgtgaggtgggtctttgggcacacggagggcacc

SEQ ID NO: 809339 - DNA, 512 bp, Homo sapiens
ttcaaccctgagcagtctcagagcccatgatcataaccactaggctatacttccccaggccacctgagtttattcaagtgtgctcctctggagacataggccaaaatctcttctcaagaatatcagtggaaagtcctgttggttcagcacagagatctttgtagaatgtggacagayacccctcagacgtcccacactcacattgcactagcatgtgagctaagccgtttaaatatacatgtgagaccctcttacaaaaggccagggacttactcttttctttccttcatccattatttattgaaggcatgtaaccagggatacaaaatcgtaactgccttttaaattgttctcttattttgtaccagaaactttgcaaaacacttcacatactggccactccttggacatcacatcaaatcttatcagcttcatctcttattccagccactgctgtgaagagcagaactgtgcaggtttagaccaatttcatgagtgttaaacctgactgt

SEQ ID NO: 809340 - DNA, 632 bp, Homo sapiens
gaggctgaggcaggagaatggcatgaacccgggaggcggagcttgcagtgagctgagatggcgccactgcactccagcttgggtgacagagcaagactccatctcaaaaaaaaaaaaaaaagaaaataatactatatacatttatatacacagtcacacattgcttaatgactgggatatgttcaagaaatgcatcgttaggcgatttccttgtgcaaacatcatagactgcacttacacaaacctagatgttatagcctactacacacctaggctatatggcatggcctattgctcctaggctacaaacctggacagcatgttactgtacttkactagtccattctcgcattgctatgaagaaataactgagactacataatttataaagaaaagaggttgaattggctcatggttccacaggccatataggaagcatggcagcatctgcttctggggaggcctcagcgaacatacagtcatggaggaaggcaaagcaggaacagacacatctcacatggtgggagcaggagaaagggttgggggaggtgacacccacttttaaacaaccagatctcatgagaactctattatgagaacagcaccaagagatgatgctaaaccattcataa

SEQ ID NO: 809341 - DNA, 632 bp, Homo sapiens
gaggctgaggcaggagaatggcatgaacccgggaggcggagcttgcagtgagctgagatggcgccactgcactccagcttgggtgacagagcaagactccatctcaaaaaaaaaaaaaaaagaaaataatactatatacatttatatacacagtcacacattgcttaatgactgggatatgttcaagaaatgcatcgttaggcgatttccttgtgcaaacatcatagactgcacttacacaaacctagatgttatagcctactacacacctaggctatatggcatggcctattgctcctaggctacaaacctggacagcatgttactgtacttgactagtccattctcgcattgctatgaagaaataactgagactacataatttataaagaaaagaggttgaattggctcatggttccacaggccatayaggaagcatggcagcatctgcttctggggaggcctcagcgaacatacagtcatggaggaaggcaaagcaggaacagacacatctcacatggtgggagcaggagaaagggttgggggaggtgacacccacttttaaacaaccagatctcatgagaactctattatgagaacagcaccaagagatgatgctaaaccattcataa

SEQ ID NO: 809342 - DNA, 632 bp, Homo sapiens
gaggctgaggcaggagaatggcatgaacccgggaggcggagcttgcagtgagctgagatggcgccactgcactccagcttgggtgacagagcaagactccatctcaaaaaaaaaaaaaaaagaaaataatactatatacatttatatacacagtcacacattgcttaatgactgggatatgttcaagaaatgcatcgttaggcgatttccttgtgcaaacatcatagactgcacttacacaaacctagatgttatagcctactacacacctaggctatatggcatggcctattgctcctaggctacaaacctggacagcatgttactgtacttgactagtccattctcgcattgctatgaagaaataactgagactacataatttataaagaaaagaggttgaattggctcatggttccacaggccatataggaagcatggcagcatctgcttctggggaggcctcagcgaacatacagtcatggaggaaggcaaagcaggaacagacacatctcacatggygggagcaggagaaagggttgggggaggtgacacccacttttaaacaaccagatctcatgagaactctattatgagaacagcaccaagagatgatgctaaaccattcataa

SEQ ID NO: 809343 - DNA, 618 bp, Homo sapiens
ccagcactcaagggagagagaaacccacaccttcagagcattgagagggaaaatgactgcaactgcaaggaaacacaggggagctacataattgagtgagagtttaccaactgaccaataagcttaagtgtcacctgctgaaccacaccccaaagcttccacaccaaaaatacctcactaacagacacccctgaaaccagaggcaagaagacggcttcaaataaagatcctgcacaaaasctcagcccagtgaaaacatccagaaaagaagtctattgactgtactcaatctacactgcagttaaaggaacacccacacgcagaggtgaaaatgaaccaatgcaagaactccagtaattcaaatgaccagagtgttgtatgtcctccgaatggctgcaccagttctccaacaagagttcttaaccagaccgaactgactagaattacagaagaattcagaatatggataggaacaaagatcatcaagattcaggatggcaaaactcaatccaagataagaatcacaataaagtgaaacaggagctgaaggacgaaataatcaatataaaaaagaacctaacaggtctgacagagctcaataacataatacaagaattt

SEQ ID NO: 809344 - DNA, 531 bp, Homo sapiens
tccttgggttctgttggatctataggtttatgggtttcagcaaatttggaaagtttttagcacttattttaaaaaatatatttatgtttatcaccttttcttctcttctgagattctaattacacatataatagacarcttgacatggttgcacagcagggcttttttcttcttcttcatttttctttctctccatgcttatttttgaatagtttctattgaatgtcttcaaatttattgctcttctgcagtgtcgtatcctgttcaccccattcagtgtatttttaaatttagatgtcttagattatatctctagacgttgtatttggatcttttaaatattttttattttctcctcaccaagtttatatttccttgtataatttgagaatgtggagcttataatagctgtttggatatcctttttatgtcatttatttaattgctgggtctatttattgagttttcttctggtaatggttagtattttcctacatatttgcctgcctggtaatttttttactggatact

SEQ ID NO: 809345 - DNA, 573 bp, Homo sapiens
gatgagtagatgaaggttaaattgatgaaatagaaaaagggaaatggaagaatccttagttctacggagtagaaatggaataaaacagagttctctctactctattatgattttatctcactctattgatgagaaaatggaaggtgaattcatattcctgcctgtcaatttagtacataacaacgcttagagaaggcatttatacctaaccagagataacaggcatatccacagattaacatgtgccaagcatttctattactagtttatagtaaaagaaacatttttcttaggtaatcaacttaatttattttataagcattttgttaactttagcaaatgtaaaaataatttaaaaatacattttyaggaaagtattaagtggtttaaatgcattttaacataagaaaattgaaagtaatccaagtacagtgagtatatataaaaaaagttatgtgttagtaatttattttctttgaagtgatttgcatgcaataacttgtaatacctattaagtgattcagtgattacaaaataatcctggagaaaatgatcatgtgtttaatgaagaaa

SEQ ID NO: 809346 - DNA, 617 bp, Homo sapiens
gttatatcttcttggtaaattgaatcttttattactatgaagagaccatcttcatctctagcaatgccttttactttaaactgtactttctctgatattactatagctgcactggctttcttttagttaacattcgcatggtataccttttccattctttttactttagattttcagtattctcttctatgtgtgcctttcattagtttttgtttttgtttgtttgttttttatatctttttttttctttaagttccgggatacgtgtgcagaatgtacaggtttattacataggtatacatgtgccatggtggtttgctgcacctttcaacctatcatctargctttaaaatccaatcagattatctttttaaaaaaatttttttataaatacagttttataatctgcatctactgtagagcacttatttgtaacgtaactactaatatacttggctttaactctgacatcttatcctgagctttcttctcctgcctgttttattatcttatttttgattgttcggattgcttgaggatttttttcatctattttttttctatatacagttagtatttacactagaaactacaacatatgtacttaacttgataaa

SEQ ID NO: 809347 - DNA, 599 bp, Homo sapiens
ctgatatcttccacttgccatttaaaaggatcattctggctgttgcattaagaatgactatagaggctgggagtggtggctcacacctgtaatcccagcactttgggaggccaaggcgggcagatcatttgaggccaggagttcgagaccagcctggccaatatggtaaaaccctgtttctactaaaaatacaaaaattagctgggtgtggtggygcccacctgtaatcccagctactccagaggctaaggtgggagaattgcttgaaccagggaggtggaggttgcagtgaactgagatcatgccactgtgctctagcctgggtgacagagtgagactccatctcgggggaaaaaaaaaagaatgactatagagggcaaaaacagcaacagggagcctaatcaggagtctgttggaataacccagtgagatgatggcttggacctgggtggtaataatgaaagaagtatacaaatatattttaaaatatatattaacggttgaaggtcaaataaacaagattttctgctagattgaatgtagagtatgagaaaaagataccaagtattactccaaagttcttagcctgattatcagaa

SEQ ID NO: 809348 - DNA, 599 bp, Homo sapiens
ctgatatcttccacttgccatttaaaaggatcattctggctgttgcattaagaatgactatagaggctgggagtggtggctcacacctgtaatcccagcactttgggaggccaaggcgggcagatcatttgaggccaggagttcgagaccagcctggccaatatggtaaaaccctgtttctactaaaaatacaaaaattagctgggtgtggtggcgcccacctgtaatcccagctactccagaggctaaggtgggagaattgcttgaaccagggaggtggaggttgcagtgaactgagatcatgccactgtgctctagcctgggtgacagagtgagactccatctcgggggaaaaaaaaaagaatgactatagagggcaaaaacagcaacagggagcctaatcaggagtctgttggaataacccagtgagatgatggcttggaccygggtggtaataatgaaagaagtatacaaatatattttaaaatatatattaacggttgaaggtcaaataaacaagattttctgctagattgaatgtagagtatgagaaaaagataccaagtattactccaaagttcttagcctgattatcagaa

SEQ ID NO: 809349 - DNA, 422 bp, Homo sapiens
cttcctagcatccctactctagaaaatagtaggtactaagaagagggcagttaaataaaagactaatccgggcgcggtggctcgcgcctgtagtcccagctactccgaaggctgaggcgggggcaggaggactgcttgaacccaggagttcgggggggtgcggtgagctatgattgtgccgctgcacttcagccggggtgacagagtgaggtcccatctctaaaacaataagaataawtaataataaaaaattcaagattaaacctataaatgttgttaggccaaatgctgtacacgcatgaagttaacagttatgggttcaaatctggactccaccataaccatgtgcataaagaggcatacacccgaggtcttcctggttaagcccttggcgctatgccagaacaagcgtcttctgtcct

SEQ ID NO: 809350 - DNA, 623 bp, Homo sapiens
tttcccattgccttagggtgaagaccagatccttacctggatgggttttcattgtctctctcctttttcttttttcttagatggagttttgttcttgttgcccaggctggagtgcaatggcatgaactcagctcactgcaaccgctatcttctgggttcaaacagttctcctgccttggcctcctgagtagctaggattacagccgcccaccatgcccgactaatttttttgtatttttagtagagttggggtttcaccatgttggccaggctggtctcgaattcctgacctcagttgatccacccgcctcgacctcccaaagtgctgggattacaggcatgagccaccgcacctggcmattgtctcctttttcactgtcactttgcatggcactacccgttgatctctctagtccagccaaaagggttgcctttgggtccttggtgcgtcctaccacagggcctttgcacatgctgttctcattacttggatgccttttctttccctcctcatcttctttacttcttctttagattttagtgcaagcttcacttctttagggaagccttcctggattccccagattaattcaaattcacgttatcagctctgtggacctccc

SEQ ID NO: 809351 - DNA, 587 bp, Homo sapiens
gggtggggatttctcatgaatgatttagcaccatactcttggtgctgttctcttgacagtgagtgagtgagtgagttattgcgagatctggttgtttaaaagtatgtagcacatcctcctctctctcttgctcctgctcttgccatgtaagacatgcctgctccccattcaccttctgccatgattgtaagtttcctgaggcctccccagaagccgagcaaatgccagcatcatgcttcctgtgtagcctgcagaaccacgagccaattaaacctcttttcttaataaattacccagtctcaggtatttctttatagtaatgtgagaatggaccaatacatatattttggtttttcggagtttttttgagakagggtctcactgtcacccgggctggagtacagtggctcaatcttggctcactgcaacctccacctccaggttcaagcgattctcccacctcagtctcgcgagtagctgggaccacaggtgcacaccaccatgcccagctaagctttgtgttttttggtagagacagggtttcaccatgttagtcaacctggtcttgagctcctgacctcaggtta

SEQ ID NO: 809352 - DNA, 478 bp, Homo sapiens
ttggttggggttctcaaaatggtcatacctaaatgggttaaattagtaccagaataaaggatgctatggacccaccataacaaagcttaaaaggaagcctttaaagaatcaaactaatccaaaagtaatttagttgcattttacaacaaaatccaacacgctttatgctacaacaaaattcakcacccaacaatgtacaatttacaatgtctggcaccaatcaaaaactaccaggcatggcctggtgcggtggctcacgcctgtaatcccagcacttagggaggccaaggcgggtggatcacgaggtcaggagttcgagaccaacttgaccaacatggtgaaaccctatctctactaaaaatacaaaaattagccaggtgtggtggtgcacacctgtaatcccagctactcaggaggctgaggcaggagaatcacttgaacctgggaggcagaggttgcagtaagccgagatcacacc

SEQ ID NO: 809353 - DNA, 599 bp, Homo sapiens
tagagcttgaaagtaagtgaagtaaaactaagagaattgaaaggagaaattgacatattcacaatcatagttggaggtttcaacactcctttctcagcagttggtagaacaggtttacagaaaatcaaaaaagatgcggaagacttaacagtgaaaccagtttgagctaatagacatttataaaacactccttccatcaagmgcagaattcttactctttttaagtacacatgaaaattaaccaaatatagaccatattctggttcataaaacaattctcattaaatttaaaagggttggaatcatatagagtacgttctctggccacaatggaattaaacagaaatcaacagaaagatacctggaaagtctcaaatatttcaaaattgaacaacccatgagtaaaacaagaagtcacaagaaaaattagaaaatattttgaactgagtgaaaataacatatcaaaatttgtgagatatagctaaagaagtgctttgaagatttgtagcattaactgtttatattagaaaaaaataaagctctaaaattgatgatctaggcttctgtctgaagaaactagaaaaagaagagcaaattaa

SEQ ID NO: 809354 - DNA, 553 bp, Homo sapiens
gctgggcagaggcgctcctcacttcccagatgggatggccaggcagtggggctcctcacatcccagacgatgggcggccatgcagagatgctcctcacttcctagacggggtggcggccaggcagaggctataatcttagcactttgggaggccaaggcaggcggctgggaggtggaggttgtagtgagccgagatcatgccactgcactccagcctgggcaacattgagcattgagtgagcgagactctgtctgcaatcccagcacctcaggaggccaaggcaggcagatmactccaggtcaggagctggagaccagcccggtcaacatggcaaaaccccatctccaccaaaaatacaaaaaccagtcaggcatggcagcgcgtgcctgcaaccccaggcactcagcaggcctaggcagaagaatcacgggagcccgaggcggggaggttgcagcgagctgagatcacggcagtacagtccagccttggcaacagagggagaccgaagaaagaagggagagggagagggggagagggggagagggggaggga

SEQ ID NO: 809355 - DNA, 466 bp, Homo sapiens
gggatcctgtcggcatcctatgtcacgcttagacaacgatgctcgcctagaaactcaggttagaggctcggcccacaaggttakatgccctggggtatatctggaccaatggaatctctttgcaagatgtttgtccgtgtgtgatctgaactaatccaccttgtgccctctgctggggatgggaaagctctacttctcatcatttcccagctcattgctttgctgtacagcagccttggggcagccccgaatggctggtccagaggtttccaccttccagtggtggattctaatgttctttatgtgtttctctctgttcttctctgcctgctttggatcggctgttactaagctgctgccgagtggcaactctgcttatctcacggtgttgaggtgagactcactgcttttggtattactgattcaaggctacttagagattgtcttttcttgtacagttcagcca

SEQ ID NO: 809356 - DNA, 466 bp, Homo sapiens
gggatcctgtcggcatcctatgtcacgcttagacaacgatgctcgcctagaaactcaggttagaggctcggcccacaaggttatatgccctggggtatatctggamcaatggaatctctttgcaagatgtttgtccgtgtgtgatctgaactaatccaccttgtgccctctgctggggatgggaaagctctacttctcatcatttcccagctcattgctttgctgtacagcagccttggggcagccccgaatggctggtccagaggtttccaccttccagtggtggattctaatgttctttatgtgtttctctctgttcttctctgcctgctttggatcggctgttactaagctgctgccgagtggcaactctgcttatctcacggtgttgaggtgagactcactgcttttggtattactgattcaaggctacttagagattgtcttttcttgtacagttcagcca

SEQ ID NO: 809357 - DNA, 382 bp, Homo sapiens
agagcaaagggacaggcaaggtcatacctgcgggggtgtggrgctcctctgctgggcctagacgttgagttcatacccctttgccaggttgggagagggcatcggctggggacaaagcgggtcaagcaggtatgagattacccttggatctcttcctcctgcagcttggaggatgccagcaggggccggcgttgaggaggccctcgggtggcatcaccagcatggctctgagggtctctatttccagagctctgcatctgtgagctcaggcaccccacccagtcagcgagggagaaggcaggccgctcctcagtggacacatgccagtggcctcaggtcccattgctccacctctcgcagtggaaggccacccccaatgtgc

SEQ ID NO: 809358 - DNA, 382 bp, Homo sapiens
agagcaaagggacaggcaaggtcatacctgcgggggtgtggggctcctctgctgggcctagaygttgagttcatacccctttgccaggttgggagagggcatcggctggggacaaagcgggtcaagcaggtatgagattacccttggatctcttcctcctgcagcttggaggatgccagcaggggccggcgttgaggaggccctcgggtggcatcaccagcatggctctgagggtctctatttccagagctctgcatctgtgagctcaggcaccccacccagtcagcgagggagaaggcaggccgctcctcagtggacacatgccagtggcctcaggtcccattgctccacctctcgcagtggaaggccacccccaatgtgc

SEQ ID NO: 809359 - DNA, 568 bp, Homo sapiens
tggtctataggcctatttttataccagtaccatgctgttttggtgactgcagccttatagtatagtttgaagttgggtaatgtaatgcctccagatttgttctttttggttagtcttactttggctatgcagggtctttttttgttccatatgaattttaggattattttttctagttctgtgaagaatgatgatggtattttgatgaaaattgcattgaatttgtagtttttttttggcagtatggtcattttcacaatattgattcaacccattcatgagcatgggatgtgtttccatttgtctgtgtcatctgtgattactttcagcagtgttttgtagttttccttgtagagatctttcacctccttggttaagtatattcctaggtactttatttttgtcacagctaaagtaaaaggggttgagttcttgatttgattctcagcttggtggctgttggtgtatagcagagstactgattttgtacaataattttgtatcgtgaaactgctgaatttgttcacccattctaggagacttttggatgagtccttagggttttcta

SEQ ID NO: 809360 - DNA, 625 bp, Homo sapiens
aagattcttctttcggtggaagacaatggatttcgccttcactttcctgtccttaatatccactttgttgccrctcaacacagtgggggtgttttcacacactcataccagatctctatgccagttaggcacattcttgtaagtaactctcgatgttacatcaaacactatgatggtactctgggcttggatataatagccatctctcagtccactgaatttctccaggccggctgtgtcccatacattgaacttaacaggtcctctgttggtatggaacactaggggatgaacctcaacacccaaggtggctacatacttcttctcaaattcaccagtcaaatgatgtttcacgaaagtcgtttttccagtaccaccatcaccaaccaatacaagtttgaactggacctggggctgtccctgcgcagccattgcggtgttccttccagaagcgtctccatgcccgtctgactcaggaaggaaggattattattgctgttgtttagagacagggtctcgctctgtcacccaggctggagtgcagtggcaccataatagctcactgcagcctagaactcctgggctcaagggattctctcacctcagccttcccagtagctggaac

SEQ ID NO: 809361 - DNA, 588 bp, Homo sapiens
gtctagtatttacttattacctatgcacatcctcccatatactttaaatcacctatagattactaatacctaattcaatgtaaattattcgcaaatagttgttatactatattgtttaggaaataatgataagaaaaagtctatatatcttcagtacagatgtaaccgctgtaggtaggcctaactacatagtatacatcagcagcaacaacagtttcgatcctcaggtagttaaattcacagatgtgaaacacacagacatggagggcagactatcatatattcttttagataataaaaaaagagtaaacaccttccaactaattttatgagacaacatagcccagagaagaacttaaacatgacaatgacattacaaaaaagatatccaccatctgaatgaactgatgaacacagccaccaaaattccatctaaaatattagaaaatagaagcaagtaatatatggagaggataatgtacaatgggactgaatgggatttataagagaaatgtgactttaaaaaatcagagtaatttaccacatgaatagaaaaaggtagaaaaacrtgcagttatgtcaacagat

SEQ ID NO: 809362 - DNA, 610 bp, Homo sapiens
tcatgagagtttgtcatatgtaggctccagccctacaggacctgtgggtttttctctttgtgtgtggagatgagagagtgtagaaataaagacacaagacaaagagaagaaaagagagttgggcccaggggaccactaccaccaaggcacggagactgatagtggcctcgaatgccaggctgcgctgttatttattggatacaagacaagggggcagggtaaggagtgtgagccatctccaatgataggtaaggtcacgtgagtcacgtgtccaccagacagggggcccttccctgttcggtagccgaggcggagagagagaggggacagtttatgtcattatttcttctatgtatttcaaagactttagtactttcactaatttttgctactgctatttagaaggctgagccaggtgtagagggtggaacatgagagtcaaacaggagcgtgaccactgaagcacagcatcacagggagacgtttagkcctccagatggctgtgggcgggcttgactgatgtcgggccttccacaagaggtggtggagcagaggcttctctaactcccccgggcaaagggagactccctttcccgatctgctgagtgat

SEQ ID NO: 809363 - DNA, 479 bp, Homo sapiens
agtggcactgtgtcggctcactgcaatctccgcctccctggttcaatggattctcctgcttcagcatcacgagcacctgggattacaggcacctgccgccacgcccggctaatgtttttgtatttttagtagagatggggttttgctatgttggtcagggtggtcttgaactcctgacctcaggtggtccacccgtctcggcctcccaaaatgctgggattacaggcatgagccactgtgcccggacctgaaaacagaattttttaaccagagacctgcttcatatcttttttaaatctgagttgagccaagattagctgaaatttggtttctggcagtaatgcttgcaagggcaatgttattcccagacccaggataaaaacctctggagtgttttggctacccatgatgctycctggtgtttcagatgtgtatggagcagtaaaatacagggcgagtaccttacgctctgtatttga

SEQ ID NO: 809364 - DNA, 598 bp, Homo sapiens
aaactttcagagacacacaaggttgcgaaaacctcagcatcctttcttagctcactccccgatcattttctcctcaatcgtctacaggacaggtaacaaargtcatctgcttagaaacagtatgttagataagatagtcccccaaaaggtagtataaataataactttcctatatgacaaacatatcaaaataataacatttattgtaaaaagaaaaaaaaaacctcacttaccagaaatcctctttataaaaaaaaaatccaggaataaactctaaaactttttcaagtaacactgtaaaaatctcagattactggtgtaacataacatattcctgaatcagaaagctcactatagtaaatgtcaaattgattcaaaactttagctagagagtaaatactccagtatccttaagaaattttttaaagaataataaaataataataaaacaggagctgtcctcctggatttaaaaatgtaaaataatgctacagacatttaaaaatctggccctggtatattagaatagataaatgtatcaatggaacagaacagagaggccaaaaataaactcagatgtatatgggaagtcatctat

SEQ ID NO: 809365 - DNA, 526 bp, Homo sapiens
ccatcattcaggctggtagcatccccacctgaggggtaagagaccgaatcatggagcgtttgcacgagtggtggactcaggatgggaccccaagccttttgcttctaaatccacagcttgtttccatgagaattcacttactgaacttgcactgatgtgtttgttcactgcatgtgtgttgtctactaggtgctgggcacagttgtgaactgaagagaatcaaaacccttccttcgtggaatttgcactccaacaagagaaacagataaggagcaggaaataggaacacagcgtagggtgtgaacagtgacagtaaagctggcggaggtgccagggagagctgcaatttgaaatgaagtggccagggtaggcctcaccagaagccgcagctgagcaggggcgctgagcagagatgtgcttccaggaggacccttctaggcagagggaggtgagaatggagagatagggcctggggaactgcctgttattctgaaasagagagtaagccattgtgggtatccccttg

SEQ ID NO: 809366 - DNA, 427 bp, Homo sapiens
atgagctactattctctgaatgctgggaggagcgacccatgattgttacagtcaaaggccatagtttgataatttcaaagtcatattataaagtcactttggttggtcttgtccacatakccagcctgcagtaaaaatgagccatgttaaaacttgaaagaggtagctttggtgggaaaagttaaagaattttgcatggtggaaatttgttgttctaggatgataattgtaagtggaatcaagaaggctttgattctactcacatactacccacaagaggaagttaggggtggacactgctgtgtgcagctttggtaggtggcagagaagctggcctgctgtcattgttactcctgttgtcagagccgatagctggactgaatctcccactcaaactgatgggagccagcagggcatttccatgttt

SEQ ID NO: 809367 - DNA, 575 bp, Homo sapiens
tccaagattccagagatgataggctttggatctgggcgagaacaatccagccttctcattttagaaatgccgaaggctaaggacccaaaaccacccatacacaggacgtcacccagtgtgacatagaygaggctatgaccagagccccccatccagagctctccccagccaaccactccccatgtgggcagctccaagctggctccaggcttcaggagaggaagcacttgctgactctctccttagacgtggacatgctgaagtgaattccaggcatgttttcaagatctcctcggactgcctggatcagaggctagggtagttatctctgcttgaagtatcagtggtggaagccttccatcggctcctcccttcatcttgaaagaatcccggggcatctggtggctggcctcgctccgaagatggtggggacgaaagcctctgggatacacattttcttcaggggcggccagctgtaagagacatcgtccaatccaaggggtggcaagttcattgagcacaataacccaactccgccactgagtgtgtaagttagaaccctgcccccaccagga

SEQ ID NO: 809368 - DNA, 575 bp, Homo sapiens
tccaagattccagagatgataggctttggatctgggcgagaacaatccagccttctcattttagaaatgccgaaggctaaggacccaaaaccacccatacacaggacgtcacccagtgtgacatagacraggctatgaccagagccccccatccagagctctccccagccaaccactccccatgtgggcagctccaagctggctccaggcttcaggagaggaagcacttgctgactctctccttagacgtggacatgctgaagtgaattccaggcatgttttcaagatctcctcggactgcctggatcagaggctagggtagttatctctgcttgaagtatcagtggtggaagccttccatcggctcctcccttcatcttgaaagaatcccggggcatctggtggctggcctcgctccgaagatggtggggacgaaagcctctgggatacacattttcttcaggggcggccagctgtaagagacatcgtccaatccaaggggtggcaagttcattgagcacaataacccaactccgccactgagtgtgtaagttagaaccctgcccccaccagga

SEQ ID NO: 809369 - DNA, 635 bp, Homo sapiens
ctgaaaagctggttcaggctgtgatgggaagagggggtgggacaggcttcatcatgcccacctcccttttggaattcaaggaaagctgaccagcataaacatcagtacagacctgaagtttgataagaaacactgaccatctcttctctctgaagcctgctaccgggagggaggtttcatccgcatgataaaatcttaagttgtcccaactttctggaccgaaccaaggtatttcttaaatgtatgtgattgaagtctcacatctccctacaatgtgtataaccaagctgtgctccaaccaccttgggcacatgtcacaggccatgatcactcatatttggctcagaataaatctcttcaaatgttttacagagttcgactcttttcaccgacaaatgggcaatgtgttgtgtttgcatgaggagcccctggttgagagcaagttccctgccggttctgccctcaggttcttggtggccagagacactccccagggcgggcagccagtctggtgctggccagggctgtrctgcttagcaaggccacagaagggacggagctgccctgcctgccaagcctgggaagcctgctcaggttgtttactgctggcctttcaggaagtgctttgggaacaa

SEQ ID NO: 809370 - DNA, 503 bp, Homo sapiens
acactttgcttaaaacacaaacacattatacagctgtacaaaattattttctttctttatattctcattctataagcttttttctattttttctttttttttttaacttttaaaatgtttctgttaaaaacaaagaggcaaacacacagtggcctaggcccacacagggtcagggtcctcggtgtcactgtcttccccccaacatctggtcccactggaaggtctgcaggggcaatgacacgcacagagccgtcacctcctgtgatgacaatgccttcttctggacacctcccacaggacctgcctgcagctgctttacaattaacttgtttttctaattagtaggaggagtacactctaaaataacaataaaatgtatagtatagcackcatcatcattatcaagtagaatgtgctatgcacaactgtacgagctatacgtttatacaactggtaacgcagtaggtttgcctataccagcatcaccgcaaacgcgtgagaaa

SEQ ID NO: 809371 - DNA, 622 bp, Homo sapiens
tctcgtgagagtcagtgagttctcatgagatctgatggttttataagtgtttggaagttcctcctttgctcttctctgtcctgtcacctggtgaaaaaaagtgcttgcttccccttccccttctgccatgattgtgagtttcctgaggcctcctcagccataccgaactgtgagtcaattaaacctctttcctttataaattacccagtcttggtatgtctttatagcagtgtgagaacaaactaacacatatgccctggatggaagagctcatttcattaatgctaaagtcaacagagccttgaaaatggcttgcaggcatggcctcaggaagagccaagaaccaagtgtgatcccctcttctacccctaggagctatgggctgagccccttgaccagcagacttcccaggatgaaaaggagaagagctcaaggaattgccatgaagagttagtgtagagagtagtttggtgatgagtcaatggtcattcaccccccacctcayggtgcaagactttgtagtgaatcttctgagtcctatgtctcattttccttatctaacaaatggcgtggtggtcctcgccctagctaacccataggattgacttgatttgaaaaccct

SEQ ID NO: 809372 - DNA, 528 bp, Homo sapiens
gttctatagatgttattgtaaattccttataattttctgtaaaactataatgtcatgtgcaaataaagatagtattacttcctttatttcactctgtatacctttatttttaaaattatttattatttttagttgtttttaaattgaggtaaaatttacataacatataattaaacattttaaagtgtacgactcagtagcatttggtactttcacaatgttgtgcaaccactacctctaggtagttctaaaacattttaataaatccaaaatataaccctcggtccggcatttcaagatggccgaataggaagagctccagtctgcagctcccagtgtgagcgacgcagaagatgggtgatttctgcatttccaactgaggtaccgggttcatctcactggggagtgtcggacagcrggtgcaggacagtgggtgcagtgcaccaagtgtgagctgaagcagggcgaggcattgcctcacccgggaagcgcaaggggtcagggaattccctttcctaatcaaagaaa

SEQ ID NO: 809373 - DNA, 607 bp, Homo sapiens
catttgttcccttccagctcaaacatcctttgattctggagatgacattctggttaattggggttcttggatatgtaatccatctgcataagtttctgaaaaggaaccaagttctgccccaggcccaaggagcactggttccatctgccgacactggcttctccccgctccccgttctgcctcagcaatgcctgaccttgcgcttccccagcatctatctccttaggggcctcagaaccccatccctgccaataatcctggctcttggctgccctgtgccaaaggcagatggtgttgagtaatggggcttctcccttggttggatgggccagcgtcagcagagctgacttcagcgtcaggctggcatgaggcttttggagcttagcactttctcttcttcacgatctgggtggggaagtgggagggaagcagagatggcggttctggaatctttcctgaagcctgggtatttgtgamgatatggcatcctgagcctccaacttccctgccactgagcttctccgaagacatctctctttgtttgcctgtatttcactctggcggtgtctaagaggcttcctccatttgcttttttatattcatttga

SEQ ID NO: 809374 - DNA, 442 bp, Homo sapiens
tatgaagcatctaccactgcctttgacttaaccctttttatgtctgagcttcaatcatgagkttttcaaaaattatttctagaaagcaagttgggtttcttcaatagacagtggagtgttttgctccagagtactgaaatattctgttgtgatgttggaaactttcaccaattaaggacaaaaaccttctcataggtgtgtatatatatatatatatacacacctatgagtgatatacacacacacacacacacacacacacacacacacagagagagagtttgtgtcttttacaggaatcattttaggagttcatgtagacttattttattgaggctgttgagcaaaaattttttttctacttctccttgtgaattttatttgggtattatttgaatagtctcagaagtagcagatctttattttttaggataatttattt

SEQ ID NO: 809375 - DNA, 619 bp, Homo sapiens
accttctcataggtgtgtatatatatatatatatacacacctatgagtgatatayacacacacacacacacacacacacacacacacagagagagagtttgtgtcttttacaggaatcattttaggagttcatgtagacttattttattgaggctgttgagcaaaaattttttttctacttctccttgtgaattttatttgggtattatttgaatagtctcagaagtagcagatctttattttttaggataatttatttggaatcagcccaaagttatttggaatcatgctgttaaggtggacactgaagttgtggattttaaaaaagaaagcccagttgtagctatcaaacactagggtataggtgtgacacattgattgtcatagaaggaaaggatataaggagtagttgaaaatatgcaggaccaatgacagtaatgttggaataaacatatgacccttcaaggcaactattgtgaaaggtaatcctctcttaaaattttaaatctataaattccagtgatttttcttcaaagttttaaagtctcaccttacatagactcaaagactgatgtgcaacagcaggacaagaagaacctgaatacttaggatctagtta

SEQ ID NO: 809376 - DNA, 641 bp, Homo sapiens
aacttgggatccttttgcttytttacattctatgttggacataaagtgagcattactttatgtggggaatatgtatgtatgtgtgtatttatatattctaatttattttaacagggtgaagtgggtcagtgagtaagatgcaatagaacagtagttatctttgtcaattaaagcccctgtcaccatggcgtaggttagtgtaagctctcttgcagagtgtctttgtagagatactcaagtaataccatgtgtagttttgcagagattttgtaggtttcttagatgtttaccgtcgtgtgctaagctttttccaagccaaaaaacattgatctaggccagatactggcaaactttttcttcaaagggccagatagtaaatattttaggtcttgtaggccatataatctccagcaaaatcactcaggtcggttgttgtaatgcaaaaacagccataggaaatacataaaagcttggctctgttccagtacaacttattttattttatttattttttgagacggagtctcactctatggcccaggctagagtgcagtggtgcacttggctcactgcaacctccacctcccaggttcaaacgcttcttctgcctcagcctcctgagtagctgggactataggcac

SEQ ID NO: 809377 - DNA, 638 bp, Homo sapiens
attttttaaagctctgtaaacagacataatgcaccctctgcttccttttcagcatttattctgttgctcttccccccaccctcccattctgcctctagactttgtttmtttttcttagagaggaattctaaattaaacaatgcaagaaaatgaaaatggcaagggtacaacattatagaggactaaaggggaatagaagtaagttacgttattgaaatctcagtgtgagggaataatgaggataacacaggttaattttccgatgtgtcctttacccacataattgtccaggacatagatgttatcggagagaagctaagaagcacaatttgtaagagtcttaaaagggtaatagaagacacacttaggcttagcatcgttaatgggcagagaggttcaggtcatagttgatttgagtctgctcaaaacattgtgcagcatgttgtattcagtgttctggttaggatgttggggatggcccaagggcccaataactaacagtgtataattttgatttgagtgcttaagtagatatgttttcctgaaaaaacatgagcagtaaaggttgacttggatttgtatgcggcatgtttccaagggggacctgggaacagatgtgttgtctgttctgaaagcat

SEQ ID NO: 809378 - DNA, 611 bp, Homo sapiens
cagggtagatttgattctaggccttttttaggagacaggaaaaataatatacacacacatgcatgtgtgcatacacaagcacatattttaggaattgtgagttcacactaatacttccaagttcaaaccattttcacagagaatgcttatctccattctataatgtattattcttccacagtgaaaaccctgctgcctaacacatttgttcatttactcagtcctttaatacatctaaaaatagattcaaattatgtcacccatactactacagaaaaagacctactaaaaagttcaggacatgttttccctccacactttcttagaatagggtagatagtaaaattttgagttcgtaacttatattattctttttctcacctctcttcatagtggttatgtttttaatttgaagtacaatttccctttgcttcattttccctttgcttcattttcctttcaattttaggtttttatctttcccatctttgtttattaattttattttttgaatatgtggaacactaatawgctttccaaattcaaaactctgtataaaggtatactgagacatgtattactgctagaagttggtcatttatttatagcaa

SEQ ID NO: 809379 - DNA, 581 bp, Homo sapiens
atgaaaagccacacagatgtgccttcattttgtagtatattaacaagatggtaatgcatgtatgtatacaaatctatcctgagagtcttctttgagggttgattgaaaactcactcctcatcttggttttgtttgcttgatatgggaagcacaaaacatttatctttatgttctgacaatagaaatagtagttggtatgaaatactcggtgggcgaagcagtgaatgataagggaaatagtattttgcatgttgcatttgcaaaggaaactcttagaaaagtggctaactttagatttacttatactccttagagttcacagggatgaatttaggtggagagatgatatttgaaggaaaaggtacaggtctacgtacagtagactagattaggtgatcttgttgtgcaatatgttttgaaattactgatgtgacatacattaatctcmaaataattatgctgtgtgaaataagccggataaaaagagtgtaataattgatatggttcggctgtgtccacacccaaatctcatcttgaatcgtagctcccgtaattcccacatgttgtgggagggacctggt

SEQ ID NO: 809380 - DNA, 601 bp, Homo sapiens
taggactaaaaccagaaggttgcatgtccggtgcgggagcatcgaagaagatcctgtctgtagaagcaggagcgtcaagacttgactgagagccatggtgctgaaatgagatagattccctgatggagagcacacgtggacccccacacctgagggctcactgctcctcaccacagatgcactcccctactgagtcctgagacctgagtgcaccccatagagtagggctcagatgaggggatgcaaatctccaccagctccaccctcccctgggttcaaaagacgaggacagggcctcgctcagtgaatcctgctctccaccatggacatactttgttccacgctcctgctactgactgtcccgtcctgtgagtgctgtggtcaggtagtacttcagaagcaaaaaatctattctctcctttgtgggcttcatcttcttatgtcttctccacaggggtcttatcccaggtcaccttgagggagtctggtcctgcgctggtgaaacccacacagaccctcacactgacctgcaccttctctgggttctcactcagcactagtgraatgtgtgtgagctggatccgtcagcccccagggaagg

SEQ ID NO: 809381 - DNA, 539 bp, Homo sapiens
ctcgtccagcactgaacctcagcatcatgtgctgtgtgcagggtcagagggccaacgtactggcccctgggraagcgtttcctctggtgggagttggtagaaggtgtcctgtcttcttggctgcatctgtccgcagtggagtttacatcatgctgagctgggatgtggaaggaaggaagagcatcttagatcaaatatgatgactggccttactgagttttctagattttcctgaataaatgtttcttcactcactgtgtgctgttagagtctttccaaacctgtaatttcccaaaataattttcactggtctcatgagggcatggattcattgagcccctcatgctgtcaaagagaaatagaactgtttttttttttcacttcatagcgaacatccatgggttatcaaataatgggctggcttttcttccaacactttacagacaccatcaattttcttcttgcttataaggttttaaccagaagaatgctgtcatggtcttttctgttcttttggaaggaatgccccctctactcac

SEQ ID NO: 809382 - DNA, 612 bp, Homo sapiens
ttgtacttagaagaattaacttttatctccacatgttttttttttaatcatagagaaactactagtggtagttccactgtccaagttactgaatatcttattcctagaatgagrcactgcacaatgtgttctgacacgacagaacgtagctgtagttaagggacaggagatgtgatcacgggaacacgagtctgcgatccagcagttcttgctccttcacatttgcccagaaacaaagaccccagcagaacaatggaagcattgacttaggtctccacagtctgatgtgagataaacagcaggtagtttatgcctctgttttatagcaggaaatttaatctctaaagaagggccattttggagataatactattctccaggatgcttaaatgcccccaaacagagagcactgcagagccccgtggccaggagctacaacacctgggtctggaaaccactggacagaaatatgagattctcttaccacatgtatgatggaaccttgaagaatgtttccttccttctccataatcacagcctgcgatgaactggaggtcccagtacataaaaaaacatgtgtctgcattggatacagaattagtcccataaaat

SEQ ID NO: 809383 - DNA, 612 bp, Homo sapiens
ttgtacttagaagaattaacttttatctccacatgttttttttttaatcatagagaaactactagtggtagttccactgtccaagttactgaatatcttattcctagaatgagacactgcacaatgtgttctgacacgacagaacgtagctgtagttaagggacaggagatgtgatcacgggaacacgagtctgcgatccagcagttcttgctccttcacatttgcccagaaacaaagaccccagcagaacaatggaagcattgacttaggtctccacagtctgatgtgagataaacagcaggtagtttatgcctctgttttatagcaggaaatttaatctctaaagaagggccattttggagataatactattctccaggatgcttaaatgcccccaaacagagagcactgcagagccccgtggccaggagctacaacacctgggtctggaaaccactggacagaaatatgagattctcttacyacatgtatgatggaaccttgaagaatgtttccttccttctccataatcacagcctgcgatgaactggaggtcccagtacataaaaaaacatgtgtctgcattggatacagaattagtcccataaaat

SEQ ID NO: 809384 - DNA, 564 bp, Homo sapiens
tcttagggaaactgcagtattctaaggtgacaatatgcaaacatgatgaatgtacacttgctacatctccaattgtgtactgttttccttacttctgtttgaagaaggragtcgtatactcaggtctagtatcagtgtagggggtgctccctatttgcaagatactagaaaaaaatggtaagttagaggcccattgttataaaaatctactagctccgtgtcagtgtgtgtgtgtgtgtctgtgtgaatgtgtgtgttattgaaacagaagacatggagtgggcattgatccacaagcatagatacctacaggcactcttagatgtaatatttaactgcaggagtctaaataaaataaaggattcgccaaaagtcttgaaaattttggtgctgactatgtgtccactgattcaatgcatcctgagttccagggaagggaatccccaattctttcatagagttgactgggtctcctaaggtcaatgttttcaaacgatggtgtcagtaacatatggtgtcactgaaagagcattttaaactagggcatggccacttcctatagcc

SEQ ID NO: 809385 - DNA, 564 bp, Homo sapiens
tccaagaacacgctgtatcttcaaatgaacagcctgagagctgaggacacggctgtgtattactgtgcgagagacacagtgaggggaggccattgtgcgcccagacacaaacctccctgcaggaacgttggggraatcagcggcagggggcgctcaggagccactgatcagagtcagccccggaggcaggtgcaggtggaggctgtttcctgtcaggatgtgggacttcatcttcttccaacagtttctctaatgaacctctctaattttagaattctgtggttcctaatgtcatctctacatattttcaaaagatcattttaacatgaggacataacctctcatgcaccaaatgcacattgatgcttacaaagatgaaaagttctcaaccattgtgaccaggatcgcagtcctgaggaagctcacgggtgtctgatgagtctcctccattcaggcccaggacagaaacctcagagggattcctggaccagaacggcagggattctgatcacagccaatagagaggctgggccagggtcagtgtcctgtagaagctcacagggt

SEQ ID NO: 809386 - DNA, 638 bp, Homo sapiens
ttaaaaaaaatctgaacagaccaatgagtaaagagatcgagtcagtgatttttccaacatctcgaatcaaagtccagaacttcatggcttcactactgaattttatcaaaaattaaaaaaaacctagaatctctactcaaatttccaacaaaataaagagaaagaaatatatccaagcttattttggaaggccctatttccaaagcaaggaaaagacactacaagtaaataaaactacaggccaatatccctgattatcatagtttcaaaaactctcaagagtgatgagatgacaaacaaaattaaacagcagattaagaatagaattcaccattatctgtgtctcccatacccagagaggctgctgcttgccctgcacaaggatactctgagcagaaacctacctggcccagccctcaccttgctttatgcagccatctgccctggcagcttaacacaaaggacagcatcttttgggagatacatggccacacccactgcctgagaatccacagtagcccctattcctgggcaacataagccaagcaaaaaccccactgttaatactgtagctggtgctctttggaaagsaccatctccaagcaggaagccaataaacagtccatcacagtatctcc

SEQ ID NO: 809387 - DNA, 526 bp, Homo sapiens
aaatggaaattatatacagcctgtagsctgcagagctcaggtaaagtggagcacatgaactggacactaaaacagctactgaagaaattttgtgaggaaactcacctgaggtgggatcaggtcttacccgtggtcctcctccaagtcgggtgcacccgcacaaaacaaaccgggtgttcaccctatgagattttattcggccggccacccccaatcacaggtcaaattaaaggtgatctctgtgagttaggagaactctaaggaagcaaatgcaggctttagggctagctatgcagaaagtgcatggctgggtgcaagaaagaatgcccattggtctgacagacccagtacaccctttcaaacctggggacctcgttggggttaagaaatggaatcataactctgggacccatatgtgatgggccccatgttgtaattttgtccactcccactgctgttaaagttcagaaatcgtgccttggatccaccacgactggctgaaaccggcagcccaggaccagaggac

SEQ ID NO: 809388 - DNA, 650 bp, Homo sapiens
tggccattagtagtgaaggggatgagatgtgggtgtggactgrtcctgtgctgtgcaaattgtcattagtagtgaaggggatgagatgtggatgtggactgatcctgtgctgtgcaaattgtcattagtagtgaaggggatgagatgtgggtgtggactgatcctgtgctgtgcaaattgtcattagtagtgaaggggatgagatgtgggtgtggactgatcctgtgctgtgcaaattgtcattagtagtgaaggggatgagatgtgggtgtggactgatcctgtgctgtgcaaattgtcattagtagtgaaggggatgagatgtgggtgtggactgatcctgtgctgtgcaaattgtcatggagtcacttttctcaccatagtgttagaaagagactgtaaaagttgtcagaatcaaactgcaacaatttgtgttaaaacctgggaaatggagctgggaaggccatgagggagggttctcatacacatgccttccataacaagaactgtcataaatagattctgcaaaaccacaaccttgcacaaaggccagcacaaccttaaaataattacttctccaagtacatctgcccagaggtgcctgtgcaatattacactgatgccaccctggttattgatcattttatccc

SEQ ID NO: 809389 - DNA, 525 bp, Homo sapiens
caattagaaaaaaggtagccaaattacctctaatttcagatgacataatcatatatatactaaagactcttgtaaatgctcttagagctgatgaatttagtaaagtttcaagatacaatatcaacatagaaatctcagtggggtttctatacacaaacaataaactaggtaaaaaaaatcaagaaatcccattttcaataactacaaaaactattaaacacctaggaatacatttcaccaaggaggtgaaaatccgtaaatgaacaaactatgaaacactgatataattaattgaatgagacaaacacaaaataagaaggacaatctgtattcatgaactggaataatttatattgttagaatgaccataatgcacatgacaatctacatattcaatgtcatctctatgaaaawaccaatggcattattcacagaaatattaaaaagcattattaaaatttgtatacaattgaaaataccccaaatgactaatgcagtcttgtggataaaaaacagaggtggagg

SEQ ID NO: 809390 - DNA, 634 bp, Homo sapiens
aattttatgaactgtcatgactgtagtttttggcaaggacattatcatgtcaacctgtaaataaacagacaacaataaaacatatcaaatccatggggagtctgacctrtgtccctctgtcttataagcacaaggctttgccacatccaaaatattattcaggctccagggtataaaatgcttttggactgtggaaggtaacagctctcccctcaggcaggggtaaggtatctggggaatgcagagttgtgttcataaggaagatgtcattatcgtgtcttctcctgtgcctggtagcaggtcctgaaggtgaacgtctcagatgtcagacatgggtctatcgggttaggataggtacatgtgactgacagggactgattctccatgtaatcacatgccctgtcccaggagcagctgcaggagtcagccctggacctgaatagcacacacttaccctctgcctcacctacactgttactggccactccgtcacaaccagtccttactagtggacctggatctgccggctctcagggaggggctgcaatggataaaatccattgctagtggtggtgggagtccatttgtcttgtggaaaatggcagcatttccttattttataaggcataataat

SEQ ID NO: 809391 - DNA, 264 bp, Homo sapiens
gtcacatgaaataatatgaaaattggtgggaataggggaggagacaactctgcaattctcatctgaaggaccaggaaagcctggacagaccatctccccagcctccgtgactgcaccacgtgcccacatggacactcatccctgatagggtaagaagactccattgatggggctgagcattttatgatagaaattactagagactgaygtggaggtttcaacaactaatatttataaccaaaatttaattacccccacattgtt

SEQ ID NO: 809392 - DNA, 657 bp, Homo sapiens
tgtccagagctatggactgaatgtgtatgcaactccaaaattaatattgtggaaccctaatccccagtgtggtgtaattggggtgtgggccatttargaggtgatcaggtgaaaaggttgaagccgtcataaatgagattagtgctctaataaaaagtcacgggagagcttttctctcttgcttccctgtcatgagatgatacgataaaattacggccatctgcaattcaggaaggaaacctttacatacacatgattggctgtcttgggcttcccagcattcggcactgcacagaataaatatgtcttgttaaagtcatgcactttatgacactttgttaaagcagccccaataaaataagatatctggttttactggctcagagttggagagaaatttgtttcagaaataattctacctcaaatcttactcatgtatggtttagttaatatttaaattatgttttaaacttgtttagagttgatgatgaaatgagttaagagtttggggactgttataatcaaatgaatgaactgcgaatgtgtaaatgccatgcatttgggggatggtcttttctattctgggtctttcatgcctacgtgtgaattgaaggattgcttttcttatttctgtgaagaaggccattattattttga

SEQ ID NO: 809393 - DNA, 657 bp, Homo sapiens
tgtccagagctatggactgaatgtgtatgcaactccaaaattaatattgtggaaccctaatccccagtgtggtgtaattggggtgtgggccatttaggrggtgatcaggtgaaaaggttgaagccgtcataaatgagattagtgctctaataaaaagtcacgggagagcttttctctcttgcttccctgtcatgagatgatacgataaaattacggccatctgcaattcaggaaggaaacctttacatacacatgattggctgtcttgggcttcccagcattcggcactgcacagaataaatatgtcttgttaaagtcatgcactttatgacactttgttaaagcagccccaataaaataagatatctggttttactggctcagagttggagagaaatttgtttcagaaataattctacctcaaatcttactcatgtatggtttagttaatatttaaattatgttttaaacttgtttagagttgatgatgaaatgagttaagagtttggggactgttataatcaaatgaatgaactgcgaatgtgtaaatgccatgcatttgggggatggtcttttctattctgggtctttcatgcctacgtgtgaattgaaggattgcttttcttatttctgtgaagaaggccattattattttga

SEQ ID NO: 809394 - DNA, 598 bp, Homo sapiens
ttgtaagattgtaaaagctaattttgagatataatattacttgagagtttctttataagttaagcattaatattaaatgcacactaatggaagtstagcatctgggcccctgtgacagattgacaagggtttcttgaagaagtaatccactctttagcttaaaaaattattaaaatttataaaagacctatgaaaattatattttatggtaaaagtagttataatttaatagacttatttctcagaattgagagatagttttaatttttctcatgatgttcttataaggggttattgtttagaaaattaattctttcaaaaataaaagtttttgcttttttaagaaatcactgagttttcacttggctaaataaataacttactttacaataatctgtaattccattttgtaatatcaagtgttctaaataaacctttgatatttgacctccttcacacaataaaagtctaaattcagtcatttgacctcattattcttttttgatatttgatctcctgaagccaaaaagaaacatatttagcttctttggtacaattaaattatactggaagcaatgtcaaatttgaaatggtgttt

SEQ ID NO: 809395 - DNA, 516 bp, Homo sapiens
ctctcttggaggtctaagggaccccaggaaaaggragccattatcccaggcttcagttgcatgaccatttggagtttgatggtctgaaaatgagaagaggcaaatctggttattagaagacatgtatgaaaaccaaacaaggtggcaaggacagcttgaaagaaaattccaaggctgctgacattcctagataactgcagctgtagttatgcctgctaaggtttgggcgcatggggcttggcttttgtcagctccctgggatttattttcccaaacaaagaaacctccaggttaggggcaccctattcattcccatcacctggcatgatttaaaggataattgcttagaattaaaatattgatccagattttttatattccccatcgctttttgtttcttctgggctgtagccagagatcattgattggcgctcaggaataagcagagttagtctaaaatgcaggcaaatacttaaacaactgaagagattagaatttaaagacaagtgtatgata

SEQ ID NO: 809396 - DNA, 585 bp, Homo sapiens
attgtctctgccactccttttacataaatgtattaaaaagtagttttaagaccacagcaaaattggacagaaggtgcagagagttctcatgtgcccctgcttcaccatgcacagsctttcccactgtcaccatcctgccccagagtcatcaataagttacaatggatgaacttacatgggcggattggttctttcctcttctggtggtctcttggcataccaagcccaaattatcttgaagcaccataggttctactgtaatgcctaaccttgttttttactctagtttgctactttaaattttccctttttttgtctccttaattgccagccatgtttcccatatgaatagactctccctggctgggaaagctgggcaaactccatttgaccttttgatttataagacattaagggctccttacccaaccctcttcttcaaggaattaacctgtgtaagcagatcctcagcatttcaaaggagcccaattaactgataaggtactggaacaaacaatgtatgaagttcccaggatttttctcaaagagataacaacataaagccttgagttcatgcccagcata

SEQ ID NO: 809397 - DNA, 580 bp, Homo sapiens
tggtttttctccgtgtgcagagaccttgagtagagcctgtctggcccttatccacactatctcttgtgtccccgggaaaaagcagagatttgcctgactgcagaatctggggtaggagtctgctcagctcacagcctgcagagaagcccagtgaagttttatggagtcagagagctttcccatgtggggaacctctagcttacccatggccagagattactggtcagctgtaattgagagtttaacaattagagcactcagaagcctatctcatcgcagcttcattatgtaacttaccaccattagactgcggtaataactcaatcttgatttttctgaccccattttctcatcttattcatttgtaaattgggttatagaaaatgttatgttttagactctgattcaaatctcagaagtttatgaactcatcaggaataatacaaaatgtgtctagttttggggaaatgtaaatgaatgtccatgcagtgtgtgtgtttgttgtgtggggatatgtcagtcacaccccaatgaacatgatttctgaattayatcatcaaactacaattagatttgctga

SEQ ID NO: 809398 - DNA, 550 bp, Homo sapiens
atccagggttgcagaatgactctagaacctcccacatctcagctttctgggtggaggcacctggtggcccagggaatataaaaagcctgaatgatgcctgcgtgatttgggggcaatttataaacccaaaaggacatggccatgcagcgggtagggacaatacagacagatatcagcctgaaatggagcctcagggcacaggtgggcacggacactgtccacctaagccaggggcagacccgagtgtccccgcagtagacctgagagcgctgggcccacagcctcccctcggtgccctgctacctcctcaggtcagccctggacatcccgggtttccccaggcctggcggtaggtttggggtgaggtctgtgtcactgtggtattacgatttttggagtggttattatacccacagtgtcacagagtccatcaaaaacccatccctgggaacctkctgccacagccctccctgtggggcaccgccgcgtgccatgttaggattttgactgaggacacagcaccatgggtatggtggctaccgcagcagtg

SEQ ID NO: 809399 - DNA, 628 bp, Homo sapiens
gcttgtctaaggcaagaatccaagtagggacaggtgagctcgtctcagggaagggtccaggtggggacagttgtgctcatctgagagaagcgtygaagtggggacaggtgtgcttgtctcaaggaagggtccatgtggggacaggtgtgctagtatcaagaaagggtccacatagggacaggtgtgcttctctcagggaagggtgcatgtggggacaggtgtgcacatcggagagaatggtccacctggggacaggtgttcttgcctcagggaagagtccaccttctcagggaagaagtgtgctcctctgagggaagggtgcacatggggacaggtgtgcttgtctcagggaagggtccatgtgggaacaggtgagctcatctgagggaagagtccacgtggggacaggtgagctcatctgagggaagggtccacatggggacaagtgacctcgtctgagggaagggtccacgtggggacaggtgagctcgtctgaaggaagggtccacttggggaccggtgtgctcctctgagggaagggtccacgtggggacaggtgtgctcctctggagggaagggtccacgtggggacaggtgagttcatctgaaggaagggtccacatgggga

SEQ ID NO: 809400 - DNA, 542 bp, Homo sapiens
catttgaacttttttttcagcttttctgttcctactgttgtttgcattatcttctcctagtagagcgtttccaaagaaccacggtggacttacaactaactcaactcagtcccaatctgatagcccagtcttagcagagatactgacctactttttcctgtgatttctgggcctggcctgataattttacctagcacagtgttctggacaaccaatatcaatcaactgaagttggcaggggatgaaactggttgccatcccactaaacttctgcaggtatgtacactgactaaccttatgctattcttgatgtctctaatggctccctctttattctgagctttccatctgttctgaagactgcccttctatttgtttatctgctcctgaagcaatttccccatccaacacctgacagtcgggggttagagccagaaccaagggtatgtactggttgcactaggccttacgatcacataccyactggctctgtccatatggacgcttcagaggagaaaatgctgcaagttaaagaagttaaa

SEQ ID NO: 809401 - DNA, 566 bp, Homo sapiens
aatggtgcaaaagcaatacacattcagtagaaactataaccccatctttggtcctaaggcgctcctaaacttttgatggggttacctctcaatacacccactgtaaagttgaaaaatcattaagtcgaaagtaagttagggattatctatactttttagggacagaagccagaaatgatacaagttatgagattgagcaactatgtggctaataaaaaggcaatctttatcattcctatttgaaatccagcattgatttctcaaatagttgaacagaatttaaatattagttttctcagctaacaaatcacaagcgaaaagaagcttcacttcctttttaacgaagacaaaagaagccagttagaaacttactacattgtgttagattttttaaaaagccacagttataccaaatgtatttactttgtgaagtatatccttcggaataaatgcattcctggaaagragaaacagaagtcagtccttaattagctagttgaggtactcataaagaacaagaataagccaacacttgaaatgcagaaaactcagactgatttttcaat

SEQ ID NO: 809402 - DNA, 496 bp, Homo sapiens
tttttagatatccatattatgtaaataaatttcattaattttaacagctatataatattccactctatatcttaaattatttatccatccccctactgttgacagttgttccctccttttcaatatttacaaacagtacagtaaaaaaaaaaaaaaacctttctacagtctccttgtggaaagtctccctgtacctggatttctataagtgaaatgggctgggtcatagagttcctaagtcttcagctctatcatgcacagttggccctctgtattctcgggttccacatccttggagtcaaccaaccacagagcacaaatatttgaaaaaaataaaaataacaatacaacaaaaaataatggtaatagaaaaccaatccagtgtaaygactatttacacagcacctacattgtattaagtattgcaagtaatctagagatgattttaaatatatgggaggatgtgcataggctatatgcaaatacaccatgttat

SEQ ID NO: 809403 - DNA, 496 bp, Homo sapiens
tttttagatatccatattatgtaaataaatttcattaattttaacagctatataatattccactctatatcttaaattatttatccatccccctactgttgacagttgttccctccttttcaatatttacaaacagtacagtaaaaaaaaaaaaaaacctttctacagtctccttgtggaaagtctccctgtacctggatttctataagtgaaatgggctgggtcatagagttcctaagtcttcagctctatcatgcacagttggccctctgtattctcgggttccacatccttggagtcaaccaaccacagagcacaaatatttgaaaaaaataaaaataacaatacaacaaaaaataatggtaatagaaaaccaatccagtgtaacgactatttacacagcacctacattgtattaagtattgcaagtaatctagagatgattttaaatrtatgggaggatgtgcataggctatatgcaaatacaccatgttat

SEQ ID NO: 809404 - DNA, 605 bp, Homo sapiens
tctaacagtcacgtggaaggtaggcaggcacaaagctactcgtggggagaaagtgaaattttctaggtgacctccaaaagatggcaagttgattggcagaggaggaagatgtccctgttgcttctttcctatcagtgcctgctgaccttcagggcagatatgaagaggtgtcccagtggggcacaacctcaacaagtggagagatgcaagtaactccatgcacctttccaccttcctcttcaccacttcctccccaacacccaggatgcctaagaggtaaaagctccacctctgctgataataataggctggccttgaaagggactattccaggctcttctacggactgttttaatggatggagctggaagccattatcctcagtaaactaactcaggaatagaaaaccaagcaccacatgttctcacttaaaagtgggagctgaacaatgagaacacatggccacacgtaggggaataacacacattggggcctgttggygggggtgggggagtggagggagagcataaggaaaaatagctaatgcctgctaggcttaacagttagatgatgggttgacaggtgcagcaaaccatcatggcaca

SEQ ID NO: 809405 - DNA, 581 bp, Homo sapiens
agggaaatctacaattcagggatgtcatgattgggttgctgaaagaataataagkccacacacggtggatcatgcctgtaatcccagtacactggaagcccaaggtgggcagatcacttgaggtcaggtcaggagtttgaggccagcctggacaacatagtgaaaccctgcctctactaaaaacacaaaaaagtcagccaggcgtggtggcgcgtgactgtagtcccagctactcaggaggctgaggcaggagaatcacttgaacccaggaggcagaggctgcagtgagctgagatcgcatcactgcactccagcctgggcaacagagtaagactccatctcaaaaataatattaataataataattattattatttagtgatgttcaaatatctaatggtttcattaataagtaggagaaatacctgatgatgaagctcctctagattttctttctttttaaaattatcagaaaagtagaggcaacgtaataaaatgaccaaatggctgcattacaggaccctgcaaatagagactattgcaaatggagcactggaggatgacaatgctgaatctggcct

SEQ ID NO: 809406 - DNA, 581 bp, Homo sapiens
agggaaatctacaattcagggatgtcatgattgggttgctgaaagaataataagtccacacacggtggmtcatgcctgtaatcccagtacactggaagcccaaggtgggcagatcacttgaggtcaggtcaggagtttgaggccagcctggacaacatagtgaaaccctgcctctactaaaaacacaaaaaagtcagccaggcgtggtggcgcgtgactgtagtcccagctactcaggaggctgaggcaggagaatcacttgaacccaggaggcagaggctgcagtgagctgagatcgcatcactgcactccagcctgggcaacagagtaagactccatctcaaaaataatattaataataataattattattatttagtgatgttcaaatatctaatggtttcattaataagtaggagaaatacctgatgatgaagctcctctagattttctttctttttaaaattatcagaaaagtagaggcaacgtaataaaatgaccaaatggctgcattacaggaccctgcaaatagagactattgcaaatggagcactggaggatgacaatgctgaatctggcct

SEQ ID NO: 809407 - DNA, 661 bp, Homo sapiens
gtagccacgtcctggttacagtggatcctgggcaagacccagtgctgtgctggcttcaagtctgacccagtgtagtcccagtggtggtggccacaggggtacttgtgtcaccccactcccagctccagatagttcagcaaagagagaatacatttgtttgggagaaaataaaggaagagaaaaagactatctctctgataatccaaataattcttcaggatcttatataaaaccatcaaggcagtacctccatgagtctgcaaaacatggggtttctgcaggccaccaccgacgttcgcttaaagcccgagggctcttgaatacctggaaggttccaataaatatgacaacaaacaagcccacactgcaaagactacaataaatacctaactcttcaatgcccaggtaccaacaaacatccacaagcatcaagaccatccaggaaaacatgactttaccaaatgaactaaggcaccaggaaacaatcctggagaaacagaggtatgtgacccttcagacagacaattcaaaattgcagtgttgaggaaactcaaagaaattcaagttaacacagggaaggaactcaaaattctaccggatgawtttaacaaatagattcaaataattaaaaagcatcaagcagaaattctggagttgaaaa

SEQ ID NO: 809408 - DNA, 565 bp, Homo sapiens
caggaaacatctcgtgcaaaggtgttgaaaaaggagtgtgcctgggtatccagggagtagtggtcaagcagtgagrtccaagaacagggagtggggtagttgtgggaaatgagatttgagagggagaaggggcagatgaggtatagaatttccctctgggtgtgaggagacccacgaaagaagtccaagctccaaattatatttaacagtatctctggcaaaaataaactggtgggggagcggcaaaaatgaaaaggggaccaggaaagagttgatagtatttcagaacagggtggtaggaatggaggtgcgataacctggatatattttaaaagtagagtgctgaggatttactattggaatagatatggaaggagagaaaaagaggagtgaagggtaactccaaagttattggctccagcactggaagggtgaaatgccaagattggaaagagtacaagaggagaaaattgggtgtgagacgagagggaatcagctcagtttgggacatagtgaaattgaggtacctattagatatacaaattattttaataagatccaggta

SEQ ID NO: 809409 - DNA, 565 bp, Homo sapiens
caggaaacatctcgtgcaaaggtgttgaaaaaggagtgtgcctgggtatccagggagtagtggtcaagcagtgagatccaagaacagggagtggggtagttgtgggaaatgagatttgagagggagaaggggcagatgaggtatagaatttccctctgggtgtgaggagacccacgaaagaagtccaagctccaaattatatttaacagtatctctggcaaaaataaactggtgggggagcggcaaaaatgaaaaggggaccaggaaagagttgatagtatttcagaacagggtggtaggaatggaggtgcgataacctggatatattttaaaagtagagtgctgaggatttactattggaatagatatggaaggagagaaaaagaggagtgaagggtaactccaaagttattggctccagcactggaagggtgaaatgccaagattggaaagagyacaagaggagaaaattgggtgtgagacgagagggaatcagctcagtttgggacatagtgaaattgaggtacctattagatatacaaattattttaataagatccaggta

SEQ ID NO: 809410 - DNA, 640 bp, Homo sapiens
ataaagtagaaatcacttaccaggatcctggacacatttgcctcaatctagtaccaaactaaatcctacamacacttcaagctacttccaggagccctgaagtcttttcatttaattaagcagccttgaacccaaattatgcctaagcttccagcaagttttcagagtggtaaggaaacccagacagtgaagtagaaacctagaagttcactgggatgagtacaggtaatacttggtgtcccccctttaacccaactgcaaaccagcctgtccttggaacttttttttcccctctagaggaaccattctggaagggaagcactctgcttagcatatgctctgttaaaggcttcagttaaacatacatgcacccctagaaagaaatatgtgcaaagcattccagattatgcacgtgcatctgtctccttaaactgcactccagagactaaagcagaacacagaggctgtcatggatattacacagtctacagcgagtgaatgacttccattgtgacagaaaagcaactgtacattatacatgcatacaattcttttcctcttaaaactctactacccacacagtaaatattgctataaacccacagtgggccaagaaaaacaaactttgtatacactcctt

SEQ ID NO: 809411 - DNA, 643 bp, Homo sapiens
aaggatttctgacttcaagtactgcactgcttagagggtatccataaacaccaattttaagagtaagaacactgcttgcaactcaggttcacacgtgactttgtaccaggtggctttgtatatagaacagaaaaggccttgactcccccaaattcatattctctaacaaagtggcatccactgccatgtcactgtatcattcttgctatcaatatccacaacagctatcacttttacaaacggctcccttcatcatggaaggaggaagaatgcccttggcaagggcagagtccatgagttaaattcacccttctggaataaattatttagtaccacttaaactctgaaagctttgagccacctattctgtggtttgtagcattgtcttctaagtttacaatttcatgattgtgaagcgacaacttaattccctagtgcaaaatcaatacaatttaaatttgctgtcggaactgacattctccagcaaactaaaagatttcttcttccaatgacatgagatcattttaatctgcttttacaaaaaggtactcaggaactattccaaaatttaggaatcaattcttgctggccataaagcaattgcccccacccctcttaaaygtgtgggatccctggaaccacc

SEQ ID NO: 809412 - DNA, 682 bp, Homo sapiens
atttggacctctatctcacaccatatacaaaaattaactcaacatagatcaaagacctaaacagtgtaaatctctgtgaccttggattaggtaatttcttagatatggcacctaaagtatgagcaaccamaggaaaatagataaattgtacttcattagtattaaaaacctgtatttcaaagataacaatgagaaagacaccttacagaatgaaagaaaatatttgcaagtcacatatcgaattatttagtaccccaaatccataaagaacatttacagctcaacattaaaaagacagataacccaatttaaaaaacaaacaggagctagaagctgtcatcctcagcaaacaaatgcaggaacagaaaaccaaacattgcatgttttcacttgtaagtggaagctgaaccatgagaacacgtggacacatcatggggaacaacacacactggggcctgtcagaggggttgcgaggggagggagaacatcagaaataaaagctaatggatgctggacttcatacctagatgacgagatgatctgtacaacaaaccactctgacacgtttattaatgtaacaaacctgcacattttgcacatgtaacctgggacttaacacaaacgttgaagataataaaataaaaaatgaacaaagaatcttaacagatatttctccaaagaa

SEQ ID NO: 809413 - DNA, 600 bp, Homo sapiens
atacacataaaagatatactttaaagcattttaagcgtataattcagtggcgttaagtacattcactgttgtgtaaccatcaccactatcaatttccaaaactttctcaacccctgaaacaaaaactctctaactattaagcaaaaacccttattttcccctaccctcagttcctcataacttttattttacttttcatttctaagaattctatatacctcatgtaagtggaatcatacattatctgtcctttttttgtctggcttatttcacttgtcttcaatgtcttcaaggttcacccatattgtagcatgtatcagaacttcattccttttcaaggctgaataatattccattgcatgtacatatcatattctgtttatctgttcatttgttgatggactcttggattgttcccaccatttggctattgtgaataatgcagctatgaacatgggcataccagtatctgtttgtgtccctgtttttaattctttggggtatatacycaggagtggaaatgctgagtcatatgataattctacatttaactttttgagaaactaccaaagggttttccacagcagcagtaccagttta

SEQ ID NO: 809414 - DNA, 537 bp, Homo sapiens
ttctggttcctggtagggagagggatccttctasaaggaggtagaataaagtttccactaaatttaaagttatatcttctcccttggcattttcagcttcttattccagttgaccaagatgcaataaagaagccctcattaatgaggatacatggttgctatgatattataagggcagggaagactatgtcctgtgaccctttgctaggggtttctctggctactaaagcatgcttgtccatgttctggagaagttaacacctcccaggagaagctctgttccaaagctgatggaatttgttgtataaacatctcatttttctcacccttacttaactccaagacacatgatctacactgttttccaaagttcctgagaagggttaagctacagtagtccttgcagtacttttcttgaaaacacactcttctacttgtgagtgagcttctctcccttctctgtcttcattccctactcccttacgccttccaaataaagttcttgcactctaatccttgtttcagtgtctctaggag

SEQ ID NO: 809415 - DNA, 537 bp, Homo sapiens
ttctggttcctggtagggagagggatccttctagaaggagstagaataaagtttccactaaatttaaagttatatcttctcccttggcattttcagcttcttattccagttgaccaagatgcaataaagaagccctcattaatgaggatacatggttgctatgatattataagggcagggaagactatgtcctgtgaccctttgctaggggtttctctggctactaaagcatgcttgtccatgttctggagaagttaacacctcccaggagaagctctgttccaaagctgatggaatttgttgtataaacatctcatttttctcacccttacttaactccaagacacatgatctacactgttttccaaagttcctgagaagggttaagctacagtagtccttgcagtacttttcttgaaaacacactcttctacttgtgagtgagcttctctcccttctctgtcttcattccctactcccttacgccttccaaataaagttcttgcactctaatccttgtttcagtgtctctaggag

SEQ ID NO: 809416 - DNA, 624 bp, Homo sapiens
gtgttaaaccaaagaggaatcaattaaaaaaaaaatacagtgtgtcccaaaacacgcatttgagttgggagcagtgattgatccaacatttatagagaaccctgcagagtccctgacattgtgggaagaatagaagtagaatgagcccagaaaacccgtgtttttattttagatttctttaaatacgtgagaatacaatggcatataatgcaatattttcccttctcaaaaatatatctagaaagaaagagatggggaaatgcacagcagccgttggtggaggttgaccctggaagctaattctagaataacttaaaaatgtaagttgttcaggtttcccttttatagctgttctgagtagcacagaaactcaattttgcttggtagaaggtccttgccttgcttcttagattccacagtcatttcttaggctagctttactatcatttgattcagccaaagatgatgtcttatagaaatgttcaataaaggcctcattcctaagcagattctacttgttcaagtttatgagttacaactacctgaagtstcagaatcatagcagtaatgagcataaaggcagtggagaccctgtgataagttttactgaaatgagaaagataa

SEQ ID NO: 809417 - DNA, 596 bp, Homo sapiens
acctaggagtcagcaataatctgcctctttccctctctccccagtagcaactccgacaggcactgccttcaaaatacatttcaaaagcaagcattcctcaccttcactattatcccaggtccaagccaccactgtctctctctgggactactaactggtcaaatcatgagcctctgcctccttacaatatattctcaaaacagcaaccagagtcatccttctgaattgtactcagttcctgccattcctcagtccaagccttctaatggcctcctatcacatctaatacaaaaaagggacccagtgacctaagacaataattagcaacagactaacctttatgcaaaaggtgacgtgaggcatcatcgaaggtaagggagtgctcactgccatgacaaatcagatgacacagcttacacttcatagtcaatcctgaggggctgtggaagaatctaggaaactcaatgacatttcacccctaaatcaacaggtgtgcaaacagaattatcctcttatctaatcagatctccrtaagtaccctgaaggcttcaaggaataagagtgtgcctgtttttgaccacggattatttacttgc

SEQ ID NO: 809418 - DNA, 563 bp, Homo sapiens
gcctcataaaatgactaacttcaatatttactttcatttctaaaattttttaaatcaaccactaagactttaacctccccctacacacgccaagaagaaatgctggctctcccctgcactggccacacctgtctttagacagcacccctttcctgctcgacggcctcctgcccccatcatgtgatcaacctctggcatcaggaaggcagtggtggctctgtgccatgaggtccctctttgtaggctgtggctatttttgggctggcagcccctctgattcctgacttggccctagataatcatgaggccgcctttagagagaaacccttcagaagccaggcaggtccctgtgggattagcaacactccactgctaacacagcaagtctcaggtcctaagtgctataaaggccctccaaggacagcgccctctaacctgatggccctcggttggccagacccaagsctgggctcccatttcaaatgggcaagtccgtggttttatggggctaacaaatcaaagctgacacagatatactactcatacatggattttagccagga

SEQ ID NO: 809419 - DNA, 505 bp, Homo sapiens
aagtcctttagtgtttgtcaaaactactgtaaagatactacctgagactaggtaatttataaaggaaagaggtttaattgactcacagttctgcatggctgctgaggcctcaggaaacttacartcactgtggaaggggaagcacgcatgtcttacatggcggcaggcaagagagaagtaagtgcaaccaggggaaatgccatcatatctcatgagagctcactcactctcatgagaacagctttgaggaaaccacctccatgacccgatcacctcccaccaggttcttcccttaacacctggggatgacaattcaagatgagatttaggtggggacacaaaagcctaaccacatcaatattcatcatggattcaaagatttcttgattaaaattacgagatattaagattaattatgatgattataaaaataataccaaaccttgattatgtaccatgcacgattttagtcattttacactttacatgtattaattgtttaaat

SEQ ID NO: 809420 - DNA, 454 bp, Homo sapiens
ggtctcgaactcctggcttcaaacaatcctrtcctcccaccacagactcccaaagggctgggattacaggtgtgagctaccacgcctggcttagtttctaatttctgagttttgtagaaaacaatcttaaaaaaaacaagttatgagtagtctgttaataacagtatatttaggtggaacttacagttttatcagacggaatagtaaaatttatctcacccatgaagctaaaatgaaagcagaaatgttaacaccaaagttactacaggttatcctgacttagagcatgataaatcattctggacatctgaaaatgaacccaaaatagtaatcttgtaaaaatctttattattatactttaagttctagggtacatgtgcacaacatgcaggtttgttacatatgtatatgtgtgccatgttggtgtgctgcacccataatcttgtcaaaatct

SEQ ID NO: 809421 - DNA, 480 bp, Homo sapiens
tctttggttaatacatattcctggctaacagttgctgtattgaacacagaggaacagacacacctctagaccttcattcttctggattttgcaaacccgatagtcaatttccagctcasctttgatagtaatatttccaaatgataaggaacaggaaatgtcgcaacaagttctcctgacaatgaggtcctgtgtgcctaggttttgtagaacatactgaaaaagtaggtggccatgtctttgatatgctttccaaggtgcatccaactacagtctccttcctttctgcccagtaattcccatcagtgaacttaggcccaaaatcaataaagctgttttttataaactattattaaagggcatttccactacctgagaaggaagggaagacgttctagctcacccttattagcaccgtaggaggcactcgtgaatcaatacctgaaaatgtacaagtcccagacaatcagtgctcagagc

SEQ ID NO: 809422 - DNA, 337 bp, Homo sapiens
cagaaagagctaggaggaattgttgaaaacctcttacatttaattcctaatagctaaggtatttctgcacaaacaaaacaaaaaaacctccaaaagaaaacaaaacaaaacaaaaaaaaccacacctgattggtctgttacacaattctgcagacaaaaggacaaaccagactgcagagtttatttagaaacattgtggaacattctgagctagaaaygcaacaaggagtatttcctttagggactgaaacagtattaacttatagcctgcaattagacccagtagctaagccataacctaattacttaaaagtaagtagcagtggttgccaaactg

SEQ ID NO: 809423 - DNA, 676 bp, Homo sapiens
tgtttagcctcatgaaagacacacagaaacacaaggaaggcactgtttctgcctgcctstaatgatttgcagtgtagaaagattaaatcttaagcaactttacaagatatacaaagaataatagaggagatgtcataaggcaacaataactaatggcccaaattacagactaggcagagccggggcatagtaagaagtcagaggagggagtatgctatgcagtaggggtcaggtaagatttaaagaaaagtactgaggcatgaaagacaaggtgtgtagataagcaaggaaggagaattgggggagctagagggaactcattgaaaccccaaaaatcattgaggaccaccagttgcaaggttctggaccaagcctgggtgggcttgatgagtggacttgattctgacatcagggtggtgttgagttaggaaaattagtgctagagttggatttcacacttagatgaagggaaaatgaattttgtcaagggggatgctatttgactagggtctgaggggttgagaaatggtttttgcagtccaaaagtacagatggagcaaatgcaagcaggtatgaagcctatagtggatttgggaaggagaaacaaagactcaaaaatgtactgagcacctgctctgcaccagcattttgttgaggatttttgaatctatgttca

SEQ ID NO: 809424 - DNA, 642 bp, Homo sapiens
ctatagtggatttgggaaggagaaacaaagactcaaaaatgtactgagcacctgctctgcaccagyattttgttgaggatttttgaatctatgttcattaggaatgtttgcctgaaatttccttttcttgtagtgtccttatttggctttgatactagaataatgctggcctcataaaatgagtttgagttctattgcacaatatggtgacaatttatattaagatatgatatagtacaaaatatctaaaacagaggcttttgaatgttctcaccataaagaaatattaagtgcatgaggtaatggtaacactaaatacccttatttggtcattatacaacatatatatattaaaacatcaagttatacctcataaatatatgtaattataatgtatcagtttttaaaaatgaggtggctgggaatagtggatttatttctggattctttgttctgctccattagtctgtgtgtctgttcttatgccaataccatgctgctttggttgctatagctttatagtataatttgagacagctaatgtgatgcttctagttatattcttcgatagtgatggattgctttagctattcagggtcttttgtagttctatacacattttagaattttttttctatttct

SEQ ID NO: 809425 - DNA, 588 bp, Homo sapiens
accagcattttgttgaggatttttgaatctatgttcattaggaatgtttgcctgwaatttccttttcttgtagtgtccttatttggctttgatactagaataatgctggcctcataaaatgagtttgagttctattgcacaatatggtgacaatttatattaagatatgatatagtacaaaatatctaaaacagaggcttttgaatgttctcaccataaagaaatattaagtgcatgaggtaatggtaacactaaatacccttatttggtcattatacaacatatatatattaaaacatcaagttatacctcataaatatatgtaattataatgtatcagtttttaaaaatgaggtggctgggaatagtggatttatttctggattctttgttctgctccattagtctgtgtgtctgttcttatgccaataccatgctgctttggttgctatagctttatagtataatttgagacagctaatgtgatgcttctagttatattcttcgatagtgatggattgctttagctattcagggtcttttgtagttctatacacattttagaattttttttctatttctgtgaag

SEQ ID NO: 809426 - DNA, 588 bp, Homo sapiens
accagcattttgttgaggatttttgaatctatgttcattaggaatgtttgcctgaaatttycttttcttgtagtgtccttatttggctttgatactagaataatgctggcctcataaaatgagtttgagttctattgcacaatatggtgacaatttatattaagatatgatatagtacaaaatatctaaaacagaggcttttgaatgttctcaccataaagaaatattaagtgcatgaggtaatggtaacactaaatacccttatttggtcattatacaacatatatatattaaaacatcaagttatacctcataaatatatgtaattataatgtatcagtttttaaaaatgaggtggctgggaatagtggatttatttctggattctttgttctgctccattagtctgtgtgtctgttcttatgccaataccatgctgctttggttgctatagctttatagtataatttgagacagctaatgtgatgcttctagttatattcttcgatagtgatggattgctttagctattcagggtcttttgtagttctatacacattttagaattttttttctatttctgtgaag

SEQ ID NO: 809427 - DNA, 555 bp, Homo sapiens
ttagatgataggttgataggtgcagcaaaccaccatggcacacattgacctacgtaataaacctgcacatcctacacatgtaccccagggcttaaaataaacagaaacagaaacaaaaaaaaaggaagtaaaaaataagcctaaaaggaaaaagtaaaattttttctatttgccgatgacgtgatcctacatagagaaaactcaaaacacgtcataaaaattgttaaatccagtaaagtagcaggatacagaatcaacatacaaaaatcagttgcatttctttacaccagtaatgatctatctgaaaaagaaatcaggaaaacacaatccatcataatagcatcaaaaagaataaaatagagggtggaacaaggtggccaaatagaaccttccagtactcattcccctgcagggacatcaagttcaacaaatatcctcacgagcccaggcggcacagtgtgaagacagagtctacctccttaggaagtaaaaggaatgttagtgtgggattwtgcattggaggctagtgctgaccccactgcagtggaacacatc

SEQ ID NO: 809428 - DNA, 633 bp, Homo sapiens
actatggcacatgtttacctatgtaacctcattctgcatgtgtatcctggaacttaaagtaaaattaaaaaaagagaaaacataaatggctaattaacaaataaaattgtgtttcacctctaaaaataaaaataaaacataaaaagtcttcaccaaacagttggcatcttttgctcttcttccttctaccagaggagaacacagtaagaaggctgcaccagaggctgtggtcttgatcttggacttaacctccaaaactgagaaaataaatatctgttctttataaatcacccaatctcaggtactgttatagcagcacaaatggactaagacagtgactcccaaatttatgtcactagctcagacctgtcccctgaatttagattcttatatgtagttgcttctcagcctcatctactttggatacctaataggcatcttaatatgtcatgtctaaaaaggaacttatgttttctccgtcccaatatacactgtccctttcccaaatcttccccatctcagtaaatggcaatcccatctttctagtttgcttaggccaaagaatcttacagtcaatttgatttttctctttcttaccacaaactsaatgcaccagcaaatcctattagcttt

SEQ ID NO: 809429 - DNA, 618 bp, Homo sapiens
aagaatcttggaaactacacaaacacatggaaattaaacatctcctgaatgatgaataaatcaatgaagaaattaagaagaaaattgaaaatttatttatayaaataaaagtggaaacactacataccaaaatctatgggctatagcaaaaacaatactaagagaggagtttatggcaataaactcctacactgaaaagtagaaagactttaaataaacaacttaacaatgcacccaaagtagctagaaatgcaagctaaaaccaaaccgaaaattagtagaaagaaagacataataaagatcagagcagaaataactgaaattgagacaacaaaatttaaaaatcaagaaaactgaaaagttggctttttaaaaaaataaacaaaatggacaaaccttgaactagactaagaaaaaaaagagagaggactcagataagtaaaatcagaaacaaataaggagatgtaataactgagaccacagaaatacaaagattcattagagattatcatgcttcttttccatctgctggctgagcctggggtttttatgggcacaggattgggggcagggctggccaaggatggttgtggaaaaggtaacatttgagcaggaaac

SEQ ID NO: 809430 - DNA, 494 bp, Homo sapiens
aatcaaaggtgatatgtataaatgcatatcactatgattggtaatagtaggttggtgcacctagctttataagagcagtcatctgaaataacgtgacagacaacctaagtcttttgacgaaattcgtaaaaaaaacccacaatggatcaccatacatcaccactgcaccagttgcccaaagagccaagatttcgaaaaattttatctttcacaaaagcagctgtacaaaaggacatctcttcatttactgatgatttcaacatttttatccacatgcacaatgcttacacacagtcaatgttgtataaatgcaccctcatgaagtcatatttgcaagaaatgcataaaataaatcaactttctgaaagtctttacacaatttatacttcccatactggaagtgatgtgacggtgaaatacaaagcayggtgaattgtaaaaaataatgataacaatctaaaataatgggaaaaaacttaaaaaaggaaaagcaa

SEQ ID NO: 809431 - DNA, 559 bp, Homo sapiens
tatgttaagtgaaataaaccaggcacagaaagacaaacatcgcatgttctcccttatttgtgggatccaaacawcaaaacaattgaactcatgctcatagagaggagaaggatggttaccagaggctgggaaaggtattgggaaggtggaaagggaggtggggatcggtattgtataaaaaaatactggaaagagtgaataagacctactatttgatagtacaatggatgattatagtcaataataacctaattgtatattttcaaataacataaagagtgtaattggattgtttgtaactcaaaggataaatgcttgaggggacagatacaccattctccatgatgtgtttatttcacatttcatgactgtattaaaacattttatgtaccccataaatatatatacctactacatacccacaaaaattaaacattaaaaaaagatatgtacatttttaagacacaatgctatgcacttaatagtccacagtatagtgtaaaagtaacttttatatttactgggagagcaaaaaaaattgtgtgacttgctttattgg

SEQ ID NO: 809432 - DNA, 468 bp, Homo sapiens
actagagatttgagaaaagaatgaagcatgttttgcattttggaaaatagaaaccatggcaccccatctctctctctctctctctctctctctctctctctctctctccctccggggtgtgtgtgtgtgtgtgtgtgtcttaaaccctggcctgcatctcctttttttattttttaaaaataaataatttgggttttatttggtttaataaataaaagttttatttataaaaagtttactttataaaactttttataagttttatttataaaaataaaatgttataatttctatgtgtgcaaaaaaatgtatgcacctgtattctttatttccagtggaaaatggcaagattcagacagtttcccagatgtctccaaacctacttgttctagaatcatgtmacacaatatatatagacacaagtaatatctatttttttcctttccatgtacttctaacagtccactt

SEQ ID NO: 809433 - DNA, 508 bp, Homo sapiens
ttctcttcagtgaagtgagtgatatggtttggctttgtgtcctcacccaaatctcatctctaattgtaatctccatgtgttgagggagggacctgtaatcctcatgtgttgagggagggaggtgattggatcatgggggcagtttcccccaagctgttcttatgatagtgagtgagttctcgtgagatctggtggttttataagtgtttgacatttcctcctacacacattatctctttcacctgccaccatgtaagatgtgcctgcttctccgtctgtcatggttgtaagtttcctgagacctccccatgtggaactgtgactcaattaaacctctttcctttataaattacccagtctctagtagtacctttatagcggtgtgagaacgaactaatacagtgaggraaatgctattagttgctgtaaggaaaaaatgagataatttatgaaaagcacttagtgctaagcacagagtaaatgctcaataatggtagttcttgggtac

SEQ ID NO: 809434 - DNA, 522 bp, Homo sapiens
gagtaaatgccaggtgaggagcagcctaaacattcgtcctcacaaggctgtaatacagcacccccaatacccaagactggcrtgatttaagagaagaccaagttaggaccaatgatttcaattcctctagccagtaatgggccatcctgctggtgtcattagagaccacataaaatttctgaacttctaccccaactccccatttcccttcacactgggacagtgtcagggcagacctcgtgaagattcaggactttcaccatcatctaaagtaataaagccacaccttctgtagcagtagtggagatcccgtaggaagccagactccttccagcaatagcaatgagcctcccttccttcagtgtcaatgaaaatcaagtagagaacctggacttttaccatcaccagacaagatggtcttctccctgcccctggcaggacaatgtcagagaaaaccagtcttatttaaatggtaggtttaaataagatccagatttttacaaaacaatctccttgtttaat

SEQ ID NO: 809435 - DNA, 454 bp, Homo sapiens
tgggatagtactcaacaataataatgaacaaactactaatatatgcaactatctgaatgctcttatgtcaagtaaaaaatccaaaygcaaaagattacatattgtattattctgttcacataactttcttgaaatgacaaaattataaaaatagagaatagattactagttaccaggggttaagaaaggaataggggctggagagaagtggttgtggctataaaaggtcaacttcagggatcctaggggttacagaaatgttctgtagctttgctgtatgaacattaatatcttggttgtgatactgtcctatagacttgcaagatattatcattgggggaaactgagtaaacagtacatagatatctctataatgtcctacaactgcatatgaaaactataattatctcaaaatttaaaaactaattaaattgtattgctaagaatgaagcac

SEQ ID NO: 809436 - DNA, 628 bp, Homo sapiens
agactttaagaaacttttggggatgttataaatatctatcttgattgtggtcataatttcataattgtatacatatgtcaaaacttataaaatattacattttaaatatatgcagcaattatayctcaataaaattgttaaaatatatcaatatatttaactaaatacaaacatcaataaataaatatgatagatgtccaagactccaaaatataaataacaaaacacatttgagagaaattaacttgaatctaaataaagtggaaaggtatactaggttcataaattggaagacttaatagtgttcagatgtgaatttctcccttaggtaatctatagattcaatacaaaccataaaatgtctgtgtgtgtgtgtgtgtgtgtgtatacacacacacatagatatatatggggggtataaattgacaagctatttttaaaatgtctgtgataatgttaagatgtagaacaaccacaaacagtttgaatatcaaagttgccgtacctgatttcataatttactggaaagctgcagtaattatgacaatgtggtagtgacacaaagggagataatggacactttgaatagaaaagtctagaaacagactttcttatagggtcattggaa

SEQ ID NO: 809437 - DNA, 625 bp, Homo sapiens
tatactgacagtgttgacagaaaaacaaatacaagaaatgctaaataaagtactttaacctgaaatgaaagcacactaaacatatgaaagcccatgaaagcataaactttgctaytgaagcttaatatataagtgaatacagaatattctaatactataatggtggggtataaatcacttttaattctgatgaattatcagactaaagtataagtataaccgtctaaaatatgttaatggatatccagtataaaaacataattttttacgggtgtggtggctcatttctggaatcccagcacttttgtaggccaaggcaggaagattgcttgagcccaggagtttgagaccaaactgggaaacatagtgaaaccttgtctgtacaaataaaaaaaattagcagggcatagtggtgaacacttgtggtcccggctactctggaagctgagatgggaggactacttgaacctgggagatagaggctgcagtgaggcgtgattgcactattgcactcagcctggggaacagagtgagatactgtctccacataaataaaataaaatacaaaacatataatttgtgacattaataatataaagtgtgtgtagagaaggaaaagtgtaga

SEQ ID NO: 809438 - DNA, 625 bp, Homo sapiens
tatactgacagtgttgacagaaaaacaaatacaagaaatgctaaataaagtactttaacctgaaatgaaagcacactaaacatatgaaagcccatgaaagcataaactttgctattgaagcttaatatataagtgaatacagaatattctaatactataatggtggggtataaatcacttttaattctgatgaattatcagactaaagtataagtataaccgtctaaaatatgttaatggatatccagtataaaaacataattttttacgggtgtggtggctcatttctggaatcccagcacttttgtaggccaaggcaggaagattgcttgagcccaggagtttgagaccaaactgggaaacatagtgaaaccttgtctgtacaaataaaaaaaattagcagggcatagtggtgaacacttgtggtcccggctactctggaagctgagatgggaggactacttgaacctgggagatagaggctgcagtgaggcgtgattgcactattgcactcagcctggggaacagagtgagatactgtctcmacataaataaaataaaatacaaaacatataatttgtgacattaataatataaagtgtgtgtagagaaggaaaagtgtaga

SEQ ID NO: 809439 - DNA, 649 bp, Homo sapiens
atatgccccttttcagtatatgtgtctyacacctttaacttttctgcttatgtatttcactctttcgaatgctgttgtaaatggaatttcaaggaatatatctggccctacccaggaaagaaaggggagagaaacatttttggttttaataagtcttccaagccttgactgagatttacctctgcatgtgcgcgcaggatctgatgatattttccatcttgtaaggcttttcaggggcaactctactggtagcaggaagatgctcatggtttagatgatacatggttcttagtgcattgtatcagaggatgcaatgtaaatatatacacaatgtcaatatttataattggttatgtaattttgattatttaactaaggttgtgactgatggaattttctactacaaacttactagagtcatgtaatatatgggtagattttttaacattgtgcaaatatctcattacctttctctcacctagtttagtattctttgatggctcttgcctggagcaatttttgctgtggtgtttctaatagtgatttttttatttccctcattgtttctgcatttttaattggaactattttgtaaggaattgtgtatattttacgtctatctgaaatctgaaaaactggttgtaattta

SEQ ID NO: 809440 - DNA, 573 bp, Homo sapiens
tgaagacagttttaggtccccaaatcttaagagattttcttattctcccccactaccccagaattaatgacaaaagatgaygttcaagatctggtgaggacataagataaataaacaaaaattagttgtatttgtatacacagccaacaaacaatccccccaaaattataaaagcattttaatttacaaaaatgggtaaacaacttgaataggcatttctccaaagaagatgtataagtggccaacaaacatatgaaagattctcaatagtattagtaggtagagaaatgtaaatcaaaaccacaatgagagcagttgatatacattgggatgacaatgattaataataataataagcagtttcagcaagaaaatatagaatttgaaagttttttccctttgttggtgacagtgccaatatgatgcaacagctgtagaaaacgtttgggagttccgcacaaaagttaaacatataattaccatatgactaaccaattcttctagctgcatactcaaaagaactgaaaccaggtattcaaacaaaatgcttgcatagaaatgtccatagcagaa

SEQ ID NO: 809441 - DNA, 605 bp, Homo sapiens
tttatgttactatctaatgtaattttggcctgaaaaactccctttagtgctttctgtacagcagatctgttagaaatagattttctgtttttgtgaacttgaaaatttcttaatttattttttagatttattttttaattgacaaataaaaattatatatattcatgttatataacaattattttaaattcctatagctttattggtagagtttctggctatcacatcttataaaagaagggtacctagacatagaattgttaattgacaagaatttggcttccattgttcctaataacaagtcaactcttaatcttattgaaggtcccttgatacttttccttctgctgtcctcaagatcttatctttgtctttgatttttgttgatgtgactatgtttttttaggtgtggttatctatgaatttaatctacttgaagtttgttgaaattcttagatgaagcctcagatttggaaagtatttggtcaytatctcttcaaatatttttctctcttttctttttctcttctccttatataattcccattatgtgtatgttagcacactttttggggggctgggggtgggtgtcactctatcaccta

SEQ ID NO: 809442 - DNA, 567 bp, Homo sapiens
cagcattttggtcaaagacatccaacaagtctctaggaaattccaaagtttcccayatcttcatgtcttcttctgagccctccaaactgttctaacctgtgcctgttacccagttctaaagtgcttccacattttcaggttatcttgaaagtagtgccctgctcccagtaccaatttcctgtattagtcaattttcacgctgctataaagacatacctgaaactgggtaatttataaaagaaagagttttaactgactcaatgttccacatggctgagaggactcaggaaacttacaataatggcagaaagcaaaagggaagcaagtcatcctacatggcaacaggagagagagagagcaggggaactgccaaacaattttaaaccctcagatcttgtgagaacttcctcactaacatgagaacagcatgggagaaaccaccctcataatacaatcacctcccaccaggatcctccctcaacatatggggattacaattcgagatgagatttgggtggggatacaagccaaaccatatggccagagttcacacttttcttttctgga

SEQ ID NO: 809443 - DNA, 567 bp, Homo sapiens
cagcattttggtcaaagacatccaacaagtctctaggaaattccaaagtttcccatatcttcatgtcttcttctgagccctccaaactgttctaacctgtgcctgttacccagttctaaagtgcttccacattttcaggttatcttgaaagtagtgccctgctcccagtaccaatttcctgtattagtcaattttcacgctgctataaagacatacctgaaactgggtaatttataaaagaaagagttttaactgactcaatgttccacatggctgagaggactcaggaaacttacaataatggcagaaagcaaaagggaagcaagtcatcctacatggcaacaggagagagagagagcaggggaactgccaaacaattttaaaccctcagatcttgtgagaacttcctcactaacatgagaacagcatgggagaaaccaccctcataatacaatcacctcccaccaggatcctccctcaacayatggggattacaattcgagatgagatttgggtggggatacaagccaaaccatatggccagagttcacacttttcttttctgga

SEQ ID NO: 809444 - DNA, 593 bp, Homo sapiens
aaatatgctaatgattctattttcagtggtagaaaaagtactgatggtctgtggcatggtctgacagtacagatacacaaaatctcaccattgcatactactgatcaatggcatrtaagaatcttggaaggatctgcatgattatatatgatacttttaaacacttctgtctgactaacaagtataatgagattggctggttgctcctaatgttgcttaattaagtaggaaaagaaaaagatgaactcaaggattcaatgtcccaattcaagtgctacgtaaatgacttgatagcttctatatgagccctgaaggagactgctatctcctgtagctcagggctgaggttgtggaaaaccaaatctttatcatgcaactggctgaattacaatacaagtttgaactgccaacctcacaggttgccttctgttaaaatgtggacattgattgcaaaggaagtaatggggttcctgaaagatgaaatggagatatgtgggaagatcctgatgaaggttaagacattgagcccctaaattctgcatcatttttgccagtggaagcagactttccagacatagtggaagcatcttttc

SEQ ID NO: 809445 - DNA, 687 bp, Homo sapiens
ctgaacactgaggatgttaagaagactataataattttcagggaacagacaaaaagagttcatataaaaatattgagatttatgatgttatcactgctctcaacacaacatcagacaccagaagaaaayagagtggtctttaacattgtaaaaagaaagtatttctaacaactaatttctagactgtcattcaaatttaaagataaaataaggaaaagattaaaatatgcaagaactgaaaaaatgaactttatacagaaagctcatgtgtcccaataaaattaaggattcacaatgtaaataagaaaagcatgggtttcaggaaatagcggcttgtatattggacagaagacaaaaggaatcctgaagataatgatgaagacaagttccaaggcaagagctgtttgccaaggctggagagcggttagatgggagtcagaggatggtaggctctaggagagaggtctcaagggggaaaaaccagatattaggctgatagataatgattgattgatagataggcaggcagacagacagatttttgttttgactttaaccaaaataataaaagttttatcattccggtggatatttggagggttaaggaaaaaaagaaatccctgagcaaatggattaatgaggcaattttaaaccaaaggaggggaaattaatacaaagaaagaaaaa

SEQ ID NO: 809446 - DNA, 500 bp, Homo sapiens
tccccaactttttggaggctttgttcattttttaaaattcttttttatttgtctctgttggattgggttaattcaaagaccttgtcttccagctctgaatttctttcttctatttgttcaattctattgccgagactttccagagtattttgcatttctataggtgtgtccaatgtttcctgaatttttgattgattgttttttctttgagctatctatttccttgaatatttctcccttcacttctcgtatcattttttggatttccttgcatggggctttgcctttctctggtgcctccctctttagcttaatgactaacctcctgaatttttttttcaagtaaatcagggatttcttcttggtttggatccactgctggtgaactagtgtgatttttggggggtgttaaagatccttgttttttttgtttttttwgtttttgtattaccagattggttttctggttccttctcattttggtaagctctgtcagaggg

SEQ ID NO: 809447 - DNA, 600 bp, Homo sapiens
ggatcttagtactcatttgtgttgtcaagtttctgggtgttctcattttattcctaatacagtatgccattaaaatgcatgtctacatttattggcaatgaatgtkacccacatgaatattaaagggaaataaattcccagtggagagcaaggctggttatattctttcttttgtttcccccgctttcttcttttatttcagggatagccaagtgctcagagtagacattttgtttcattaatccctttcttttttgaatattgacacagctgagactcagcgagagaatggtgtttgcacccaacccagaatggaccaaagtgctagatttcctttgcaaagaaactcgtctttgcagtaaatgtttgtctcttttttttgttgctgattgcacttgtgagattatcaggctctgggtgtgaatgcagcttaatggcctcaacctttgtgtctttgctgactgagcactgctcttggctgttcaaggcataggtggagggaggaataattccccagctaattcagagatccctttgttttccctgtaattagtgtagaacccacttcttggccacacatttgtagaccatgctactggt

SEQ ID NO: 809448 - DNA, 597 bp, Homo sapiens
tacttttactctgcaatactgccagacttttaaaactttttttttagtaggacttgctctgggtccagaacatggtaataggaattaactctggcatttctgctgcttagtctgctcaccagctcctaaatatcaacatgcgttctgaatttcagccagaattgattggaaaattggccttataattcactagggttcagatttgagatcagttaacaccagacttctggaaacattggctgcccctttgggccaatgagtggtgaggttattctccttgaaaacagagctgaaagtcattcctttcttcctcgctcttcagtgatttcagactttgcatcctgctgagaactgctctgagagtgggagtacacaatgcttcatgcaggctttacacagaaggagaaatctgttcatacagggggggtgttcagacccatgccatcaattcagattgtcaggttgagccacagagagggggcaggatctactgagtgctatagactgaattgtgtccatcccaccagtccgaatgtatttgttgaagcccagacccwaatgtgatagtatttagaggtgggacttttgggagataat

SEQ ID NO: 809449 - DNA, 585 bp, Homo sapiens
tctaactagctattgggtacaagttccactacccatgagaactatatacccagtgagactttcctcattaggactacctgaatcataacgaaatttcaagaaaaaaattggctgattctaggactggggaaagaaatataaaagatgagcctggaacattctgtagtaccaaaaagaaagaactcaaacaaacaaaaaaaaactagacaaacacatctcactgtgatgggacatatcaaaaggacacagaagctaattgaaagagttttcaatggccaaaactgtaacaatttgagcaaccaaataaataaaacggtattggaatataacattaaacataagataaatatccatgactctgtattgatgtaaataaatgattgaataagtaaattggggagaaaagacaaatgccaagatgaatttcaaataatttatgtagttactctgccctcaaggaggtggagaataatttccacttccmaaatatggaaactacatttcttcttcttacagtggcttcttccaaagagtatgatatggaagggggaaaataaagagtaatttttctcatgaagaacttga

SEQ ID NO: 809450 - DNA, 658 bp, Homo sapiens
gacataggttgggtgctgctcggatcccctttcaraactaaaggacttttttcctagctgctaaaaatgcaaagaaatgctcttggatgaagagggaagcaaatgatcctttcaagggagtcccccttcctaagctgcatccagttattggtctatgcaggagtataaatgctcagccttcagccacagctcaggacaattctgaaaggccattccaaatccagatctatctgtggggtcagctgaacccttgtcatgacagcatcattgcccaacttctccacctgcccaattctgcttctttctcttaccctacttgtgttgatcccaagaaactccctaatagatttgcagcacactagtcatcttagcgtcagcttcctggggaccacgtctgcaatagaacctgtgtcatacataaagctcaaagggtcaattatgcaattgtgcaattatgaaatgttttgaaagtatggccattctcaagatattttgattcagccacagagaattagcacgttctctctgataatcttcataatcatgctttcagtctataaatgttaactgagtgattttttgtggttgatcacatgtagaacctaggactcttggtgtaattaagaaggggtccttgccctgcaatggacctcttttg

SEQ ID NO: 809451 - DNA, 629 bp, Homo sapiens
tttctgggatgtatacttatctacttaacgtatcaaattgtatacattaaatatctacatctttttgaatgtcartcattcctcactaaagccgttaataaaaagaaacatgatacattgtttacatcttaaaatatcaagaaatcataagtcatccattttatgacttgtgctctagaggttgaaagtaatctgttccatgtcacatggttagcaagtgacagcaaaggaaactaatgaaaataactctttccattaaaccactcttaaaccttgcatgaagtttgtatttgtgtaacatcttgccagaaataattactttccttacctattctcccatagttgaagtttaagtaaatgaaggttcactttattgtgtttctaaggatgtgtttattgtactagcctcatgtgcctttttaacctaggcaaaattttatgggtgctttttactacagtgtttctgaagaaagagaaagcataaatcctaaaataatttcacactttattatatatatacatatacttaagtagataagtatatatatatatatatatatatatatatatatatatgtgcatgagtagacaagagcacttaaaaaaaacactgtgctttattgccttta

SEQ ID NO: 809452 - DNA, 557 bp, Homo sapiens
ggggaccgttgatttctttgacgttttaatggaggtaactccccttcattaggccccattcccctgaaagccggcaagggcaaggttgttgtaatggccaggacttagaagtcctcgaagtgccccaaagttgctcactgattgaagcctgcctctgggactcaccctcaccccctccacgccatcccatgtcctatcttttaaagcccattgcctgtcactcggggctgggacgagaccttcctaacgcataccccgccagcgttccccagacgcggctgcgaaacggggcgcttttctcatatgggactttatgagcccgtaatgaatttgagttctccctcctcaacctccctctctctccccttcgctgttccacagcaaagcctatagtgaaatcggacactttgcgaggattgcaaaccttacaaatgctccagcatccattttcccccctctaaatgaatctgtggaaatgcctttaataaaactggggagcggaggtgggggcggcgctggaasagaggaggaaagttttgccttttctgtctgggaga

SEQ ID NO: 809453 - DNA, 667 bp, Homo sapiens
ccttctggtgggtgtaacctctaacctctagctactcccaggccattggaggaaggtggcccctggctaaaatagcagatgctgcaagggatgagaaccaggccgcgcagccccagacactgtcccaagggctcccttgggacaagcccaagctgactctggaatccctcctccgtagcagctccatagctcctctggttgtggctgtgacagccccttgctcgggggctgcagcacccaacccacacccacaccgttggggcagggctagaccaggcgaaattcgtaccatccgtttgtttgacttggagccttcctgctgtcctcgcctatacgcctcgtttgaacttaggctctagactggagagacacggggacccctttaaggcctaagaagagaggcgcagttaaggaaaaatgttacgtttcctgtgtcctccaccctacggcctaaacattccctccccaggtccctggagagtggtggaaagcggttcctccccgcttaggcccttcggatgcaggtctagcccgtcggcaacgggaggtgtcctgagtgggtctgtgactgccgagcacacccgccgcggaggaaggctgctgcttcctgargctgagagtggatccggctccgggctctcctaattggcggacgctggggggcggc

SEQ ID NO: 809454 - DNA, 516 bp, Homo sapiens
tgttgtagcccaggctggagtgcagtggcaccatctcagctcatgcaacctccgccttcggtttcaagtgattcccctgcctcagcctccagtgtagctgggattacaggtgcccaccaccacgcccagctaattttatatttttagtagagactgggtttcaccatgttggccaggctgatctcgaactcctgacctcatgatccgcctgccacggcctcccaaagtgttgggattacaggtgtgagccactgtgcctggcatgttgttctagacttttcttgggaatagcttatttggtatcttgaataacatacagaggtgtatctgccctttgggtatataataatagagccaggcacctttacacctagccctgcagtcaaagaggaaagataacttttgaccatacacataaggatctaggttggggctgggcatagtggctcatttttgtaaaccatcccagcactttgggaggccaaggcaggatcckagcactttgggaggccaaga

SEQ ID NO: 809455 - DNA, 612 bp, Homo sapiens
cctcagctttctcatttatgaaatggagatcctaatagcactgatgttgcagagcagacacagaaataagatcatacttttaaattgcttgtatcaatgtaagttgtaccgtcattgtaaataaattctggccaaattgcttgtatcaatgtaagttgtaccgtcattgtaaataaattctggccgttagtagttttctttctcctccccatcatagggaatattccagcctcttttgaggcctgcagcaggccagttgaggcatcaccattgaagttgctggtgcagtgtacaccctggcacaaggaccttatctgagcccccacactctcctgcttgctgatgggcaagccctgggctggctgatacctccaatctctttggagacagctggccatatggcagaaaggctggaatggcatctccactctgtgacccagtctcccacttgcccccaaaagaatatttcttctgacagtggacagctgacatatcaccactttccttmtactgtgagtgtctctggatgggcagaaaggaatggccagcccctggttatggtcatctaaggtcacctctgaaatgctgtgagcccctcttccttcctctcct

SEQ ID NO: 809456 - DNA, 636 bp, Homo sapiens
cctcagctttctcatttatgaaatggagatcctaatagcactgatgttgcagagcagacacagaaataagatcatacttttaaattgcttgtatcaatgtaagttgtaccgtcattgtaaataaattctggccaaattgcttgtatcaatgtaagttgtaccgtcattgtaaataaattctggccgttagtagttttctttctcctccccatcatagggaatattccagcctcttttgaggcctgcagcaggccagttgaggcatcaccattgaagttgctggtgcagtgtacaccctggcacaaggaccttatctgagcccccacactctcctgcttgctgatgggcaagccctgggctggctgatacctccaatctctttggagacagctggccatatggcagaaaggctggaatggcatctccactctgtgacccagtctcccacttgcccccaaaagaatatttcttctgacagtggacagctgacatatcaccactttccttmtactgtgagtgtctctggatgggcagaaaggaatggccagcccctggttatggtcatctaaggtcacctctgaaatgctgtgagcccctcttccttcctctcctctgctatttcccatctctgctgtt

SEQ ID NO: 809457 - DNA, 272 bp, Homo sapiens
tttaacaggtgctttacaaaagagtaagtgctggcacacagggcccagactgggtaggcccatgattgtggayggtgcttcccagtaatgagacagggcacatttctagctggggcttggaaccctcagtgagacaagaaatctcagaccccacccttcaccccttctccacctgagctcttcctcctccacatcacggcagcgaccacagctccagtgatcacagctccaaggagaaccaggccagcaatgatgcccacgatggggatggt

SEQ ID NO: 809458 - DNA, 272 bp, Homo sapiens
tttaacaggtgctttacaaaagagtaagtgctggcacacagggcccagactgggtaggcccatgattgtggacggtgcttcccagtaatgagacagggcacatttctagctggggcttggaaccctcagtgagacaagaaatctcagaccccacccttcaccccttctccacctgagctsttcctcctccacatcacggcagcgaccacagctccagtgatcacagctccaaggagaaccaggccagcaatgatgcccacgatggggatggt

SEQ ID NO: 809459 - DNA, 272 bp, Homo sapiens
tttaacaggtgctttacaaaagagtaagtgctggcacacagggcccagactgggtaggcccatgattgtggacggtgcttcccagtaatgagacagggcacatttctagctggggcttggaaccctcagtgagacaagaaatctcagaccccacccttcaccccttctccacctgagctcttcctcctccacatcacrgcagcgaccacagctccagtgatcacagctccaaggagaaccaggccagcaatgatgcccacgatggggatggt

SEQ ID NO: 809460 - DNA, 506 bp, Homo sapiens
aagctttcttttttttttttttagctgtcttattttgctttccattcatatttgctattccatcactggttgttcctttctactcttttcttgtttcatttattttgatcagtgatgtgtatttccawttctgtgaaagtttaattcagttgtatgtgtggtaaaatgtaacaccaaatcctttgcaagaaggaattaccttgcacatcagattgaacattgtatacttgaaaatccagagagatgccagtgagctaaggatcaaatgaactattattaaccaaggccattttcatcacatcctggtcctctctgtcacatggctgcttacatttctctgtggttttctttcaatgtaagtagttcttgttaaggatccttgcaatgaactttggtattcttttcctttcatttttataaataccaggtatattttaatttgaaaactctgtttaacaaattacaatcatgtaactaaaaagatgcccaacactggtgtaaaacac

SEQ ID NO: 809461 - DNA, 601 bp, Homo sapiens
aaagggctgggcgggttctaaggcccagaatttgcttcctcctggttccgggggaatgggcaggcaactttctgaaggaagtggtatgtgtgaactggggcaccaagatactagaaaaatgttgctagagaagaggggaaggcctctgcaggtggagaataagaatagcacaggaaaggcctggcagcaggaagcaggcaggatgtctggggagcagtgggtgtgcctgcaatggggtcagggtggaggggtaggggtataggaattagatggatgttttcaaggatttgggacctctgttctttggtgtttgtttgacacatctgaaaagaatgcatacacaaagaattatcatgtgagaaagcattggttaacgctaaggtaataattaggatttgtggaaggtggaaaaaattacctaaacatttttagcaattgggaactgcaaaataagccgataacatccctgttaacacttaggaagagtcttcattcatgacatctgttaaactagagagcctccattggctgttggaaggttcctcaaacacmaaacagaaacaaggggagtcccttgactggttcccatgttcttaagtgt

SEQ ID NO: 809462 - DNA, 531 bp, Homo sapiens
attcaaaagtaactagtattaggatggggaagggaaccatacctatgagccttgtcttgcaagagtatatgttggtaggattaggcatttgtcattattgcagagaatgaacttcaatttttttttttttgagacagggtcttgctctgtcacccaggctggagtgcagtggcgagatctgggctcactgcaacctccacctcctgggttcaagtgattctctgacctcagcctatcaagtagctgggactacaggcatgcaccaccatgcccggctaatttttatatttttagtagagatggggtttcaccatgttggccagagtggtctcgaagtcctgacctcaggtgatccacccgcctcagcctcccaaagtgctgggattacaggtgtgagccaccgcgcctggcctaatttttaattcttagtttgacttaaaccytgcttttagtgtgatggcgaccaaagctgagctgaaagggctttggagagatgttcacagcagcacatgcctgaggctctctcttctt

SEQ ID NO: 809463 - DNA, 531 bp, Homo sapiens
attcaaaagtaactagtattaggatggggaagggaaccatacctatgagccttgtcttgcaagagtatatgttggtaggattaggcatttgtcattattgcagagaatgaacttcaatttttttttttttgagacagggtcttgctctgtcacccaggctggagtgcagtggcgagatctgggctcactgcaacctccacctcctgggttcaagtgattctctgacctcagcctatcaagtagctgggactacaggcatgcaccaccatgcccggctaatttttatatttttagtagagatggggtttcaccatgttggccagagtggtctcgaagtcctgacctcaggtgatccacccgcctcagcctcccaaagtgctgggattacaggtgtgagccaccgcgcctggcctaatttttaattcttagtttgacttaaaccctgcttttagtgtgatggcgacmaaagctgagctgaaagggctttggagagatgttcacagcagcacatgcctgaggctctctcttctt

SEQ ID NO: 809464 - DNA, 514 bp, Homo sapiens
cccttctctgtgagtgcagaatgctctgcatactcaacagccttccagtccgaggccagtctggagtgataggcttctgttttttgttcttggcaagttttacaagagtagagggatcattctctgagatgaatttgggtctcgacaagcaagaaaggaatctttggatagcggtgagttatcacaggcacccacttttctttcacatttttgaatgaggacggagataccactgaaaaactgactagaaatacatctgtttgtagatacttagcaattgcaatcttttataaccctcttgcccagaagtgtcaaaaagtccaagagcatatggctctccaccaaccataaccatgaccacatagttgttagaaatagttggtacattttcagatgtaaatttgtttgttgtgtaggatatcggtatgttttaccaatggcatcattgcttacaacagcacacttaatggtctgcattgctgaaatagtttkgtatttactttaaatatttcga

SEQ ID NO: 809465 - DNA, 630 bp, Homo sapiens
tccttccccactcctgcctttccagtttggctccatgctgcactgcctcaccactgcaccagccttggtgccccatctctgtggsccaggcttccagcctcccaccttgggcccacctcctggctacagccgacgatgcagatctttgtttgtttttgaagaaaaggtccctagagacctctcctaccttttgcaagaccactggtgtctcagtgtgtgtgtaaacaaaaagcttgagttgtggggaagttgtaggagagttcctaagaacttagtccttcatgacaacagaagcacagcattttctaaaacattaaaaatctcaattacactaaaactccaggatggttgggccaggggggaataaatcatgttaactaagaaagcaagggagggaactactgagaacgtcaaggttggaatccatattgcttcaagccagaggccagttcctagtcggtggctccatgctggtctctgatgtttaggaagtggtgtcagcagagactgagctgcaccctttctttggacagatggcaggagaggagaacttcaaggaagagctcagatcccaggatgcttccaggaacttgaaccagcatgaggtagcaggacatccacattcctggt

SEQ ID NO: 809466 - DNA, 629 bp, Homo sapiens
gagactgccttctccatcatgcccagaaagggggttctaagcccccacacagaccacgagttcatcctgagcttttctcctcatgaggttcagatggtgtcatctcagtagccacacatggttggatcatgtatttagaccccccacctgtgttcctcaatcacactgaagccacagctgggcccaccgaggtgctatcctgcccaggccagcacttggctgagttgggttggagtacacacctggtgtgcagggtgaagcagctcattttgtctggtcctgatcccagactcaccccatctgcagcaagacccttggctggcttcctccgctctgggtgtctcccacatgtctactatggcaaaaaacattaccatccccacccataccacagcatcccctagagagagtgaggtgcagggacccgagggccaggttagcacagcgctggccccagcatggagggaagccctgtgggccacggtaggctagaagggaattcgagctgggcatgaaaaggatgctccggggccattgttagtgggtttggggctgaratgagtgatcctgcctctggtcccagcatccagctgcctcgttgtctatcctgggagggtgtggtgcttcgg

SEQ ID NO: 809467 - DNA, 526 bp, Homo sapiens
aggccaaaccttttgtttcttattaagcaccttccacagtacaaactgtcatgaataatatctgtacaacttaacagtttcagtagctgttcagatacaaattgatttcaaacagataactggcaaacataattaaagtcacagttagactacccaagtctataaacttgggtataaaacttggctataaaacattagtatatcagtaatttacagtgttcaattatggttggtaaaattaagttggagtatggctgggaattactattataatcccagaaagtcagaagtttttagacaccaaagcatcctgctataaattagtaggcacaatttaaaggttgtatgcatattcaaaggccatgatctctcgaggaacttgtatattaaamatgcaaaacaacaaaaaatatattcattcagaaagaatttccttctcccctcccccattacttcccctgggctctcctaacctatctgatattaaagctgtaagataaggcatgaataaagttaaatgactttc

SEQ ID NO: 809468 - DNA, 453 bp, Homo sapiens
ttttattctttttatgctactataaatgagattgttttcttaatttcctttcatgatagtttattgtgtatagaaacaccattgatatgtgtgtgttgatttttgtgttctacatctttactgaatttattaattctaatcatttttcttgttgagtattaagggttttctgtgtacatcatcatgtagattttataaatcatatcgattttgtagattattgctgcagacagataattttaccttttactttagattttgatgccttttatttctttttcttatctacttgctctgtctagggcttctaacactgtgttgaatagaagtagcaagagtggacattcaygccttgtcctggatcttagagaaaagattgattatgatgttagctgtgggattttcatatatgccctttattatgggatttttttttggatatgacaccaaaag

SEQ ID NO: 809469 - DNA, 555 bp, Homo sapiens
aaaacctgtggggcacagcaaaagtagtattgagggaagtttatagcaagaaatgtccaaatcaaaagagtagaaatattacaaattaatcaagcaacacaacacagagaactaaaaaagatctaattaaaccccaaattagcagaacaaaaataatagagattaaagcaaaataaaatcaaatagaggctgcccaaaatacagaagaccaatgaaatgaaaaattgcttctttgaaaagataagcaaaatgggtaaaccactagatagactaaccaggaaaagaagagagaagattcaaagaaacaaaatcaaaaatgaaaatggagacattaaaatgaatatcacaaaaatacaaaagatcatcagagattattatgaacatctatatgctgacaaacaggaaaacctagaggaaatagagaattcctggaaatacacargcaactgagattgaatcaggaagaaatagtaaaccagagtagatcaataatgagtagtagattgaatcaggaataaaagatcttccaacaaagaaaaactgaattgcatggat

SEQ ID NO: 809470 - DNA, 555 bp, Homo sapiens
aaaacctgtggggcacagcaaaagtagtattgagggaagtttatagcaagaaatgtccaaatcaaaagagtagaaatattacaaattaatcaagcaacacaacacagagaactaaaaaagatctaattaaaccccaaattagcagaacaaaaataatagagattaaagcaaaataaaatcaaatagaggctgcccaaaatacagaagaccaatgaaatgaaaaattgcttctttgaaaagataagcaaaatgggtaaaccactagatagactaaccaggaaaagaagagagaagattcaaagaaacaaaatcaaaaatgaaaatggagacattaaaatgaatatcacaaaaatacaaaagatcatcagagattattatgaacatctatatgctgacaaacaggaaaacctagaggaaatagagaattcctggaaatacacaggcaactgagattgaatcaggaagaaatagtaaaycagagtagatcaataatgagtagtagattgaatcaggaataaaagatcttccaacaaagaaaaactgaattgcatggat

SEQ ID NO: 809471 - DNA, 596 bp, Homo sapiens
gcatgcagggcttaaaatttagatgacgggttggtaggtgcagcaaaccaccatggcacacatatacttatgtaacaaacctacacattctgcacttgtatcccggaacttaaagtaaaatgtaaaaaaaaaaaaaaaaaaaaaaaaaaatactagagttcttcaagttgtaacaaaaagatgttaaagccaggtgccgtggctcatgcctgtaatcccatcacttagggaagccaaggtgggaggatcatttgacctcaggagtgtaagaccagcctgtgtaacatagcgacatcacatctctaaaataaagaaatagataacatgaaacatttttaagaagttaatagttaaaaaagccactagtaaaagtaaatagtcaaatctggaataatctaatactgtaatggcactgtgtaaatcattttaaattctattataaaagcttaaaacacagaaatattgaaaataactatatctattctaatttggcaatgaatacacaatctagaaagatgtgaagtgtgayatgaataacataaaatgtgggcagagtgaagtaaaagtgtagagtttttgtatgcaatttcagttgt

SEQ ID NO: 809472 - DNA, 591 bp, Homo sapiens
gaaagtcttttgggaaagcaatgaggcaaggctaagcaatgaccataagtttagatttcctcattgttttgaatagacaggaaatcatttgtccagaaggaggtattatgtagggaaacttttacctttctgtatataaaaacatataactaatacacacacactcatacacaaatatcaatggaggtatacattgtgtttactttttctatgtttatgtacaatagtaatatctttatagttatactaacgttattaaaataagtaattatattaactaagtttaggaccagtttctagtaagtaagaaagaaaaaaaatcatctccaaattctatgaatagatataatgaatttcaagaatgcctgatgaattaacttaggattcaggaaacaaaaaaagttgctattgaatagaaaaatggaaaagtaacagcaacaaaattctggtagcagatgccaataatttcccaagacaaaatgatgtagtaacttcagaagtatataaatgaagactggataccagcaagacatactggatgattttstatccagatagtgctttttttacttattaggttgggttattgaa

SEQ ID NO: 809473 - DNA, 571 bp, Homo sapiens
tacgggattttttgctctgcattcagagaataatatcagagagatttttcatcccaaaatgttgaagcagagtgtaatattacaggctaggttgatattaaggtaacaagttttgaaaatccctggaatcaaatatcatctacttgagagttttgaaatgatttagaaaataaagtgatatcattggtcatttatttttttaacaggctttgaagcacttagtatatattgggcatcattgtgtgtttttgagatgcagtttctgttatttggtaagttataatttgtagagtcaaagacattcttataataatagtttgtggcaaagcaggtaagattctagtgattactcaggaaatccagaaaaaatggtgcagcatgattaggaagctgtaggaaggattctatgagtaaagtcattttaaatgaaaagtaaaaggagaccacaaaatcagaagcagaaaaacaataagtataaagcagagactatttacagatayagaaagtagtatgaaaaatgacttggttgtgtaaaaattctcactgctaaagtacatatgaaggaatctat

SEQ ID NO: 809474 - DNA, 615 bp, Homo sapiens
gcttgccctcagctgaagggatcctgaggacagtagaaataatgaagacatcagtcaggatgatgagcagaagggtacccagcaaaccagacactgagatcagtgttataatgaattctgtgtggttactgtctatacaagacagcctaataactgccagcatatggcagaagaagtgtttgacaaggttgggtctgcagaaagagtccctgaatatcagtgcagtctctgtaagagagataaagaagcctgcagtgcaagcagaggccacaagttgtccacatacaatgttggtcataagcagtggatatcttagagggttacaaatggccaggaagcggtcatatcccatcaaagtgagaatgatacagtttgtgccaccaagtcccaagaagaagcacatctgtaagctacaacctgtgactgaaatgcttctgtccttggccagtagatcttccagcatcttggggacgatggtcagygtatagcaggtctcagagaaggagagtgcactaaggaagagatacataggggtgtggagggacctgtccactcaagttagacccatgatggtcagattacctgcaagggtgagaaggtagagacaaaagaaga

SEQ ID NO: 809475 - DNA, 615 bp, Homo sapiens
gcttgccctcagctgaagggatcctgaggacagtagaaataatgaagacatcagtcaggatgatgagcagaagggtacccagcaaaccagacactgagatcagtgttataatgaattctgtgtggttactgtctatacaagacagcctaataactgccagcatatggcagaagaagtgtttgacaaggttgggtctgcagaaagagtccctgaatatcagtgcagtctctgtaagagagataaagaagcctgcagtgcaagcagaggccacaagttgtccacatacaatgttggtcataagcagtggatatcttagagggttacaaatggccaggaagcggtcatatcccatcaaagtgagaatgatacagtttgtgccaccaagtcccaagaagaagcacatctgtaagctacaacctgtgactgaaatgcttctgtccttggccagtagatcttccagcatcttggggacgatggtcagtgtatagcaggtctcagagaaggagagtgcactaaggaagagatacataggggtgtggagggacctgtccacycaagttagacccatgatggtcagattacctgcaagggtgagaaggtagagacaaaagaaga

SEQ ID NO: 809476 - DNA, 524 bp, Homo sapiens
cattgccattgaactgaccctaaaagaaatgctcaaggaagtcctaaacctggaagcaaaagaacataatggaaacacatgaaggtataaaactcactggtaaagtaatcacacataagataaagagaaaagactcaaatgataccactacagaaatccaccaaatcacaaaggtagtcaatataggaaaaagaaagcaacaaagaatatagaaaacaaacagaaaacaactaatgatatgacagcctcacaattactaataaccttgaatgtaaatggattgaattttctatttaaaaatatagaatgaatgaatggattaaaaaaaacatgatcaaactatatgctgcttagaaaaaaactggccttaaggaaaaacttaagaattttttwaaaaatcatgaaacaaatgaaaatggaagcacaacacaccaaaaccagtgggatacagcaaaagtagtgctaagaaggaattttatagcaataaatgcctacatcaaaaaaaaaatagaaagataacttaa

SEQ ID NO: 809477 - DNA, 524 bp, Homo sapiens
caaaatgaagtggttaccaaagcaaatgacatcttgtgaaaggggaggtctgaaaaaaaaaaacaagtgggtgggttttttcaaagtaggccaccggacctgagataaccagaattcaaattaggatgacagtgtagtaggggaagcaaccagaatcggacctgcttcatgtcttctttggtaatatatgacttgccctccgccagggcttggaaggcattctctatttcatcactggacttgatgttttctgactccttgtcaatcaggaaagcagtatagtcctccagtgagacatagcccttcctgtgggagaaatggatcaggagctgagccttctcaaggcagagaaggaagtcccctttttaatcctactcagtgtctcagaaacasaggaaagccagattctccaagtgcctcttccaactaagctttctgggatgagatgggttatgctctccattttggctccccttcatcaccctcttacagccaaacattactaagccaaatattactaaata

SEQ ID NO: 809478 - DNA, 555 bp, Homo sapiens
aaggaacttaaaataacaagcaaaaaacaacaaactccattaaaaatgggcaaaggacatgaatagtcacttatcaaaagaagacatacgagtagccaacaaacatatgaaataatgctcatcatcactgtttatcagagaaatgcaaattaaaactacaatgagatactatctcacaccaatcagaatgatgattattaaaaagccaaaaagcaacagagactggcaaagctgaggagaaaagagaatgcttatagagtggtggtgggaatgtaaattagttcaaccactgtggaaagcagtttggagatttctcaaataacttaaaacacaactaccattcaacccaacaatttcattactgggtatatactcaaagggaaataagatcattataccaaaaagacatgtgcacttgtatgttcattgccaygctatttacaatagcaaggacgtggaatcaacttagattcccatcagttgtggactgaataaagaaaatatagtacatatacaccatgcagtattatgaagccataaaaaagaatgagacca

SEQ ID NO: 809479 - DNA, 622 bp, Homo sapiens
tgctcaaactgattgtcaacatttgtggttcagaaaatctgaaagtgaagcctggccatctgcatttctaaaaatctcccagaaaattcagatgatgggtaagattcaggaacagctgggctggatgatcaytaagatcatttctagtcctgaggctatttaatactcatttttaacaattccctaacatgtattatctcatttatcattaacaattctatttaataaatatgaacttctttttacatgagaaacatggtacacagagctgcaataactagtccaagtacacagagataattattatgaatctaaggcagaaattcattatgtctggttccagatccatgtctttattgaccatgatctcatacctagttcacaggctttcatcctaatcactaaacttaataaaatttctaaaggaaatacggtattcaataagtaaatgtaattacaaattatcgtacattaagtggtgaaagaatttattccttgagtcatcaagatttatttattttttaaaaatttgagtaggaactctatgtcaggcaccctgttaggtgcagagcattcacttagtggctatcatatgaatggtcttggctttggaggtctcgga

SEQ ID NO: 809480 - DNA, 463 bp, Homo sapiens
aatatgggagtttcatagattgtaaagactatatatatataatatatattatatatataatcatttatayatataaaaatactgagcacagtgcctataatgtttagcagttacttttactattgttatgagacaaaaattacttatagggccaacatgttggaaaactccagaggatgctattaaatctttagtttctgctttctgaaatcctagcagcaatagctgagttctccaaatttcacaaagtgactttctcaggggcaagaactgaaactgttatataatattttgacacaaacaaaacagcaatttaccatttcacaggtagaaaatgctgtggctcatgcttgtaacaccagctacttaggaggctgaggagggaggattgtttgaggccaggagtttgaggctgcagtgatctatgattgcacctatacactccaacctgggcaacagagca

SEQ ID NO: 809481 - DNA, 609 bp, Homo sapiens
tactcagccatcaaaaggaacaaaataatgttatttgcagcaagttggatggagcttgagaccattattctagtaacttgggaatggaaaactaaatatcatatgttctcacttgtaagtgggaactaagctatgtggatgcaaaggcataagaatgacacaatggactttggggactcaggggggaaaaggtgaggaggatgagaaataaaagcctacatattgggtatggtgcacactgctcaggtgacaggtgcaccaaaatctcagaaatcaccagtaaagaaattatcaatgtaacagaaaaccacctgtactccaaatactattgatttttttttatctcatgttgaactgtaatgagtttggatgttgtcctctctaaatctcatgttggatgtgaggcctgggagaggtgtttgagtcatgttcggtcatgggggtgaattcctcatggcttggtgctattctccatagtgtgtttttgtgagatcttgttgcttaaaagtgtgtggcatctcctccccytcttgctctcgctctaccacgtgacatgttggctcctcttttgcctcctgtcatgattgaaagcttcctgaaggctcacca

SEQ ID NO: 809482 - DNA, 573 bp, Homo sapiens
gatgtgaggtcctattttattcatcatgccatttgctgcctaaataccttacttttttattactgtgttattgttttataagtcctatgagatttatgctttaaatgttttatgttctattttggtgtatttcgaggattcatttcaagatttagagctctttttagcagttcttgtaatgctggcttggtagtggctaactctctcagcatttgtttgtctgaaagagacttgatctttcatttatgaagcttagttcactggatacacattctcggctgataattgttttgtttaaggaggctaaagatagtactccaaacctttctagcttgtaggatttctgttgagaaatctgcttttaatctgataggttcctttataaattacctgatactttgcttcacagctcttaaaattcttttctccgtcttgactttagagagcctggtgactatrtgcctaggcgatgatctttctccagggtgttccctgggtgttctttgagcttctcgtatttggatgtctagatctctaggaaagccagggaagttttcctcaattaatccctca

SEQ ID NO: 809483 - DNA, 573 bp, Homo sapiens
gatgtgaggtcctattttattcatcatgccatttgctgcctaaataccttacttttttattactgtgttattgttttataagtcctatgagatttatgctttaaatgttttatgttctattttggtgtatttcgaggattcatttcaagatttagagctctttttagcagttcttgtaatgctggcttggtagtggctaactctctcagcatttgtttgtctgaaagagacttgatctttcatttatgaagcttagttcactggatacacattctcggctgataattgttttgtttaaggaggctaaagatagtactccaaacctttctagcttgtaggatttctgttgagaaatctgcttttaatctgataggttcctttataaattacctgatactttgcttcacagctcttaaaattcttttctccgtcttgactttagagagcctggtgactatgtgcctaggcgatgatctttctccagggtgttcccygggtgttctttgagcttctcgtatttggatgtctagatctctaggaaagccagggaagttttcctcaattaatccctca

SEQ ID NO: 809484 - DNA, 618 bp, Homo sapiens
tcttcatttccagaagttgtgatttttttttatgctctctatttttttggagatttttccatccatatcctgtaayattttttaaatttctttaagttggtattcatccttctctggtgcctccttgggtagtttaataatccaccttctgaattcttttctggcaattcagagatttcttcttgggttggatccactgctggtaaggtagtgtgatcttttggggctgttaaagaaccttgttttgacatattaccaggattgtttttcttcttccttctcatttgggtacactatatcagaggaaacatctgggactcaagggctgctgttaggattttttttgtcccacagggtgctcccttgatgtggtgctctcccccttctccaaaggatggggcttcctgagagctgaactacagtgattgtcaacacccagcagagctactgtgctccaggctccaggctggtactgggtagtgtctgcaaagagtcctgtgatgtggttcgtcttcaggtctcatccatggatatcagtacctgctcctgtggaggtggcagggcagtgaagtgaactccatgagggtccttggttttaattttgtttattgggataat

SEQ ID NO: 809485 - DNA, 618 bp, Homo sapiens
tcttcatttccagaagttgtgatttttttttatgctctctatttttttggagatttttccatccatatcctgtaacattttttaaatttctttaagttggtattcayccttctctggtgcctccttgggtagtttaataatccaccttctgaattcttttctggcaattcagagatttcttcttgggttggatccactgctggtaaggtagtgtgatcttttggggctgttaaagaaccttgttttgacatattaccaggattgtttttcttcttccttctcatttgggtacactatatcagaggaaacatctgggactcaagggctgctgttaggattttttttgtcccacagggtgctcccttgatgtggtgctctcccccttctccaaaggatggggcttcctgagagctgaactacagtgattgtcaacacccagcagagctactgtgctccaggctccaggctggtactgggtagtgtctgcaaagagtcctgtgatgtggttcgtcttcaggtctcatccatggatatcagtacctgctcctgtggaggtggcagggcagtgaagtgaactccatgagggtccttggttttaattttgtttattgggataat

SEQ ID NO: 809486 - DNA, 606 bp, Homo sapiens
cagtatggggatgaccacatagtctcttatttgaacagcccatttgcaaaatgggcaaaagatctgaataatcactttattcaaatgtcaaatacacatgatcagatgctcaacattaccagcaattaatgacttccagagcatcaacctatatggtacaagatattagccaagaacaagagaggatgtttaacagcgaaaaataatttattgtgacttttacaggagcttgaatgccctcattggaagagtcaacattaataaaatctgaattattaccattaatatggccatgtcatttttatcggcaggtgctagagaaatgctacttatacatgtagcatttacaattaatatatgtagcattaaacaattatcaggaacattctgtctattaaaatgtaatcttccttcaaccctattatccacttacatttatatattaaaacacattatatatgacaaatttaatactcagctatttctttgaagttttgctttyattatataaatgtaaaatttgcatttcagtccctaatatcttattgcttaaaaatgttttatagtatttgttatagggtaaaatttatacacaaagaaaattca

SEQ ID NO: 809487 - DNA, 594 bp, Homo sapiens
tgttagccaggatggtctcaatctcctgacctcgtgaccctcctgcctcggcctctcaaagtgctgggattacaggcgtgagccaccgcgcccggcccctaagcagtggctttaatatccccttgatgtgacctgtgagcagcttcccaaggcaggaaattccagaagtgagtcagggccagggccctggagccacttccctgggtccccagaagcagcctttctgtggctgtcagaggggcatagctgggtgcacaccagggtggggccagtccagaagctggcagtattgatggagacccctctgtgtcccactccctgcttgggggagccattgaggcatagtggccagtgtgggaccctgcatctttagcatttgtatctgcagtgttgtgcacatacaagtgactctttttgttttaatctgttagcctagaggggcagagtagcagactgagtctccacggytttccactaccccagccttcagcattccatctccagcttctctagggacactcccactccatgaccacctattctgtggacttacagtgaggagcaattagctgtgtcagtcagggtttgcatgga

SEQ ID NO: 809488 - DNA, 634 bp, Homo sapiens
ctctccagggagtgagtgtgtgtttctggtcaggcctcacgggctcaagtcttgcagagtgagggaggggcagtttgcactgggctctggackgtcatttccatgtccaccttcagcttggccttttcttgttgagtgcaaggccccgccacgaggggctggttggagctgggagccgcgcggggagcccgcccaggcacagtggcggctctgtttcccactccgcctcctcaggggcccccattcacgggaaggagagtcacacattcccccttgagataagaatagagcacgactgtgccccaggacagagtccagcttcttcagccagccctgcgaggcctggcaagggctcccagatggtactggcatgagtgggccctggctgcctgccccactggcctcttgtgcattgtgtggcccggacactgggtacagtgtgtgtctgtccggggcccccctccaggaaaaccactgtctccaggctctgctcaagatggaggggcttgtctcaaatcagctgttccagggctctgctgcgcccctcctcttacctgtgggccttggactccaacctccctgccttgattcctccagccactggtgtctattcctggacgggcagaatggagcc

SEQ ID NO: 809489 - DNA, 450 bp, Homo sapiens
gtctcagcctcccaaatagctgggattacagtcgcctgccaccacctgtggctaatttttatatttttagtagagacggggtttcgctatgttggccaggctggtctcgaactcctgacttcaggtgatctgcccgcctcggcctcccaaagtgctgggattacaggggtgagccaccgtgcctggcccccagtgtacattttttaccacccaccccctgacccagagcgagggcagaggttgcctagtgtgtacctgtcgtgcctgccatacctgcctgcggattccgatagaagcacagagcccacatgggttattayggctctgaggtcctgagtttgtaaaaatgtgaaaaactcagcagcctggaagggatctcatggaggccagggctttgtgcttgtgccctgcaagagctgctgcacctgcttcacctgatttgtgtgtcca

SEQ ID NO: 809490 - DNA, 450 bp, Homo sapiens
gtctcagcctcccaaatagctgggattacagtcgcctgccaccacctgtggctaatttttatatttttagtagagacggggtttcgctatgttggccaggctggtctcgaactcctgacttcaggtgatctgcccgcctcggcctcccaaagtgctgggattacaggggtgagccaccgtgcctggcccccagtgtacattttttaccacccaccccctgacccagagcgagggcagaggttgcctagtgtgtacctgtcgtgcctgccatacctgcctgcggattccgatagaagcacagagcccacatgggttattacggctctgaggtcctgagtttgtaaaamtgtgaaaaactcagcagcctggaagggatctcatggaggccagggctttgtgcttgtgccctgcaagagctgctgcacctgcttcacctgatttgtgtgtcca

SEQ ID NO: 809491 - DNA, 571 bp, Homo sapiens
atatcattgatattacttttattaattataacaaatggatttagaatcaatcatcaaagcttggtcccaggtctgatgttctgagatattcaagttcatgcttgcttaatgttttgtttacaaaatagctgcaatttaaaaaaaaacttggaagaggctttctgttttgatgcataatatgaaagctgactgtgacttagcaaaccaaaaatatttattcagaaaatacttcatttcaactatctgtcgtggtgaaaggcagtttttgtttcagtgtgatcaatgcaacacactgtgttttcattatcagctctgttggttgagagtggttctaggaaaacacttgagcactgattcccaaatctaacaagtgcccagattctcagaagctaggaagatgtcacaggatatacccattcttcctagtgaatggactagataagagttaggtttctttccttacccarccttattataaggaagtatattgtgaatgaactttctgaagtgggaaccagcagtaataactttcaaaaattcttttacagggagtttatgcttcacaccatct

SEQ ID NO: 809492 - DNA, 627 bp, Homo sapiens
aaccttaatttttataatttgtttttgaactctaaatgggccttaaaattctgtagttgtatcaacacrttttaatatgtagtatttttgtggttgttcaacttattcattttaaaatatttcctaatttataacttattgggttaattagaactgtgtctcaactaagcccagtgtgggcttttgaattgaaagtctgttattgatttctaacttacattgtgattcagatatgctcaaaatgatttcagccatttggcttgcttcatggtaagatcagattttaaaaatattccatacctgcttcagaagattatatgttctgtaattgttgagtacaggttcactgtagtcaattagcaacgtttgttaattgtactttcaaatattttacatctttattttttcctgtttgtgaatgccatgtaagaatctcccagtataattataaagttattgatgtaaaatacacataaaatgtattttaaagtttacaattcagtgtattacatatattcacaatgtgtaaccatcaccactatctaattccaaaactttttcatcaccccaaatgaaacatcgtacccattaagcagtcactccccaccctctattcccctaacccct

SEQ ID NO: 809493 - DNA, 605 bp, Homo sapiens
tcatgttttttaaatttgctatttaggttgggcatggtggcccatgcctgtaatcccagcattttgggaggccataggcgggagtatcacttgagcccaggagtttgagaccagcrtgggcaacatagggagacccgtctttacaaaataaaaaaatttgctgtttaatgtcattcttaagaaatattaaaaattttaattattagcataaattttactgttctttatattgtaccagcttaaagtgcaaatattagagcttttttttttattaaaaatttttttttaagagacaggctctcccttttgttgcccaagctaaaatgcagtggcaatcatagctcgctgcagcctcaaactcctggactcaagtgatgctcctacctttgcctcctgagtaactgagagccactacacctggctaatttttttaaaaaagttttgtacagaagaggtggtctctctctgttgtccaggctggtcttgaattcctggcctcaaacaatcctccctccttgacctcccaaagtgctgggattacaggcatgagtcactatgcctggccataggagcatttaactcatttgtggaatcatctaaaatca

SEQ ID NO: 809494 - DNA, 416 bp, Homo sapiens
actgttctttatattgtaccagcttaaagtgcaaatattagagcttttttttttattaaaaatttttttttaagagacaggctctcccttttgttgcccaagctaaaatgcagtggcaatcatagctcgctgcagcctcaaactcctggactcaagtgatgctcctacctttgcctcctgagtaactgagagccactacacctggctaatttttttaaaaaagttttgtacagaagaggtggtctctctctgttgtccaggctggtcttgaattcctggcctcaaacaatcctccctccttgrcctcccaaagtgctgggattacaggcatgagtcactatgcctggccataggagcatttaactcatttgtggaatcatctaaaatcacaaaatgtattttatagttcacacatg

SEQ ID NO: 809495 - DNA, 581 bp, Homo sapiens
tgcataattcaggataagcccttcctctcaagatctttaatttaatcacatattttgctatacaaggcaatattcactggttccgtggattaagaagtgaatgtatctttggaaggycattttttttttcagctgcccacaaaggttacaaattctccttgatcactctgttaaacataaccatagattttgataaacagtgttttcatcatcatttttcagatattctgtaagtgtgttctcatttcacccaagacatatcatagaagactttctaattttcagcagaagtggctttttattttataatttcaattttaaatttctggttttattacattgtggtgagatagcattgtttgtggtatttctttttttttttttttttgtttttttttttttggagacaggatctctttgtcaccaaactgaagtatactggcaagaacatggctcactgcagactcaaccacctgggctgaaggagctaatgctcccatctcagcctcctgagtagctgagaccacaggtgtgtgccattatgcctgggtaattaaaaaaggttttttcatagagatagg

SEQ ID NO: 809496 - DNA, 662 bp, Homo sapiens
aaattgttttttttggaaagatctttgagtgctgattcaatttcttatggtatatgactattcaggctttcaatttcttcttgagttagctgtatgttctatttctctagaaactcatttcatctaaattttctaatatattagtaaaaagttattcataatagattttaatcttttcgtatttgaagaatctacatgtactttcttttttcattcttaatgtttgttatatgcatgatctctcttttttcccctagattaatctcattagaggtttatcaatttaattatacttttgctttgttaaccattttctctattgcatgtttgctttctattttactaatttctactctgaactttatttccttgcttccatttcctttgggtttattttgctgttcttttttaaatttgttaaaatggatacatatttcattagtttttatctttatttgtaatattgaatatttaatgctataaacttttttctgagcactatcttaactgtattctatggtttttacatacagtgttttcaaatgctatagtagtatcaacattttttctaaactattgcatcagtttatgtgctggccaggagtayatggaagttctggtggctctagttaatacttgatatcaccactctttaactagcc

SEQ ID NO: 809497 - DNA, 551 bp, Homo sapiens
tgtaattactagttgccattttcagatagaaattttaaaatgttttaaaacctattacactctatagaatatattattttaattttaaaaattctaaatattttgctaataaaaaagtaactttcctcctttcccatcatccaaagaatataactaatgcttcctttttaatggctttattaagatatgattcacataccatacaattctcccatttaaaatgtaccattcagtggtgtttaatatagtcacagaattgtgcaaccatcaccacagtttgtgttagaacattttcatcaccccaaaaggaattctgtacccattagcagactctctgtgacccccaaatcccctatcccaaggcagtaactaatctactttctgtctctatagatttgcctattctggatatttcatataaatggaatcataygatatgtaatcttttgtggttggcttctgttaaagaaaaccagagccagacaataggttcaagctgcgaacagcgattttatccaggaactatgacaacggggaaaaagagacctcag

SEQ ID NO: 809498 - DNA, 577 bp, Homo sapiens
taaagaaaaaaaaaagttatgcagaatgttagatatttacatttgatacggtgtgccactattcaaggaaaaattaaatagcattttttaaaaaatagaatgarcttcaaaattaaagttgatttttaacttccatattagcaaatactcttcactactgaaagacagtactattttgcatattctgcataactttaagaaagtctttagtgaaatctttattggaagaaagtcatttgacaacaggcaaaaatttaatgattcggtatgaagtaaaatcaatcttctgatttggaaaatactctattataaaggtttcacttctttttggatgttttaaaatagacatagacacttgaaagtactatcatcacgtctcaaatcacctagaattcctagtatttttaaattgcaaatacaatttcaagtttatttaaatactccagaagttataatcctactaattgtgctagactttgctagtagagggggcccctctttctggatgagaagtctctcttgcagccatagaagagaccatggctttccccataggtttttcaacagactgtgaagc

SEQ ID NO: 809499 - DNA, 652 bp, Homo sapiens
ttgatgagctggagattgcacttagtaataataatgtttgtataaaattcacagtttatagagtggccttcttgtctcccttaatcctcccaagaacttttggggtataaaaacaccaaaattaagcytgatgagcaaactgtgtgaacaaaacttagcaggagcctaattggtagtgcgtgggttcaagcacacatgctgcatttttccttacctcatactgcctttacacatgaaagttatcggatagtcattggagggaatacatagaaatacactgttctcttctaggatttttaaaaattaaacttcagaagaaaggggttatataaacctcaattcaatggaattcttaaaaacttcttaatttttacgttgaacaaaagttttggtttgtgtaatatttcttaccacctttttccttcaagttgtcagcacatagtaggtgtgttttctttttttgccactggtcttttgtttttttgtttttttgttttttttttggtcattaaatcattttgctctgttgatttttgttcattttgcttggctgcttttgtgggtactacagattaattaaaaggttatttattaacccagtgtctattgctgtaatctttagcatgacaaggccctaactgttgctgcatag

SEQ ID NO: 809500 - DNA, 526 bp, Homo sapiens
aatgatcattatttctgcccaggacctccctggtcttgctctcccctcttcctccccaggcgaccttgggaactttactcaccctctggcccttccctcctctgtccagtgttttccccacccactgtgatcagctcagatcagcgagtctgtgggacattagggatcagtcacccatgtgaggccctcgacggggtcccaggatggagcagtgtatgtccccacaaggctgcttattgcacaagtaatggaggaacaaaggggtgggtaagccccctcctgggcagcttcagaccctgctaaaataggaaacagcctggggcaggtctgaccccacttgtgtctctcctgcccccaccccagcagcagcgtcctggaggccataccatgtgctaagcagatgccaagatcacgtyattcatcatcacctggaaattcccctaaccacaccttaatacgctgcactcgtgcctcagctaaaagtatcacacactgcattgcaatgagtttggatcccagaccccct

SEQ ID NO: 809501 - DNA, 643 bp, Homo sapiens
cagagccttccccagccatgtggccatatcacactggcatcacccacctattccccaayacaacacagtccgggggcccctcacctggctgaggtatgtgacaaggctctgagctgatggtgtacgttcagcctgagtaggtgtttgcatgtggttgcccccaaaccagtgtgatttggggctgcatggatccagagtagggaggtgacggtcccaccatctctggggtgtgtgcaagggtcagggtttgggaaggggttggacaagaccagtgtccctgaggactgcctacctgctgggagctgacatgggaatctgggagtgcgtctggcctcctggagggggtctcgggttgcccagaggggagcgaggaggaggcccagaacataccccttcctagaacaggaaggtggggtgaccctgcagggtggcctcccacacctcagtgatgcctcggtgacccctaaggcagaagatgcgtgaagcaggcatgaggccctgagcactgctggccacccctgcaaatggaggggccccacctgaagttgggggccggggctcatgtttgagccattttgactgggtctttttcagtttattttctaaacctcagtttatttgaagcacagtacatgattgctca

SEQ ID NO: 809502 - DNA, 643 bp, Homo sapiens
cagagccttccccagccatgtggccatatcacactggcatcacccacctattccccaatacaacacagtccgggggcccctcacctggctgaggtatgtgacaaggctctgagctgatggtgtaygttcagcctgagtaggtgtttgcatgtggttgcccccaaaccagtgtgatttggggctgcatggatccagagtagggaggtgacggtcccaccatctctggggtgtgtgcaagggtcagggtttgggaaggggttggacaagaccagtgtccctgaggactgcctacctgctgggagctgacatgggaatctgggagtgcgtctggcctcctggagggggtctcgggttgcccagaggggagcgaggaggaggcccagaacataccccttcctagaacaggaaggtggggtgaccctgcagggtggcctcccacacctcagtgatgcctcggtgacccctaaggcagaagatgcgtgaagcaggcatgaggccctgagcactgctggccacccctgcaaatggaggggccccacctgaagttgggggccggggctcatgtttgagccattttgactgggtctttttcagtttattttctaaacctcagtttatttgaagcacagtacatgattgctca

SEQ ID NO: 809503 - DNA, 621 bp, Homo sapiens
gtgggtggacaccaggtggagaccaggggtgctgctcagaatcctcctaggcccaggacagctgcctcagcaaaatatttgccccacgtatctgtggtgccaaggtataggaggtttagtgaactcacccagggatcctcaatacagaccaagcatcaatagtgactgatgctgggtgggagatatttatgttcttatttggatttatgcgcatttcaatttttaatactgaaaatatattattttatttatttgtttttattattatggttttttgagatagagtcttgctctattgcctagactggagtgcagtggcgcgatctcagctcactgcaaactccgcctcctgggctcaagcaactctcctgcctcagcctcctgagtacagcctcccaccaccacacccggctaatttttgtatttttagtagagacaggggtttcaccatgttgtccaggctggtctcgaactactgacctcaagtgatccacccacctcggsctcccaaagtgttgggactacaggcgtgagccaccgtgtcccacccaaaaatgtattattttataaagaaagcacgttattttaaaaataagaggggagggagtctgagacagttgg

SEQ ID NO: 809504 - DNA, 666 bp, Homo sapiens
ctgggctggtcctcagcctgcagggaggatgtgaaggtgaaggctgcagctcctgggttggtgagtggctgctgtccagccctgctgaccatctggtcctttgggggcccccgggctggagctgggtgcgtgtcttgggggtgcccttgcaaggaaccctcaggggtcccgggaggcccccagatccatgcatgtgcttctgtcctggagagctggtgggccaagcaaacctctcctgagtgatggtcactgggggccatcggtggtgtgtctggatcaagggtgcatgcaccctccctctgcatgtgaagggctcaggcctggggttactgtgtccccatctctgtgtccccacctctgagagtttcccagcgactccacccctgtacggcctggacccctgccctgtgctgagctcagcagaggcccagggaggcaggagcttcgccactgaccttttcctgggccggtgccctttcctccttccttggccttgttctgccttgctctgactggtggcttagagtgtggaagggacttggccccctgttctcagcccgcggagggtggatagggcagsgtccagatgggaaatggtttcagagatttgggccctggttcagacagtatgggagaggggaggggaaggagaggtagggggatcca

SEQ ID NO: 809505 - DNA, 486 bp, Homo sapiens
cctccagctgcatccacctccaggccccacccagcctcctgtcctgagccgctttggatgagatcaggggctcatgagccatgcaaagccagcccggcattcctgcccagaacagccatgcttgcatrtttctgtacatttcgtccatggtcttcttgtccacaagtcttagccggcctatttcccttctccagaaacataaacatggtatttgtaattttattatcaccaaggttgcattgatgagaggctttctccttgtgtgtcgcggttcaggagccagtttgaggggcccaggccctgaagcagccttcttaggagggcaagcctctttttgcggagaagattcctgggctggcagagtgtgtggtgtggttcatttcatgtgccaacttgcctgggccatgggatgccagacagctggtgaaacattattcctggtgtctgggagggtgtttcttaatgagagcacatgtgaacccacag

SEQ ID NO: 809506 - DNA, 614 bp, Homo sapiens
caggcagacatcaatcaataaatgtaagctgtacattggttcagcctggaaaggcaggacaattgaagcttccaggtcataggtggattcaaaggttttctgattggcaattggttgaaggacttaagttattatctaaagatctggaatcaatacaagggaatgtctgggttaagataaggggttgtgaagaccaaggtttttattatgcagataaaacttcagggagtaggcttcagagtcaataggttgtaagtgtttcttatcagacttaaaaaggcgccagactcttagttaattctctcctggatcaaagtaaagacctggaaagggaaagggattctctacagaatgcagatatcccccacaagagacagctttgcaggaccactgcaaaatatgtcaaagaaatatattttgaggtaaaacacttccatttctttcagagcctgctatctgtcatgtgatgctacactagagtaaggttggaatttggtgtcctattgctacaaggagtctgttttttcattcttcagatctctgtcttcatggtaacgctggtctgttgtgcctgaactccaaagggagsagggtaaaatgaggcacgcccaacc

SEQ ID NO: 809507 - DNA, 625 bp, Homo sapiens
tctaatgcacagtgagtattggcacccactgtaccaaacaacctcaccccagggttgggaagagtttggaatggagcacctatggtgtttgtttctgtgagtggggcgagttgcagacgctggtctcctcatyggtgtgccatggacttcaacaggggtcctggctacagaaaatactatcactctccataactctggggaatagggacatttaaatgaagaggttatggtcagcctgggcaaagaattacacctataaatggtggtggcttctgccctgacacccatgatctctactcatccacctacccatacctgactgtgtctctgctgaaatatggaggacagattcaccctgcctaagtcatgtttggaaccctcttcctccttccttgtccatgtccactcatctcatttcattccctaattcaccatcaaacagcaatcagtctcctcaagtcttactgtaatctataaaatctatattggtgatcatcagttttttgacttgaaggatcatatgttctgtagatttttttttcagaatgctctggacaattaattttctttaggccagatcacactgcctcctccatgagaattggcagcttcacctatcaaccac

SEQ ID NO: 809508 - DNA, 495 bp, Homo sapiens
ggatcacctgagatggtggcaggtgcctgtaatcccagctacttgggaggctgaggcaggagaattgcttgaatctgggaggtgagggttgaggtgatctgagatcatgccactgcacyccatcctgggccacagagcaagacttcatgtcaaaaaaagaaaattattgataatttttatttaggtttgttatgatgtattttttgtccatatttttagagacacgaatggaatatatggactaatagataggatatctgcaatttgtttcagacaactgtgtaaaagaagttatttgaggccgggtgcggtggcttatgtctgtaatcccagtaccttgggaggccaaggcgggcggatcgcctgaggtcaggagtttgagagcagcctggctaacatggccaaaccccttctccactaaaaatacaaaaattagccagacgtggtggcaagtgcctgtaatcccagctatttgggaggctgaggcaggagaat

SEQ ID NO: 809509 - DNA, 600 bp, Homo sapiens
accaggggtgctgctcagaatcctcctaggcccaggacagctgcctcagcaaaatatttgccccacgtatctgtggtgccaaggtataggaggtttagtgaactcacccagggatcctcaatacagaccaagcatcaatagtgactgatgctgggtgggagatatttatgttcttatttggatttatgcgcatttcaatttttaatactgaaaatatattattttatttatttgtttttattattatggttttttgagatagagtcttgctctattgcctagactggagtgcagtggcgcgatctcagctcactgcaaactccgcctcctgggctcaagcaactctcctgcctcagcctcctgagtacagcctcccaccaccacacccggctaatttttgtatttttagtagagacaggggtttcaccatgttgtccaggctggtctcgaactactgacctcaagtgatccacccacctcggsctcccaaagtgttgggactacaggcgtgagccaccgtgtcccacccaaaaatgtattattttataaagaaagcacgttattttaaaaataagaggggagggagtctgagacagttgg

SEQ ID NO: 809510 - DNA, 484 bp, Homo sapiens
cctccagctgcatccacctccaggccccacccagcctcctgtcctgagccgctttggatgagatcaggggctcatgagccatgcaaagccagcccggcattcctgcccagaacagccatgcttgcatrtttctgtacatttcgtccatggtcttcttgtccacaagtcttagccggcctatttcccttctccagaaacataaacatggtatttgtaattttattatcaccaaggttgcattgatgagaggctttctccttgtgtgtcgcggttcaggagccagtttgaggggcccaggccctgaagcagccttcttaggagggcaagcctctttttgcggagaagattcctgggctggcagagtgtgtggtgtggttcatttcatgtgccaacttgcctgggccatgggatgccagacagctggtgaaacattattcctggtgtctgggagggtgtttcttaatgagagcacatgtgaacccac

SEQ ID NO: 809511 - DNA, 607 bp, Homo sapiens
gtctttattagcagcgtgagaacagactaataaaatgatacctgtactagaatccacttgaagaaagggaagcacaaattgatcaccaaggtgtgacataggaaagcatagtttgatggtccatcaaacactattgataggaaaaagtgagaactaagaattgagcattcaatttagcaatataaatattattgtgactaggatgaacaatagtttcagcagagtgtttaaagtaaaatcttggttagtgggtttgtagctgaaagagaggaaattggagacagcaattacagacacttgaaatttttatcagggaagatttcaagcatataaaaatatgaattaacaaaaaatgaaacccatcacccacattcaattgtttttaactgatagccaatgttgttcatctacttccccactccctctgtccctaccttaccagattattttgaagatactctgaaaaaataattkaacttcattcataaaaatttagacttctgctttaaggctcttgcattttttctttttctataaaaggagcaaaaaaacagatggtaatttgcaggtggaagtgaggttaagagaagatatttgtaaaccactt

SEQ ID NO: 809512 - DNA, 553 bp, Homo sapiens
tgaagaaacatacctgaaaataattagagccatgtatgacaaatccacagacaacatcatactgaatgggcaaaagttggaagcatttcccttgaaaactagaacagccagacacgatggctcatgcctgtaatctcagcactttgggaagcaaaggcaggcagaccacttgagcccaggagtttgagaccagcctggtcaacatagggaaaccctgtctttacaaaaaaataagaaaaattagccaggcgtgatggcacacacctgtggtcccagctactcgggaggctgaaatgggaggatcacctgagcctgggagctcaaggctgcagtgagctatgatcacactactgcactcaagcctgggtaagagtgaaaccctgaccaaaaaaaaaaaaaagaaaagaaaaaagaaagaggcyaggcgcggtggctcaggcctgtaatcctagcactttgggaggccgaggcaggcggatcacctgagattgggagctcgagaccagcctgaccaacatggagaaaccctgtctctactaaaaatacaaaatta

SEQ ID NO: 809513 - DNA, 494 bp, Homo sapiens
ataaatgaatacatgaataaataaataaataaaagttaagaacataaaaaaaagcagacacagactaatggaacagaacagagaacccagaaatgagactacacacctccaactatctgrtcttcaacaaacctgacaaaaacaagcaatggagaacagattccctattcaataaatggtgctgggataactggctagccatatgcagaagattaaatctggaccccttccttacaccatatacaaaacttaactcaagatagagtaaagacttaaatgtaaaacccaaaactatcaaaaccctggaagacagtctaggcagtaccattcagaacataggtacaggcaaagatttcatgaggaagacacagagcaattgcatcaaaagaaaaaattgacaaatgcaatctaattaaactaaaaagcttctgcacggtaaaagaaactatcaacagagtaaacagacaacctacagaatgggagaacatttcttt

SEQ ID NO: 809514 - DNA, 569 bp, Homo sapiens
tgtgtacacctgaaaaagctcaaacttgcctagcacatatagagtccgaattcagttgggtttgtgtgaaacgggtaggttgagccctaaaaaagaggtagataacccatataggcagacttccttattttatttatttttttctgcttcagcctcctgagtagctgggactacaggtgtgtgccaccacgtctggctaattttgtttgtttttagtagagatggggtttcaccatattggccaggctggtctcgaactcctgaccttgtgatctgcgcgcctcggcctcccaaagtgctgggattacaggcgtgagccactgcgcctcgccaacttccttattttaaatgccatttcccactaaaaataaaaccagtaattctttgaaaaaaagttaatattatgtataggactggaagtatataagataaaactggaatatattgtcakaccagaaatcaaagattttgtcaaagactaatagttccatgtcaaaaagattcactaatcaatttgcagaggctcccactggccaaagatagagcttgatcatcaacaggaataataa

SEQ ID NO: 809515 - DNA, 645 bp, Homo sapiens
ggtaaaatgtttcataatctcactctattgtccaagacaaatgtgctattgtattacatgtgaaatgtcatctttgaagtctggtaagggtgtgctgtgaggtgagccatctggaaaacacagtgtagaytgaaaaataattataagccagtttattacttttttccagttaagcctaccatgacagctgctaaaaaaaacactatgtagtataaagggtaaaaagactctgaagtcgcaaaagttatacccacctccaacaatgattagctagtatacaagtcactcaaattccctgatccttttggcttgtctgtaaaattgaaatatggacacatgccacagaggagttttatgagtattaaatgaaacaacagctgtaaagcacttcgtacagagtacacaataagtttgatttctcttctcgtcttctaaatatagactatataatattctttatacagagaatattagataaaatccaatcatatttgaaaaccaggttgagcaggttggtttttcaaagaaattcattgagcttccataatgtcctttctatttgacgggagaaaaggggctttggaagatcaagtgtgaagctttagaattctgtctggagctggttaggaccacccaggcctgagt

SEQ ID NO: 809516 - DNA, 607 bp, Homo sapiens
atagcacattcagtgccaacaaagcatctggcacgtagtaggcactctgtcaatagatggcaaacaccagcgttattcttacaaaacaggtgaaactgcatcacctcagtctcttcttggaccaacatcagcaggtgttaattgttggagcaagtggcatctcactactcaaactatggatgataatctgctggctgcatactgtataggaaaagcatttttacctgagaaagataactttcaactttctaatctagccttgtaccagttgcaaataattgttattatatgttatgctttatagacagccttgtttttaattatgaggtttttattggagtggcaggtttcagggtaagtctgccatctgacttgccagtacttgttaaaagtttttatagtgtgactcatttacatatgcatgtgtatgtttaggtgctattattaaattttgctggcatatagtgagaaaattgtgattcaaattcgtccrtatgtactcctcccccaccatctgctctgcccctccatttaccagaaggctagctttagctacttgtgcatgtaaaacagaagcaagcaacactgtgaaagtgaaaatctttta

SEQ ID NO: 809517 - DNA, 671 bp, Homo sapiens
tgaggctgggctggtcctcagcctgcagggaggatgtgaaggtgaaggctgcagctcctgggttggtgagtggctgctgtccagccctgctgaccatctggtcctttgggggcccccgggctggagctgggtgcgtgtcttgggggtgcccttgcaaggaaccctcaggggtcccgggaggcccccagatccatgcatgtgcttctgtcctggagagctggtgggccaagcaaacctctcctgagtgatggtcactgggggccatcggtggtgtgtctggatcaagggtgcatgcaccctccctctgcatgtgaagggctcaggcctggggttactgtgtccccatctctgtgtccccacctctgagagtttcccagcgactccacccctgtacggcctggacccctgccctgtgctgagctcagcagaggcccagggaggcaggagcttcgccactgaccttttcctgggccggtgccctttcctccttccttggccttgttctgccttgctctgactggtggcttagagtgtggaagggacttggccccctgttctcagcccgcggagggtggatagggcagsgtccagatgggaaatggtttcagagatttgggccctggttcagacagtatgggagaggggaggggaaggagaggtagggggatcca

SEQ ID NO: 809518 - DNA, 596 bp, Homo sapiens
ataaaaaggatacatcaaccctaaattctccttccyattaatgataccaacatgactggcacaagaattatattttggttttagaaacttttccttgataggaattttatactttgataagttttgtctgaaatttcacattcctgaaaactttaaatgagtgaaggtcatgtaagagttgtgtctgggcttcatggcagaactgctggcgagcgtaccctttctgcagaaagtataaaaatggccttgctgaggaaattaaatttatgttcaagtgctatttctttatggcaccgggaaacaagcatttcaaacagctggaaatggtcagagtggtcataaagagtttgtgttaagaatggttacttaggtgccaggtgtcagcctgtccaagtgctggctttgccacttaccagcactgtacactcagaagtgcacctctgtctttttttaccttatttgtaaaatggaccagtgcatgtaaagagtttagcacagtgtgtagcacataagagctcaatacaaattagttagtattagccaggtgtggtggcccatgactgcagtcccagctactcaggaggctgaagtgggag

SEQ ID NO: 809519 - DNA, 584 bp, Homo sapiens
gtgaggtaggcactattaatagctccattttgggggaaagttaattaactttcctgaggtcacattgtaagtggcacagcttgaatagaggcattcccccttcggagcccatgctcttaaccctctgccttaggtaaggatcaattataataaatacacctgtcttcagtgcggccctgaatcagggaggaggacattggaatccctacagttcttttttcttggcatttaattattaacagttgcatctctctcttgactggagcagtgataaaaaacaagaacaaacaaacaaaaaaaacagtgcatctgtttgatttccaaaaaaagctttaaaagttactgttttctggctgggcacggtggctcacgcctgtaatcccaacactttgggaggccaaggcaggcagatcatgaggtcaggagttcaagaccagcctggccaacatggtgaaatcccgtctctactaaaaaatacaaaaattagctgcacctggtggcgggtgcctatagtcccagctactcaggaggctgaggcaggagaatcatktgaacctgggaggcggaggttgcagtgagctgaa

SEQ ID NO: 809520 - DNA, 487 bp, Homo sapiens
taggaagaatcaatatcatgaaattggccatactgctcaaagtaatttatagattcaatgttatcccatccagctaccattgactttcttcacagaattagaaaaaactactttaaatttcatgtggaaccaaaaagagcccatatagccaagacaatgctaagcaaaaagaacaaagctggaggtgtcacgctgcctgacttcaaactatactataaggctacagtaaccaaaacagcatggtactggtgccaaaacggataaagtagaccaatagaacagaacagacacctcagaaataacaccacacatctacaaccatctgatctttgacaaacctgataaaaacaagaaatggggaaaggattccctatttaataaayggtgttgggaaaactggcaagccatatgcagaaaactgaaactggacctcttccttataccctatacaaaaattaactcaagatggattaagatttacatgtaa

SEQ ID NO: 809521 - DNA, 649 bp, Homo sapiens
aatatttaactgttaatgagtatctattactgtcagccaaacatatttatcactgccaaatgctrtacagcttcatcagccttcaggaaaattctccatcagcctcagttgatgtagggctcatacctaggacacagagggctgataatttgtcattttgacttgaaatgaataaagaaaagccatatttaactggcacacaattatggggttttgattctggttatttgaaatttctagatagctgaagattagcagaaaatgtcattttacttattttttaaataaactttactttataaaccagttttaggtacacagcaaaatttaacagaaggtatagagatttctcatatatatcctgcctacacatatgcatagcttccccacccattttatttttatacttgaataacacactcttcccctctttcccatatcccatagaatgtgccaggcaaattgcttgcctttgtagttaagcaaggctttaaggctatcatcttgattgaagatccattctcattattcagaacattatgtgtagaagtggtagatttaggaaattgaggtgaatgtaggctgaccccaggttgactactctggattaatttttcttttttggccttttaaaatttaaactctgatt

SEQ ID NO: 809522 - DNA, 559 bp, Homo sapiens
cacacacacacacgtacattttctagctctatctgctcaaaggccctaaaagcagattcccagtaccaatgaacacatctacccagaatttggtcttttgcggatttttggagacagagtctcgctctgtcgcccaggctggagtgcaatatcacaatctcgactcactgcaacctctgcctcccaaattcaagcaatcctcctgcctcagcctcctgagtagccaggattacaggcatgtgccacgacgcccagctaatttttgtatttttagtagagatggggtttcaccatgttggccaggctggtctcaagctcctgacctcaggtgatccgcccgccttggcctcccaaagtgctgggattacaggtgtgagccactgtgcccagcccagaatttggtttctaatagcattccccatgcagaggaatcagggtccatggggaartgctgaagcacaaaagcataaaataaaagcctgtaaaatctagttatgtcacaaagtaggaaggtgctaaaatagttgggcatatcactaagacataggagccaacttga

SEQ ID NO: 809523 - DNA, 571 bp, Homo sapiens
agcaaacttttagtgagcttataccatattgatttagtttctgtttttacatatgctgaaggaactgcttgtttgttatgcaagtttcataaccacaacagtcataaaattcattaraaacaattccattgagcatcaggagagagatgaagaaatgcctagtggtgatatataagctaaagtggagggcattaccctttctcccacaatgccatcaaatgccccctattgagccaccccaagtaacatacaagataaaaatatacgagcttgctatcaaaatgaaacatcaagacaagccatctcgactgccacacagatttcccttctgtgctgtcctatataaagattttgagtgccactgcaaaggacctaacattggtttgccttagggaaaaaaaattctttctttagttttgtttttttctttcatttgtttacatcttaacattttctgaattgcttctgataaccttattcaagctacagtgaacctaaataaccttcttatcaaggttgcagaagggagatggtggctcagtaatgaagacccgaaaaaagaaaaaaaaaa

SEQ ID NO: 809524 - DNA, 604 bp, Homo sapiens
ttttctttctcactaattataggtatctctctcatgaccctttttgggtctgtgtacatctctgaaacaaccactgtagctccagagacacaatcctcattggccaaatcactgcaatttgcccactccttgagcaaggtcagtctgtagactaaactgtgggtagggagtttcacaaagagcaaaccaagtcccacgtccagaaaaatagagggggcacagaaggcagaaacagcagatatccattacaacttggttgtttgcttaattgaatgtaattatgttggtaatagagactttgtcctttcatagactctgattgcactactacctactacgcaaacagattctaataaattatgtcatggttagttaagaatggaggaggaggagatgggatggcagatgaggtacacaagtggatgcaggcaaagagaaaacagcaatatttctagatcaccctgaaaactgaagctaaaattctacttttaagtgtgtgaggccaggcacactggctcatgcctgtaatcctargcatgggaggccaagcagcagggatcatttgagtccagtgtgagcaacacagtgagaccccgtctctaat

SEQ ID NO: 809525 - DNA, 486 bp, Homo sapiens
tgggtctagtgggaggaggcagctaacggaaacttagtcattgggggattttatgctgagggcagttttgctctgtgtttccttgcagacacctctgcagagcatcaggctctgtccctgctgtgaggatctgcaaggctagcccttgccctttacaaatctcctttcttttctttctttaaaaatggacttgccttggattaataacgatgtgctggagagcttcttatctctgcctggaattatgctttcataataatattacccttaacctttaatctaaaaagtagaggggaattaaaaataattcacaaaggaaaaagcaaacctccacaatcgaaagagatagggttaggggcagaagaaatggcaagaagacatcaggctggaaatggtgrcatttaatcggggattaggcacgaagtgggtgaggcaattccagatgacaagaaccaacccgaaccatctaatggaacctttgtcaag

SEQ ID NO: 809526 - DNA, 521 bp, Homo sapiens
tccagatgacaagaaccaacccgaaccatctaatggaacctttgtcaaggttttcaaatactctagtgccctttaaaaatcattttctcctctgcccttatgtttttgtccagacttagaggtgaaagtgaaataatcgagggtgagatgctggctctattgactttttctcaaagggatgcgagctacaaatttcatgggaaatcctcttgctgagtaaaagcccttaagaacaggattggctacatgatttgcagaggccagtgcaaaatgaaaacatggagtttcttgttcaaattattaaaagggtcaaggagacaggcaagcatgaaacccaatgtagggcccttctgagcctggggaccctgtgtgactgcatagatcacacacccatgaagctgaccctgcttagggggtctctgaagtttcacactattctcattttctgacttaataatgtttcttyttccattttcaaagcttcagggatgtggtaattgtgtgtgtgcgcactattttta

SEQ ID NO: 809527 - DNA, 633 bp, Homo sapiens
acttccctcctctctctctgcttgctttgcagcagctttactgagatatgattcacataccctacaattcacccctcggaagaagagttcttagtagagttttccatcatttttagtctgttcacagagttgtgtaaccatcaccatccagtttagaatatttgcatggccccaaaagaagcccagtactcatgaatcagtcactcccatttccccctcacctacctcctctctcagcctctcccagcctctcacaaccaccagtctactttctgtccctatggatttgccctttctggacatttcatgtaagtggaatcagatggtatgtggccacttgtgtttagagtggtgagcagagcccaggctgcggcagacatccagaccaaggcggtctgggccaggtgacagcctggctagggtttggcgaggtcagttcctcctgcctccgtggggcccatgagccgcagtccccagggatgcatccggagggcatcagaggcaggacgccgagcaagctgatacccaaggagtcacagccaccctgggagcttaaagggccgaygcagggattgggaggccgtggtctgggtcagttgggaactgggggtgatcagggatggccactcatag

SEQ ID NO: 809528 - DNA, 620 bp, Homo sapiens
attcacataacataaaattaatcactttaaagtttatacttcagtggctttagtatattcactatgctgtacatgcatcgccacggtgtaattccagaacatttccatttccccaagagaaaccrcaaatctgttggcagttattctccacttctccccaccccatgccctaggtatccaccaatctactttctgtcttcgtggatttgcctgttctggacatttcatagaactggaatcacacagcatgtgggcttttgtgtctggcatctttctctccgtagattttcctattctggacatttcatagaaccggaatcacacagcatgtgggcttttgtgtctggcgtctttctctccatggatttgcctgttctggacatttcatagaaccggaatcacacagcatgtgggcttttgtgtctggcatctttctctccgtagatttgcctattctggacatttcataaaactggaatcacacagtatgtgggcttttgtgtcgggcgtctttctcttagcacagtgtttccaggttcatccgcgctgtagcctcattcaacacctcattatctgtgacgctaaataatattcctttattctgtttatccatttacctg

SEQ ID NO: 809529 - DNA, 552 bp, Homo sapiens
cagctcctcatctgttcaagttggatcctaagattgcagcaattcagccccttcttcaggctccacttctaattctagttctcctgctgtttcccccacatctgcagtgactttctccactgaagtcctgaacccccaaagttatccatgagggttggaatccacttcttccaaattcctgttaatatatggatattttccttatatactggtgtctttacttgtttccaacttcttattgatacatgatagttgtgcatattaattgggcatatgtaatattttgatacatatacacatgtgggatgatcaaatcagggtaattacgatatccgtcacctcaagcatttatcatttctttgtgttgggaacatttcaaatcttctcctttagctattttgaaatgcacaataatttattgttttttttgagatggagtctctctgttgcccaggctggagtgctgtggtgcratctcggctcactgcaacctcccgggttcaagcgattctcctgcctcagcctcccaagtagctgggactacaggtgcct

SEQ ID NO: 809530 - DNA, 544 bp, Homo sapiens
agagctgtaaggcaaaagcatcaggtaacctatacacraaagcctatcggatttttttttttgagacagagtcttgctttgtcatccaggctggagtgcagtggtgcaatcttggctcactgcaatctctgccgccctggttcacgcaattctcctgcctcagcctcccaagtagctgggactacaggcccctgccaccaggcctggataatttttgtatttttattagaggtggggtttcaccgtgttggccaggctggtcttgaactcctgaccttaaatgatccacccaccttggcctccctaagtgttgggattacacgaatgagccactgcgcctggccagaatacctatcagattaacagcagatttctcagcagataccctacaagccagaagggtttgggttcctatttttagcttcctcaaacaaactaactgccagccaagaatttagtatccagcaaaattaagtgtcatatatgaaggaggcataaagtctttttcagacaaatgctgagagaatttgccaccaccaagcca

SEQ ID NO: 809531 - DNA, 576 bp, Homo sapiens
ccgcatagccgctgggtcccaccccacggggtrcactgcgtatgtgtctgccctgggaaccagcctgtgctggggctgttgggggatccagggccaccctccgtctgcaaagcccacggcagagagggttggaggagaggagagtgtgctgaatgtttgcttcaggtgggctggcatggcctgggcagtggaagagagggcacaggagggaagccttccagacagaggaggcctgggccccaagtggtcaacagcttgacctcttggaagaaccaagcatggctgtgtctgggaacctgggcctccaaaggggaagtgtgtggtcagcccgcaggctgccctatgccttggctcatgctacacggggagagcagggcagggtggggtggttcccagtgaaggtggcaggactcagcaagtgtgggcctgtggagccagccaagagctcacacgccactgatggcccctcatcatccccaagactgaggctgctgctctctgtgacttggcacagcctccaggcatggggttcctaactctacctgcctgcattcttgccctatttgtggctgtgac

SEQ ID NO: 809532 - DNA, 621 bp, Homo sapiens
aattcacataacataaaattaatcactttaaagtttatacttcagtggctttagtatattcactatgctgtacatgcatcgccacggtgtaattccagaacatttccatttccccaagagaaaccrcaaatctgttggcagttattctccacttctccccaccccatgccctaggtatccaccaatctactttctgtcttcgtggatttgcctgttctggacatttcatagaactggaatcacacagcatgtgggcttttgtgtctggcatctttctctccgtagattttcctattctggacatttcatagaaccggaatcacacagcatgtgggcttttgtgtctggcgtctttctctccatggatttgcctgttctggacatttcatagaaccggaatcacacagcatgtgggcttttgtgtctggcatctttctctccgtagatttgcctattctggacatttcataaaactggaatcacacagtatgtgggcttttgtgtcgggcgtctttctcttagcacagtgtttccaggttcatccgcgctgtagcctcattcaacacctcattatctgtgacgctaaataatattcctttattctgtttatccatttacctg

SEQ ID NO: 809533 - DNA, 486 bp, Homo sapiens
aaacccaagctggtggcaggaggccctcacatccaccctgtccagcccaggggctgtgcctacccagggtgagaaggaccaggagcacacagtgtccagggccagtccatccctgtcacccccacccgccaggcccaccagaacactctgctgtcctatgtgggagaggatgtccccaagctaaacccaggccactcacctgtcttgagggaagatcagcatgtcccgacacccaccctgcaggctctggctcctgcagggaaaccagagggcatgagtgaggtcaatccagctgggtaggtccctgccggataaaggtacacaagcccagaccgtcctctaagcaggaccttgtcatgcctgatctgaaggtcatcccgtggtgctcctgactcataaccacacactcatgtgtaccttcttgcycccacatgtccaggactgtaggtgacactgggctgccacggttccttgtcagcatgtcta

SEQ ID NO: 809534 - DNA, 408 bp, Homo sapiens
tgcgcttggaaccgcagcagatgggatcttgctctgtcgcccaggctggagagcagtggcacaatcacagctcactgcagtcttgaaccactgggctcaatggatcctcccacctcagcctcctgagtaactgggaccacagacacacaccaccgtgcctggctaatttatttttttatattttgtaggtgggatcttgcgatgttacccaggttggtctcgaactcctgacctcaggtgatcctccctcctcagcctcccaaagtgctgggattataggcgtgagccatggcacctggccatgatagggtttttttctctmtatatagaagggactccccatcgcttggaccatagggcagtctgacactcggctgaggctgagtgaagctggcctgggctcagggg

SEQ ID NO: 809535 - DNA, 408 bp, Homo sapiens
tgcgcttggaaccgcagcagatgggatcttgctctgtcgcccaggctggagagcagtggcacaatcacagctcactgcagtcttgaaccactgggctcaatggatcctcccacctcagcctcctgagtaactgggaccacagacacacaccaccgtgcctggctaatttatttttttatattttgtaggtgggatcttgcgatgttacccaggttggtctcgaactcctgacctcaggtgatcctccctcctcagcctcccaaagtgctgggattataggcgtgagccatggcacctggccatgatagggtttttttctctatatatagaagggactccccatcgcttggaccatagggcagtctgacrctcggctgaggctgagtgaagctggcctgggctcagggg

SEQ ID NO: 809536 - DNA, 312 bp, Homo sapiens
gctgggcccctctgtgacctcagactcttccttctaggcaggaacaggttgggggtcccgtctccaagccctgcctggaccccrcacctccagtcccaggctagctgattcagggctccttgccctgcagcccaagggccctctcaccaccattgcccaccccacctccctgggctcctgggatctcagccttaggtcaaggcccagccctggtgcaccctcccccatgggccaggccctccatgcctttgcccgcgccagtccctccacggggcacgcccttcccgctgtggctactcctcaatcttagag

SEQ ID NO: 809537 - DNA, 415 bp, Homo sapiens
ggattcctgcgcttggaaccgcagcagatgggatcttgctctgtcgcccaggctggagagcagtggcacaatcacagctcactgcagtcttgaaccactgggctcaatggatcctcccacctcagcctcctgagtaactgggaccacagacacacaccaccgtgcctggctaatttatttttttatattttgtaggtgggatcttgcgatgttacccaggttggtctcgaactcctgacctcaggtgatcctccctcctcagcctcccaaagtgctgggattataggcgtgagccatggcacctggccatgatagggtttttttctctmtatatagaagggactccccatcgcttggaccatagggcagtctgacactcggctgaggctgagtgaagctggcctgggctcagggg

SEQ ID NO: 809538 - DNA, 415 bp, Homo sapiens
ggattcctgcgcttggaaccgcagcagatgggatcttgctctgtcgcccaggctggagagcagtggcacaatcacagctcactgcagtcttgaaccactgggctcaatggatcctcccacctcagcctcctgagtaactgggaccacagacacacaccaccgtgcctggctaatttatttttttatattttgtaggtgggatcttgcgatgttacccaggttggtctcgaactcctgacctcaggtgatcctccctcctcagcctcccaaagtgctgggattataggcgtgagccatggcacctggccatgatagggtttttttctctatatatagaagggactccccatcgcttggaccatagggcagtctgacrctcggctgaggctgagtgaagctggcctgggctcagggg

SEQ ID NO: 809539 - DNA, 609 bp, Homo sapiens
ttgtatttaaaagcggcccctcctctcctgtggccacagaacacaggcgtgcttggaytcttgacaagcagacctgctcctgcagaggagacagccacatttggaattgggcaccgagaagacctgagaaaaacccactctctcttttttttttttttgagacggagtcttgctctgtcacccaggctggagtgcagtggcacgatctcggctcactgcaacctccgcctcccaagttcaagcaattctcctgccccagcctcctgattagctgggattacaggcgtgtgccaccatgcccagctaatttttgtgtttttagtagagacggggtttcaccatgttggtcaggctggtcttgaactcctgacgtggtgatccacctgcctcggcctcccaaagtgctgggattacaggcgtgagccaccacgcctggccgaaaaacccactctcataacagaagtgcagactcattgctagattcagtgcccttgagtgtgccagaggtcctctgtgtttgagacaatcctgtgtgtgccaggaggctccgtgtgcaccaggggctctcagaatcccgcttacccagctggagaccatgcctctggcagc

SEQ ID NO: 809540 - DNA, 625 bp, Homo sapiens
atttcttaaaagttaaacacacacacacacacacacacacatcctcctaccaccaccaccaccatgtgtcaaggaagcagcataaaaggtactgcaaagaggttgaarattcccaactgtccacccatgtgcagagacctctggcccacacgagtgctcaactcccagtcaattaagaattaatgctgggaaactctcagggtcggagaaccaaggcaccagaaggaagcccgtgttctttggccgtctccaaggttctgggaggctgggtttgctcaacgactgggctttttctccctcctcctggacgagtgatggtgaaaggcgccactcgcctcctcttcctgtcctgaggaggtggtgggaacctagactactggtggccattattctatgccaggcaatccgggcccattaatgcccgtgcgcacacacacacacacacacacacttctaatcccagcaaaatgcttcacaggcgctgagcacaaaataaatgcttattaactaaactgacccaaaatagtgaaatgtacaagtaaattaatcatgcctttcccggaggcctaacaggattacaaattcggcaaaaattgaccgcatggagatcaatacgcgtctactt

SEQ ID NO: 809541 - DNA, 623 bp, Homo sapiens
acactcattggacacttataatgtgccagatactgtgctaagcacacacctccattatatgggagctactttattattatcctttcacagaggaagctactgagacttaaataataacttcaggaaagccacttgtgaagtcagtggtaccacctgtccctgcctgactcctccaaagcccatagtcttagtctctctgctataccccattctaaagctggtgctaagacagaaaataattcacatctagagctactgcctctcctttcttctacataactaaagtctcttccaatgtgacacacatgtcctctttggttagtatgtggaataatgggagcacattccaagcatgataggaatccatacagccagcgataacccacctgagttgagggaaaaaaattaaactatgagtttagtcaaagtggcaatgctaataaaacctaggtgttctttgcacacttcctgagtggccatgtaaaaagcatccaattgcagggtgcactgtgccattcattctgccagcaagttaataacctcttactragctcccccaggatgatggtgctgtgctagatataggattgcagaacaagtcatggaatctaaggtgccactca

SEQ ID NO: 809542 - DNA, 626 bp, Homo sapiens
cttgtttaaaatataaatgttatagacacctaagatagaaatttgactgaaacagcctcttaattattgtcttaaaaaattggtataatgaaattgcatttgtagtctttggacatttaaatccagaagggatattttctttttcttttttaaaaatttaattcaatagtttttgggctacaggtggtttttggttacatggataagtgctttagtggtgatttctgagattttgatatacccatcacctgagcagtgtgcactgtacccaatatgtagtcttttatcccccccccgctccacccttcctttatcgtccccaaagcacattatataattattatgcctttgcagcctcattggttagctcccacttgtaagtgagaacatgcgatatttggttttccattcctgagttacttcatttagaataaattgtctctagctccattcaagttgctgcaaaggccattatttcattccgttttttggctgaatagtattccatrgtgtatatatgccacattttctttatccacttgttgattgataggcatttaggttggacccatattttcgcaattatgaattgtactgctgtaaacatgagtgtgcttttttttttt

SEQ ID NO: 809543 - DNA, 601 bp, Homo sapiens
gtttaattatttcccatctatttatttttgtttctgttttatttgcttttgggatcttagtcatgaactttttacctaaaccaatgactataagagtttttccaatgttatcttctagaatgcttatgttttctggtcttagatttaagtctttgattcatcttgagttaatttttgtataaggtgagcattgaggatccagtttcattcttctacgtgtggcttgccagttttcccagcaccatttattagatagggtatcctgtccccactttatgtttttgtatgctttgtcaaagatcagttgactttaagtatttggctttatttctgggttctctattctgttccattgtctacttgcctatttgtgtaccagtaccaggctgttttagtaactatagccttgtagtataatttgaagtcgggtaatatgatgcctccagatttgttctttttgcttagtattcctttagctatgtgggctcttttttagttccmtatgaattttaggatttttttctagttctgtgaagaattatgatgatattttgatgggaattgtattgaatttgtagattgcttttggcagtatggtcat

SEQ ID NO: 809544 - DNA, 500 bp, Homo sapiens
tataatatatttgtattttgtttgttgaaattatctaactttycatttttcttttagactttaaagctgtcaagccgtgttctagataaaataagtattggacaacttgttagtctcctttccaacaacctgaacaaatttgatgaagtatgtacctattgatttaatcttttaggcactattgttataaattatacaactggaaaggcggagttttcctgggtcagataatagtaattagtggttaagtcttgctcagctctagcttccctattctggaaactaagaaaggtcaattgtatagcagagcaccattctggggtctggtagaaccacccaactcaaaggcaccttagcctgttgttaataagatttttcaaaacttaattcttatcagaccttgcttctttttaaaactttaaatctgttatgtactttggccagatatgatacctgagcaattcttgttctgggttgtcttatgtgaaaaataaattcaa

SEQ ID NO: 809545 - DNA, 573 bp, Homo sapiens
attcattgtaaaccatgaagttcacttttgaagtctataattcagtgacgtttattatattccaggatagcaaaatcatcactackgtctacttttaaaatattttacttacacaaagaaaaatatcattccctaatcattcctctccctaatccctggaaaccaccagtctatttatatttctatgggttagcttattctggacattacatataaatgaaatcatacaatatgtgatcttttttacttatttcacttagcttaatgttttcatgttttcaatgaggtttcaccatgttatagcatgtatctgcatttccttctttttattgacaaagactattcccttgtaaaagcattccacattttgttcatccattcatcagttaatggtcatttggatcatttccactttgtaactatggtgcgtaattccactatgaccctttttgtaaaagcatttctgttaatgtgtgttcatttatcttgggtgaatatgggacgtggtttcatttatcatggcagtggagttactgggtcacatgagaactctaggctaaatattttaaggta

SEQ ID NO: 809546 - DNA, 636 bp, Homo sapiens
gaagaaaagggaatgcttatacactgctggtgggaatgcaaattagttcagcctctgtggaaagtagtttggagatttctcaaataacttaaaacaggactaccatttcacccaacaatcctattactgactatatactcaaaggaatattaattttctaccataaaaacagacgcatgtgtatgttcattgcagccctattatcattagcaaagacatagcataaacctagatgcccaccaatgatggattgcgtaaggaaaatgtggtacatatataccatggaatactatgcagccataaaaaagagtgagatcatgtttttcacagcaacatagatggaactggaggccattatcctaagcaaagtaacgtaggaacagaaaaccaaataccatatgttcttgtttataagttggagataaacattgaatacacgtggacacaaagaaaataacagacaccagggaatatttgaaggtggacagtgggaggagggtgaggatgaaaaaactgactattgggtactatgcrtctcacttgggtgatgaaataatctatacaccaaaccccaatgacatacaatttacctataaaacaaacctgcacatggatccctgaacctaaaataatttt

SEQ ID NO: 809547 - DNA, 609 bp, Homo sapiens
gaatatgggaatcaaagcttctgttttagtcatcttacacgtgatgatgctgacaatttctacaaatagctaacatgtattgagttcttaattggtgccaagcactgtgtaggttactttatgtgtatttccatatttaatcttataatagccccagagttagctggtaccacgattgtcaccattttacatatgagaagacagagtcatgacaaggttactaaatttcccagagttatgcaattagtaagttgctatagacggaaaatgaactcaagtagtctggctagagtttgtgttgtgaatcctcatcctataacacacgttctgcaggagattagagcttgagatatgtaaatgtgggcatcactgacatctataacaactttggcatatattttcagcattttgaatctacagttaagtttacctttactttgtgaaagtgaaattgctttagttagtgttaagctattaagtcattttatatttttwaaaaaaagctattaagtcattttatatttaaaaaaaaaaagcaatggtttccaggagaaaagggtgatacaacaatagtatgacctgatggaaactatttctatttacaaagaa

SEQ ID NO: 809548 - DNA, 582 bp, Homo sapiens
aatttgagatgtctattagacgtctaaaggaaatgattaagcaggaggttgcatatatgaacatggaactcaaataaggggtctagattgaagattaaatctttagagccatcagcatacatagataatagataaagccataggattggatgaaataatttagagactataggcaaatgagagggcccaaggttaaactctagatagggttttgccatgttgtccaggctggtctcaaactcctgggctcaagtaatccacccaagtcagcctcctaaagtgctgagactacaggcgtgagccaccacgcccgaccatgatctctcttcctcactggagtataagcttcataagaacagaatgcagattttctttgttcactgcttatattagtttgctacggctgtcataacacaataccacagcctgggtggcctaaacaacagaaatgtattgtytcactattctggagtctagaagtctgagatcaaggtgtcagcagggttggttccttcttgagactctgaggaagaatccgttccgtgcctctctcctagcttctggtggtttgttggtgatcct

SEQ ID NO: 809549 - DNA, 514 bp, Homo sapiens
gccaccgttcaggagatccatgtggtgacaagcacagctcagaggtgarcagtggcctgcaaggaaaaatcactgtgagtggcctggagggatctaaactcagagaagtggctgcccagtgaccatctgactgaggagtaagtgtgagaggacaaaatctctttccccaagattttaggggaaaagtgtccattggggtggcagaagtgacacgtccttaggtcacatagatgataacattataagacaatatgcacaatctagaccagcagtcattaaatcagatcactatctttattttctcacttttaaaaagcatgtttcagccaggcatggaggcatgatcatgcctgtaatcccagcactttgggaggccaaggcgggtggatcacttgaggtcaggaattcgagaccagcctggccaacatggtgcaaccctgtctctactaaaaatacgaaaaaaaaaaaccaaaaaaaaaaacagctgggtggggtggcatgtgcctgtactccc

SEQ ID NO: 809550 - DNA, 620 bp, Homo sapiens
aggtggaggttcccaaacctcagttcttacttgctgtgtacccacaagcccaataccatgtagaagccactacagcttggggcttgtaccctctgaagccatagcccaaggtttactttccttttgttaaccatggctggagctagagcagctgggatgcagggtgccacaaaccaaggctgcacagagcagcagggccctgggcctgggccacacaaccatttttttctcctaggcctctgggcctctgatgggaggggctgccacgaagatctctgaaataccctggagaccttttccccaatgtcttggctattagtatttgacttcccttcagtttcaaaaatctctgcagccagtttgaatttcgccccacaaaatgggttttccttttctactgcatggtcatgttgcaaagttttcaaaacttttgtgctctgctccctttttaaatataagtttcaatttcagaccatctttttgttacatatatgagcatatacttttagaagcagscaagtcacctcttgaatgctttgctgcttagaaatttattccatcagataccctaaataatttatctcaagttcaaagttccacagatctacgaggcaagggca

SEQ ID NO: 809551 - DNA, 600 bp, Homo sapiens
taactgatggataattgtgacacaacctatgaaaacctctgggattcagcaaaagcagtgctaagaggaaagttcatagcattaaatgcctacatcaaaaagtctgaaagaccacaaatagataatctagtgtcacatttcaagaaattagagaaagaagaacaaaccaaaccgaaaccaagtagaagaaaagaataacaaagaccagagcagaactaaataaaatttaaacaaaaaaatacaaaatgtgaatgaaacaaaaagctggttcttcaaaaatataataaaaattaatcgactattagtgagattaaccaagaaaagaagagagaggattgaaataagttcaattagaaacaaaatggaagatattacgtctgatactacagaaatacagaagatcatttaaggataccatgaacacctttatgtgcataaactaaaaaacctagagaagagggataaattcctggaaatataccaccttccttgattaagccaggaagaaatagaaactttgtacagaccagtaacaaacagtgagattgaaatggtaaccaaaaaaaattccarcaaaaaaaggtctagaaccagatggac

SEQ ID NO: 809552 - DNA, 634 bp, Homo sapiens
agttcttaaatttttgaatatggcactgggaggcattaggcccccaccagcatggtattgaggaactttccctgtcctattactttcacaactgtgagataaattcaggaccttttcagggaagactcatgtcatcattgctcattgaagtgtaagtggagaaaaaggaaaatgaggtaaagaaagatttctctagagcagccacctcaggtggcaatgtctaaaagtatttttgtttgacaaaactggagaggtgtatgctactagcatctactaggtagaggtgaagaatactgccaaacatcctacacagtgtatatgacagtatcctaaaccaaagaatgatatggcccaaaatgtcaacagtgtgaggtttagaaaacttggtatatttttatctcttctctcaccccttcctccctccaagatacacatacaagctgttaaaagtggttccatttagggaagaagctagctttgggtagcaatatttggaaactcagagtgaggagaaggaacatagactgtccttttttkgtagaatatatagtatatactaatatatgtattataaacataataaagtatattttacaaaacaccctactgtatttttcaaatgatttttaaaaaa

SEQ ID NO: 809553 - DNA, 630 bp, Homo sapiens
agaaaaaaaaaggagagtgatatgtggacatgtggacatgtggtttaggaaaagcaatgtgcctgcctgctgatgtttggactcttcttgaaagacaagtttcttgttctagtggagatacaaaaggacaaaatcaaggagaaatggctcaatggctcctcaaaccgctctagctgctcaacatcgtctgagtgtaatagtgagttatttagaaagcaggaaagaataaaaaagataatagaaacaacataggaaaaaaccagttaaagacgttcttttaaaaatctcgtgcagggaaaacatccttagtctttgtcctgtctactttcaagttggagtaattgatcctttatctaggagacatctgttctctatgaaagataatgaagataccagagtaggaaagtatggaccaagacaaggacttaaggcaaggcacctctttcttctaaagcctgtttgtagcatctgcaggaactcagattagtgtttcacttgaaatttgcatttctgtgggtatatatatatacrtatatatatatatatatatacatatatatatatacatatatatatatatatatatatatatatatatatattttttttttttttttttttttttttttt

SEQ ID NO: 809554 - DNA, 637 bp, Homo sapiens
tacacatatgtgtatatacatactatgtatatgtagaagttagcacatcaaagcagaactcttcatcatttacagttgcgtcagagtggcactggcttccaaaatcagtattctgctagataagcwttaaaggaaatgtatattacttttctgtcccatgggacatacatcatataaccagtggaatttttgtcttctaactccatgattatattcaatgatgaacaggggtaaacattttacctgggctgcatttatttttaaagccgtcacattcaaatgagatatggaaatgaaaagctttcacattgctgatgctgaagagcaaattagaagcaaatgataactataaagttcaaccttgtgttctcctgtatatgccaaaaggtaatgagaatgaagaggataaaaagttgaatctggtaaagatgaagactggtgagctgtcagtgagttccagacaaaagaggcatgataacgcactgggtttcatggagaaaattgtctgagcatggatgactgagttgttttgtttgataggaaaaaaaaaatttaaactctttgggaatattgcaatcagttaattatcatatgtagaaaacatatttatatgtcgaaaaaagataagcacaaagtg

SEQ ID NO: 809555 - DNA, 546 bp, Homo sapiens
tggaatactctttcccctagataccacatgactcactacatcaccttctttagctcgttgatgaaacgtcactttgggcttggccggtggctcacctgtaatcccaacactttgggaggctgaagcaggagaattcacttgagtccaggaattcaagactagcctgggcaacatgatgagacctcccctctacaaaaggtaaactaaattagctgggcgtggtggtacatggcggtagtcccagctgctcaggaggaggctaaagtaggagaatcacttgagcctgggaggctgagggtgcaatgagtcatgattgtgccactttactccagcatgagtcacaaagcgagaccctgtctcaaaaaaaaaaaaaaagtcattttggtaaggcttttgctggctacccttttagacattgcagcaccacaaaactctccttgctggctttatttgagaaagaaacaaaaagcagygattttagtttattttgttcctgctgcattccccttcgcctacaataatgcctagcacatgataggtggttga

SEQ ID NO: 809556 - DNA, 629 bp, Homo sapiens
tctggcttcagtctgcagatcacaactagtcctgggccaattagcagaaccatgagcaactggcacaatgaacgctataaacgtattttagatgatcaattcagttcatctgtagygtagacagaagtcacttgtgggtcttaaggagtcccacaaaaattagcccatatattgtaactagcgataagtgttatttatcttaagtagtgtcatctgttcattcattctacacatatttaatgagcaccaattatgtaccaggcatcatgctcaggaaaaacagtgataatcaaaacagatgtgaagctcgttcatgacatttattgtccattggagaagataaaaaaaggaaataagtcacacacacacacacacactcagaaaagtttgtactgacaaagtgtggtagtgctttttgtcagacacaagaaggagtctaggcctaggatatatgaggaagaagagagtgggaacattgggcaggtgaagttaagggaactgctggagtcatgtgggaggcaattgagggagaaagcctgggggacagagttagggaataagaaatagtctacttggtggacctgccaaaggcccctttagtgggtctaaggggtatgacatagcgctgt

SEQ ID NO: 809557 - DNA, 458 bp, Homo sapiens
ctgctggcctcataggctgagtgactgatttagagtgcttggggtcagtatgagttagagagattcaactcatctattttgctgaggcagctcatctattggctctatagtgatgtggatattactgacttttctcagttttacatgaggccaattgaaggcctgtcctgaagttctgccttcaacagtgctagtgtcataaccaccatggaggagttgaaagaagcatagaggtgagtcttctctgtattaattttcttccctatccccactttgaacagcaggttgaattagtgaaatgttgtgtgtgtgaagcaagtgccccaccttaactcctggctttaattgcattgttaccattaatttatyctactttattatagtagatagcttcaaaattgtgttcctagcacaatcactttatctggtaaatcccttcttgattggcttttgtggga

SEQ ID NO: 809558 - DNA, 558 bp, Homo sapiens
gtacatgagacagacagagaatctccttctttgactcatctttccactaggaatccatgcaacccaggccaagggagagcacttggtttcttccaakccctgaagctaacatggggagaggctgggagatgctgagagggcaagacaccaggaaaagctgcaggcactttctcaggcctggaaacaggggtcctgggaccctgccattttaaaaacaacctcaaacaaataaactgaattcaaataaactggataatagaccaaatgtatcttatagacacttacagaacattctaaccacagaatacacatcctcacctctacgtggaatgctctccaaatttgctcatatgtttggtcataataaataaatcaatagggcagccatcattataactccaggctgcactttaccctggctggagccagggaggctggacagcttggtcgtgagagatattccccacagtacagcatactggctatggcagtccatgtccatattgcttcttcaggccagaccctgacccatatctcctcactgggttgggactccct

SEQ ID NO: 809559 - DNA, 558 bp, Homo sapiens
gtacatgagacagacagagaatctccttctttgactcatctttccactaggaatccatgcaacccaggccaagggagagcacttggtttcttccaatccctgaagctaacatggggagaggctgggagatgctgagagggcaagacaccaggaaaagctgcaggcactttctcaggcctggaaacaggggtcctgggaccctgccattttaaaaacaacctcaaacaaataaactgaattcaaataaactggataatagaccaaatgtatcttatagacacttacagaacattctaaccacagaatacacatcctcacctctacgtggaatgctctccaaatttgctcatatgtttggtcataataaataaatcaatagggcagccatcattataactccaggctgcactttaccctggctggagccagggaggctggacagcttggtcstgagagatattccccacagtacagcatactggctatggcagtccatgtccatattgcttcttcaggccagaccctgacccatatctcctcactgggttgggactccct

SEQ ID NO: 809560 - DNA, 636 bp, Homo sapiens
taagatatgaaactacaaaacactaagaagaatacacagaaataaatcttcatacactttgattaggcattagtttctctgacaccaaaagcacattaaaaaaaaatagatgaactcttacaactcaataataaaaagacaactcattttaaatatgggaacaggatgtgagcagacatttctccaaagaagtataccaaagccaaagaacacatcataagacactcaacatcactagtcaccagggaaatgcaaaatcaaaacaaaataccaactgggcatggtggctcacacctgtaatcccagcactttgggaggccaaggcgggcagatgacttgaggtcaggagttcaagaccagcctggccaatatggtacaaccttgtctctaccaaaaatacaaaaattagccaggcgtggtggtgtgtacccagctacttgggaggctgaggaaggagaatagcttgaacctgggaagccgaggttgcagtaagccaaggtcgcgccattgcactagagcctgggcatcrcaccaagactctgtctcaaaaaaaaaaaaaaaagtatcacttcacacctattataataaaaaaatcaagtaacaagtttggtgagggggtgaagtcaggaccaacat

SEQ ID NO: 809561 - DNA, 624 bp, Homo sapiens
ttatctttctttattgttccaaggcccctactctatttcatctcctctgtagattactgaaaacacctcctgccttcataagggaaatattttaatactttttcttccttaaatacacaatagtttgcccatcagtagctaagatgaaccaggaactagaattttgaaaacaaaatcagctgttacgatgtggaagaaagggaagcaaacagtgtttgggctgcacttgctaaactgtaatgtataacaaaaccagtcttctggaggaaggaacaggtggtacgcatggaacaaagctggagcaagatcaagagacttgagaaaaacaagaatcttttaacctacagccagagagtgatgggggagaaaacacacagataatttaacaggtggatgttgggaagaaacacaagacaatcaagaagcacgtcagttactcactacttgtgacagcaaagctatgtggcaactgagagcaagagttctaaagtcagttcctggatttgaatccwtaccctgcttctggtgagagatgtattttggacaaggtatttaacacctctatgttccactttccacatatgaaaaatgggactaacacagcatcttctttacaggtttata

SEQ ID NO: 809562 - DNA, 360 bp, Homo sapiens
catataaaactattagatctcgtgagaactctaccacaagaacagcataggagaaccacctccataatccaatcacctcccaccaggttcctcccatgacatatgagaatyatggggattacaattcaagataagatttgagtggggacacagagtcaaaccatatcaatgctgtagggaaaacacagtatctgaactcaaagagcttttaaggctgctgaaaaaaaagagcatatacattaaaaagtgaagtaaaatataaggtagcatgaggcaaactatggcactagatgggcattagatataaagaaaaagaagctagcatttaattaaagcctattatatgtctataagccagtc

SEQ ID NO: 809563 - DNA, 660 bp, Homo sapiens
atctgttttgctatgactcatttatatagactacatcatttgcctaaaatatgatttcattaagagaatacaattacttgtataatcaaaagtcactgatgaaagttaatcagctggctttttgcagtcttcatataggtaatacatgactaggtcaggatttgaaacatttgaggttattttatctagttcttacatatactgatagtttaatttgctacaaaactaaatttgcagttgagcaagaaatctgcaagtaggattaggttaggagctaggaaaaaaaactttcaaggttaaattagataatctagttgactaacattatcaataataatatactgaagagtccatagggatagtccatgaagccttaagtttctgccatatacacagttacattctaaggagatgaattcctgtattcttgccagggcttatccagaatcatttgcaggtaaaatgattccttctacctaacagtagttgattagaccagttataatttaatcggtcacaggcaatcatacagtctaacacatgctaggtactcaatgaaaaaaaatatgtatatatatgtrtatatatatatatatatatatatatatatatatatatatatatatatatatactctagagacagggacttgctctgcca

SEQ ID NO: 809564 - DNA, 643 bp, Homo sapiens
aaaaatgccctagctagtgaagcactaatgggaaatggggagaagggaaggagacctcatagagtctcagcctactctgttctcattcttgcagctctctcttcccgtttcgatatttcttcagraagagcagccactcttgagccttccaaatgcagcgctggaaagaggatcatctcttgtagtgactcctcccgagccattcttcctccaactctatccttttcttatgacacttcagtcgtggggaatgaggtccccatgctgagtcctctgtggttttatcgtgtcctttgcccctttataatagattttttcccccaatttaaaacattaagaatggaactttctaaaatgttcatgtcctgagggccggtttaggccttttgtcttcggcacttaggatcctaatgacaataaattatttatgaagagttattgattgaatttagtggaatagagtaaaagagaacaaatgcttccctcaagatacagagaaaatgcatgaaacttccctaggtctacctggttactattcacaggatcactttgggtaggtgagtttgtgccagaggttagggaatggggtctttcaagactcactgtcctgagccctgctcacccaagagacctcttccccagt

SEQ ID NO: 809565 - DNA, 680 bp, Homo sapiens
gctgtaactttactattttgtcaaactggaatattgtatgtaggtccaaaggctttgtgttgtagacacttaatgrataaattgatttagaaaacgggaaccaagacaaattccagaaaattcagggcatgttaaaatatttggcattcaaatagatgacctgttataaagcctacatatttgtatactttttgaaagggactggaccccagagccagatgaactaagttctactaagctttgacactggagaatttaacttctctgtgactcagttttttcattagtaaagtggggataggagtagtacatatcatagggttgtaaggagaactaaaagtgagctaacatgtgtaaaacacttagaatggtgtctggcacatagtaaatactatatgggaatcagctgtttttacttctcaggtactagaggtaggagctccagtaaggtgccattttagcatgaccaatacaaacaagtcccttggtttggcacttcaggattcctgaacccaaagatccaactgggctaatgacctaagctaacagatgagcccttctattagcaacataatgagtttggagttctctcctccaaatgccttcaaccctaaacatccaggtgccggaggagagcatgctctggatcagcagctagtaattaatgaagagacaccatt

SEQ ID NO: 809566 - DNA, 501 bp, Homo sapiens
ttcaccatgttggtcaggttggtctcaaactcckgacctcaagtgatctacctgcctcggcctcccaaaatgctaggattacaggcgtgaaccaccaagcccagccaagtttaccattttatatgggtgtgagttgcagcgccccaaaacaattacaatagtaacatcaaagaccattaatcacaggttaccataacagataacaatgaaaaagtttgaaatactgcaagaattaccaaattaccaaaatgtgacacagagacagaaagtgagcacgtgctcttagaaaagtggtaccaacagacttgccacaaaccttcaatttgtttaaaaaaaaaagcagtatctgtgaaatgcactaaagcaaagtcaaagtgcactaaaatgaggtgcacctggataatgaaaataaagtgatgatataaaatcctagttaaacttttcttccctgcccaaggctcagagcctgaggttccttttccctttactaataaaggagat

SEQ ID NO: 809567 - DNA, 646 bp, Homo sapiens
aaatttggctgatctcttccattatctaaagttccttttgcagctggagaaatagtgaagtgaaagaggattagatagcacgggcaggggaccccaggtggagtggccactggtgccctctgctcaggctggaggagaactcactgagccttcaaaggagcgtatgcaagtgagagccctgaaacttatgccttgtttgcttcaagtcatatctgcctctgtctggaagccttctattataatttttttacattttttgaaattactatttattgggtcctgctttgtgccagccacatatatgcatgttagtttttctcaacattagaaacacatggaaagctttaaaaaatacaccaacctaagaccaattaaagccaaatctctaggggtggggcttcagtatctgtagtttttaagagcccccagatgattctaacgtgcaaccggagttgaaactctcagcgcacaatgctactttacatgttagcttcttaacgccttacacaaacctggaaaataggtcctcttatccrtattcaagtatatgaataaactgaggctcagggaggttaaatattttactcaagaggaaatcacagagtcataattcaaacccacactagtttgacttcacaggctgctt

SEQ ID NO: 809568 - DNA, 579 bp, Homo sapiens
ttggatttaaacttgtaagtgtcttcattcctcatttgcccttggctagccaagagactgattgttcaagactccttatgtttctgcagggttaactaaatttgctttaccattaaatttgagaataccatgtgacctcccagtacacattaaaattgacaacatccctttagtcttcaacataaaatcatgtcattatttttgagattccgcaaaattcatgaactgtcattgaattttctgaaattaaaacagcatgttaacaaatggcagtaaatgtgatttatggtgtaatacagctattcaacatatgctgtagcttttaattcttggttattactattagccagggaataactgcaaaatgctttagaaaaataaactaatagaagaatgttttatgtaaaataaaagtaccaaaagtgcaggtttctacattctgttgagaaggatagtcaygtggtttagcaaaatgaaagcctgcagctactctctcatccctttttgtaacagtagttttatactgaatctcttcttagtactatgactatgtttgatgacataatgtgtaagtctagg

SEQ ID NO: 809569 - DNA, 579 bp, Homo sapiens
ttggatttaaacttgtaagtgtcttcattcctcatttgcccttggctagccaagagactgattgttcaagactccttatgtttctgcagggttaactaaatttgctttaccattaaatttgagaataccatgtgacctcccagtacacattaaaattgacaacatccctttagtcttcaacataaaatcatgtcattatttttgagattccgcaaaattcatgaactgtcattgaattttctgaaattaaaacagcatgttaacaaatggcagtaaatgtgatttatggtgtaatacagctattcaacatatgctgtagcttttaattcttggttattactattagccagggaataactgcaaaatgctttagaaaaataaactaatagaagaatgttttatgtaaaataaaagtaccaaaagtgcaggtttctacattctgttgagaaggatagtcatgtggtttagcaaaatgaaagcctkcagctactctctcatccctttttgtaacagtagttttatactgaatctcttcttagtactatgactatgtttgatgacataatgtgtaagtctagg

SEQ ID NO: 809570 - DNA, 556 bp, Homo sapiens
tcttaattctgctcatattttagtctcaacttcaatgacaccaatcttctcccctaggctacatcagttctccctgctatatgctggctattcgcttaacacattgcattgcaggaactgggctaaattattcaccttcccaattagactgtaagccccatgaggacaataaccatttttgttttgctcacgaacatgtccttgacatctaatagctagtgcttgaaaaagagcagaaaataagctgaatttaattctttcatttaatccacaaatattttaaggaagcctatttgtgccagatgccacccaaggcactgagattcagctgtgaatgaaacaaaatctcttcctatatgaagctcatgttcttgcagggtaaaaaaaaaaaaaaaaaaaaaaccctaataaactaataattttttaraaaatgcttaaattgtataaataaatatagttttaatatttgtataactttttacatttttatttttactttttaaattttattattattatactttaagtttcagggtacatgtgcacaatgtgcagg

SEQ ID NO: 809571 - DNA, 602 bp, Homo sapiens
ctatacattgttcctttttaaaagtttgtttggttttaatgaattggttccctcaactgaagtttaatagccatttaaaggaagacaatttatcctaatgtttctgtatttttctaaactttctcatcctctctggcccaagccttaccatagtttttcaaataattggtgatcaaaaatgctgaactgtcacctgtttgcctatatactcttttccatttgtgagttcttcagtgtaatattccagagattgtgtttattcagatacattcatcttccaatcaatcaagataatgccagcttctgttgtgggttttgcagaaaggatttcctagactcctgaattcattttttctctctgtagtgtgagcatttttctgttttaaattattttctgaaaaaatgtgagtatttacgtactcgaaattttaactagaattgcttcccttctaaaaatgttagtttctcagaccaaatgcatcaatctgactccctcagaagtcaggcgsttcacaaagagggaatacttcaccttaggtggccaagaaaaaaaacatactggcccatataccaggaaaaatagtagaatgggtcagtgcaac

SEQ ID NO: 809572 - DNA, 612 bp, Homo sapiens
attttttatgtaaggttgtgatgacctttatacaaggtwatgatttttgcagagtcttctgtgacgttttggttttcaagcatttgtgcatgaagaccctctcttcatggccttccctggctctgtttgtcagggtttgtaacacaagtaactccattttgatgctgataactttcacaatataaagctaactttttattttgtttggtacatagttcgagattcatgttacatagtttgtctactgaatgaaattcagttatagctgatatgctacttaaagatgtttatcggctcaggacaggattgtccatagttataattcatcccctagataaaattttagaagagttgaagattccaaccaaccattatcttcacatttcctcccttactctgtccttccacaaatggtttcaatgcatataagacctattaatttatacattttttacattcagaaacaatattttggaaagtttaaatgctctttgatgtactgataacagtcaacatattactttataaaataggtatggaattttaaaaatgactaaagactttaggtagaacaaggaagctctatgagagaagtcttaggtttagtaaagg

SEQ ID NO: 809573 - DNA, 523 bp, Homo sapiens
taacaaactatccaattaaraaaaaaattctatgtgccatcacattaaaaaaataaaatacatagacaaaagtttaaggaggtggaagatctgtgtactgacaaccataagacattgatgaaaaaattgaagaaagacacaaaaaagttgaaagagagtccatgttcatgaattggaataattaatattgttaaaattctcatactatccaacatgatctacaaattcaatgtaatgcctatgaaaattaaaatgacttttaaaaaatagaaataggaaaaaataatcctaaaattgtacggaaccacagttaactccaaatagacaaagtaatcttgagaaagaagaacaaagttgaagacatcagactgcctgattagaaactacattacaaagctatagtaatcaaaacagcatggtgcaaataaaaacagacttatagaccaatggaacacaataaagagcttagaaataaagctacacatatgcagtcacctaatcttttacaagggttccaaaaata

SEQ ID NO: 809574 - DNA, 499 bp, Homo sapiens
ccaggtgataccaaggctatcgtacaaaactgactacattgatcattgataccgttttaaaatctcattatgaagcctggaaaattgtagatgcaatacaccattcatgtattaaaggcatattaaaagtcagaagaaagtaatccgtatatccagatgagaaaaatgcataggaagccgaagataagcatggtaaactgataattatacttcagttgattatttgccaatctaaatcaaaaggagctttggttttaacaatcattaagggaaagaagacaaatctttagtcttattcatgttgagaagtgagatgtattgctcccataaggcctggattctcaactggaataacctcaagaaaggggtagactggaaagaaagaaagaaacctttaaaatatctgctactcaggaaagagaaagtttttatatgaaatttggagagaagagtttaccctgagaattsttaatcatctggccctaactaaggttcaggg

SEQ ID NO: 809575 - DNA, 622 bp, Homo sapiens
attttttatgtaaggttgtgatgacctttatacaaggtwatgatttttgcagagtcttctgtgacgttttggttttcaagcatttgtgcatgaagaccctctcttcatggccttccctggctctgtttgtcagggtttgtaacacaagtaactccattttgatgctgataactttcacaatataaagctaactttttattttgtttggtacatagttcgagattcatgttacatagtttgtctactgaatgaaattcagttatagctgatatgctacttaaagatgtttatcggctcaggacaggattgtccatagttataattcatcccctagataaaattttagaagagttgaagattccaaccaaccattatcttcacatttcctcccttactctgtccttccacaaatggtttcaatgcatataagacctattaatttatacattttttacattcagaaacaatattttggaaagtttaaatgctctttgatgtactgataacagtcaacatattactttataaaataggtatggaattttaaaaatgactaaagactttaggtagaacaaggaagctctatgagagaagtcttaggtttagtaaagggatctggggc

SEQ ID NO: 809576 - DNA, 625 bp, Homo sapiens
ctttgctgaataatttaccaaaaatttaaagatgaattaacaccaatttttctcttccaaaaatagaagggtgagcaaacacttctaagaaaatactgacaaactgtattcagcagaaaagtaaaagccttatgcacactgatcaagtaggatttatcccaggaatgcgacagtggttcaacatacaacaatcaaccgatgtaataaactttattaatgatttacaggaaaaaacaaacacaatcatctcaatggacaccgaaaaaaatagcaaaatgataaaaacactaaacaagctaggaatacaaaggaactttctcaaagtgatgagggcatatgtgaaaattccacagctaacatcagacttaatggtgaaacactaagtgtttcccctgagatgagaaataacaatgatgtccaggatcaccacttctattcaatattgtactggaattctagccaggataattagataaaaaataaataaaggtattcagactgaaaattgatagattacatgatyttataggaaaaaaattttattcacaaaaataaatttatagttaatgaacaaattatcaaaatgcagaatacaaggtcaatatagaaaatcagttgtattttc

SEQ ID NO: 809577 - DNA, 517 bp, Homo sapiens
aatatgtgggtgatctgtacagctggatattgttcatcaataaaaagaaataaaggaaatactgatacatgctatatgatatggataaactttcaaaagattatgtgcagtaaacaaactagacacaaaagaccacatattatatgattccatttatgtgaaatatccagaatagacatatccatggacatggaaagtaaattagtcattaccaagaaatagggtgagggattgattgggaggtttaggattttctttgagcaaagttgaaaaggttctggaattagtggtggtgattgaacaacattgtgaatatactaaaatccactgacttgtacactttcaaattgtttttaaaaagtcctatttcccctattagaatcacaaatcccctgaattgaaatattcacggtctctttagaagatatacctctctagaagtacactgttacaatgaaagatgctcctgtgtatgmtggtccattaagtcccattattgcaaacacaatcaactgcc

SEQ ID NO: 809578 - DNA, 603 bp, Homo sapiens
atctacttttttcatgatgatttcctaatatcatacatttctcatytggtaaacattcgtacactgagctgacagattttactatagaatataaaaaatacacttgttaatatcgtcaccaatctcaccaaaaaaagtatttaagaacggaaatgctatcaagctcatggtgatggaatacattttccaaaattctactttttgcttgaaagctcacattttatcattggcaacaaatactgtcagtttgtttctttgaagtgacaagcttactccactcattttcaaggaaatatccaccatatgtccaagtttgaataaacataattatctgtcagtcattccttcaactaaaaatggcattccatgaaaaaagcaactagatcagctttcaacctaacctcataagagcttttccttgaagcaaccatcatactttaaggattagaagttcttctttctcatcatgtagaaacctggtaaactgagatttaataaacttcataattttccttgctttatcaatagcattcagctgtaactggacagaaaaaaaaacaaaaaacaggaagttcatggtagcgaagaacagaatgactaata

SEQ ID NO: 809579 - DNA, 603 bp, Homo sapiens
atctacttttttcatgatgatttcctaatatcatacatttctcatttggtaaacattcgtacactgagctgacagattttactatagaatataaaaaatacacttgttaatatcgtcaccaatctcaccaaaaaaagtatttaagaacggaaatgctatcaagctcatggtgatggaatacattttccaaaattctactttttgcttgaaagctcacattttatcattggcaacaaatactgtcagtttgtttctttgaagtgacaagcttactccactcattttcaaggaaatatccaccatatgtccaagtttgaataaacataattatctgtcagtcattccttcaactaaaaatggcattccatgaaaaaagcaactagatcagctttcaacctaacctcataagagcttttccttgaagcaaccatcatactttaaggattagaagttcttctttctcatcatgtagaaacctggtaaactgagatttaataaacttcataattttccttgctttatcaatagcattcagctgtaactggacagaaaaaaaaacaaaaaacargaagttcatggtagcgaagaacagaatgactaata

SEQ ID NO: 809580 - DNA, 523 bp, Homo sapiens
tggagctgtaacactgcagtctcctggcttctgtgggtcatcaggctaattgattttcctttgtaagtgaccctccctacctctagtgacttcagaaaccttccttttgactttagtgttcagargtttcaatgtactgtaccaaggtggtgcattatttttatttatcatgcctacactttgttgtgattcctgaatctgagggtttatgtctttcatcaaccgtggaaagtcagtaccattatgttgtagaatattgcctcccctaatgcttctgatcttttccagaaacttctatttgaccatctcattgtcttcctcagctgtctcatagattttctatctctgtctccctctgcttcattcacagaattttctatgcagtttctaactcttgagatgtttctgttccactgctttatctacccactgagactttcagttatatattttttccttccctataaatccttgtatgggggtttaatttgcttgattttagcatcttgtacctttctcatat

SEQ ID NO: 809581 - DNA, 540 bp, Homo sapiens
ttgtaagacaaggggtaaatgtttgaggtagtagatacccccatttacctctatgtgattattatgtactgtctgtctatgttagaatatctcatggaccccataaacctatacacctactatgtacccacaaraagcaaaaagaaaaagagcttatgggtatcaatttttctgttagtaccgcttttgttgtgtcccagcaagttttggtacattgtcttctcatctttatttgcatttaagtattttctaatttcccttctgattttttttttttttaatttaagtcccaggacacatgtgcaggacatgcaggtttgttacgtaggtaaatgtgtgccacggtggtttgctgcacctgtcaacccatcacctaggtgttaagccctacatgcattaactatttatactgatgctctctctccctctgcccccctttttctttgattcattggttaagagtatgttgtttcatttccatacatttgttaatttttccattttacttctattattgatttctaagcttatcccattatc

SEQ ID NO: 809582 - DNA, 540 bp, Homo sapiens
ttgtaagacaaggggtaaatgtttgaggtagtagatacccccatttacctctatgtgattattatgtactgtctgtctatgttagaatatctcatggaccccataaacctatacacctactatgtacccacaaaaagcaaaaagaaaaagagcttatgggtatcaatttttctgttagtaccgcttttgttgtgtcccagcaagttttggtacattgtcttctcatctttatttgcatttaagtattttctaatttcccttctgattttttttttttttaatttaagtcccaggacacatgtgcaggacatgcaggtttgttacgtaggtaaatgtgtgccacggtggtttgctgcacctgtcaacccatcacctaggtgttaagccctacatgcattaactatttatwctgatgctctctctccctctgcccccctttttctttgattcattggttaagagtatgttgtttcatttccatacatttgttaatttttccattttacttctattattgatttctaagcttatcccattatc

SEQ ID NO: 809583 - DNA, 559 bp, Homo sapiens
tagacatcagctaagggggtttgggggccagtyggcagcctctggaggcctctgcacccctcctgtgaaaggccggcgcagagctgcaccgtggggtcccctggcttggggtgggcctcagaggctgtcgccgtgcctgctgtggctctccatggccctggagcctgggattgcagaaagactcccagaccttgctggggaaactccaggatatgggggtatccagactcctgagacttccccgtgggtccacacacgtcaccaatcctctctgcacctcagcttcctcatgtgtgaaattcaggtcatatcaggacctcagttcctggggctgtgccgagggtgtggggacattgggcatgaaggttctcagtccagagccaatggccaagagggcaaaagggtgttggtggacgatgcctcctcccctggcgggggcggggaaggaagtgctgggggaagccggtgtaaggggccccgtgcccaccaaaggcgcgctaattgcgaaggaggggcctcagccaggaaccgccatagcctcagttttatttattctgct

SEQ ID NO: 809584 - DNA, 559 bp, Homo sapiens
tagacatcagctaagggggtttgggggccagtcggcagcctctggaggcctctgcacccctcctgtgaaaggccggcgcagagctgcaccgtggggtcccctggcttggggtgggcctcagaggctgtcgccgtgcctgctgtggctctccatggccctggagcctgggattgcagaaagactcccagaccttgctggggaaactccaggatatgggggtatccagactcctgagacttccccgtgggtccacacacgtcaccaatcctctctgcacctcagcttcctcatgtgtgaaattcaggtcatatcaggacctcagttcctggggctgtgccgagggtgtggggacattgggcatgaaggttctcagtccagagccaatggccaagagggcaaaagggtgttggtggacgatgcctcctcccctggcgggggcggggaaggaagtgctrggggaagccggtgtaaggggccccgtgcccaccaaaggcgcgctaattgcgaaggaggggcctcagccaggaaccgccatagcctcagttttatttattctgct

SEQ ID NO: 809585 - DNA, 581 bp, Homo sapiens
ctcgctcctgggcctgcctcaaactctccgcaggtaacgcctcccgaacttgagccacgctccaatccyctcctcaaacccctccccgtttctcacaccctggacccctcgctccgtctcggccccgccccaagcccagctccctctcggcccctgagcccagccccgacccgcctcccagtccctgggaccctcccgacaccggcccctccctaagctccgcctcccagggcccgcctcctgagcgcagccagcagcccggactcggccccgcctcccggaccctgggcccctccccacgtaggcccgtcctaagctccgcctcccagagtccgagcagcgcctggccacgtgctacgacatagtcaacgccccgccctggccccgcctcctgagccgttctccgggtctggccttagccccgccctaggacctgtctcctgggctctgctccgagtctcgcctcctgaacccaatcgtcctttacccccaccctaacgcccgcctccaggactcttatcctgcccccacgcaaggccccgcctccaggacgtctccaacctggatgtttccgaagcccc

SEQ ID NO: 809586 - DNA, 644 bp, Homo sapiens
tcactaggtattgttacatttatatgtttatacagaaattagggcctgtggtattttttatgccattttgctaatgtacccagtattattttatagattagattcataaagtgyattcatctgtgtctagtaagtcggataactttttttttttttttcagctatgtcttctcattttacccaagaccttctgccagagcagggcatacaagatgcattcccaaaaagaatactgagaggatatggaaattgtggccttgataatttatatttaaggaaagactgggaaagtttagatgagtgtaagttgcaaaaagattataatggacttaaccaatgttcatcaactacccatagcaaaatctttcaatataataaatatgttaaaatctttgataacttttcaaatttacatagacgtaatataagtaatactggagagaaacctttcaaatgtcaagaatgtggcaaatcctttcaaatgctctcattcctaactgaacatcagaaaattcacactggaaaaaaattccaaaaatgtggagaatgtggcaaaacctttatccagtgctcacactttactgaacctgagaacattgacactggagagaaaccttacaagtgtcaagaatgtaacaacgtca

SEQ ID NO: 809587 - DNA, 505 bp, Homo sapiens
agtggcttgtgccatgtcagccagcgaaggaggggcagaaccaggatccaaaccccagctgcctggctccagactcgtgttcccaaggtcccactacgcttggtcaccttactgcattatagtatcctggtctttggcagagtccacgtaaaagaaggaggtagagggagtgagagggccttcacgcaataaagtttcccggcgttacactgccaccgtaattgtgttcccgatcaggacctctcccttcttatcctgtccgtgattggccctggaaaaccttccagagaactgtcctccttctcctgggatctcagagaaaattcacctgagttcagtgtccaggtgacccaagctctgaatgcagtaacgagcacagggagatgaggatgtcaccatgagaaagcctcccaggcagcatccgggagcaaccccaagactgggcagggtggggctctgatgcmgcccacggcgaggagggctgcccgtgctgcctaaatgggtt

SEQ ID NO: 809588 - DNA, 656 bp, Homo sapiens
tctgcgctttgactgactaaagccatgggaatcatgcgctgattatcagggctatcgggatcaaagggagtatacatacgataggcctcccacagtctctcgtagaattgtgctggactttcttcttytccctgaatgacctcagagagcttgttaacgtttgtggccttctgagctctcctctgtaatccttccaagagagcttccctgtctcagttgagcctttgcatatcccctctttcatgtgggtcccactgggggttggttcctcctaactgggtccttagatagtctcggggtttttgataatcagctggtgtatgttcctctagccacttagttgctgcttggagcactctctgcctttcatctctgtgaaagaggaacatgagcaactggtggcagtcagcccaggtgaggttgtgggtctggataacagcttggagcaaatcaattagggcttgtggcttttcagtataggacagggtattgttttgccagtcgagaaggttggcagaggtgaagggctggtacacaaaaatgcgcctctccactacgtgaccatcctcatctatcccagtataccgctgctctctcgggggcatttggatccccatttggggttgtaaaggagctgccaagggaggggtttctcc

SEQ ID NO: 809589 - DNA, 644 bp, Homo sapiens
tttacacactactacacagtggatccaataggggagggaacaggtgggagccccaccccctactgagttggcagggcaggagccccacactcatggatgcagttgcagccacccagctatggctccagacctgggcatgcctgcactcctggaagccccccctggccccacaggctcagaagtgcctgctcctgcttctcccctctcctgacacctgctccaattctggagcaaagttgaggctgaacccgggtgctatctcaacctggctggatgtgtgcgtgctaggggtggtgctgacacaccagtcccaccaccttgaccccctttgaattttgggcaccaacaagcaggggcgggaggccaagggggccctgagggcggtttggcacaagcctgccggtgcctcttggtaggaacagcctggttgctgtggatggcatgttgatggtggcaggatggaaaagggtgggtcctggtgaaacctcaccttcaagccagggatggcctgaagcctggggcctgagcwgccagttccagctggagtccactgcctggagtgagtacatatggagctttttccccagcccacccatggccgcccatggaccgatcagcacacacttcccctcctgagcccataa

SEQ ID NO: 809590 - DNA, 630 bp, Homo sapiens
cctaggctgctcacagcaggggtccctgggtccagcccacaaaaccatcttttcttcctaggcctctggacctttgatgggaggggctgccatgaagacctgtgacatgccctggagacattttccccattgtcttggggattcacatttgactcctcgttacttaaacaaacttctgcagctagatcgaatttttcttgagaaaatgggattttcttttctatcgcattgtcaggctgcagattttccaaactttcatgctctgcttcccttacaaaactgagggcctttaacagcacccaagtcatctcttgaatgctttgctgcttagaaatttcttttatcagataccctaaatcatctctctcaagttcaaaactacacaaatctctacagcaggggcaaaaagccaccagtctctttgctaaaacataacaggagtcaccattgtgccagttcccaacaagctcctcatttccatctgagacaacctgagcctaractttattgcccatataaccatcagcattttgggcaagtctctaggaaatctcttccaaattttcccacattttcctgtctccttctgagctctccaaactgtcccaacctctgcctgtttcccagttc

SEQ ID NO: 809591 - DNA, 656 bp, Homo sapiens
tcctaattcctaacagacacatacacacacacatacacatagcgttattgaactacgatacaaccaartggacccagcagtatattcatcctctgcagtggaattctactatggcagcaccctttctttgttttcgtaataaaaacatgtcctgtattgtaagaagacacctgctgaaatctatgacagaaagttgtattttcataatccttgcctattttttcccttttaacctcaaaccttcatataaaatagtgttattcatggaatggaatgtatctaatagttgcagtcacactagctttatgattcattttcatagactggtacaagtaattttttcataaggaatgctggagataggtgcaataagcggccggccactgggaacttgtccctcagtagcagggaagtccttgtgtggtcccacgtctggagggtggagaaggactcatggtcagacctctcattgtcttaggagttgaaaatttcactcttaaagatacgaccataaccaaccctctctgatctgttggaggcgatcataccatttttcccagaggctaatggaaggggaagagtcagattctctgttgcggtcagatggtggctgcccatttttcattatgttacaggggtaccaatagcatctattc

SEQ ID NO: 809592 - DNA, 400 bp, Homo sapiens
cacatataattcctccatactgccgatccttttggcaaatggtatctgcttctgttttaaataccattcacacagaaccttaaatttttatttccctaacgtgttctcrtgcagactcaatggctagcacttttcttggaccattttaaatgtcgattttcatttagtcaagatacactattggaagacctcgctgagaattctatatataaaccaatcccacaaattagaatctacaaaaaccttctatgttgagacaaattttagaattatacaatattataatagcctaaatatttgggtattcttttataatttaccattttctttgacgttcaacataatattttatcttaccaacagactcgagaagaaactatgtgaggtattatttcccact

SEQ ID NO: 809593 - DNA, 618 bp, Homo sapiens
aggccctggctgtggctctagcctgtccacccactgtgcttggagggaaggtgtctgcagacgggaccagccctcggccccagaggggatgacatggtgtgaatgtgctgtggacggggacctgaggcactgagcccgtctcagccctccctccccactgggactctgggaactgcacattctcccacagggaggggtcaccccgggctctcacctgactgtcgcctcctggtctcctcctgcccggcgtggtccttgccaggtggtgggtcccagtacctggtagcggagggggcttgagggggatgccacccctttgccctctggctgccctccctccctgcccctcccactggctggtgccaggctgcctgggggctccgcttctatgccaagggcttctgggggaggcagggccacttatcatggcatcgtgttgtcctcgagtttttgcaaaatctgagtgtgtggggtgtaggtgtctcagagggcagggtttgtgttccaggagaggagaggtgagatcaccatgcctcaccaccgagggtggggcagtcgcctgcccgtgtgtgccaggggctttttayactgcacccctcagccttccaggtcttgttg

SEQ ID NO: 809594 - DNA, 571 bp, Homo sapiens
ctgtgttcaatattttattggccaactctaccaacagtgaccaagtcttcatgactgtcttatgtgcaccaaactcacagggatctgatgtaaatacaccaatttattgatttacaattgcaggcaaggttaaaatatacatgttattcagtttctcctttctggaaaatgaaacaatcagaagactggtgaacatggaatgaggacaaaaggacacaaggaagtttgaaaggaaatttcatctcaaggcatggtaaattctggagaatcatcctggcctccctacagagaatcctctttggtggcagaaagtgcaggtcccccctggagagggcaggtcagggaccaccgggtcctcgtgtgcagctccctgtggaaacacgtggttcttctagctcaaccatcatctgctggtggttgatttcccactgtactctcaggaggtgttctttcaaagctttggggctcctgacccagccttccaattacaatacaatatatttcacattgaggttacactttagaatgtattcagtgggctgaattcaygtagctatttattctgccttct

SEQ ID NO: 809595 - DNA, 575 bp, Homo sapiens
ggcctgcttgttctcatcagtgttcaaccaacattggttggatgactaaatcaacatgcagaatgtgggtaacctgagaatgggcactcatttgccaggtttctcaaagacctaacctcttagtcttcaagacgtttgtcttgggtgcggtcatgggccagagccagtgccagaaccccaggagtatagagaccaactgcccgaccctggtcctccaaggctccctgacatgagaccaactaagacagcataacccgtggggcaggacagactcctggggtggcagctgtgttcatcatcttgactgggtcaagatgtatccagctgtacctttcatgtgcggtttattgtatacatccgttgaaacatattaagacaaaaaagggaaaacaaagaccacaaaggagggacagggaagaacccggaaggcgctggcagcacagggaggaggcaggtgtttgcagtcagacytgagtcccaggccccactcagcccttcctgcctaggaccagagcactgtcccagatctctccaaacctgttttcccgtgggtgaaagaatgacccgggaagtat

SEQ ID NO: 809596 - DNA, 566 bp, Homo sapiens
taatacagactcaaacctggtggctatttggtttcgagctttgaattcattttgtaccccccagcgcaaccccgatactgtctatgtaaatatgagagrtcaaaggacccgtgaggggtttctcttttcctttgggttacctgcttcctgtctggttgttgaaatgccaaggtgaaagggatggccaattggatcggagtgcaaatgctgctccaattgtttggcagagtactcaatattggtcccccacaataccactgtacatctgcttggggatggattagggctgactgactggttagctcttggaaaggtttaggcccagtacatcccatcaggtttccgaggaacgtcagattttccccttgccatgagagacatgaggtaaaattggcatcaagagctggaagtcgaatggcccttgggggctgtcccgtagggcttctgacttttgggaaaactggtggttttggcaatttgagggtgtgactcctttggtaaggtggatgtaaggttttagggcggtgcaaccctctgaggaggtccagccctgatactgggtggtc

SEQ ID NO: 809597 - DNA, 481 bp, Homo sapiens
tgggatcctcatggtgatggtctcctgagccctggaagggagggggcctatgggccagagggctcaggactaaatgaccrtgaatattcacaggagccgaaggtgaaaacagcccagtgtccaccaacaggtgcatagatggacaagctgtggtcgatccaaacagtaaaatatgattcagtcacaaaaaggaatgacccactggcggcttccacagcgcaggtgaaacctgaaacttcacgctcagtgcaagaagccgacgctaaaggccacatattgtaggattccacttataagaaatgtccagaacaggcaaatccacagaaacagaaaatgcattagtagttaccaggaactggtggatggggcaagaggaaatgggattttgtttcagggtgatgaaaaaattccagaacaagacagaggggatggttgtacaacactgggaatctgttcgacgctgctgaaatgcacactttaa

SEQ ID NO: 809598 - DNA, 538 bp, Homo sapiens
gcccaggctgatcttgaactcctggccacaacagaacctcctgcctcggcttcccaaagtactccrattatagctgtgagctaccacacccaaccaaaacactaccttcttgatcacaattccctaatttactttttccctactgtgattaaacaactggttaactagattttgataaactatttaactacttaaatgttaatatttttctcctaatattttcatatcaaactcaattatatcttgtacaaacatatttcatttgcagtctaatgagtgcatcactgacgtctttccccatttccccaatttagctctggacaaaaacatttcttctatgttctcttcagttctcttgggatttccaaaatattgcaacgccctacttcaatcttctaccaaagccataaaaggaaaagaaaaaaagaaaaacagttattaagtatcctagcctcacttaataagggaagaagcattctttccattagctccattcatggttcccaaattagtactagatatatgcatagtgataaga

SEQ ID NO: 809599 - DNA, 623 bp, Homo sapiens
acaaatgttcatacccaacccagaccatctgaatcagaaactgtgggggtgggaccagcaatttttggctttacaagcccttcaggtgattttgatgcacataaagttagagaaccactcttctagactaaaaattctaactataagcctccttggtctataatcagtgaagactatcaggagagcccagaagaatcctgtgatgtgactcttttttgtaaatcagaaattatttcctcaggaaaattaaaaaaaaaaccctactaaaaatgttcaacttttgcacaaatgattttatgagggttatactagatacacctgaattgtatcacagggctataaaaatgacccagcaaatctactaggtggaactggactttaagacctatcagaggaatgtatttgtattatactcatctttgtatacaatttaccattagaacactcttacacaattcaaagataactaaaaccaaacagaaacctctttagccttcttccctgggggtatggggatgagtcctgaatttttgtttgatccccctaccyttgcccccagttaggatcgcaagataatatactagacaccaattaagtttcaggtaaacaacagatatttttta

SEQ ID NO: 809600 - DNA, 632 bp, Homo sapiens
cctgagcaatacagcaagacctctctctacaaaaaaattttaaaaaattagccaggcatgatggtgtgcgcctgtagtcccagctactcaggaggctgaggtgggaggatcacttgagtctgtkaggtcaaggcagcagggagctatgattgcgctactgcactccagcctgggaaacagagcaagaccctatcttaccaaaaggaaaaaaaaaaatttatcctaatcaagtatttatgctggagtgtccgtcgatagatctgtacaagtgaaaaactggacaatgcaagtgcaacagcattcaaatatggcctattcataatcacactgtccaggaatatttagtgccacgtgggaatccacacttgttaacacactggaggaaaaaatctgagaaacacagaccacaggcaacacaactttgtcctggagagtcaggtcaactatgagtttgcctttcaattctgttctatgttttaaaaaatagttgttatgtataacttttataaatcagaagaaaaatccttgtttaacccatcaaaactatttgttcaaaacgaagcccctggtcacaatcatgtggactgaacagcagattcctggcctcatcatagacccaaataatctacctg

SEQ ID NO: 809601 - DNA, 564 bp, Homo sapiens
ccattgtataaacaagaaggcaaggcccactgggataaaggacttggtatggtcaccccgcaagctgatagccaagttggtccttcaagtccagcttccataatagcccacactggaagtgggagacaaagccagaaatgctgtaaagggagaaaaacaggttgctgctgctcaaagtggctccccaggcacttcccacagtgcccacacaggcacagccaggtcaaaggcccaattgcctacagtccaccctcaccctgccctagaggggaggagcttagaacacgcagccctgttacatagaatggtgttgcccactccccaaaggcctcgcccaaagcagaaagccctgtgggtccaaggatcccagcattgttgtgggcaggcaaaaggttcagcatgtgtgattcggaacagaaacagagcaggagacggcccagtgttctctgcaaacatcagcctcactgagcaggatcagagcttaagcccgatacacagatttcataaggtgtttaaaaccaactcarcatcatcaactttaaaccttcatgccaatcccaattt

SEQ ID NO: 809602 - DNA, 649 bp, Homo sapiens
aggtgactcaagaagaaaaagcaaaaggctgctgggtatccatgccatctgtgctcgatgtcacgctgcacctgccctgcaaagcaccccaccaggggaacaccatacagcccctgtgtgggtagaagctagagtcaactactgactctagggagggaggttgaggaaggaggcgcatgaaagaacccaggaagtaattgagaagggcttgggagtcaacacggccaggagtatttcagtgtcaggacaaagcccttctttctagtgatggtgaccagtaagaagtgatagggaggactgataacagagtcactcctaatcacagtccaactccttgtccctcagctcttctctccacatagttgggactgtttcatagtaacttgtataccatccctgtcccaaaagcaattggtcccacaatgctgccatcatatgtccatttactgctgagaaatgtatccccccaccccccaggagtctgggactaagaatcagacaggtctgatgtcacatcaatcccatctctctgtgtttsgctcttgagtcatccgctcctctctttgcagacctcaactattggatcctaggtatttacatcacctccttacttcacgtcatctgatagcttattcttccttccttccag

SEQ ID NO: 809603 - DNA, 563 bp, Homo sapiens
ctggcggcagcttagctgggttgctttgcctcagtctcttgcaagactgcaatgatggtatcagctggagctcgactgaggctgaaggaatctctcctaaatgtacgtatgcggctgttggaagagagcttcattcatttcctcaccacatgggattctccaaagggatggcaaccaacttcccccaggtgagtgataaaagagaggcacacagacacagagagagaccaagctcaaagcctcagtgaattttataacctaatttcagaaatgctatattatcacttctgcaatattctattggtcatacagacccaccgtggtacaatgtggggggtggctacacaagaacatgaataacaggaggcagggatcaagggcgccatcttggaaactggccaccacatccctgaagacgcttttttttcccctaaaccacatgtaacttctgaaatctgctagggtgaggttgggaggctctgggagttccaaaaatacatgagtgtgtgcatacacccgcccctcaacacacacacacwatcctaaaacagaggaaagatcct

SEQ ID NO: 809604 - DNA, 572 bp, Homo sapiens
tttaatgtatacaaatgttttgaaacccaaccaggataccagkggatcccagaattgaatgaagtccgatacacaaatctaacagcattataaatgtacagcataaacagactgaaggggtaggggcggggaacttaaaaattttggaaaactatgctttgatggaaaactgtaaagctaaagaaaaaaacgaactgactctgaggattgtactctagttggtaagtttgtttctcacaagagcacaagctaacaattctgaaattacattgcatgtatcccagggtctatcaaataagttaataaatgacagatcatggaagctaggtttctccttgccagagaaagtaacaatgttactaataagtaaggcactgaggctaaaagggataggatattgggttagagtcagacagtaggaactcatgtttagtttatattaaactatacacacacacatacacacacagatggatggatacagaaataattacaaatatgtatgtatgcatggatgaatgagtgctcacacatttcccagctctgtgcactgagaggcctagaagcagtga

SEQ ID NO: 809605 - DNA, 588 bp, Homo sapiens
ataacctggagaacccataggtaggaagcacctgggcctgaagacataaakagctggaggaggaatgaagccccctggactctccctgcacccctcctctgtgctcctctctgtccgtcctaatttttctctctcacagatgcctggtttctctgctccccagaccccaagacagaacacaggtctctctcactgctgggttgaattctgcttttttaaagagatggccagagcaaggataggatgtcttccaaattcccaggaaaacagcctacctttagtgcccaaccttgagctaagcacactgaccagggcagtggacaccatgggaagccccatgaccggtacaggttgaatcaggggctcatccactgtggccaagacgatccaacaggtgctctctacgacctggcaatggcctacgtgggtcaggcaatgacttgacagccactccttaagtctggacagtgttttctaccttacgagacactttcacactcatgattacttttccgcctttgtatcttcttgggattttgatgtgagggctaacttacagatgagaagatgggttcctggaagacaagt

SEQ ID NO: 809606 - DNA, 577 bp, Homo sapiens
actgcacccagccttcgaggtctccatttgacaagatgcgttgaggggtgaacacggagaggcagagaaagctggagccgtgtggagctgggggagtcaggcgcctgcctgcagccactctcctccaccaacagagaggggacatgacagagggagcagagagaacagcccccaaggggcccctgctccctgggcagaaggccagaggctccggcggccatgcttgctgcctccgccaggccatgtgctgcttggggccatgtagagcctgattctgagaatctgcggcatcccccaggtgggtgtgcgggacagggaggaggctcacagagaggcttgtggggggaagcagggaggatcagcctcaacattgctctgccaggaaccggcctccctcctttctccgggtgtgcccttcctgtagcaggcaggatgggcaggggagggaggcrgctccgtggcgcgcccccacgtcctgtcctgcttatgacagctcagggaggccccggtctagcctgtaggcctttgctctctcagtccccccacctgaaaggccaccccactgcttcaggaggtg

SEQ ID NO: 809607 - DNA, 577 bp, Homo sapiens
actgcacccagccttcgaggtctccatttgacaagatgcgttgaggggtgaacacggagaggcagagaaagctggagccgtgtggagctgggggagtcaggcgcctgcctgcagccactctcctccaccaacagagaggggacatgacagagggagcagagagaacagcccccaaggggcccctgctccctgggcagaaggccagaggctccggcggccatgcttgctgcctccgccaggccatgtgctgcttggggccatgtagagcctgattctgagaatctgcggcatcccccaggtgggtgtgcgggacagggaggaggctcacagagaggcttgtggggggaagcagggaggatcagcctcaacattgctctgccaggaaccggcctccctcctttctccgggtgtgcccttcctgtagcaggcaggatgggcaggggagggaggcggctccgtggcscgcccccacgtcctgtcctgcttatgacagctcagggaggccccggtctagcctgtaggcctttgctctctcagtccccccacctgaaaggccaccccactgcttcaggaggtg

SEQ ID NO: 809608 - DNA, 341 bp, Homo sapiens
actctttcctttcaagtgaaaaaaaaaaaaaacagtatggcatattctctaacaaacacagaatttctaatrtttgtggttttccttccttctttccatcttcctttgtcttctcttcccttcccttgccttcttccttcctttcttcttttcctcttccttttcttttcttttttcttttcctttctttctttttctttttttctccttccttccttctttccttctttctttctttcctcttattcttccttccctcctccctcccttcctttctccctcccttttcttccttcttttctcatattctttctttctcacgttcttgctttctttccttt

SEQ ID NO: 809609 - DNA, 563 bp, Homo sapiens
aggcatcccaaagatgtactattttttgctccctgcactattttttttttaatggaaccaacgtttaaaaataggatttctgccttctcttaaaacatcagatgatctggtaacgctgagctcctgttctcacatgggaacaactggctggagctgagtggcagccacctctttagaaagatgttaatttgaagtctgctatagtccccatcattccttatatttcccccaacactgagacccaagtcacttgaaagtcaatatgatgattcaaacaccaggattcttcactcatttgtgggtttgtgacctgtgatatttgtggattcgtgacctttggtttagaggtcaagtataggggttgtaaataaaacttgggtttgaatcagataagaactgtaccaatctcaaagacggtgaattaaagattaaagaaaatattgcatgyttggcataatgtgtggaacacaacagctattgtaaacacccagtaggaatgtaagctgcaagagggcaggtagaaaccgtgctaatttaatccgctggggatatgacatttgatt

SEQ ID NO: 809610 - DNA, 521 bp, Homo sapiens
tcttcagttctggacattttcttctattattttctgatggagattactgctcttcttgtataactcctgtcaggtgatttttaatgttcaatgaattatctaattttattatgattttctcttttctttgcatctgtttttttttttctattctacttttttggagatttctgcaagtttattttccaattcttcttccctcttctatcaaatctttagtctgggtgcggtggctcacgcctgtaatctcatcactttgggaggccaaggcaggcagatcacctgagcctgagctcaggagttcgagatcagcctggccaacgtggcaaaaccccgtccctactaacaatacaaaaaattagccaggcatagtggcacacacctgtaaacccagctacktgggaggatgaggcagaagaatcgcttgaacccgggaggcagaggttgcagtgagccgagatcataccattgcactccagcctggtcaacagggtgagactctgtcttaaaaaaaaaaaaaa

SEQ ID NO: 809611 - DNA, 495 bp, Homo sapiens
tgtatgggtagttgatgcttatttctagtatcgtgggtcagaaacaacacctaaatagtacagagtttttattgcatacaacatatttcagagtcagtggtaggcttctcataattgtcctgccaagacgaagcttaagtttatgcagagccagttcctgggtttccatttttcacaagagtccctatatctcaaagagaggatgtgtaagaaggacttgggggttggtgtcgaataccatagacttctcccttctgcgaggtaacaatgcttattctaccatagatacctatagagaacagagctgtcacccttgctgtcaaaaccaaaaataaattctactggaaaagtctaagagagaagtggtgtcatgactactgatgagtcaaacctcccagcctctgctgagctggtccagttggtacctcatagtatcgyccactgtagtataatatgtacagctagattatttgaaaattcaagtgcataattgat

SEQ ID NO: 809612 - DNA, 565 bp, Homo sapiens
tgataaaaaattacaaagaatttcaagatgaccataataggccatgcacaaggcctttctaaatgggtagagtgatcatgaagccatgggcattgttttgttttrtttaatcttactgtttggttgtaaagcagatctttaaatcaagagaaaaaaagaatgccaaagaacatctcaatcaaaatgttttaaacattatagaagattagatccatataaatgaaagggataaagaaaaagcacatatccaacctcaaatataaagcatggaattcttatgtgaactccattatagcacttgatatttcagctctattttcatttttgaacaactctagatatatctatatattttagtctaaaatttaatttttataagttctaagttcttccccaaattctaccttagataaacaattcagagatacctgtgtttcctattctattaggtggaaccatatgaaattgtcagtattcagccttttctgtcctacaaaaaaatgacagctttgtgtttccacctaacacatggcagcccaataaatatgtgacagtcaggaccata

SEQ ID NO: 809613 - DNA, 517 bp, Homo sapiens
gtagctgggaccacaggcacgtgccacctcacctggctaaatttattttttgaacagacagkgtattgttatgttgtccaggctggtcttgaactcctaggctcaaacgatcctcccacttcagcctcccaaagtgctgggactacaggtgtgagccacacctggccaggttctactttttaatatttaaaatatctgaaataggccgggcacggcggctcacacctgtaatcccagaactttggtaggctgaggcgggcggatcaccagaggtcagcagtttgtgatgaaactccgttcctactgaaaatacaaaaattagccgggtgggtggcagatgcctgtaatcccagctactcggaaagctgaggcacctaaacccgggaggtggaggttgcagtgagctgatatcatgccactgcagtccagcctccgcgacgcaatgagactgtctcaaaaaaaaaaaaaaaaaaaaaagatggtgtcagtgatttctgctacatcagctctggaggca

SEQ ID NO: 809614 - DNA, 517 bp, Homo sapiens
gtagctgggaccacaggcacgtgccacctcacctggctaaatttattttttgaacagacagtgtattgttatgttgtccaggctggtcttgaactcctrggctcaaacgatcctcccacttcagcctcccaaagtgctgggactacaggtgtgagccacacctggccaggttctactttttaatatttaaaatatctgaaataggccgggcacggcggctcacacctgtaatcccagaactttggtaggctgaggcgggcggatcaccagaggtcagcagtttgtgatgaaactccgttcctactgaaaatacaaaaattagccgggtgggtggcagatgcctgtaatcccagctactcggaaagctgaggcacctaaacccgggaggtggaggttgcagtgagctgatatcatgccactgcagtccagcctccgcgacgcaatgagactgtctcaaaaaaaaaaaaaaaaaaaaaagatggtgtcagtgatttctgctacatcagctctggaggca

SEQ ID NO: 809615 - DNA, 517 bp, Homo sapiens
gtagctgggaccacaggcacgtgccacctcacctggctaaatttattttttgaacagacagtgtattgttatgttgtccaggctggtcttgaactcctaggctcaaacgatcctcccrcttcagcctcccaaagtgctgggactacaggtgtgagccacacctggccaggttctactttttaatatttaaaatatctgaaataggccgggcacggcggctcacacctgtaatcccagaactttggtaggctgaggcgggcggatcaccagaggtcagcagtttgtgatgaaactccgttcctactgaaaatacaaaaattagccgggtgggtggcagatgcctgtaatcccagctactcggaaagctgaggcacctaaacccgggaggtggaggttgcagtgagctgatatcatgccactgcagtccagcctccgcgacgcaatgagactgtctcaaaaaaaaaaaaaaaaaaaaaagatggtgtcagtgatttctgctacatcagctctggaggca

SEQ ID NO: 809616 - DNA, 579 bp, Homo sapiens
ctgcagatgatagtgtcaaaccaagtggaacaaagaaagaagatctggatgacaaagagaaaaaagatgaaactcctgcacctgtatataggrccaagtcaattctggagagctgggtatgggagtaagcaaccaggtaatctttgatcagagatagaaattagtatagacattttgcctccagatcctcaggtggttttagaaattggttctctaattctgtaggagaaggttgatactggtataggcttacacgtcattgaaactggaaaaggtagctagatattcttctactcatgttttggataatgagatattttatgcttcacacacttggagtatgtcatctactgtaatacggtatctgaatgaatactttaaataaaatacatttctgtaagttaattgtatactttaaaaatctctgaaaaatttgagtagcaagtctcagaaacttggttctaaatattaagaatatatccttccttgggagggagcatgtagtaaacatgttagtgtgattgtaagcatactgtctttctggaggtcgctgtgttcctgcatccactattttcattt

SEQ ID NO: 809617 - DNA, 499 bp, Homo sapiens
gtatgtgccgctccctcaagtgaccataagcagttgtaattaacatttgcactggctgatcccatgccttgcaccatgcacaggtctcctttccagtccatcggccctcccgtctccaaggatctatccttcattaaagattgtgtgtttgttaaatattttctccttttcattcctttataagtgctctaggaatacatagcctaccctgaggatgtaattctttgtagaaacccttcagatatgctgttccctgcctggatactcagcgtctgggtcttattcctcatcttagctcagttgttgcttccacaagtcccttactgaccctcagaatagcggtggtctgtcctccagtctccctggtacycccatagtcatccgttgcacagttttggacttgaaatcctgtgattagttgtgtcagcggtgccctttgctgccttccttgttagagtgtgcaactcagtcttcacacggtatctgtggaaccaggcag

SEQ ID NO: 809618 - DNA, 631 bp, Homo sapiens
tcatgatgagcggattccagctggatcccgccgggcccatggccgccatgacgcctgctctaggtgaggatgactacgtgtttgtctgttttcatgataggartttaaccagggagaatggtgaatagggtgagatagtcctgtggattcagttgactctggtcttctcgagtggtttttgtgtaaactggagtgtcttacaatcaagtattctcaagaatcccttgaactgtgtgtgtacatatggaagagtttatgcattcaaaagagatatgcttgtactctggctacgtggggccaggattaaaatgtgagtgtttcctctagttttctgttcccattctctctttctctgtctcttctttcaatttgaaaaatcactataatcacctaaaactttggggtttcatcgaatatttactgaaacttacaggaaactgtagctgaggcaatcatttcaataagaggactagggacagttacctcaatgatttaagtagagacaatcatcttaataataggaattcggaaccacagtgtacgttattcagataactaaaggctgattctgtgccgagctagggaaccatccagatagacttctcaaagttctctgtatatttatgaggac

SEQ ID NO: 809619 - DNA, 479 bp, Homo sapiens
ggttagctaggatgacctcaagatactggttggtctcgctttctcattagtaatttgtggggagatactggattttcttgagttagctaggaggcccctgtgttttatagtattccgggaagtatattctcaaaacagtattcaagccaaagggggaatgccctcattatacccttccttattttcttagagttgctgctgacactgcctgcatcacctgcaggttaagtccctggggttgggcatagtgtgtgtgcatgtgtgtgctcacatgtgtgtgcgcgtgcatgcagtgtctcgtgttgtagacacttagactcaaaccgaaacaaacccccgccaaatgggctcaccagctggttttctttgggtccccggktggcatgcatcccagcacactgcccacagttggagctgttgttttgttttctttttaaaattacactcctgacccaacaaaggagagtaggtaggaattg

SEQ ID NO: 809620 - DNA, 613 bp, Homo sapiens
ctttagttctctggatggaaatctgaagatgaaggagaccttctgtgccaaatagaagcctgagatttttagtgaaactaacatacgtcatctggtcttcgtgaaacgattctgaggtttctaagaatttcccacaacactgaagattggtggcttagagtttattgacccccaaagaaaagggtatgtttgactgtgagatacagttgtccttgccattttccagatattacccactgtctttgtattgaattaccttaaaagtattgactcatagaagcaacccacatggttaaacccaactttaatccaaaagtcttggtcatcaacaaggttttctccaactatagaaaaatgtgctccccaaatttgccacattctcattctctccatctaacaaaaaagaaacaaactcttcattgtctggcccacttggatctttttatctcaaataattttttaaaaaatgcttatgttggcttggcttrgtgactcatgcctgtaatcccagcactttgggagcccaaggcaggaggatcatttgagtccaggagtttgagaccatcccggggaacatggcaaaacattgtctctaaaaaaaaaaaaaaaaaaa

SEQ ID NO: 809621 - DNA, 576 bp, Homo sapiens
aaagaaaaaaaaaagttatgcagaatgttagatatttacatttgatacggtgtgccactattcaaggaaaaattaaatagcattttttaaaaaacagaatgarcttcaaaattaaagttgatttttaacttccatattagcaaatactcttcactactgaaagacagtactattttgcatattctgcataactttaagaaagtctttagtgaaatctttattggaagaaagtcatttgacaacaggcaaaaatttaatgattcggtatgaagtaaaatcaatcttctgatttggaaaatactctattataaaggtttcacttctttttggatgttttaaaatagacatagacacttgaaagtactatcatcacgtctcaaatcacctagaattcctagtatttttaaattgcaaatacaatttcaagtttatttaaatactccagaagttataatcctactaattgtgctagactttgctagtagagggggcccctctttctggatgagaagtctctcttgcagccatagaagagaccatggctttccccataggtttttcaacagactgtgaagc

SEQ ID NO: 809622 - DNA, 505 bp, Homo sapiens
tcaatagctacatccctcagaagggaaggaaggcagagggatgaggcttcagttcacctccttctcatgagtgctgcagagcatctgtgaattcagaggtctgcagctgggctctgttcacccaggagtgtgcttcatgctctaggaaggagccactttgcacacagatgatccagggcccagccatccttccagggtgaataattaatgtcttctctcatggtgaactctaggattcaagccatctaatgtttttgaagccactgtcattatatttaattgatgatgacaggtggccaccaatgatgaatattttcccagggggagtctccccaagtggctttagacttcctcacatggccccaggggattaaatggctcctgattactcagaggataagaggttctgtcttatcwtgttcttttcttatttgtcttatgtgtctttcctgccccaggcctgggatcccccactgatctcccttcccttagtgagaggtggtat

SEQ ID NO: 809623 - DNA, 622 bp, Homo sapiens
cctgcaggggtcaggcctgggttactgtgggtggggcctgggaggggcccttgtggcatcctggggagtctctcccacrgctcctgtttgactttcctgtggctgctggctgttatcacaaatgacccctaatttagtgccttaaaacatcacacactgactctctcccaggtctggaggtcagaagtccaaaatgagtccttgggggctaaaatcagggtcccagcagggccggctccttctggggactctggggagaattcgtttccaggacttttccagcttctagaggacaacctcagctcctggccccttcctccaacttcagagcctgagctcagcatcttcaaatctctctcttgctcttctctccctccctaccttcttctctccctctcttccttctctctctctccgtctccctccatccccacatcttgtcctctcactctgaccctcctgcctccctctttcttctacaaagaccccagcttggacccacctggataacccaggagcatttcccacctcaggctcctaattgacatgacatctgcaaagtccctgtggccacacatgacacatagacaggtccaggattgggacacgactgtccccgcgg

SEQ ID NO: 809624 - DNA, 625 bp, Homo sapiens
cttgcttgagtatcatttttgtatgtagtacaactaaatgtctcagattgattaggactgtaatctagacaatttctgatgtctgtkaacctttcttcttccatgtattttgcccatcagcaagaagaaaggtaaaacagggcagattattatgtagcagctatttaatagacaaataagtgtaagttgatggaaagcagtaatgttccttaatacagacacttgcacttggtagacagattcacccaagtttgcatattataattccagccaccacacagtgagtgagtgactctttctcacaatatcactaactctaagtctctgtctctcatcacatcctatattctcacaccacccctgagccctaggggacatgatgcctacccgatcctgccggctgagagaaggatggtatattttcttacattagtcaggtgagacaaaatttgaagctttcaaactgaaacttttactaaccaactgaatgaaaaggaagtcaaaagaataaaagtgtggaattcagtgagcacagataaaagtagcttcaacaatctcagtaatgagacttttaccacatgggggagctcattctagcatggttaaactaattgtcagacagtgc

SEQ ID NO: 809625 - DNA, 601 bp, Homo sapiens
aggctgactcaggcagatcacttgggtccaggagttggagaccagcttgggcaatggagtgcaatcctgactctacaaaaaaatacaaaaattatttgggagtggtggtgtagaccacaaccgtagttccagctatttgggaggctgagataggaggatcaattgagcccaggaggttgaagttgcagtgagccgtgattgcaccactgacagagcaagaccctgccaaaaaaaaagaaaaagaaaaaaaaatgatgagaggtatataggaactctgtaccatccttgcaacttctctgcaaatttaaaactttttttttttttttacagtttggtattttttattattattatactttaagttttagggtacatgtgcacaatgtgcaggttagttacatatatatacatgtgccatgctggtgcgctgcacccactaactcatcatctagcattaggtatatctcccaatgctatcgctccccsccctgctttaaaactattttaaaatgaaaagtttatcaaatttacaagaagaaaaacattaaaaagtgggcaaaggacatgaacagacacttttcaaaagatgtcatacatggag

SEQ ID NO: 809626 - DNA, 587 bp, Homo sapiens
ctatgtggaatcatttgcttagaaataataataacataaattatactgacaaattaacaagttttgttaagtggttgaatataagatcaatctacaaaatctactgcatcaactatatacgagcaaaagaccagwacatataaattagaaaagagatgccatttacaatagcagtaagatgtataaggtaactaggaataaatttaacataggtaaatgaattctaagtggagatttttaaaatttttattgaaagacataaaagacaatctaaataaaaataatgctaatatatgatctataaagatatcatctgcccaaagtaatatatgcattttcaatcaaaatcacaacagggttaatgaaaatgtgatgctaaaagttacatggtaaagcaaaggctcaagacagccaaaattctcctaaagaaggccaggcacagtggcttatgcctgtaatcccagcatgtgaggaggccaaagcaagaggattgcttgagcccaggagttccagaccaacctgggcaacatagtaggacttagttgctacaaaaaattttaaaaattagccaggcatggtggtgtatg

SEQ ID NO: 809627 - DNA, 641 bp, Homo sapiens
aaataatatttttctaattagtagattgataacctttaaaccattcactccctgaaaaaaaacttctcttaatgggatactaaggcttttattgttgctcagtcrgctcccttgcctccttccagtcatttgcccagatctcaccttctcagcgagtcctatgctggataccatcttaaatgccgctgcctctgccccaaccagtattcccaatccttctgacttaccctgctctacctttctttttttaataacacttaccatcttctaacacacttgatttccatgttaaaaatacatttaccagtgtctgccttcccccaacagaaagtaagttcatgagaagagggatctttgtctatctttttcactgatgcatacccagtgcctagatttgagcctagacattgtggacactcaaacagcccatttgtggatgaatgaatgaactgggagagcaggtagatccaggttgtagtctccgagtacactgggtagtgctgtttttctgtattgtatagatatcaaataagaagatggtaagaactctgtggcctctttcaagatgatggtatgattgccttagggaactaatagctaagaagcagcttttcgttgttaaatttcaagtatgttttgtt

SEQ ID NO: 809628 - DNA, 481 bp, Homo sapiens
taggtccagtgaggaaggtgcctgtctaaggttactgaggcttaaagacccttatcagcttcagcctgtgstgttaaaatacaagagtcagttgatgtctcctaggcaagctctactttaagtggaaatttttcctttcccctccctcctcttcatctttcctgatcctgagatgctaggatgaccacacaaaggatatgcaaataatccaattgtcagctctctgccaccatcttggtttggggtgccattccacaggattccattgtattcatccaagtagtttcagtctcctttcgatgtggtttacttggactgtgtaacagcaatttaagtcatatgaataaaacacttaacatgctttgcactttccctaggtggaagcaaccttagacctactaaactgccctctagatgtaataaggcctaagaatggttctaaagatatctatcagtagctaggcagcagagtggtgcagca

SEQ ID NO: 809629 - DNA, 653 bp, Homo sapiens
gatgtttttaattccatttgctgttgtctataccagttgctgctacctattcaaggcccaaagttacaatctacctccaasccagtcttctcccagtctacctccaaatcagtctcacacagcatacaagatgatcttttcataattaaattcttctggttaaatcttgtggaaataaatgaaggctaccacaataaacagagactgtttattcagcggttgctatagggagggattcagccactatcactttttggcagagactccaatgcagcctgggaagctttatagtggtaaaaagaaaggtgtgggggaggcttcaggtctactctaattgtaggttgctgacatgggaaagctagaggtggactagctggaagtagggtatcctctgtgattgacttggaaagcatatttggctttctctggttggtcttaagttggaagcagagggacaaaaaccgggaaagctggcagtcattggccaaatcctgacttttctgagccaattgcagcagaggttgttggccagagttattttgtcacatatagtctgaccagttttgtttatatgttcagtctcaaaccattcaatggctttttaagatccttgtgttacatacaaagccttctataaaatcccatgccagacc

SEQ ID NO: 809630 - DNA, 615 bp, Homo sapiens
tttattctgatgctaaatatgaacaaatttgtaaagtgatgcccaatttagtttattaataattataaatgttactattatgttatttaataccattgataaaattattttttaaacactttataattatttataatatctgcccccactcagttaaatgttaagctaccaatgccagggccattctccatcctgtttgggaaaatagttctatgtgttatagctaagggaccttaatatatagtggtaaatgagccacactgaattggttgggaccaagacagtggcacgtgcactgtgaggatataatgttaagatgtacttcttaccttcatagtttctgtaatttctaatcaatctaggaagggagagaggatataaacaataatttcttaagttatatgattcttaatataggtggaaataagtgtctgtggtagttcaaaagaaagattatttaagactaaggaaaaatgggaaccagaagtcagttaaaaaaagacaatttwaaaaaaaaaaagaaattcagggaaaacagaaggaagtcaaaaagtaaaacaaaaaaatggaacagcacctaaactagagaaatgaataaggagattattaaatgtc

SEQ ID NO: 809631 - DNA, 705 bp, Homo sapiens
ttctcttgtgtcctcacatggccttccctctggttgatgggatccctggkgtctctacacttcttgcaaggacaccagtcatattatattagggtcacacccaatgacctaattttaatttagtcacctctttaaaaaccttaccttcaaacacggttacattctgaggtactgggggctgggacttcaacatatgaattttaagggaacaccattcagcccataacacacacacacactctttctctttctttctttctctctctctctctctctctatatatatatatatatacacacacacatacatacacatatatatgtatatgtatatgaaggacaaagatatttcaaaaattaatatagaaagaaacggaggagaagaagggaggagagggtgtaagtttttttttttaggaatttaacttggttccacgtaatttaaactatgattacaatgatgagctctttaggcattacattcacttaggaccacctatttctttcttcaagaaatttgtaagatacaaaccatgtgttgagttaaatcaagtaaaatttaatggaaaattacattcaaagtcgcctgactagtcctgtgtgggttatgttctcatgcatttttcatcaccaggaaacagcttgtgaatgtcacactttaccatcaccctcctgagcccaagttttaaatagaaatttaaaaac

SEQ ID NO: 809632 - DNA, 561 bp, Homo sapiens
cacccaaattttctacaaaactttcttgctcaactatcaggggaaccacccccaatatttcaacataggttctttcctattttccctaagtgtcagccggtctgagaaataaagagaaagaatacaaagagagaaattttacatcggggcctccgggggtgccatcacatattggtaggaccgtgatggcgacccctagctgcaaaaccagcaagtttttattagggatttcaaaaggggagggggtatatgaatagtgagtgggtcacagagatcacatgtttcaaagggcaataaaagatcccaaggcaaagggcagagcaagaccacaaggcaagggcgaaattagaattactgatgagggtccatgttccgctgggcacgcattgtcttgataaacatcttaacaggaaacagggttcaagagcagacaaycagtctgactagaatctaccaggctggaatttcccaatcctagtaagcctgagggcactgcaggagaccagggtgtatttcatcccttatctcaactgcataagacagacactcccagagcggcta

SEQ ID NO: 809633 - DNA, 645 bp, Homo sapiens
tgacataatagtgtcaccaaggagacaaaaaaattctcattttattttttcagaaaacytcatacagatattagattacctgaaataaaaatgtacatgcctattaaaaggttagcattgagtagtgcctattacctgtgatacgaataatacaatgtactacaagtcttatgagaaggtttgctaggaatgtattcaaacgtaagtgacaccagaaaagtgagctggcaaaaacaatttctacctgcctatatgccatacatgtaaacttggatattttctttctttgtagttttaaactaccacttcatcttaaaaaaaaaaaaagaaaaccaaaacaagagtaattcaaataagttcaaataagggacttaatcaattttctgatttaaatttcccccagaatatttctatataatagttttagaagatgaaaagtaaaattaaacttttaaaacaagtggaataaaaacaatgatgtccaaaaatgtttaaccagatttacatagtgtaatatctatcattaaatgccttcaaaaatatagaaagcatagttttaagactcaggaatatatgcaatgcaatactcgcttatgtaatgagttaagagaactcattcattcattcaataaatgtttactgagt

SEQ ID NO: 809634 - DNA, 592 bp, Homo sapiens
gtggctgaactaatttacattctcaccagcagtgtataagcgttcccttttctacacagccttcccagcacctgtttttgacttttaataatagccattctaactgatttgagatggtatctcattacggttttgatttgtatttttctgatgattagtgagtggagcatttcttcatgtttgttggccgcttgaatgtcttcttttgagaagtgtctgtttctgttcatgtattttgctcactttttatggagttatttggttattgctcgttaaattgtgtaagttcctcagagattctagatatcagatctttgtcagatacacagtttctgaatattttctcccattctgtttactctgttgatagtttattttgctgtgcagaaactcttcaattaggtcccacttatcaattttggcttttgttgcaattgcttttgtgaacttagtcataaatcgtttccaaaggccgatgctcrgacgatgtttcctaaattttcttctaggattcttagagtttcgaggtcttacgtttaaatcttcaatccatcttgagttaatttttatatatggtgaaagggagggatcc

SEQ ID NO: 809635 - DNA, 511 bp, Homo sapiens
gtacacttttattcatggactgtgaagtttcatgttcaataaacagcaatagaataytttttctgaatgtaaaaagttacataatataatttctatatgttccattccactcatgctgtttttccctattcactttttagttcatgtagctaattaagattttccataagttgaaacctctgtttttctacaatttttttcttccctcatctttcagttaaagcgtttatgtaattcaagctttaatcacatgactggtttctagacactcatgagaaaattagtgttcatatataagtatgtagtatatgtgtatatatgtgtgtgtatacatacatatgtgtgtgtgtgtgtatatatatatatatatgcacacattacttggaagatgaagaccaccagatacaatcactcttctactttctcccattctctcattctcttcagaaggctcagaagaggaagttgatctaaccatttatgatcaataattttcccaccgatgcagaag

SEQ ID NO: 809636 - DNA, 514 bp, Homo sapiens
gccttttgaggtaggactataattacccccattttatatctgagaaaactcaaaacagaaatgtctgaagtcacttgtactggaacacatagctagaaagtttttgagctgtgattcctgtctaggggtgcctggaggacagcgtaaacttaacgtacatgctgcactgctgtgataaagaagagctgcttagatcgatttctatctggcttgcagagtctcatatatgagtgtagaactgtcctagttttcctacacataccgtatcttctgctgttgattatcttagacttttgatagttttaaaaataaaaattgtggtaaaatgggatcatggaatttaagtttaaagtctttaagtcctacaatatggctttgttagatgtgttagtaagcaaatgcaacataagttaaaagaagcattggcttcctagtcaccccaaagacattgtctccaataaatagtgaaattgaacattcctgcwattgtatcccaatatgaacctcaacacat

SEQ ID NO: 809637 - DNA, 539 bp, Homo sapiens
tatgaccaagtgggattcatcccggaaatacaagctaattgtattagtccattctcacactgctataaagatattacctcagtctaggtaatgtataaaggaaagaggtttgactcrcagttccacatggctgaggaggtcttaggaaacttatcatggtggaaggcaaaagggaagcaaagacatttttcacatggcagcaggagagagaagttcaagcaggggaaatgccagacgcttatagaaccatcagatctatgcaaactaactcactatcatgagaacagcttgggggaaccgtccccatgatccagtcaccccccaacctggtccctccctcaacatgtgtggattatggggattacaattcaagatgagatttgggtgggaacatatagccaaaccatattactggttaaatctataaaaatcaattaatatagtatattatagactaaagaagaaaaagcacatgatcatcctaatggatacagaaacagcatttgacaaatttcaacaccttttcatgaaacatacac

SEQ ID NO: 809638 - DNA, 601 bp, Homo sapiens
ttatatgaaattttatcctgtgcatagttttgttaattcaccaccacagtcaagaccggttccattatcacaaggattctccgtgatactcactgatgaccataccttcctctcttcctccccttccccaattcctgttaactggtaattgctacctctagaattttgtcatttcaagaatttgtttaagcataatcatatagtatataacacttgggaattaacttctttgagtcaggataattcctcagattcatccaaatttttgcatgtattaatagttcattcattttaattactgaggagtattctgtggtatacatataccacagtttgtttaaccattcacctgttgaaggacatctgggttctttcccgttttttggctactacaattaaagctgttaggaacattcatgtactagtttttatgtgaacatgcagttctctggaataaatgcataagtgcaattgcagggtaatacggtaattgcctgcttagttttataaggcgtatrtgttttaccacttcaagtgaagtgtggaaaccatactgccattccttttactttctcactttttcagatactgtcttgagtat

SEQ ID NO: 809639 - DNA, 609 bp, Homo sapiens
atttcttggaagctttgttcgtttcttttcactcttttttctctaatcttgtcttctcactttatttsattaatttgatcttcagtcactgatatcttttcttccacttgatcgaattaaccactgaagcttctgcatgcgtcacgaagttctcatgctgtggttttcagctccatcaggtcatttaaggtcttctctacactgtttattctagttagccattcatctaaccttttttcaacgtttttagcttccttgcgatgagttagaacattcttctttagctcagtgaagtttgttattaccgaccttctgaagcctacttctgtcaactcatcaaactcattctccgtccagtccagttttgttcccttgctggcgagtagctgtgatcctttggaggagaagagaggctctgttttttggaattttcagcttttctgctctggcttctccccatctttgtgattttatctacctttggtctttgatgttggtgaactacagatgggattttggtgtggatgtccttttagttgatgttgatggtattcctttctgtttgttagttgtccttctaacagtcaggaccctcagctgcaggtctgt

SEQ ID NO: 809640 - DNA, 634 bp, Homo sapiens
aaacactataacaagaataggttcattgcctgatgcacacagcaagtcaatacactaagactctgggttgcaacagaggaagaggtttagtcatcgtgtcactgaatgaagagatgggaagaaacctcaaatctatcttccaggggaatttggggttagggttttaaaggttttggagtgggctaaagtgtgaagatcgttgattggtcaaagagtgcagggagaagtcatgggacagggagaggaagaagctgtattttcatgctggtcccatttctctgagggggtcctccaacttgttgctggaatttggagtccaaaaaacatcttaagcgatagattcttaaacaaaagctttatgattgtaaagtcagagatcctgtctataggaacaatggggatgaaagtcaattcttaaacagtcttatgaccccagtgtcaggaatcctgtctgtaggaacagtggggatacaaatggtcagtaaccaatgctaacatgactttcagcgccaagaaaataggtcaaaatgcagccrgattgatgcttaactataactatatttctgtccagaaagtggcatgcaattcttatcaaccctggggagggggcagtttcaagactaaagagataggg

SEQ ID NO: 809641 - DNA, 495 bp, Homo sapiens
cagcaaacactgttaacagagacttcacaaggaggcatattttcaggagaggcttctccagactattcaactcacctgagctcctctgcaaatgtagattaatttttttttcttaactgatcacattattattttcttagggtgctaacaatgtcaccacaggccattgagcacttctttgtggactgacagaaggtgttccttcttcatgacagggtcaatactgcactgggcaggtggcttgaccagcagatgaagtgcgtgttggcctccatcgtcttccaactgtgtgcttctgggctgggacacgaccttcagcactatatgcagcagctgtcttacctggtccctctttctgatttcaatgcctaagtttcctttaattcattctcagcctccactgcagaggaaagcttggcagtctttgggcacaagaagttgcatataatggatgaggaatgaygttttaaaattagatttcataaagaatctaga

SEQ ID NO: 809642 - DNA, 371 bp, Homo sapiens
aactagggccaaaccccttaattaccctaaactgtccatgagaagaaaatactgcagcctttatggaatgactgagagaggcactaataaagcacacaaccctattccctgagtcagtggagggacaattcatcctaaaatacaattttattacacaggcagctcccaatattaaaaggaaactgcagaagcaggctataggaccagatagtaccttagagaactctctgaaggtgrccacctcagtcttttataataggaaccaggaggagaaccaggagaaagaaaggaagaaaagggaaggacagaggctctaatagctgctttgaagcctggcaaagtccaggatccccaaggtgcatccactagtt

SEQ ID NO: 809643 - DNA, 571 bp, Homo sapiens
ccactataaagaagaaaactgagatgtagagaggtccaactgtcaggtatgaagagtagtagaatatgccacaccaaaatrtgccacatttgcatcaggattattttgagctgaagacaattgagaagaagcaaatatgagaaaagctctctgcctttcctcctatttgcctaaaagcaaggcataaatttacaaaggtagcactcctactctctctctaacagaaaggacagcttgatcacaaggacaactttagacccttatcagcctggagaaggcagcagaggattctacataataagctttattaattagcctcagaggattctacataacaagatttattaactagcttttatctaccattagtttccttatatttgccatcccacaagttggcatgcctagagactcaagattgctgttttttgtcttgtcacttctctaaaagtttattgttcatttttaaagatgctatataagctggagttctaagctacctttttgagaattactcgttccccaggtatttcccatgtacatatgaaatatgcatgttaataaacctcag

SEQ ID NO: 809644 - DNA, 609 bp, Homo sapiens
taaagcattcagaaggaagtagagcataaaagtttggaaaatttgcagcccagcaatgcatagaaaagagaaagctattttctggggagaaattcaagccggctacaaaaatttgcataagtaaccaggagccaaatgttaatcaccaagacaatgggcaaaatgtctccagggcatatcagagaccttcaaggcagcccctcttatcacaggcctggaggcttaggagggaaaaatggttttatgggcccagggccccctgctgtgtgcagcctcagacgtgatgccctgcatccaagctgcttcagctccagccatgaccaaaaggggacaaagtatagcttgggccattgcttcagaggatgcaagcctcaagccttgggggctcccacatcgtgctgggtctgagggtgcacagaagtcaagaattgaggtttgggaacctctgcctagatttcagaggatgtatggaaatgcctggatgtccaggcagaggtttgctgcaggagtgaagtcctcatgaaraacctctgctagggcagtgtggaagggaaatgtggggtcagagccccccacagagtccccatgggggcactgcctagtggagct

SEQ ID NO: 809645 - DNA, 518 bp, Homo sapiens
actttttccaatttggaggatgcagctgagtggcatgtcccatagtatggagccacaattacctgtcagtgaagagagtacagaggaggaaaaaraaaaaaaaaaaggtgttttgattttttttttcaaaggaatcccaggggttcaggatgcatttgaaaggggtacagactgaagatgaatgcctactcatctagaaagaggggagcgaggagtcccaggttcccttctcttcctagaaaatacttggggtatgtgaggaaaagtgagagatccctctttcttcttccatccttatatccccaagtcccagcaactgtgacaagttgctgcccatgggtgtcaaagaggctttcatccatgttaacagggggtgcctaggaggtgggaatatctgctctcacccatgtatgccctgtctcccctgctctcagtagcctttgaattctctagacctcatttattccatggatactaacatgacatttatctatgaacaggaagcttggcttaattgg

SEQ ID NO: 809646 - DNA, 686 bp, Homo sapiens
gcagaagcaatgggaattgaactcaggatcctattcacakgattcagaagtccattattatgcattcctatttatgtgtgtccatgtatctaccattttatttactgagtgcttactatgtgtcaggcactgtgctaagcactttacatgaaatatctcatttaatcccaccagtaccctgtgagtaaggtactatagtcatccccattttaccaatgagataactaaggctaatttaggacaaactaaagtaagggaaggaaacagatcaaactaacagacttagattcactaatattgaatgatataggtagaaatagtttgcatggaatatctattagttccctgaaaaccaaatagatcgtgacatcaattatgatttgaatctagctcaagatggcatcacaatgggaacatgccaagtatcatggaattcggtgtaaacagtggctgttcaaaggcagcaaagtgccaagaactgccaaagaatggacattaggctactgacttgagaggggcagcctagctatccagaagaccagactaggagagaggtcctgttctgagtattatgctccaggaagagttcttgtttttcctacagataacacaaggttagggcagcataaaaacattggaaaaagaagccgatttaaatgtattgagcctttatgacacaccaagct

SEQ ID NO: 809647 - DNA, 603 bp, Homo sapiens
cttttgtaaattccaatttgaggkattttcttacttggaagcacagtggtaattgcagctcacttctcacgctagtgtggtaggaaagacagtgcattctctgctgagtatgtatggcctgtcaggcaggggtgtatgggacacagaagttgtattcttcattcccttgctccctcttcctccctcacatgtcacgcctgatcatgtccccatggaatctggttgcgtcactttccttgcaaccacagccccagaactcccatagactttgtactcccccagaggcctagggtcaagaacttaatttgtttcacagaatccagcaaggaccctgttcaggagcccaagaagtctagcttctactttctgccaaggatgaaactgaggcccaaagaggagcccttgaggatatcctataataaaagagggaggggctaatggcagaaacagctttctgaccaggtagtgatgtggtaacggatacctgggagagcagagggtctgggtggtccctccctggggggaaagagccctgtgtggcagctatctcttcagaagtgacttcaggaatgtggcctcttatttggggaagggaagaatgtc

SEQ ID NO: 809648 - DNA, 635 bp, Homo sapiens
cctaggtatctggaatgggagcccacctgaacagcccccagttgtgacgatgaccaaaccagagcctaccatgtagaaagcccttgtctccctgcctgcaggattgtaaaggaaaaagcaaggctgctggaggaaaccagaacactcagatctcactactggatttggggcagtgacatcagctctcccttaccaggcacacaccgctcaccattgtaaagagccagaagtcaccgtgcagcttctatctcttactgtgaaccatggcaggaaagtctgataaagatggtagatggggttacaagggagccttttcccattccaccaactggacacagggacaacaatgcatgtgataagagcacatgggtttgaatactgttaagaagctaccatttattgagcagttaatatcttctaggccctgtgttaagtgcttagcatttattatccatcatgtttaaattgccagtaaaaggaggaaacgtcatcagcctcatttaacagattargaaataggttctgaggggttatgtcactattctcaagacaaatagctgataagtggtgagggtgttttttttttttgtttttttttttttgagtcagggtctctctctgtcactcaggctgga

SEQ ID NO: 809649 - DNA, 420 bp, Homo sapiens
accacatgagtaactctggaaatggatcytccccaggtaaagccttgaagtggctagagccctaggcaacactttgattgctatactgtgagagactctgaaccagaggaaccagagaagccaccttcagatttatgactcacagaaactgagattagaaatgtttattgttttaaacctccaaattttgggacaagtttttacacagcaatagataactgcaaagcaatgagaatctccaaagaaaacatttaggaatgtagcatccaaggatgtataagcttcttgtattgatttgccttgaaggaatattgaggaaaaaatctctttccctaatcttccttaccactgcctcctacatacatataaaccttcaattaaaatgggccaccaaactgttcctgcacttgtcagaatttt

SEQ ID NO: 809650 - DNA, 598 bp, Homo sapiens
tagaagtatggacaaacctaacagtatgtatttgctctcatcaagactgatcactgaatttccccaatagcagcaaaaattaacactgaatcctccgtatggtcctatctcacctataaaataaacccatcccactccttgatagcaatgagtatatctgaccctttctgccctggaggagatagtaactctccttactaagactgatatgtattccagttacgggggattgctttttctacccaaaaagccttggccgggtgagtccaaggactcagaggatgtctgactgatcattgtgtggtactgcataatgttgcttcgcaagaaggaatccactggtccactgcctatcagatgctggacttacagaaggttggcatggcttcttggagtggcagctgaagcactagcataaggatgacttgcggggttgggcatgttatagtgctgttgtatgcagaatattgaggcatggagccaaaaaaaaaaaaaaggagataacagtgattgcactcattatcattccaagtgatctagttgagcagttcttgttttctttacacatamatttacatagtcatctgatgctcttcaa

SEQ ID NO: 809651 - DNA, 637 bp, Homo sapiens
ttaacaatactggggcttccaatatatyaatacagtaaatatctccacttatttatactattggtttcttccaatatattgactcttttgacaacaacaataataatttcaaaatatgactcacaaaactaaaagtagaaaattttcttaatcagataaacatataggaaatgtcaaacttagcaatgaaatattgatgtttccctttgatattgggaaaaaaacaataatgttatctaataccatcttttaaaattatatgttggctgtcccagcaagatcaataaggcaagaagaaaataagaaaagtcataatcccaacaagtattattttaacataacccaataaaattttttataaaatgaccaaaacacttttctattgctttacaataagccagcaacgaacacttctgaataattataaccatgacacttctaaattctcaaatagaattacaagacctgaatattctcctccactttaattgcatatattaaaactgaaatgcacaacttctggtaagaacttagatattttcatgcagaattgataaagaggcaaagaacattattaataaacttactgcctatgtctgatcatgtaatttaaaaatacattttaagtgaccatcct

SEQ ID NO: 809652 - DNA, 637 bp, Homo sapiens
ttaacaatactggggcttccaatatattaatacagwaaatatctccacttatttatactattggtttcttccaatatattgactcttttgacaacaacaataataatttcaaaatatgactcacaaaactaaaagtagaaaattttcttaatcagataaacatataggaaatgtcaaacttagcaatgaaatattgatgtttccctttgatattgggaaaaaaacaataatgttatctaataccatcttttaaaattatatgttggctgtcccagcaagatcaataaggcaagaagaaaataagaaaagtcataatcccaacaagtattattttaacataacccaataaaattttttataaaatgaccaaaacacttttctattgctttacaataagccagcaacgaacacttctgaataattataaccatgacacttctaaattctcaaatagaattacaagacctgaatattctcctccactttaattgcatatattaaaactgaaatgcacaacttctggtaagaacttagatattttcatgcagaattgataaagaggcaaagaacattattaataaacttactgcctatgtctgatcatgtaatttaaaaatacattttaagtgaccatcct

SEQ ID NO: 809653 - DNA, 606 bp, Homo sapiens
agtctatttgctaatattgcatgggagaaaataaagtcttgcaattaaatgattacttttgattctgcaaacatccagcacaatcaattcatgacagaaagaaagttccttatataaataattttgttgctggtttcattgacactccaaatacttcattcattaatacaaatatttattgagtgtctattgtttttgccactggggatgcataggtgaatgaggcaaacattttttgtcaccctggagcctacagttgtaacaaaagttagaaggaaaaaaaaaacggtactggagagaatctctaatgaataaatcttaactgatatatcagggaaggcttccacagagaagtgatctttaagcaaaaacaaaaactaagtagaatttatccaggtgactaatgagagagagataaagagattcccagagagagagagagagatggagatcgccaggaaaacaatatagcatatgcaraggttctgtttggggataaggggaatttcgggaattcaagaaataaaaaatctgtatggcagatgcatagtaaggaggaagatagggccagattatgcagggatttatataccaacttaagtgttt

SEQ ID NO: 809654 - DNA, 524 bp, Homo sapiens
acttttatacccattggggataggcacagggaagaccaacatttcagargtctggcacaggaactgatttttaaaatatctttgcatttcttcagagccccaaaacactgcatgtgtcttagtggctgcccacgctctggctgagtggggcaagccaagccatcttctatgccagatgctagcaggaagtcaaagctcctgcaagaatgggaaggtagataacaaggatcccctatatcaccaggcagtggagtagatttgtcctcctgcagggtatagtgtttctatcagacagctgaaggactcctagatattgttctcagggaaggaaacaagcaagcaaacattcattcctgactagatgctaacttaactgattgcactgaattctcctaaaaccctgtattaatcagtgttagcctcttttcatagaaggggaacttgaaactcagtttgaaaaataagcctaggttttctctggtacaaagtaatctcgaacttggaagtcaggtagcctagactcc

SEQ ID NO: 809655 - DNA, 636 bp, Homo sapiens
tactgagaatactactaactatagactttgtgattaaatattaagaacaaatttctgcttttatcttatttaatctcctaaaaatatttggcttcctcactattccctccatgaaaaacatattttcttaactattatgacaccacattctcctagatagcaagaataagatttttgtgaagaagcacattggagatataagaaggatatcttaacccttggtgtggggtaggaggaggagaagggagagaaatggcccacacatgaactctgtgagatgtgggaacagaatggtgggaagattccccaacctcaagacctatacttgctcaggatcccaatgtgaattggatagacatctcttcccctggtgcattggggtctgggagcaatcccatgttgttcaagtcattttgctcaacccacttagccccttctgctgaaggtagtgggtaaaaatgctgaaaccagatgaaggaaaatgtgattcagtcttttttcacattcctaaccttcagtggagaatggggtaactgagagatgttagtgcactggctggaatctctgcctttatcatgaatattcaaaggtatacagaataaccaacrtctataagccttaatacaccagattagc

SEQ ID NO: 809656 - DNA, 516 bp, Homo sapiens
gctgaacaaataacagcaggtcatcctaaggggatagccagggtatttstaaggtgtactaaatttcaccctgacatttaccaaattcttacatcactagctccctcttctgtttccacaataaagtgcagtttctttaataaagggtattttctatcttcatccaattctttgaaaatattttatttccttagagactttctctttgtcacttctttcttttcctcttgccatcatgcctccatgggatctctctctccaaggtgcttactcttccccagaacagtatcttctcaagactgctgcttctggcctatggaccttccaatctctccatattctagtagtctaggagccaagcattctgatcagatcatggacctgctctcagcatgtccccagtcaacatggatatctctagtcctgaaccctagcatgtgttctgtgttccatcactgctgttacactcttctcttctgtccatatcttgcctgaccatctgcttttatgtgagct

SEQ ID NO: 809657 - DNA, 581 bp, Homo sapiens
gttacccaaatttatacaacaaactcttagaaagcagttgtaagaaaataaacaacccaattaaaaaatgaggcaaaaaccttaacagacactttaccgaaaaagatatacagatggcaaataagcatatgaaaagatcttcatcgtatgtcatcaggtaaatacaaattaaaacaacaacaggatactattacacacctattagaataaaaacaatccagaaccctggcaatactaaatgctggtgaggatatggaataacaggaactctcattcattgttggtggaaatgcaaaatggtatggccactttggaagacagtttggaagtttctcacaaaactaaacatattcttaccatacaatccaacaatcacactccttggtatttacccaaagaagttgaaaacttatgtccacacaacagctgcacatggatatttatagcagmtttttatagttgacaaaacttggaaaaaaccaagatgttcaataggtgaatggatttttaaaaaagccaaaatgtagaactatggtagtccaaacaatgaaatattaactgctaaagagaaatggactatg

SEQ ID NO: 809658 - DNA, 581 bp, Homo sapiens
gttacccaaatttatacaacaaactcttagaaagcagttgtaagaaaataaacaacccaattaaaaaatgaggcaaaaaccttaacagacactttaccgaaaaagatatacagatggcaaataagcatatgaaaagatcttcatcgtatgtcatcaggtaaatacaaattaaaacaacaacaggatactattacacacctattagaataaaaacaatccagaaccctggcaatactaaatgctggtgaggatatggaataacaggaactctcattcattgttggtggaaatgcaaaatggtatggccactttggaagacagtttggaagtttctcacaaaactaaacatattcttaccatacaatccaacaatcacactccttggtatttacccaaagaagttgaaaacttatgtccacacaacagctgcacatggatatttatagcagatttttatagttgacaaaacttggaaaaaaccaagatgttcaataggtgaatggatttttwaaaaagccaaaatgtagaactatggtagtccaaacaatgaaatattaactgctaaagagaaatggactatg

SEQ ID NO: 809659 - DNA, 492 bp, Homo sapiens
tatttttttccaactggtcaggttgatcataaattttatcatagttcattttttgaaagccagttgcttttgtatcagttgctattttattacatggataccattctttctcaacatgttagcttattttcaaggtgcacgtgacttacagacaaccaaatatattctatgacaactcactttctttcccagaactactctgtttctctgtttccactgtgccatttgagttttcaagacatttgtaaagaaaaaggatagtggtaatagaaagtcattggtttatttcacagatgttcatgagagcctactttccaggtctcattcttggctctgtgatatagtggtaaataacacaggtaagctttatgctcccacagagcttatgtaacagtgagaggatcagacaagtaaaacatgcatttttttamttgtttgatatactaaaggtactccacgttctgtgtggggttaaatgggaaacaaaggtga

SEQ ID NO: 809660 - DNA, 548 bp, Homo sapiens
ggagaagatacccagtctttcaccattaagtatcatgctagctgtgatttttcctatgccctttatcaggttggaaagccccttataatgcttttctgagagtttatgaggaatagatttttaatttaattttgtcaaatacttattctctattctgataatcatgagttttgctttttagtctgttactattgtgaattacattcactgacttttaaaagttaaaccaactttgcattcctaggataaactccaccattcatgatatattaccctgtttaatagattattcgatgtataaaatttagtttagattttttgcacatattctcattagagatgttggtctatagttttttttttcctttgtgatgtctttatctgactttattataaggtaattctagtctcatagaatgagttgggaataagtcccttcattttttggaagtttttgtataattgatttctttctttcttaaatgtttagtaaaattcactagtgatggtatrtggccctggaattttctttgttggaatattctggt

SEQ ID NO: 809661 - DNA, 633 bp, Homo sapiens
gactactagatctcccacatgtgtttctagcagtcaaattaaagtgtaggcaaagcaaaagaagtgccattccgtttctcctcctgaagtggcctccccacttttctccctgtaggtgtgctggtcctctttgggaggctgctgctgcggtcagtttttctaagcctgggtttcggtggataaaggactctagaaacaccctgaaattctgcgtgagtaagcagatgtgcattttttgtgggcagaggggcttcagctttcattagatcctaagagtgatacctccatgactccagaatggttaagaatctctgttctatgctgtagctgattccacagcttgtttcccacctgcacttctaaactcttagacttgctaaacattcaagttctgactgccttcactacaggcacctgagtactcttagtagttgagagaaaggggaaggcagacagggcatgaatagtactattttctctataggcattttttcggaacataatttttccttgtataagtgaattctcactaaagaaaatgtagaaackgctgggcgcggtggctcaagcctgtgatcccagcacttttggaggccgaggcaggcggagcacctgaggtcaggagttgaagac

SEQ ID NO: 809662 - DNA, 389 bp, Homo sapiens
caatgatcactgtaggtaaaaaaaaaaaatgtgtattatcatgttataaatccaacatcaagtggtttccaatttttaagaaagaatatatacacatataattaaaaccttgtgtatatttatatgtgtgtatatgtccatgtatatgtatagctattaaatttaaaaaatcacctaatatgcatgcgaaaggataattaaaagcaacagaatttgtcaaatatcctggaatatcataggattttaaaaactacgagaagttccagagatccactgtgtttaattaaagactaaaactcaattactgtcaaaaacttccagctgatgttcaagaaaaactgtwtaatatccagcagtatctacttctattatggaaaatttaaaactag

SEQ ID NO: 809663 - DNA, 521 bp, Homo sapiens
aggcaattacaaaagctttacctggcagggatcatggggggacgtgccctccccacatcagacctgatgcacagccgtgcattgcagtctgtgaatggagttgcagtcaaggactcagacgtcccgaactgatcatgctctcacacatgtcggcattcctagaccagatgcctccatttggagtccgccttatcaggagcctttggcagaggcctttctcaagcacctgagctaagacctcttgttgccatggtgggagtgggggatgcctaaaaatatttttttcttcaagctgactcagtactcagtacttttctactcctagcccttccctgtcacctcctcctgcccctgggtccataaaatggcaggagcctcttgttcagggctcccttaacagtgagatgatgawgccctgcatccgtcagacccctgttggagccaccccatgtggaaaaatggaataatggaggagtcggtactttttctggttcagtcccttgcttatactatcaaaggca

SEQ ID NO: 809664 - DNA, 424 bp, Homo sapiens
tgaataagttctcactctgttcattcacaggagagcggattgttaaaaagagcatggtgctggccgggtgcagtggctcatgcctgtaatcccagcattttgggaggctgaggagggcggatcacctgaggtcaggagtttgagaccagcctgcccacatagtgaaaccccatctctactaaaaatacaaaaaattagccagacgtggtggtgggctcctgtaatcccagctactcatgaggctgaggcaggagaatcacttgaattcgggaggcggaggttgcagtgagccgagatcgtgccactgcactccagcctgggcgacaagagcgaaattatatctcaaaaaaaaaaaaaaaatagcatggtgcctcccccacccctcctccctgactccccractcttgttcccggaatgggggtc

SEQ ID NO: 809665 - DNA, 706 bp, Homo sapiens
catgtcttcttagcctcatttaggatccagatgatccagatagtaattgcattattctgctcaggctgacttaacatagtaccatagactgggtgatgacagaaatttattttctcctagttctgaaaattggaagctctagatcagggtgctagcatggttggtttctggtaagagttctctttcctgcttctatatagctgtcttctcactgtataattacatggcagagaaaaagaccaagtgtctcttcctacaaggacactaattccatcatgaaggtcgtatcctcatgacctcatctaaacttaatcactgcccacaggccccatctccatccaacattatattggaagttagggcttcaacacataaattttgaggagacccaattcagtttatctcagtaattaaagaagaaaaaaattaaaatcagtaataacaataaattcaagaaaattggtaagtttaatcctaaaataccttaaaaatattattgaaaataatgaatacctaataaatacaagcattttagttctagtataaatatgataaatacctaattaccttaagactacattgcatttgctgacrttgatataattatgtatttagccaaacaaaaggtttaattcaccttcaaagaatatcctgaaaatttattcaaaagaaaactctcaaagtcatgggctatttattaatccta

SEQ ID NO: 809666 - DNA, 644 bp, Homo sapiens
atgtaagtcctcttgtgagagacttacctttaacccatgtcctgaaagatcccccagaagtaaaggaaataaagttttawatatagcgaaacttgagccataaaagatattaatttaacagaaaaggcgatggcgaggtcccaggaggtagaaaccatgggtgcatcctcaaagtgggaaggtcatgtggttctggtcctggaatgctgaggagaataagcttagcagagagtaaatggtagaaatggctgctcttttgttcagttggtgaaaaacctttcattttaaaagaacttacatcatcaaatcagtgaaaaaaattatcagaccaactggtatgtctaacaatggccttagttcacttgatcaatctaaatgctcatattagagaaatgactgttgattgggcaggtgggcttctaaaaaatgaaatatgtttgaaaaaattattttcctctggccacatgctaagtattccacatgtattgaatatttttcttacttcttgagtttgctactcactaagttcatgattagttggaccacaagccaaacaagtaacaggaaaattatttgcaaagataattgagaggctggtaaatgtaccacctgaggacacagctctcgagctcaagtatctttag

SEQ ID NO: 809667 - DNA, 515 bp, Homo sapiens
ctacattgactttcttcaacagaattagaaaaaaatctactttaaaattcatatggaaccaaaaaagagcctgtatagccaggacaatcctaagcaaaaaaaaaaaaaaaaaaaaaacacacagctggatgcatcacactacctgacttcaaagtatactacaaggctgcagtaaccaaaacagcatggtactggaaccaaaacagatatatagactaacagaacagcatagagacctcagaaataacaccacacatctacaaccatctgattttcaacaaacctgacaaaaacaagcaatgggaaaaggattccctatttaataaatggtgctgggaaaactggttagccatatgcagaaaattaaactggacccctcccttacaccytatacaaaaattaactcaagatggatcaaaggcttaaatgtaaaacccaaaaccataaaaacccttgtagaaaatctaggtgatacctttcaggacataggtatgggcacagattttaagatgaaa

SEQ ID NO: 809668 - DNA, 454 bp, Homo sapiens
tgttagcaaaaatgtggagaaattggaacccctcatacactgcttgtatgaatgtaaaatggagcagtggctatagaaaacagtttagtgattccttaagaagttaattacagaatttccatttgacccagcaattccactgttaagtatatatccaaaagaattaaaaacaggtattcaaacaaatatttgcacacaaatgttcacagcagcactattcacaatagccaaaagttggaaacaacccaattttccatcaacagatgaatgggtatggttaaacaaattgtagcttaaccacacaatgaaagagtattcagccattagaaggaatgaagttctgaaatatactaygatgtgtatgaaacttgaaaacatgctaagtgaagaagccagacacagaagttcacatattatatgattccattcatatgaaatattcagaataggcaaa

SEQ ID NO: 809669 - DNA, 600 bp, Homo sapiens
cgtctcattatttgggttgctgcaatcctcttctattgtggactctgccccttgtagtctattctcaaccaagcaatgaggcgatccttttgtcaacagatgatgtcactctgcttaaattcctagattgactttttgttacaatgaccttcaaggggcagattttcagaagactgaccccctctagaattaatctctgtgccttctctggtgactatatatgtcagtaatggcaatgtcactgtgtccctctgaatgactgatttccactggaggtaccatgttcagggccaggcaggagttggagagagcttaggtcaggatgtacttgaactgccaaagttcccatcagttctgtggttagtatatgtccctttcaagtggaggcacatgcaaatagcaaaaagatgcttcttcaaactgaaccaaagttggaattaagagaaaaacatgctgacaagtttcatggaatgtgaaaacatcttcaytgcaattagttttaagaccctggagctaagctttccttcctccttagggagaaagcatgataggaaggaaaagcagaggaaacagtacccaggaagacctgtatttggatac

SEQ ID NO: 809670 - DNA, 600 bp, Homo sapiens
cgtctcattatttgggttgctgcaatcctcttctattgtggactctgccccttgtagtctattctcaaccaagcaatgaggcgatccttttgtcaacagatgatgtcactctgcttaaattcctagattgactttttgttacaatgaccttcaaggggcagattttcagaagactgaccccctctagaattaatctctgtgccttctctggtgactatatatgtcagtaatggcaatgtcactgtgtccctctgaatgactgatttccactggaggtaccatgttcagggccaggcaggagttggagagagcttaggtcaggatgtacttgaactgccaaagttcccatcagttctgtggttagtatatgtccctttcaagtggaggcacatgcaaatagcaaaaagatgcttcttcaaactgaaccaaagttggaattaagagaaaaacatgctgacaagtttcatggaatgtgaaaacatcttcactgcaattagttttaagaccctggagctaagctttccttcctccttaggsagaaagcatgataggaaggaaaagcagaggaaacagtacccaggaagacctgtatttggatac

SEQ ID NO: 809671 - DNA, 523 bp, Homo sapiens
tggggaggcctcagggggcctttattcatggtggagggcaaagagggagcaggcatctcacatggccaagtgggagcaagagagagatagtggtgggggaggtgccacacacttttamaaagaccagatctcagccgggcgcagtggctcacgcctgtattcacagcactttgggaggctgaggcaggcagatcacgaggtcaagagatcgagaccatcctggccaacatggtgaaaccccatctctactaaaaatacaaaaattagcctggcgtggtggtgcatgtctgtagtcccagctactcaggaggctgaggcaggagaatcgcttgaacccaggaagcggaggttgcagtgagctgagatcgtaccactgctctccagtctggcgacagagtaagactccgtctcaaaaaaaaaaaaaaaaaaaaaaaaaagaccagatctcctgtgaacccagagtgagagctcactcttcaccaagccattcatgagggatccacccctatgatccaaacacctc

SEQ ID NO: 809672 - DNA, 536 bp, Homo sapiens
tggcttcatccctaggagctaaactgacctgagaagatgcaggagctagttattatcccttcactgacctcagggtctacagcctaagtttctttcaacagcctgtgggcaagcaactrggacttgcaaaccccagctgctagtcaccagctcggtaggaatgaacatttctgtaggagcttgtgaaacacaccagtaatttgttgttggcttcccagtgtatccgtcactctgtcagctgtcatgtgcctgtgcctccagaatgacagtcactgactcaagttttcagacacatgaggtaaagtcaggaccaaggccgagacactctccaaaggacaggaattgctggggcaggcaggatttgtgctgggaaagtcatagggggaagtgagctcctggacacacatgacaatattgtgacctatctacggcttcacagtgagtgcagcctaggttgaatgtacaaattggttatcaatgccataatcagggcttgattaagagatacaggaatttgccctgtgcttatgagtagc

SEQ ID NO: 809673 - DNA, 634 bp, Homo sapiens
aagatactcaaagttacaccttcaattgacctctccctagcttagatctcttagtcagtggtctcaaagttttctatgtattagaatcaccttgaggatattaaaaaaaatcttaatgtctacaccctagatgaatgaagtcaagatctctaggagtgggcccaggcattagttttaactctacaggtaattccaagatgcagttaagtttgagattaagttgcccacttaatctctccacttggatgtatacttagtgtctcaaatgtaatatgaccaaataaacttcattattatccctatttcacacttgatcatctcacacttgatcagtggatggcttccccatccactgatctctcaagccccaaaagtaagcttgatactagttgtttattttctctcactacctacagctactccaccagcaaagtcttcagttccaacttgaaaacatccaacgtcattctaccatcaagtccaacctgtaccactgcaagttttaattaatctgcttacwtttggctcttctctactcacttctccctcttgtatccaaagtaatcttaaaaccaggtcatgtcacacccctatttaaaaacctccagtggcttctatcccatgtcgtataaaa

SEQ ID NO: 809674 - DNA, 591 bp, Homo sapiens
tttccttcctttttttttaaggctgagtagtattccattgtgtatatccactacattttctttaccattgctccactgatggacacttaggttaatttcatatcttagctattagaaataatgctgcaacaaatatgggatgcagatatcatttcaatatactgattccatatcctttgggcatatatacagtacagggattcctggatcatatggtggttttacttttttgaagaatcttcatactgtttccgtaatggctgtgctaatttgcattcccatcaacagtgtttcagggttcccttttcttcacatcctttgcacatattctccaacacttgttatgtttcatctttttgataatagatattctaagttgtgaggtaatatctcactgtgattttcatttgcatttgatgattagggatgttgaacattttttcatatacctattggtcatyggtatgtcattttgagaactgtctgttccaatcctttgcccatttttaaatcaggtgtttttactactattgagttgcttgagctcctatacattttggatatcaacttcttatcaggtgtatgctttac

SEQ ID NO: 809675 - DNA, 648 bp, Homo sapiens
ataagcaagcttgttagccaaatttatcttaggtaggtcaaatttttatatgasagtgttgtaattttgtatgtgttggctgtatctttatagtaaaggaggaccccttggatcttgaataatcaataagtgtagaatatatgtgtgtattttatcacccaattttattatttcaaatgactgcagaagttgacagctgaacctttggttttttgacatgttcttgatgaacctgtgatttatcttatactgagttcttagtcgtggttacaactcccaagctgactttttctttttgtaggagacgtacactatgataaaatgcctaggaccacttgggggagtcgggggaaactttccctcagtctgaacttttttttttcagtctgcatttaacaggcagcctctgttaaatgcattgtgcttactcatgtggaccactgatgagatttaatattgcccggcttcctgcttatgaagttcccatttgaagagaactattccaatgagaacaaggcacggtagtttcagagatcaatactggacttgttcctgatcaatatggaactatttggcaattttctcatatagaatgacatttcctcttgtaatctgaggcaaattcaactgaaatgaaaaaaggcaatt

SEQ ID NO: 809676 - DNA, 600 bp, Homo sapiens
tgctgagacaggcacatcatttctgtggtattcttgccaaaaatgtcttacatcaatctcatcagagaaaacatcagggcttggtgttggttgctcacacctgtaatgccagcatgttgggaagctaaggtgggagaattgcttgagaccaggatttcaagaccagcctgggcaacatagcaagacccatttctaccaaaaaataaatatgtatattagctgggtgcagtggcatgggcctgtagtcccaactactaagcatgctgaggtgggaagatcgcttgagtccaggaggttgaggttgcagtgcagtctagcctaggtgacagagcctagatgacaacctgtctctaaaaagaaaagaaagaaaaaggaaaacatcagactcactcaaattgagggacattctacaaaatcttcaacagtgtcaagctcaggaaacaaaggctaaagggctgtcacagattgtcacacaacacttaaatgcaatgagggatttgaacttggatcctgggccagaaacagtacatttagttgtactatcrgcaaaatttgaataaggtctgtagactagttaatagttttgtatcagtgttaatt

SEQ ID NO: 809677 - DNA, 588 bp, Homo sapiens
ttttttgtatttttagtagggrcagggtttcaccatgttgtccaggctgatctcgaactcctgacctcaagcaatccacctgcctcggcctcccaaaaatgacgggattacaggtgtgagccactgtgcccagcccatgttattttattatacttggcttcttcttcttcatattgtgttgatatagtggaggaaattatggatgttggaaggcaatatgataaaggggtgtgttatatattttattgtttttaattatttatttttttgagatggagtctcgccctgtcgtccaggctggagtgcagtggcgcaatcttggctcactgcaacctctgtctcccgggttcaggcgattctcctgcctcagcccccaagtagctgggattacaggtgcccgccaccacgcctggctaatttttgtatttttagtagagttggggtttcaccaagttggccaggctgttctcaaactcctgacctgaagtgatctgcctgcctcggcctcccaaagtgctgagattacaggcgtgagccaccgcgcccagccaagggtgtgttatagaatatttgttacaaaaaaagagg

SEQ ID NO: 809678 - DNA, 634 bp, Homo sapiens
tcactctgtcacccaggctggagwgcagtggcatgatcatgttcactatagcctctgcctcatggctcaagggatcctcccatctcagcttcccaagtagctgggaccacaggtgtgtgtcaccacagccagccaaattttttttttaattttgtgtagagatgggctcaagtgatccatccgcctcggcatcccaaagtgctggaattcaagagggagccactgcacccagccaagacggttttttgttttgggatttttttcttttttgagatagagtctcactctgtcaaccaggctggagtgcagtggcacaatctcagctcactgtaaactctgcctcccgggttccagtgattctcctgtctcagcctcccgagtacctgggattacaggcgcccgccaccatgcctggctaacttttgtatttttagtagagacagggttttgccattttggccaggctggtttcgaactcctgacctcaggtgatctgcccaccttggcctcccaaagtgctgggattacagccgtgagccactgcatctggccagggtggctttttttgaaagcaaggacacgaaagttcagaaagggaagaagctggctgtggccctccagcaagctggcagcc

SEQ ID NO: 809679 - DNA, 623 bp, Homo sapiens
ggagatcacagacttggacccaggaagacccaatttaaggccaggcccatcagctccccctgcaattggcctccctgagmcccaacttcattgtctatacactgggataggaacgggcatctgcttcggacgtgtgaggaccacgcaggacaatccacacaacatgcacagggcctgggacatgtcagaagcctctgctgcaggacacaggacacctggccccacgaaggcagagccctctgaatttgaccaaacctcctccatgcagacacagctgcggccttggggctaccacatccccagatttgcggagcctgaaatgcggccagcactggaagcggggagactcccacattgagatgtttctgttctcccagagctccagtagagaaaatgttcacccacaaaccccccagggtatccagaggccaggggtgctggggtgcaggctgcagacaggttcccacatttggtgcaggggaagacacacatctgctcaaaagaaaaatgagggagtgtttcgggttgaactgtgtcccctcaaaaaagatacataggggtgataatccccaggacctcagaatttaaccttacttgtacagagacttcaaagagaaatcaag

SEQ ID NO: 809680 - DNA, 623 bp, Homo sapiens
ggagatcacagacttggacccaggaagacccaatttaaggccaggcccatcagctccccctgcaattggcctccctgagccccaacttcattgtctatacactgggataggaacgggcatctgcktcggacgtgtgaggaccacgcaggacaatccacacaacatgcacagggcctgggacatgtcagaagcctctgctgcaggacacaggacacctggccccacgaaggcagagccctctgaatttgaccaaacctcctccatgcagacacagctgcggccttggggctaccacatccccagatttgcggagcctgaaatgcggccagcactggaagcggggagactcccacattgagatgtttctgttctcccagagctccagtagagaaaatgttcacccacaaaccccccagggtatccagaggccaggggtgctggggtgcaggctgcagacaggttcccacatttggtgcaggggaagacacacatctgctcaaaagaaaaatgagggagtgtttcgggttgaactgtgtcccctcaaaaaagatacataggggtgataatccccaggacctcagaatttaaccttacttgtacagagacttcaaagagaaatcaag

SEQ ID NO: 809681 - DNA, 623 bp, Homo sapiens
ggagatcacagacttggacccaggaagacccaatttaaggccaggcccatcagctccccctgcaattggcctccctgagccccaacttcattgtctatacactgggataggaacgggcatctgcttcggacgtgtgaggaccacgcaggacaatccacacaacatgcacagggcctgggacatgtcagaagcctctgctgcaggacacaggacacctggccccacgaaggcagagccctctgaatttgaccaaacctcctccatgcagacacagctgcggccttggggctaccacatccccagatttgcggagcctgaaatgcggccagcactggaagcggggagactcccacattgagatgtttctgttctcccagagctccagtagagaaaatgttcacccacaaaccccccagggtatccagaggccaggggtgctggggtgcaggctgcagacaggttcccacatttggtgcaggggaagacacacatctgctcaaaagaaaaatgagggagtgtttcgggttgaactgtgtcccctcaaaaaagatacataggggtgmtaatccccaggacctcagaatttaaccttacttgtacagagacttcaaagagaaatcaag

SEQ ID NO: 809682 - DNA, 576 bp, Homo sapiens
aatgtctgttcaaatcctttatccatttttaattgggttgtcttttattgagttgtaatagttctttatattttagctacaactgccttatcagatatgtaatttgcaaatatcttctcttattctgtgagttgttctttcactttcttggtggtttcctttgaagtatgaaagtttttaatttcaatgtcccatttatctattttttccttttatttcttatgctttttggtggcatgtctaagaaaccattgcttaatccaacatcacaaagatttatactttttttcctaagagctttatggctccagatcttacattcaagtcttgaatatactttgactcaatttttttttttttttttttttttttttttgagacggagtcttgctctgtcacccaggttggagtgctgtggtgcaatctcggctcacagcaacctccgcctccccgattcaagcaattctcctgcctcarcctcctgagtagctgggattacaggtgcatgccaccatgcctggctaatttttgtatttttagtagagatggggtttcaccatgttggtcaggctggtc

SEQ ID NO: 809683 - DNA, 525 bp, Homo sapiens
acctagtagccagcctaaatgagaagatttagccttgaggttattttagtacaatagggaagaccatcagtattcttggccatggaaataattcagggggaaaaaaagaaggttctgaagtgtataggaaaaggtataaattcaatacaagttgggaaattagcacctagataagactagagggtctggccctcagttttgtaggctcaaaaatgtttttttaatatacatagctgtcagttggaagcggattgacttaaattcacaagagctactttatgaataatcaaatggtgggatttggctgggcgccgtggctcatgctataatcccagcattttgggaggccaaggcaggaggatcacttgagtctaggagtttgagaccagcctgggcaacagtgagacctcatctctatgaaaaataaaattagccaggcgtagtggcgcatgcctatagtcccaaccactsgagaggctgagatgggaggatcgtttgggcctaggaggtcgaggctgtagtgaa

SEQ ID NO: 809684 - DNA, 626 bp, Homo sapiens
cctgttgtctagaagttcctcttctcctgcygttcatctgccagcttacccttacctcccacccgctcacatacccagcattgcgctctatttctagaaataattactgaagttagttttccatctcctccccaaggtctgaatttatacaggagcatccttaggatgtcttacatctttgaacttgtaacattttggtcttcattaaaagatgactttttttttttttttttgagacagagtctcgctcagtcgcccaggccggagtgcagtggctggttctctgctcactgcaagctccgcctcctgggttcacgccattctcctgcctcagcctcccgagtagctgggactacaggcgcccaccaccacgcccagctaatttttttgtattgttttttagtagagacggggtttcaccatgttagccaggatggtcgcgatctcctgacctcgtgatctgcccacctcggcctcccaaagtgctggtattacaggcgtgagccatcgtgcccggccgagatgacatttcttgattgcttttctgctctgttcctggatcttttattctaattcaccctgtatttgctaggttggtcattgatgacttcttgagttgatcaact

SEQ ID NO: 809685 - DNA, 626 bp, Homo sapiens
cctgttgtctagaagttcctcttctcctgccgttcatctgccagcttacccttacctcccacccgctcacatacccagcattgcgctctatttctagaaataaktactgaagttagttttccatctcctccccaaggtctgaatttatacaggagcatccttaggatgtcttacatctttgaacttgtaacattttggtcttcattaaaagatgactttttttttttttttttgagacagagtctcgctcagtcgcccaggccggagtgcagtggctggttctctgctcactgcaagctccgcctcctgggttcacgccattctcctgcctcagcctcccgagtagctgggactacaggcgcccaccaccacgcccagctaatttttttgtattgttttttagtagagacggggtttcaccatgttagccaggatggtcgcgatctcctgacctcgtgatctgcccacctcggcctcccaaagtgctggtattacaggcgtgagccatcgtgcccggccgagatgacatttcttgattgcttttctgctctgttcctggatcttttattctaattcaccctgtatttgctaggttggtcattgatgacttcttgagttgatcaact

SEQ ID NO: 809686 - DNA, 578 bp, Homo sapiens
taaatggattttaaaaattagttcaccagaagtcagtttgcccaataccagttcatggaagttataaaaatttgtgaagttaccaaaaactagtcttgaaaaaactccttgaatatgtcccttctaacagctttttaatacatgttcaggatgaaaaaaactaaggctcttgggttggtttagtctttttattaagtggagcagaaaaaaatggacttcactcaaatgtacaggtatgctgtttggagtttattttgaacgatcagagaaggacatccctctttcagatgcttccaaagaactagcaagcacgtgtgtcttttatcaggcatcgtgcccttaaagggattcctcccagatagcagtgccagatactagggcttgactgtcagaaacaagcaacctacatttcaggtcatgcagatccacatttttcctagaaggtagctctacacactgtccaaccaggractgtcaaaatccacagattttagcatttcctatggggactttagcttatcctaaattctgaaatcttctttgttattttccatttgatatttagctttcttctatca

SEQ ID NO: 809687 - DNA, 600 bp, Homo sapiens
tcccttgcctcagcctcctgagtagctgggattacaggcgccygctaccacacctggctaatttttgtatttttaggagagacaaggtttcaccatgttggccagactggtctcgaactcctgacctcaggtgatcctcccacctcggcctgtcaaagtgctcggattacaggcatgagccactgtgcctggccagactgccctttctcacagaaacaaagcaactagtagccagtaaattcacataaaattttcatagtggaaaaaatccccatgcaacaatcgctggtaagacagaatcattactaaatgaagcaaagagttatatctggtcttaggaagaaagataccaggcctagaatgtcatttacaaaatgaaaagaatctgagggtataagaagaaaagaaatttagatataaaatagaaaaggaaagcgaccttacagaaccagatgattcagagaactctttgtcagaaaaaagaaaaaaaaatgagagaacaatttgttaaagaatattatatttcttgctaaccaagacaaatgaaaacaacccaagcgcagcctagctaaattatgccatcagaattagtaactttcc

SEQ ID NO: 809688 - DNA, 549 bp, Homo sapiens
ttttcccattctgtagggtatatgtttactcagttgatagtttattttgctatgcagaagctctttagtttaattaggycctatcattaatttttgtttttgttgcagttggttttggagcattctgtcaaattactaacagcactttttacagaattagaaaaacgaatttcaaaaatgtatttggaaccacaaaagagcccgaataaccaaagcaatcctaagcaaaagaacaaagctggaggactcacactatctgatttcaaagtatattacaaggctaagtaaccaaaacagcatgggactggtacaaaaacagacacatagatcaatgtaacaggttagcgaaccccagaaataaggctgcacacctacaactgtctgacctgtgacaaagtcaacaataataagcaatagggaaatgactccctattaaataaatggtgctgggataactggctactcatctgcagaagattgaaactggacttcttcctttcaccatatacaaaaattacctaaagatggattacagacttaaaggtaaga

SEQ ID NO: 809689 - DNA, 554 bp, Homo sapiens
tagtccctcttatctgcagttttgctttccttggtttcagttaccagtggccaacaaaggcccaacggaaagtccagaaataaacaatttataagttataaattgcatgttgaaatcttatactatccaacccttcagggacctgcaccatccctttgtacagcaaatccacactgtctactctgcctgactgttagtcacttagtagccctctgtgttatcaaattgactgcggcagaatctcagtgcttgtgttcaagcaacccttattttatttaataatgaccccaaaggacaagaataatgatatggtggaaacgtggatgtatcatagggaagccctcaagtgctttaagtggaaaggcgaatgtcttcaacttaatgcggaaataaaaaaacttatatgctatgattgcaaagatccatggtaagaatgaatctgctmtctgtgaaattgtgagcagtatatgggtataattcttctgttttattattagttattattgttgatcttttattgtgcctaatgtatagatcatactttatcatagtta

SEQ ID NO: 809690 - DNA, 623 bp, Homo sapiens
atcagggatgaaaaaatatggctcaggagctgtcttggctggcatgaggggcagatgttcagattgggtgtctacattttaagaggcgtattctattcgctccttcattctcctctttcccacatactcttgatctttctcagactcggcttctgggaaaaaaaccaggggcccacagatatgcctggagaagggtgaggatggactagaggtgcagagacggggcgcaccacagcagagcaccaaaagattcctgggcacttttacagatactcagaccccatcccagacctggaaagtcagaaattctggggtctatacccagggatctgtgctttttcaaagcttcccaaagtgattctgatcatcatcctggtttggagactcctgccctgggggggttgtctctgcatttcatccatggacttgacagagatgctcaccatagctgaagcttgctctgtgatgtgatccaactgaggaagcaatgctgggactcacagatatttgagtaaagagagaccatgaaagagacacagactgtcttactcaatggcgagcagacagtgcaggcatccattcagtgcctatctaaygtgaacctactatataccaggtgcttt

SEQ ID NO: 809691 - DNA, 636 bp, Homo sapiens
tcccacttcagcctcttgagtagctgggactacaagwgcatgccacaacacctggatatgtgtgattgtgtgtgtgtgtgtgtgtgtgtgtgcatgccaccacacccgggtgtgtgtgtatagggatggaatctcactatgttgcccaggttggtcttgaaatcctggactcaagtactcctcctgccttggcctccaaaagtgctgacattcaagcatgagccactgttcctggcccaatttatgttttaaaagattgttctgaatacaacatggcaagtgggtcacagaggatgaaaatgggaagcaggaggtgttggaatagactagagacaatgcttgcccaatccaggagatggactggactaggacaaatggatgtacagcgatgtcgtgttgcaggtagaattgagaggattgggattgccctggaggtgggtaagaaaggaggtgacaggtgaagggaagcctgatgactgtgcccctaggttggtaccatttctaactccaggaagactggaggaggaaggaggaaggggcacaaggtgatgaactcaagctggtgcctgttgaaaatgttgtgtctgtgagcggaaaagggagacatcctgtcagcagttgcatatagatttctga

SEQ ID NO: 809692 - DNA, 477 bp, Homo sapiens
tctctctgctcacttagaaagtgaaagaatccattcttgaacctacagatgaaagggaggtgctgtttcatgtgcagagctcctgctgggattctcagtctctaaggttctcacctaatgtacatctgccctccctgtgttgtttttttatatttagaaccaataaagttcttgcacagctacagttgttggcctgcactgctatcaagggtctctctctttctccctctccacctataaagttttactcctgagatatccttggccagaaagcaccaacattctgctggcatctcctcttcctgacttcctgccaagctctttcccgggattcatgtttccatgtggatatagrctgatgatggcaggagagctcaggaatgctggtgggaaaatcgactctgttcatctcccagtcctggaagggtggcctgggatcctgggccagaatactaattagttcagggccttgggaca

SEQ ID NO: 809693 - DNA, 517 bp, Homo sapiens
gtatggtaatgctgtcctcatagaaagagttaggaagtagtcctcctattttctggaagagattagagtattgataccatttacactttaagtatttggtaaaatttactagtgaaaccatttggacctggtgctttcctttttggaaggttattaattattgattcattttctttcattagatataggcctatttaaattatgtttttctccacttgtgagttttagtaatttgtgtttttcaaataattcatgtgacttttcaaacttgtcagtatagagttattcataatattgctttattatccttctaacatccacagcatcaatagttatgacccctctttcatttctaatattagttattagtttcttctctcttactttttttttcctgacagcctgactgtagtttcatcagttgatctttcaaagraccagttttttgttttgttgagttttctctcttgatttcctggttataattgtcttgaatttcccattaatttttactttt

SEQ ID NO: 809694 - DNA, 508 bp, Homo sapiens
ttcctttgatttttttccttctcctrttgctttggggtttccctaagagctccttcttaaatagaatttgtgtcctgtagctccctcagttttaattcactgttataatacagaacctggttgatgtgatggtaaggcgttggacaggagaaatgttctataaccttacaactaaatttcatttttttaagtgggcctgactttgtatgctgtgatcccttgaactacttcttagcctgtttcctccccttaagtaagataggaagctgagatttactaattgccttctcccttaggtcagataaggctctgtaaaatattttcccttggagagtaggctgttgttatgaagaatccttcgtgtgtatttcaaaattgttactttttcattagacaagtattacaaaatggttacttttcttccctctcccacgcctactccctaccttcacttaaacagaaagggatttttttctcatatattcactgagagaaactggttgggttc

SEQ ID NO: 809695 - DNA, 617 bp, Homo sapiens
ttttcacatctccgggtatagtagtagatgcaggacatcattattttggcaatattcaggtatctttgatattcactatggaataaattatttcaacatatcgagaacagatccaaggaggtgacctcaaagacctgaaggttaattaatggactaggctatcctgactcaaaatgaataggaattcagaaagggaagaagagggaaagctgtgtatttctgcagggattcatgactagttagatggacatattttattatgttttttcacaagggaaacatttttcttcattgtatattgaggtgtggtctcttataataaagattgttttagtctttacccaataaattttccacagtatctggtataaactctggctagataactttttactttatagaatttttccctaatgtaatgtgtgaaggagtgaggtagctatcagatttccatttataagctaactgaaaacatggaaactccacaaacagcccatataacctgaaaattgagcaaaatgactatatatacacacacacacttatatatgagctatgtctatatgtgtgtgtattatttagaatactatttwtctatacatcagtttgttctactc

SEQ ID NO: 809696 - DNA, 565 bp, Homo sapiens
tttgccaagttggccaggctgatcttgaactcctgacctcaagggatccgctggcctcagcctcccaaagtgctgggattccaggcgtgagccactatgagaaggttttaagcagagaagggatggggcttrgtttattattttaagactcagctcatggcttccatggggagcaggtctgttggaggccagggtggagatcatgggcggctggagagaaggcaagggctgtgtccgtcttgacagagactgggggtagggccccctctgtgctaggcctgtgccttgcactttaagtcactgtactccagggtgcgttagtcctccagaagccagcaggccctacaccaactctggaggcaggcctgacaggtgcagatgaactcacgcaggagtttcactctcctgaaccccagtgacattggaaccaaagccatcctccactctagcccctgagggaatctacccaaccaaacacagctctgagcatggccccctcctgctcatacactctccatggctccccactgcccttatgagaaagttctagcacctagcctggcat

SEQ ID NO: 809697 - DNA, 576 bp, Homo sapiens
ctcgctgcacacaaccacgtggatgaatctcagagaccattggccaattcgacgatcccagactccatcgagargatgcactgtgtgattttatttacatgaagtttcagaacaatcaaaactcactgatgcagctgggcgcaggggctcaagcctgtaatcccagcactttgggaggccaaggcgggcagatcactggaggtcaggagtttgagacaagcctggccaacatagcgaaaacccatctctactaaaaatacaaaaattagctgggcgtgctggcatgtgcctgtaatcctagctactcgggaggctgaggcaggagaatagcttgaacccaggaggcggaggttgcagtgagccaagattgtgccattgcactccagcctgggcgacagagcgagactctgtgtcaaaaaaaacaaaaaacaaaaaaccctcactgaggctgatggatatcagacagcactttggtcaccctgggcagaagctgtgattaggcagtggcccaagggggaagtcccaggggctagggaagtcctgttcctggatccaaggtttgggtacacagatatg

SEQ ID NO: 809698 - DNA, 586 bp, Homo sapiens
tgtttttttgtttgtttgtttgtttctccacctagcataataacctccarctgcatccatgttgctgcaaaggacatgattttattccttgttatggatgtatagtattgcttagtgttctatgtaccacatatttaaaatccaatggcctgttgatgggcacctaggttgcttccatgtctttgctattgcaaatgatgctgcaataaacatatgagtacctattgtcttttggtagaatgatttactttttatatacccagtaatgggattgctgggtcaattggtagttctgttttaagttctttgagaaatttctaaactgctttccacatcatttgttatagcagtgaatttctgttgacaatgaattctcttagttttacttttagaataaaatatttttacttttattcttaaagaatattttcaccgagtatagaatttttgattttttttttttagtttcagtacttcaaataatacttttccactactttttggacttagccatttctgatgaagagttattggccattcaagttgttgttcccttatcatttttctctgactgctttcatgattt

SEQ ID NO: 809699 - DNA, 626 bp, Homo sapiens
cttaaacgattgcttttgcaaaatcatttctaaaaaagattctagagacaaggaatattaaagagatgtgtataaagatgattaagtaaactatacataaccatgttttaatttttcctaagactgagccataattagataggtttattataaatatatagatttataatatatgtaatactttcaaatatttaaactcacagttctagcccaattttacttgtctacatttaaaagaaaaactttaaaaggatggtgaaatagtttttaaaaaggtttatttgcatgaggtagatttaggaacagtttttcttttgtctgtttaagccacaattgtacatactgaattccttcttcctatttgccaagagaccatccaaccagaaagatttaaaaattctctctatgaaagtcaagaataggcacaggacattcagctgtcatgatgaatcagaaaactaatctatgaaccatttgctggaggttattttagatggattaatttacagaacaccctagtttacagaggctaataaattatagttkatagttatgatcaaaaccattattagataggtatgccattgtttatgtatacatcttagtcctttgggccgtagatttgg

SEQ ID NO: 809700 - DNA, 537 bp, Homo sapiens
acaagtcattcttaatttatttctctgaacttatgattcttttcatttaccccatcctttataatttaccattcttaaatagttgatccatttacatatttatttgttcattgtttattcatttgcttaatcattcgctatcttttcatacatcaaacttttgtcaaataccttctatatgccataaattctggtagagagctgaaattataactcagttgccattttcatgaggtttggtaattcatttttctactcaaatcttaactagctcccatttctcctaattcctcaagtcaatttgactgcttgtatttcaataaaggctgtccacattatagcccttgggtctaccaactcattcagttattatagttattaggtatgtgcttattaaacactgatgacatttaaagtattgctttctgatattctctttcaatatcattcaaaatgtgttttttacagttgccaaataaaatacagaatgcccagttagtttgaatttcaagataarcaacaaataaatttttagta

SEQ ID NO: 809701 - DNA, 588 bp, Homo sapiens
ggatgaatattcaaagatatatctgggtagtggaattataggtgatttttattcttttctttgcaatttttcttatctcagttgggtatctgttacttttaattgatcgtttttaatctctcaattttaaaacttcaaacatatagaaaataatataacagacatccacatacccaccatgaaagtttaacacatgttaacatcttccctgtttgttgcgaactttttttttttttaattttctgtggatacgtattccttttctaaatgaagacttcagtactcagagaaagctaattcagggactctctaagtcctggaagtagttcattgcttaacaatgaaatagacagttagcactgccagagaagccgggtacctggctatcaggggaaccaattcaggtttgggggcagtgctgctgttaaacagactcagggagggaagttggagggtgtgtatactggtttaatgcctgggaagatttcccccaattccagagtctagagacatccactccatcccttagagccttgctactsaaggtggggtctgagaccaggatcccttggcagctttttagaaatg

SEQ ID NO: 809702 - DNA, 644 bp, Homo sapiens
gaaataggatcttttcagggataatcaagctaaaatgagggcatcagggtgggccctcatccaatatgattggtgtccttataagaagagaagatttggacacagaggcagacacactcagagggaagacgatgattggacacacagggagaagatggcctgtgtctggagtcacgcagctatgacccaaagaaccaaggattgccagcaaacaccaggagccagcagaggccaggaaggattctcccctagagccgtagaaagagcatatagctgctgacaccttgattttgaatgtccagacttcagaactgcgagacaatacatttcagttgttttaagccacgcagttgtgggtataggcagatccctacttatggtggttcgatttctgatttttcgactttacaatggtgccaaagccatacgtgttcagcagaaaccatacttcaagtatccacacaaccattctgtttttcactgttagtgcagttttcaataaattacatgggatactcaayactttattataaaataggctttggttttgaccaactgtagctgacataagtgttgtgagcacatttaaagtaggctggaggccatcatccttagcaaactaacacaggaacagaaaaccaaat

SEQ ID NO: 809703 - DNA, 532 bp, Homo sapiens
cttgtccttcagaccgcttatctcagtctgtaattatatgccattatggagattatttgataaacatctgtttatcccattatgctatatgcttcataaagtcaaggactgtgtctgttttcacaatggtatctgtgttgttcagtgcaatgcctagtacacagtgggaactgaattcatgtttatagaaaaattggggctattacattgaaaaagtaaaaatcattgagggtcagagtaatcgaggtgacctgcccgaggtcccacagctagtttcgagtaactaaattcaaattccctgaatcacaatccattttcttttccatccatgagcacttaatcagattttgtttccgcacaatggtggtggtggtggcggggatgacaattaggtgggggcaatggaagaaaggcacgaatgacttgggcatgggtgaggagtatgtgacccctttcggaaaatagttgaaatttttctctcaattattcctgctctgggctccgctgaraaccaaaattgggttaagactat

SEQ ID NO: 809704 - DNA, 549 bp, Homo sapiens
attggcaaatatgacacaagcagaggctctaaaagcacttgcttattgagaatcttccctctcttgttcatcttaggaccctgtgacacccgtatgtgaataaatccaggacagcctgttgggtgatgagggacacacagccaagtcattcccagcaccctagccaacctgaagccaacccaccaaacacatggatgaggccatcctagaccatccagccctggtagagctgccagctgaccaaagagatcagctgagatgacccagaccaaaagaaccatgtcacttacataatcattaagaataataaacatgccattttaaacccttaagttttgggatgtttgttacatagcagaagctaactgataaaaccgcagtgcacccttgtttaggtttaaatccaagcctcatcatttaattgtttagcctgaaagaaaagttctttaacctgcctgtgtcttagtttcctcacctgtgaaataatgayaaaaatggattatgtaatttacagcattcatgtacacagtaaatgagttaatattttaa

SEQ ID NO: 809705 - DNA, 675 bp, Homo sapiens
tttactggtttttctcccatctgtcttatcctctccatttcttcacttgtgcttcctgagatcacctcctgtgttagtttggtccttctgttgagattagacatgtgggaagtttactggagaaatacctgtgaaggcaaaaggagagggagctggagaaggcggggagaagctcagactccaatacgggactcacactgcagcagagagagggaaggagggataattgggcaggaagagacatagactgcagcctaattcgaagacaagtttggccaggccagtgaggggttctcaaagacacctgtcagaggagaaccacatcttgtaggcatgagcctcccttagtggcctcactgtgctgtcattagctgggtacagcctgagggaagtatggctttggtgtaaatgtggtgtcccagaagagtaagagcagggctattagtcaatcatgcctcctgccacagaacatctgagtggttcattttcacgaccaccatatctcccaaataaagtactgtaccacagggtctgcttttggtggtgatggtggtggtcagggaacccaaactgagatgatgaaaatccctgaaaatgaaccatatgtaaaagaaagcaaagccaaaggccatcrtttgagtacctggatccaaccattcctgatgtcagtaaccc

SEQ ID NO: 809706 - DNA, 655 bp, Homo sapiens
agtattccaaaatcactagggataactacattttagccctgggacactgtgagaacacaaatgctgctctgacccctgactgctatccctggttttatcaaacctgacttctttgaaaatatttgggaaaaatgaatggctaaagaatttttcagtccctttttctcctatgaccttctttattacttttgacgcacagtagtttttgtgtcatttgctccattcatgttgaggactataagcatgcgagacagagggtcttagatgcagacaataaattttcaagctgtccttttcagctttgcaagtgaaagagggatgcagggctgaatggaggaggatgaggagctcgagtgaactgtcagtttcaagaaggtcattgagtatgttcaggctgccaagttcctgggattgttcccaaactcccacagtgctgcctcaatctggctacagactctgtgccatagactaggatctgtggctcattccatggaactaagccaggtttctctggggtctcagatgcttccatgggtgtcaactgggtrcctcaataagtcacattcttgccttcagttttcacatttgtattttctggtcagaactaacaattaaaatagtttattatatttagagtaaataataatataattct

SEQ ID NO: 809707 - DNA, 518 bp, Homo sapiens
aacaactacctacatgggaggcagtatatgatcatggatgttttgttatttttgagaacatgtaaattatgcaaattctatatcatgccattttacacttaatgttatctaattgtttcagtttgctgtgtgtgtgtgtgtgtgtttttttttttttttttttttttttttttgagacagactctcgctctgtcgcccaggctggagagcagtggtgcaatctcggctcactgcaacctctgcctccagggttcaagcaattctcctgcctcagcctcctgagtagctaggattacatgtgtgcaccaccacgtctggctaatttttgtgtttttactagaaatagggtttcaccatattggccaggctggtctctaactcctgacckcaagtgatctgcctgctttggtcccccaaagcgctgggattacaggtgtgagccactgtgcccggcctgcatttcttttaattatagcaaagactgagcagtttttcatgtttattatctcagtgttttt

SEQ ID NO: 809708 - DNA, 575 bp, Homo sapiens
ggagagcactgcttctgttgaagatctggaacttggtcagagagcttcatctaccacaaaggaagatagtgaatgtagcataggtgtattgcctggaccaagaaacccaggtattagggagcactgcagtgtgccccagaatttccaagcaccacgtccttacacaacagcattcaaggtcaggaccaaaggcagaaatcacagggctttcttcattctttctctcttgccgtcaaagagaagcatctttttccaaagccttccagaagatttttttgcctgtgtcacactggccatcactgggccaccattagcagcaaggaagtctaggagagtgagtatctggcattttgttctctaagatggaaagtggtttctgccagcaaaatagagctgattggctcttggttgttacaccaatgtgtgcctatggcttagaacagagtgttctagccaaggtgacaaasaagatgtcaaaatcagaagaagatgggactgggtatgtggccaatgacccaggtgagaaggtcttggttgtgggatggatttcagtcttgtcggggaattgcaataaa

SEQ ID NO: 809709 - DNA, 601 bp, Homo sapiens
cactgttacaatagcatcttgctttgaagtttctgaattatgttacttcaaatttatasctcactcctataatgtcatttcctggcttagaaacctttcatgattattttccaatgcatctagctcttacagctctgttcttgtaaaagcttaaagttctggcaaagagcatggcttctggggtcatcctctccccatgactaactggctgtgtgaccttggaaaaattacttaacctctgtatgtctctgaaaaatgagaagaaatgagaataataacatgcttactccataggttttataagggttaaataaattaatgtatgtaaaatcctctttgtaagggttttgtaagggttaaatgaactaatgtatttcaaatacttagaaaaatacctgtcatatattaagtgctatgtaagagttaatcagtgaaacccttcgagaacaaatcatatggaaccaacttatatcttcactttagataagatagcatagtggaattcattctgaactcaataataatagcttccatgaacaccctcagtatgtgccagacattgtactgcattgtactagatatgtaagatatatctagatag

SEQ ID NO: 809710 - DNA, 622 bp, Homo sapiens
cacacccaaggcaaatacctgaattggaccttctgatgagttatagttctttgccttcaagatctcaaaacccaccaaggagatgagttggaggaaacatacacatggtgtcagtctacgtcaattatcgggcactgagtaacaaaccacatcacaacctaatggcttaataaaaactaccacttatttagctcacgatactggtttttctggcctggcctccccagtttgtctctgatggacttgcttgtgtatcttcagtcagctggaaggttatctgatgactggagcatcgaagaaataaaacagatggaaataaattgctgggaatagactggactttcccacagtcagattcttcaatctcaacatataaaggcatggtaccgaagtttaggcttgtcaattggatgaccacagccaacttaagaacttcaaacccttgaggacaaatttctcaaatcctcagagcttattcctgccatgttctttctctaacctcacatacaagctcagatgctggtgaaatcaagaagaaatgcaaagcaagataaataggaacyaaatctgggataccaatccagttccacttgtcatgtcctttgcaaggacatagatggag

SEQ ID NO: 809711 - DNA, 333 bp, Homo sapiens
ccaagaatggaaacggttcctttcaaacagttgcacagtggaaggatgaccctgggactcatacagtgtttctgracgcttttatagatactgcgagatgctgttttactgaagttgagattgtgttataagtatttctgactcatttagtgttgttttggggtttttagtctctttgcgtgccacaaagatgtctagcataaatctcataccatgaactcaggtgtgcaaaaaatataaatttcttttccatctatgtaacgtaagccaaaaacctgggagttatccctgagcttccctctttcctgtattcccactgttcctggccaccgc

SEQ ID NO: 809712 - DNA, 403 bp, Homo sapiens
tcaaactcctgacctcaagtgatccacccaccttgacctcccawagtattgggattacaggtgtgagccaccgcgcctggcaactttacaagaaactatatcaaactaccttccaaagtgactgtaccattttgcattccaaccagctgtgtaggagaattccggttgctacacatcctcaccaatactagatactatcagtccttctaatgggtgtgaagtgatagctcattgtgggtggttttgatctgcatttctccagtgactaatgatggtgagcatttttttgcatgcttatgggccattcatatttcctcttttatggtgtctattcaaatcattggcccattttttgttgaactgtttgtcttattatttagttgtaagagttctttatatattc

SEQ ID NO: 809713 - DNA, 591 bp, Homo sapiens
tctctgaagtcacacagttggtgagtggcagagctagcagtctgggccaggcccaccccgcatcactctattgcctcatcagaaagggtgatcgtcatcttccctccctacccacctctcccaagcctatttccccagccctcggcaggtcccagtgaaaggtaccatccaggcaccttagcatagagatctcagccaactgctctctgagctcttcctcactcccacagttgactggtcatctgccttcctgagtcagccttggacacagctgtgggaatgtgcctctctgctctcccggtgctgggccacagacactgtggcccctgcttcctccctctctctctgactccatcctgtccccctcctaacatgacaaacactctagaagcagcagctgcagaattaggaaaatgtgagccgcatgtggaccccaacaccaaactgcctggacttgaatgtcagctcagtatgtgactgggcatgctacttagcctttctgtgcctcagtttcctcayctggaaagtggggacagtgaaataaccacatagcattattgggggattaaatgagaacatatgcaaagtacc

SEQ ID NO: 809714 - DNA, 629 bp, Homo sapiens
gagaaaaaaacctctgccccacagatggaaaataaggaagggtgccytttagaccagtccagaaacatttaggaatttctgcaagatacattgagtttaaaccatattgagagtagacctgacgaaccatggtgtattccaagcaggagaaaagcccattcaagttggaggtagaaggaaccaaacattcattatgatccctgccagtttcaaggggataatagtggaccatggatgcagtttataaggaagcaaagcttaagcctgctaaagtatccaccaatgcctcttcacactaggagatgtgctcaattaagcaggttcacccccaagcacagccccctgataaggccagctgggcttgttaaagaaggtgttgtttcttcagttaaatctgactgctaaaacaaatgtggacacacaaaaagacatctgacacaaaggagagatacacggtcacatttgccctgggctgacacttccccactagtgccacagattgctgactctttactaaggcaaagtaaaggtatagtaaatataaactttccccttctttctttgtccaggccaaaaatatttagacagactgtttaacccatcttaacactcagtgttgaacaaataaa

SEQ ID NO: 809715 - DNA, 522 bp, Homo sapiens
caaaaaaaaaaaaagaaagaaaaaaaatttttttttcagtttcggctgattgaggtggctggtgcctgtaaccccagcactttgggaggccggtgtgggaggattgcttaaacccatgagctcaagaccagactgggcaacaaagtgagacctcatctgtacaaaaaatgagaaaattacctgggcatagtggtgcatgcctgtagtcccagctcaggattcaactggggaggtcgaggcaggaaaactgcttgagctcaggaggttgagctgtgtttgtgccagtgcactccagcctgggcatgagagtgagactgtctcaaaaaactgttttttatcagtttcaaatgagtttagggttaaattttcaattgtttacattttagccaggattggctaaattgtataagaaatacaaaatatctaagtgccctggaactagtaacacgtctatgttttgtttgctgatctggtttgatttgcaaatgtkggcaggaaagaactttagcaggtgtttttttt

SEQ ID NO: 809716 - DNA, 608 bp, Homo sapiens
tcccttatatggctaaataacattctactgcatggatatactacatttctttatccattcaccagtcgatagaaattttgcttgtttccagttttttggtattatgaataaygttgctgtgaatatttgtctacaatggtttgtacatttctttctggacatatatccgcaattgttttctttcctttttctttcttttttcttttcttttttttttttttttgagacagggtcacactctgtcacccaggctggactgcaatggtgtgaaaacagctcactgtagcctcaaactcttgggctcatgtgatcctcccaccttagcctcctgagtagctggggccacaggtacataccaccatgcccagaaaatgttttcattttaatttttgtagagatgaggtcttgccatgttacccaggctagtctcaaactcctgggctcaagcaaccctcccgccttggcctcccagtatgctgggattacaggcatgagctactgcatctggtcaattcttttcactatataactaggtgtgaaatttcttggtcatatggaaacagtcatacattgcttaatgacgaggatacattctgagaaatgtgtca

SEQ ID NO: 809717 - DNA, 630 bp, Homo sapiens
cactctttctggataaactcactctgctccccaaagaggttccttctccatcctggcccaaattaggaggtcaggttgtctctgtttggtcaggcctggatttcctagcatgctcccgagtgggctaatctgggctttgtgatggagtaaggagcctcattattgggctaaccttatcttaagtattcagcagtggttaactttgtgggttaactttggatttattattcagtaagaagccaatttattgatggctgggtgcagtggctcatgcctgtaattccagcactttgagaggctgaggtgggtggatcacctgtggccaggagttcgagaccagcctagtccacatggcaaaaccctgtctctactaaaaatacaaaaattagccaggcgtggtggcggccacctgtattcccagctacttgggaagctgaggcaggagaatcgcttgaacctgggaggtagaggttgcagtgagccaagatcgggccactgcactccagcctgggcratagagtgagactttgtctaaaaaataaacataaaaaagccaatttactggcttttttttacaacatggatgtttataggaaggaagatccaaaattgctcctcagcagatccccc

SEQ ID NO: 809718 - DNA, 563 bp, Homo sapiens
tccatccaaacttcaatgaccactggcctccctgctgacccatgtcccactgaggagccccaagctctgaaccaactgcctacgcaccatcccctcgggctgcacctgctccccaggcctgcccctcctttggagctgcctctgtccaccaagggtgctgtcgctcacctaaccttccaaccagaacccagtggtaccttgctgccccctccactccctgaagaagctgcccccatgcctgtcaagttcttccaactgctcaaaccttctggaactccaggcctcagcatgtcttgtctgggtggctgcaatggctaagcttgcttctctgtctctctccatcagtcagtcacccaatcaatcgatcagtcatctatcaatcagctatccacctattaatctataatcagtaatctattaatctatataatttacttctataatcaatcattgatctatcccatgtatcttcctatctaycctttatcatgtttatccatctatctatcatttatgcctctatcatgtctatctttcaataatttatctatcaccaggcacag

SEQ ID NO: 809719 - DNA, 498 bp, Homo sapiens
tgcattgtgatgtgtgcattcaacatgcagcgttaaacctttcttttctttgagcagtttggaaacgctgttttaaagaatctgcgaagggatatttgggagcccatatagacctaggttgaaaatatcttcagatagaaactagaaagaagctttctgagaagcagcattttgatgcatgcattcatctcacggagttaccactttcttttgattcagtggtttcaaaacacagtttttgtccattctgcaaattgacatttgggagttcgaggccagtggtgaaaaagcatatcctaggataaaaactagaaggaagctgtctcagaaacggttttttgatgtgtgcattcatctcgcagatttaaacctttcttttccttcaggagtttggaaacactgtttytgtccattctgtgaatgaacatttgggagctcatggaggccaatagcagaaaagtgaatacccctggataaaaacaagaaagaagatatcag

SEQ ID NO: 809720 - DNA, 642 bp, Homo sapiens
cctcctcggcctcctctctcactgcacaggtgatccccccagggtctcaccaacctgcccagcccaagggttctgggtccagcgtgtccttgattctgagctcaggagggcccttcctgtggtgggcaggatgctcatgaccctgctgcagggtgggaggctggtggggctgaactccccccaaactgtgctcaaaggcttgtgagagcctgagggactgcacctgccaggagagagtagtgagttttcagttcaaagtctccatacaacaggaaagtcatgggccactggggctggggctgattgcaggggataccctgagggttcacagactctctggagcttgtctgggacagcagggcaagggatttcataagaagcatctttcacctgcaagccaacctctctcttatttatttatttatttatttatttatttatttatttatttttatctttgcaggctctgtgacctcctatgtgctgactcagccaccctcggtgtcagtggccccaggamagacggccaggattacctgtgggggaaacaacattggaagtaaaagtgtgcactggtaccagcagaagccaggccaggcccctgtgctggtcgtctatgatgatagcgaccggccctcaggg

SEQ ID NO: 809721 - DNA, 586 bp, Homo sapiens
cacagccaccctgaccatcactggggctcaggttgaacatgaagctgactattaccgtcactcatgggacaacagtggtactcatctcacagtgacacagacagattggaaagtgagatctaaagaccttcactgtctgtatcaccctctttctccagccatagcaggactgagcagggctggcccgggtcacctggatcgaagcccttcaggctgcccttccctccagccctcccggcagactgcagagagtaggtcaggataggatttggggctggcagaaccaggctgtcctgctgttatttggaatggatgtaccttggctcaagatgacctgagtggaaggacagtaagagggagacagctactgagtgctcatggtcactgaatttcctcctgtgtgttgactgaacccaagacagtgcctctactctgtggcccaaataccctggattatttctctgaactgcccatgtttaactgagaccctcaagycccagctttgtgcatcctgatgttctgaacatggaagcctttcataatgtgcactgtgacatccttcagattcccatttcaggacttatgc

SEQ ID NO: 809722 - DNA, 581 bp, Homo sapiens
cattgtcctctaccactcaggagctgtgccctgcggtgggacctgcacctttccaaggtgtgtgttatcatctgcacagtggagatgaagagggaacctgcattgggttctggaaagtamcatctaaaaatatatttagacctgcaacagaaatctcctctctaacataaaatatttatgatcaggacacactgagaggcctagaccaaaattaagcactgccctcctgagccaggatagaatggaggaggggactggggaccccagataattccacagttaccagcatgactctatgatcacctcctggaccagatcaaagatcatcccatatgaaggacttcatattccttaggaaatacaaagtcacctctgagctctgctgtgaccaagtgagcccaggaatgaggctgagcacagtgtgatgtggagatgtctgcagagaatatggaatcaattgataaaggagatcctgtgggcaaagggtgggagggcaaggccacccctaacctctttgggtcccttggggctgagtccttctggaaaccacaaagctcctccagcagcagcccctgactctg

SEQ ID NO: 809723 - DNA, 588 bp, Homo sapiens
gctcctgtctcatgccccttccagctctgggactctgggactgcaaggccagaattctggacaaaccccaggcacagtcctcatgtccagccagctcatggggctgcctgcaatggcaggacacaggtaatctcccgataccaggttcacaccctagaaacaaatcaatcaacaatgactaacgtcgcaaaaagagacaactacacaattactaatggcacgatcttgccaaaaaaaaaaaacaaacaatcaacaacaaaaaacaaatctgatggtgcctctagaactaaataccaacttacaggtaacacaggggacagcagaacatgttaaataacaccaggagatgccatccacaaaatcctgactgtgggaaactccacaagacaaacagtccagtttcttcaataaataaattgtaagaaaaaaagagttgggtgggccatgcacagcrgctcacacctataatcccaacacattggaaggccgaggtgggcagatcacttgagtccaggagttcgagaccagcctgggcaacatgacgaaaccccatctctacaaaaagtacaaaaattagctgggtgttgt

SEQ ID NO: 809724 - DNA, 213 bp, Homo sapiens
ggcccgggtccccgggtgggagcttgcggatgggaggaacgaggcggaattctgcccccgcctccccgcagagtcggcgcaaggatcgccgagctgggatgcagagtgggctggggtcggctccccgcgaacactggctctcccggccctgggagtttgactccacatgggktcaataaccaacttcacggcgaccccgcttcctcctggcgg

SEQ ID NO: 809725 - DNA, 582 bp, Homo sapiens
gatgaggcattagaaggggcccaggcaatctgcactggacagcgagtgaaagaccttgatcctagcttcagttgttacctgagcaccattcccaagactttcatcatctatgggctaaaagctgccaggtctccaactatgaacacaatgcctcatgtgcaatttcccttctgatgcccctcaagcacctcagaatcaacagacacgtgccatagtgatcaccacaccagccccgaacctcttcctttgcagccatcttccaggtgagccagcacatgagccagccacagccttgctcctccttctccttctccagtgccccccaagcacctactccattgccgacacttgtttaattctgcctcccaaatgtcagtcaattctggagatggctctcaagcctgctgcagagcacagtcacctccccctcctgaattactaacgcgtcccagctgggctctcttttttattttgcccctttcaatctgacccaaggcagtgagttgggcactctcctactcagacctctgcaatakctccctagtgctcttggagaagtcccatccttaaaggtggatccca

SEQ ID NO: 809726 - DNA, 669 bp, Homo sapiens
tgtggacacatgctttcatttcttttgagtaaataggataggaatggttagatcatatagtaggtgtattttaactttctaagacactgagaacctgttttccaaaatggtatatttctgcattcctgccagcagtatatgagagtcccagctcctccacagcatcaccactcttggtgtggccagtctttttaattttagccactctagtaggtgcttagtgatatctcattgtggttttggcatacattttcttaatgactgttaatgttaagcttctttttatgctcttatttgccatctgtattacctttagtgaagtgtctgttcatatcttttgaccgctttttatggagttctttgttttcacattatgtgtatatgtattatttatattctggatacaagttaggtgtgtgatttgcaaatattttctgccagtctgtggctcgtcatttcagtctcttaacagtgcctttcaaacagcagttttcagttttaatgaagtccaaatttatcagtttgtccttttaatatagtgcttttggtttggtatataagaaatctttgmctaacctaaggttacgaaggtttatgttttcttcttgaagtttagagtttttactacgtatacttaagcataatttatatctacagtttataggtttg

SEQ ID NO: 809727 - DNA, 591 bp, Homo sapiens
caaaagatttgaacagacatttcaccaaacaagatggcaaataaamacatgaccagttgtttagcattattagtcattacaaaaatgcaaatttaaaccacaatgagacactactacatacctattagaatggtaaatttaaaagactggctatactgagttgaatagggtcgcctccaaattcatgtccactggaacctcagaatgtgactttatttggaaataagatattttcagataattagttaaagcaaggtaatagtggattagggtaggccctaaatctactgactgactgttgtccttaagaaggccacatgaagacacagagacacacagagaagagaatgccatgtgaagccagggacagagattggagtgatgtatatataagcccaggaatatctgtggccaccagagctggaagaggcaagaagctctctccctgagagcctccagagggaatcaaccctgctgactcttgactttaaacttctggcctccagagctgtgagaaaacacgtttctcttgttttaagacccccagtttgtggcaattaattacagcaacccttggaatctaatatattg

SEQ ID NO: 809728 - DNA, 591 bp, Homo sapiens
caaaagatttgaacagacatttcaccaaacaagatggcaaataaacacatgaccagttgtttagcattattagtcattacaaaaatgcaaatttaaaccacaatgagacactactacatacctattagaatggtaaatttaaaagactggctatactgagttgaatagggtcgcctccaaattcatgtccactggaacctcagaatgtgactttatttggaaataagatattttcagataattagttaaagcaaggtaatagtggattagggtaggccctaaatctactgactgactgttgtccttaagaaggccacatgaagacacagagacacacagagaagagaatgccatgtgaagccagggacagagattggagtgatgtatatataagcccaggaatatctgtggccaccagagctggaagaggcaagaagctctctccctgagagcctccagagggaatcaaccctgctgactcttgactttaaacttctggcctccagagctgtgaraaaacacgtttctcttgttttaagacccccagtttgtggcaattaattacagcaacccttggaatctaatatattg

SEQ ID NO: 809729 - DNA, 694 bp, Homo sapiens
tggatggggtttgggagagaaaggagaggggtatgtgatggggacattttctgcctccctggcctgggatgagctgcagagagtggatgaaccacagatggcatttgtggcaaaggtttgagcaatgggcctatgttcagaaataatggtggtcgaagttgtggtcatggagatcgttatttttccagcactgcgttgggacagatactttccaacccctcagaggaggctcttctaaggcagcgggcatttctggctttatctgatccagcatcatctcagccacagccagctgctattcttccttgggaggcctttgtatcatgaacacctgattgacaaaaatctgctatacaaagtggatgaacaaaggaatagttgtatgcactgcatacagttcatccgttccttccatggggctgagcttcccaaggtcatggcaaataggataagcgttcagaacaattttctcccaagaactgcctactgtgtcaaaggtggtggacccaccttcactctgcccgagagccacttggacttacaggtccagatgttaaaatcggacaaacccaggtgctaatccaaactcagccctgaactagccgtgtgaccttgggtaagtcacttcccctctctgagcccccatcacctggtctgtraaatggggatataaatgagggtggttaggaggatc

SEQ ID NO: 809730 - DNA, 634 bp, Homo sapiens
accttgacgtggaagaataatttatccatgcccccagacaaggaaattgcaaaatattatttatgaaggcaagtcgkcacgtcataattctggccctgcatttctggatgtgtctggccaagacggggagatgcagttgatgtttgataataaaatgggacctcgtgcctgggagatggagctgtgcgggaatcagagaggcaacggtcttgcaagagagactccagggaaggactgttccagaaactgacctgaattgttcttctgtggactcccgggtcagaagtggtaggacaaaagtctccatgaaaaagcagggaagccagaatgggtgggatgttggacatctgtttggggaggccagagatgtgaggaccttcctttggggatgacagccttgctttggggcacttgggcagttgtgtagcacagcggttgtgagtcctggctctgtcactgctgctgtggtaggtgctatggggcaagtcaggcaatacttccaaatctcaatttgttcatctgtatgatgggaataagaacatatctaccttaaggattgcctccaggttaacacgcgataatacaggtaagacataattgtcagtgggcctgacttcaattaagttgagtgatt

SEQ ID NO: 809731 - DNA, 458 bp, Homo sapiens
tggaatatttaatactgtgtgttcctagagacatatcaccattgtcatgtatctttagttctttctctcccaaataatggactttacaatttgtttggtggtaatacacttgtataaatagaagaacaatttacagagcaaaattcatattagaacaaataaatagtagaaagggccaatgaaccatagggtgctgatagttcattaagaaggtttcttcatgaaggattggctgaaattagctattttaaagaaatacagagatgaggcttaaaaatccaccacttggaattactgttgtttttgatgtggttttcactggtattatgagacaagctatcatttgtgtatgaggacaagtattgggagaatrtatacacacacgcgcacacacacacacacacacacacacacacacacacacacacacacctttttataaaactgaacccttctga

SEQ ID NO: 809732 - DNA, 458 bp, Homo sapiens
tggaatatttaatactgtgtgttcctagagacatatcaccattgtcatgtatctttagttctttctctcccaaataatggactttacaatttgtttggtggtaatacacttgtataaatagaagaacaatttacagagcaaaattcatattagaacaaataaatagtagaaagggccaatgaaccatagggtgctgatagttcattaagaaggtttcttcatgaaggattggctgaaattagctattttaaagaaatacagagatgaggcttaaaaatccaccacttggaattactgttgtttttgatgtggttttcactggtattatgagacaagctatcatttgtgtatgaggacaagtattgggagaatatatacacacacrcgcacacacacacacacacacacacacacacacacacacacacacacctttttataaaactgaacccttctga

SEQ ID NO: 809733 - DNA, 458 bp, Homo sapiens
tggaatatttaatactgtgtgttcctagagacatatcaccattgtcatgtatctttagttctttctctcccaaataatggactttacaatttgtttggtggtaatacacttgtataaatagaagaacaatttacagagcaaaattcatattagaacaaataaatagtagaaagggccaatgaaccatagggtgctgatagttcattaagaaggtttcttcatgaaggattggctgaaattagctattttaaagaaatacagagatgaggcttaaaaatccaccacttggaattactgttgtttttgatgtggttttcactggtattatgagacaagctatcatttgtgtatgaggacaagtattgggagaatatatacacacacgcrcacacacacacacacacacacacacacacacacacacacacacacctttttataaaactgaacccttctga

SEQ ID NO: 809734 - DNA, 614 bp, Homo sapiens
tctatgacatgaaaagtcaaggctcatataattttatgtgtacaaaatatccttccttcaaatttttttcaactatttagaaatgtaaacataattcttagcttgcaagtcatacaaaaacgggcatcaggctgcttttggcccactggctgttgtttgccaacccctgatatggagattagggtcatgtagtgccctacacatatttgtgtagcatctacagccatattccagcaacccagtcctagggccttgcattatcagccatatacaacagctagattcaggagggcaagacccttgtctggcttattcattttgatgttctcggtatctaaggcagtacctggcacttaacagccactgaataaatatttgtcaatctagggactaatgaaccagccccatcatgagttaaataaattggaaacctaaccaacccatacaatgttgtatatatgtgggaaactgtattctggattcgaataaaccattaagagacagtcttttgaaatagcctgttgataagccaagaaaaacccaygccagtacatgaggggagaaaataaatgtgataataggtgacgcggggaagagttaatccgtgataccta

SEQ ID NO: 809735 - DNA, 653 bp, Homo sapiens
tatatgctcttattgtggaaacaacttgaaacaatgccttattttgatgaaacctagaatatctaacacccaaatttaaaayggcagcagacacacctattgaacactttctttgtacatagcagtctgctgaatgtgttcaaggtgtattttacacaaccagaaaaacagaaagcatactcttttaaagtattaaatagaatacagggaatactatcaagttaggtttcagttatctctgaggtagataatttcgaatgaaacccaaatagaaattcattctctggctcaaaggatcacatgatctaatataaaccatctgttgcatgtgcatttatgaatagtgacttaagatgaaagaatgattcaatgggttgtgctaaagagacaccagacaataaaaatgggagtaaaacagtaattacctgaaataatttcattaatgctttaaaactggtaaactcaccgaataaaagagattgtgaggacagaatttgtattctgacattcccatgaactgtaatttctgtgcttgaacttctttctgtgtagtattctctagctttgcatgccaggcaagctcttcctttatctacttggctatttcagtttgtttccttaattcaaacatataagatgaccacgaatggtca

SEQ ID NO: 809736 - DNA, 615 bp, Homo sapiens
attgcatatctgaacatgtcaacactctgctaaaaactccatcaatgattgtccaacactaacatgatgaaattcaaactccttagtttagcataaatgcctaatatgcctactccctcaattcttagccatcctgcagtgccattacaatgaactaccactgtagcatctcaactgccccaatgtgtgtcatgcctcactacctttgtataccccagtcctctgggcaatgttctcttcctttctctccctttaccatcttgctagctctttctcaagtcttcaccactcaagtattaccttctccaggaagccctccttgatctagtgtctagtctgagataggttctcatttttctcatgcttcatgagtatagggctgtggtcagtcctctaccttgtcatatagcacagtgtaccacagtccctaattaccgtggttttccactccaccacacaatgagaagtgtggcttgcaaaggcctatggctcatgtctctctgtagcccccatgctgagtgctgggcctagcccagggcagaaggccaatttaaatgttcatgggctggacagtagaaaggtagcaggctakccaacctcatggcctgggagtta

SEQ ID NO: 809737 - DNA, 476 bp, Homo sapiens
tcgtgatatatatgatatatatatgatggaatactactcagccataaaaaggaatgaattaatggcatttgcagtgacctggatgagattggagactattatcctaagtgaagtaactcaggaatggaaaatcaaacatcttatgttctcactcatatgtgggagctaagctatgagaatgtaaaggcttatgaatgacacaatggactttgaggactcagggggaaagagtgggaagggggtgagggataaaagactaccaattgggtgcagtgcatactgctcgggtgatgggtgcaccaaaatctcacaaatcaccactaaagaacttactcaagtaaccaaacaccacctgtcccyagtaacctatggaaataaaaaaattaaaaaaaaaaaaaaagaaagaaagaaaatcagattccaaaatgacagcactcccaatggccaaaaatggaacagtttggaaataaaataca

SEQ ID NO: 809738 - DNA, 569 bp, Homo sapiens
tagatggaatgatagacaaaaacctgcttaatactttgtgtgattaaatttgtgaagagatagctcaagaggtgtaagaatgaggaccaagagaagtgctaaaatcacaatgagcagacaggtgggtacaggtaggtgtgttgccttgccttctgtacatacttttctgaaataggatgcttatagaaatgttataaattaaatgttctttatgtgcatcttacttgccaggaataccgtagggaagtctttgttgatgagcaaaatctctcccaaacagccctaaacttatcagatttgtgtacagcattttgagattttagatttttgtgtacagcattttcttgtcatgaggtatacctacatttaatatctgcaacagtgctttaagggtaattgggcagccttaaaaaaaaaaggtgtagtaacttgttaccatccctgaattgtagctttcatctastacaaaggggggataacagacttcaacatttgctgagtatttttctccgcgcttttgtaacgttgtctcctcttagctagatgcccgtttgcttaatagttcccgc

SEQ ID NO: 809739 - DNA, 627 bp, Homo sapiens
cattcttttttgccactgcacaatattccatggaattgatggacattttccgtttcaaacccwacccagcagcccggggttgtgtagtccctgccagacttgtctctgctcttggccagagaacacataggtgggctgggtgggaggcagggctctgagggttggccaagttccccggcctgtctggggattcttggagctagagttgagggacacatcttcctgccttcccaattctttgcccccgggaggcatcctgtggccccatcctgttcccattctgttatttcaagaagctgccctggcttatttctggtccttttctcccttgtctctgtggccaactgggtcaccagctggcctcaggggcctccacccaccccacatccgttctcgacctctcacccacgcaggcgtccagctgttccacagctgtgtcagagcccccaggcctgtgtccacattctctggggcagttgccaggcagtcagggtcacccttggtcatgggataaaaggactcacttaatgagtacctactatgtgtgaggttgtctggtagccttttgcaggtttatgtttaattctcgtaacaatcctgccaaatagatattcttattcccatgtt

SEQ ID NO: 809740 - DNA, 277 bp, Homo sapiens
catgcttattgaaaaatgagggaatttggactagatattctcaaattttaaggtgcataagaactatgcaagagtgtgttaaaaatccagatttttttgtcatcttccatttytttatcctttgatttagtcagtctaggtgaagcccaggaatctttatattaagaagcacctcaaaggatccatacagcttaaggatcattctttgagaaactagattagatgacttctaaagccttttccaggtctaaaatttccttctttaaggtagttgtac

SEQ ID NO: 809741 - DNA, 277 bp, Homo sapiens
catgcttattgaaaaatgagggaatttggactagatattctcaaattttaaggtgcataagaactatgcaagagtgtgttaaaaatccagatttttttgtcatcttccatttctttatcctttgatttagtcagtctaggtgaagcccaggaatctttatrttaagaagcacctcaaaggatccatacagcttaaggatcattctttgagaaactagattagatgacttctaaagccttttccaggtctaaaatttccttctttaaggtagttgtac

SEQ ID NO: 809742 - DNA, 480 bp, Homo sapiens
taaatcatatcgtttggtttccagctttaaaatatgaaaaggccaggcgtagtggctcacacctttcatcccagcactctgggaggccaagaccggaggatcacttgaactcaggagttcgagaccagcctgggcaacaaaatgagaaccccctcccaccatctctttaagaaagcatttcatcctggtctctcatttaagaatataaaaataaaataaaatgtgaaaaaatcaatacacctacaataagtcctgccttctctgtccttgcctgtctttacttttttagttatataattcttgtatttttatttataagatttacattctattctggagccataattttccaggttgttttcatcctagtcctgtarctaaatggtttctgtgcaaagtgctagccatcttgccagagacaatccatcatttttttgtgtaggttatttttcttccaatagttttttaaggaagtgctca

SEQ ID NO: 809743 - DNA, 567 bp, Homo sapiens
aacagctttaactatgacattcttttttttttttgagatggagtcttgctctgttgcccaggctgtagtgcagtggtgtgatcttggctctctgcaacctctgcctcctgggttcaagtgatgctcctgcctcagcctcccgagtatctgggactataggcatgtgccaccacgcgtggctattttttaatttttatttatttttattttttgtagagatggggtttcaccatgttggtcaggctgttctcgaactcctgacctcaaatgatctgcctgccttggcctcccaaagtgctgggattacaggtgtgagccactgcacatgaccaactgtgaaaatgttaattagccaaatgtctccaattctctaccaggttttaaagaatattttattatttagacttttccatatctttctcacctatttaawgattccttatgacattgtttaataaataaccttttcaaatctgtaatttgatctaacttttagataacttctgaattagacaaaattaatcttttttccactaataacataaccctttctggcatattttatac

SEQ ID NO: 809744 - DNA, 389 bp, Homo sapiens
ctctagccatcacaaataatttttaaaaatatttgatcagctttattaggataacatttacatagaataagattcaccaattttaaatgtacagttctgtgaattttgrcaagtgtataaagttgcataacaaataatttgtatccagctggaagaaggaagtggtgggaggacacttttattctcatcctgttggacagaacttagtcatgagtccatacctagctgcaaaagattctggaaaatatagtctttccttaagatggccatgtctccagctaaaaaccaaaggttctatttctaagaagaaagtggagaaaggatactgaggaagaagtaacctcaaccacagtcagtaataaattatttgaattgctggctttttttcc

SEQ ID NO: 809745 - DNA, 571 bp, Homo sapiens
cttaaatgatttacctttatacatttaattctaacaaatctgtatagtagcyagcattattattacccctactctctacaaatgaggaaattatataatccatttaatttctgtgtaactcagtaagtgaaggaggtggatttgactcagccaacaatctaccatggttccatagcctgtgtatttatctattaccctagaagtcatctgaagcaaataatctttgtttgattaatttaggaaagacatgtcttattctagatagagttaatgtaacattcctctcctgtttgtttccatgtcagacttaccacaagcctgacatgagttgatggctggggctctattgagttcatttgtttccttgcctagtctccagttacccttctgtgccatttccttttctccaagatgagaataatcatagtatctacttcctagggctattgtaagaataaaagaatgaaaaaattctcagaacagtgttttgtatatagttcagtaaatggtagtcattattattaaccttgttctgtggaggaggtgactgcggctcaagattattaggcaa

SEQ ID NO: 809746 - DNA, 619 bp, Homo sapiens
ataataaagtgaatatagatcttttttgttttcattgcagatttttggccctggactcttatmctttcaaggatagtcataagggttttagtcattttttaaccaggatcagctgagacagtgatagcagagcattacaccaagtgcgaggccttctaagttcagggacttgtgcaattgcaaaggacatgcaatcatgaagctggccttgtctacaacatcatttattgcaaaataaagaacaagaaacaagtatttttactatttcacacagaaaatatgtatttgtacaaagaaagtagaaaatatattattttgaacaaagtaaaaattaatataaacaatctttccccatatatcaaaatttaaacagtcaatatttaaactttaattcagaaaatgacaacataatttattaatattttaatactatatcatatttagttgttttcttcatacacgattgcagtttaggaacatatatacatatcatacatatcattaagtaaaactggaatatctaacatgttctgatataatttttatgatagatataatagagtacttctcatatatcccacacccagctttccctattatgaatatcttacaatattat

SEQ ID NO: 809747 - DNA, 654 bp, Homo sapiens
cattaatctgtactgttcatctacaaacaatgttcagtatttaatttaaaaattatttggcacatataagtcaagaacatattgctcatcatcaagaggtataatagtcaatacaactagattcagaaatggggtggggggctaggggagggatagcattaggggaaatacctaatgtaggtgatgggttgatgggtgcagcaaaccaccatggcatgtgtatatctatgtaacaaaactacacattctgcacatgtaccccagaacttaaaatataaataaatgaataaataaaaacaaatagcctacatgttagaattatcagaaactttaacaaataataatatattaaaggatttagtggaaaaagtaatgatatacaacaaaaatgaaaaatttttaaagtactataaaaaagaataaataaaaatgctagaaactaaaaacatggtatcaaagataaagaatttttctgatagtcttatctgctgactagatataggagaggaaataatcaatgaacttgaatccatgcttataacctaactaaataaaaacacacacaaaaaaacagtgycaaataactgtaatggagcacttgtgatatttagcacagtataaaatcatttagcatatacactattggagtgcaag

SEQ ID NO: 809748 - DNA, 636 bp, Homo sapiens
tcttttgcaattaggtaaactaagttaaaaagtttaagaactatattgttaagcaacatacattcagaaaartgagtcagttttttttagataaacatttcctcttttttagttttatacatttagtgaatagaagtgcagatttattacatgtgtacattgtgtagcagtgaagtctgggcttttcgtgtactcatcacctgaatagtgaacattgtccccaacaggtgatttttcaatcttcccccacatcctcccctcccaccttttgtagtctccaatgtctcttattccactctgtgtgtccatgtgtacccattgttaactcccatttataagtaacagcatgaagtatttgactttctatttctgagttattttacttaagaaactggcctctagttccgtccatcttactgcacaagacatgatttcattctctcctttggctgactagaataaaaatttaaattaatttataaagatgcacttgcctatttaaaataagtgtggtctagtgaaagagtacagaccttcaagtcactcagtcctggattcaaattttgttctgccccttattgctcatgtgatcatggtgaaagttacttaaatattcctcactctagtttcctattt

SEQ ID NO: 809749 - DNA, 643 bp, Homo sapiens
cgtagtaagaattaaataaaataatatttgtggaagtgtttccttaactgctagtcaaatgttagtttcacttctaatcttcaggtctatgtagcttgaaaaattgcttcttctcctttactcttaggtttcattaatgggaaaactgatgaaggttggatgagaagccctctgtcaaatccatacatctgtagtcagtaaaatatagacttttcagcccttggcagttttcccttctctttctatgctatcagttgcatacccacattacaacttgtaactcttaaattcatacttttcactccgaccttaagctttgaaatttcatcttatatatcaggtatcttcaactaagatgttctaaatttacttcataattaattttctccaaattcaagacatcttggggatgggaattagggagatattggtcaaaggacacaaaatttaagttagacaggaggaataaattaatgaaatctattgtacaatatggtgactatggttaatatcaatgtattgtagtcttgaaaattrctaagagagtaggttttaagtgttctcagcataaaaaaataagttgtggatagttcatatgttaattagctcaaaaaactcctacaaatgcaagacactttgaatt

SEQ ID NO: 809750 - DNA, 634 bp, Homo sapiens
taacttcctgatattgccatggcatttgtaaactgtcacggcactggagggagtgtagcagtgaggaygaccagaggtcactcttgtcgccatcttggttttcgtgggttttggccagcttctttactgcaacctgttttatcagcaaagtctttatgaccggtatcttgtgctgaccttttatctcattctgtgacttagaatgctttaacagtctgggaatgcagtcccataggtttcagcctcattttacccagcttctattcaagatggagttgctccagttcacatgcctgacatttcccccctcccttttataagagcacccttagtcctaagggttgctgaggaatgaagatccaccttctgtaagttcttcaggctgaacaggggtgacaatattcctgcctaactattagggtctcttgtattctgggtagagaggagctcagtcagaaagcattggtatatgggccattcataactccaagttctgacaaaaggtgatatctggaagattaataagtgttcagtttaagaaaacatttagtaagcttgttctgcatttttacatgcaacagcaatatatttcacaacagtaaagcaaaataagtaaaattattccgagtaaact

SEQ ID NO: 809751 - DNA, 608 bp, Homo sapiens
ggagggagtgtagcagtgaggacgaccagaggtcactcttgtcgccatcttggttttcgtgggttttggccagcttctttactgcaayctgttttatcagcaaagtctttatgaccggtatcttgtgctgaccttttatctcattctgtgacttagaatgctttaacagtctgggaatgcagtcccataggtttcagcctcattttacccagcttctattcaagatggagttgctccagttcacatgcctgacatttcccccctcccttttataagagcacccttagtcctaagggttgctgaggaatgaagatccaccttctgtaagttcttcaggctgaacaggggtgacaatattcctgcctaactattagggtctcttgtattctgggtagagaggagctcagtcagaaagcattggtatatgggccattcataactccaagttctgacaaaaggtgatatctggaagattaataagtgttcagtttaagaaaacatttagtaagcttgttctgcatttttacatgcaacagcaatatatttcacaacagtaaagcaaaataagtaaaattattccgagtaaactaaattagagggttttccat

SEQ ID NO: 809752 - DNA, 582 bp, Homo sapiens
cagcaacttagatagctcttaagggaattatgctgagtgaaaagagccaaactgtttttattttattttttttttctggagaaagggtcttgctctggtgcccaggctggagtgcagtgacgtgatcagcctcaaactcctgggctcaggtgatcctcccacctcagcctcccaaagtgctaggattataggaataagccaccacacctagcctaaaagagccaatattaaaaagttatatactatatgatttcatttatataacattcttgaaatgaaaaattctaaagatggagaacagattactgattgttcatcagggtaggagtggatgtaggatagcgacacagccttagtgatggaacagttctatattttgattatagtggtggttacatgaacctatacattacaaaagctgcacagaactatacatacacacacatgcaagaacacatcaaacaggtgaaatgtgaataagctctgtggattgrcctaatgccaatttcctggttttggtgttgtgctatagttaggcaggatgttatcactgggggaaacagagtgaacatatatatatat

SEQ ID NO: 809753 - DNA, 649 bp, Homo sapiens
tcaattgtctcccactggatccctccaacaacacgtgggmattatgggagctacaattcatgattagatttggatggggaaaccgccaaactataacaaagttatttgcccatttttagatagggttatttgttttcttgttatagagtagtttaagttccttgtacattttgcttattagtccctttactgatgtatgatttgaaaatattttctcccaatctgtgggttgtcttttgactttatcaattgttttctttgctgtggaaaaactttttagtttaatgaaataccatttacctatttttactttcattgccagtgctttttggggtcatatccaaacatcattgcagtccaatgtcatggagcatttcccttctgttttgctctactggttttatagtttttaggccttgtgtttaggtctataatccatttttgtgttgattcttggataaggctgagataagggtctattttcattcttctgtatatggatattcagctttttcagcaccatttgttgaagagattgtcctttccccattgtgtgcttgtggcaccagaaagatcttaatttttaattattagtctaaatgatatgtgcctactttaagaagaggaatatcctaattttaaaaacttc

SEQ ID NO: 809754 - DNA, 567 bp, Homo sapiens
cttcccagatatttttagttttaactatttttytgggctttgtccaataactttgtttcctaatctgagtggaggatcaaatcatttcttaagtaacagtgctataaccacagtaatcttcactccatcttctcacactgataactgtctcagttgttcataaaggtgggaacaggacttgagcttatctgagttgctatgtttcatacagaacctacagaagctgtaattcctaagtccaatttaattgggccccaaaaacgttctagcttgtgatggattgatttttttataattaattaagatatgagccacatgctataaaattcaccattttgatgtgtacaattcagtggtttttcatatattcagagttgtgcaaaaatcaccactatctaattttaggacactatcatcacttatgggttgaattttgatctatgggagatagaaaatgggaagcagacaggagaaaaattgttcaccttctaccctgtgacagactgcattgagatgcagttgttccatatggcctctttggagatgtcctgcttgaccaaacatcca

SEQ ID NO: 809755 - DNA, 494 bp, Homo sapiens
caccgtggtgtgttttatgagtttctaaggatggaaatatagttagagaatggatatatttcattattctttaaagcttgaatacaaatctcatcatgtcaaaggaaagaattttcggtaatactctgtaaatttaaattattggaaacatccattaaggtcatatgaacatgtgatatttaatggtttaaaaatattttttactaactccctattttcaatctaatgattatatttccaagtcattagctgtcctggttctcaccagagaattctcaatcaagaggtaaatcttattctttgagaaatgtatcatccagaaattatttagtactgaagagatatatcttaattcccctcccctgtacttctccagtaccttgaaaacgtaactaactgtttctaacttgagcattaatagacaaatatcttgtatttctaaatgcytcacactctgacatcctgaatgaagagcttaggtaagccagtttttt

SEQ ID NO: 809756 - DNA, 581 bp, Homo sapiens
agagtttgtctccagccttaagtaagtgttactttggtaaactcttattgtgagtgtgtattgttgacagaaaagccaaactttgtgaaatatttaaagaggtttattctgagcctataagagtggccatggcctggggtacagtctcaagagatcctgagaacatgtgcctgagggggtcaggttacagtttggttttatacattttagggagacaggagttacaggcaaagacataaatcaatacacggaaggtgtacattggttcagcctaaagaggtgggatatcttgagtcagagggtggggaacagggcttacaggcggattcaaagactttctgattgccatttggttggaagagttaagctttgcctaaagactgaagaagtccttagaaaagaatgcttgagctaacataaggggttgtagaagacaaggcccttgttatgcagatgaagtctcctaagtggcagcgctcagagaacatgtsaccagggtcagcttggaatttgggatctgattgccataaagagtctactctgtcagtcctgtgatctgtattttaatgttaatgttggtc

SEQ ID NO: 809757 - DNA, 603 bp, Homo sapiens
accttctttaaaaatacatttttaaaaaatcagatgacttgatagaggaatggactgatagatrtgtaataaagtaaatacagaaaaatgttaacaattgtagaatctagatgatggggccaggtgcggtggctcacgcctgtaatcccagcactttgggaagctgaggcaggtggatcgatcacctgaggtcaggagtttgagaccagcctggccaacatggtgaaacaccatctctaccaaaaatacaaaaattagccaggcgtgacagcgcatgcttgtaatcccagctactcaggagaatcacttgaacccgggaggcagaggttgcagtgatctgagatcatatcactgcactccagcccgggtgacagagtgagactccgtgtcaaaaaataaaataaaataaaataaaataaaataaaagtgatgatgatcatagttatgaacaacagtgagagttcacacactgcctgtactgtgggcaaagcccgttctcagtgcttcgtgtgaatgaatttgttcactcctcactacaaccttctgagatagatactgttattctcattcacagatgtggaccctgagaccagggaggttgcg

SEQ ID NO: 809758 - DNA, 618 bp, Homo sapiens
tgatggtggaggaagctgtcctgaaggcctggacccctgcacagaatgtggttatttatcagagagttggatcaagggtcaggtgctagaaagccccaactgtatctagtgtggcatgcaaagctctttggtcagtttcctaatccagttcctcagaaaactataacaaagcaagaacttaagtcagtgtcttgtgttctcagacttttcgatttgatatgaagggtgaaagatcctggctggggagttatgaatgaatgaatgaatgaatgaatgaatgatctttagcattggccttcaattccagcccccccaccacatctcttccactgccttctactactagtaactggtgactgctttttcaccacctctgactgacccgtaccttttctttgcctgttaaaatatgctaataaggaaacatacttccatttcttttgaattgaggggcccataacttttcatttagaacttctatccctgatgggaaaaatagctgtatatctattggttgttatcttggttacagtagcctgattggagttcccctgtacaaatataatcttgtgtgygctccggtgctggtatgatatatttagaatgggtgtgcttgcc

SEQ ID NO: 809759 - DNA, 491 bp, Homo sapiens
ctggttcctaagattgatttcaacattgggctaaaatgtgaagtgactgtctttgttcttacagcattgattctcagttgattggacatacagatcacttaggytggaatacagattctgattcagttctgggaaggggccagagagtttccacctccagtgggcttccagaagatcctgctgcgggtgttccttggaccatgctttgaatggcaaggagctcagaaatgttccactatggcggcttggcttgcatatatagcagaggaaccattttatttatatttacaaagtggttttgactaagttcattcaaagatattgagggccagctgtgtgccaggactcatgctagctgttgagagatacagagatggatacaaaaggaagacattagcttacatcttcattgaacgctttgcagcccttatgtccaacttgctggctccttctctgctgctgtcttcttccctaggctgttgtgacactgt

SEQ ID NO: 809760 - DNA, 619 bp, Homo sapiens
tggactggggggagcagagacccccagccccccagatggagtgggatgggtgaagtgactactcaagggctttccaacagctgcctcctcaccctcccattggctccagccaaacagcccctcttggcctctgcggagccccttgagctccaagttccgaaaaagcccttccttacccctgccctatcactccccttggggcagttcagagctaatggaacagccaaggagaaagcagaagaatcaaagaagggcgcggcacagtacccaggagaattcagggtaccaggttggctcacctcaaagaggagaaggcccctgggggcactggggtggggtaatgctcagagaagcagcctgtaagattcaccttcccagattctgtcacctcagggaggcacttggtggctccatgggaggattccagagggggccaaaggatctagcactcaggccaacatggcagggcctcactccttgggtacctagcctcctgtgttcccctcctatccccggccgggaggcaggtggggagggtgcctgctccacctctgagccccagagaaggggtgggggcagctctgggatgcctggatccsagctctatgccagccttgct

SEQ ID NO: 809761 - DNA, 606 bp, Homo sapiens
aatagaaaagaaaaacccattttctggggagaaattcaagccagctgcagaaatttgcataagtaacaaggaatcagaagctaatcaccaagacaatggggmaaatgcctccagggcatgtcagagatgtcggcaacccctcccatcacaagcccagaggcctaagagggaaaaatgggtttcctgggctgggtccagggcccctctgctgtgtgcagcctcgggacttggtgctctgcacccagccactccagccatggctaaaaggggccaaggtacaactcaggccatggcttcagagggtacaagccccaagttttggcagcttccacatggtgctgggcctgcaagtgcacaggatgagaactgaggtttgggaacctccacctagatttcagaggatgtatggaaatgcctggaggtccaggcagaagtctgctgcaggggcaggaccctcatggagaacctctgctagggaagtgtggaagggaaatgtgtggctggaacttccactgagtccccactagggcactgcctagtggagctgtaagaagagggccaccatcctacagatcccggaatggtagatccactgacagcttgcat

SEQ ID NO: 809762 - DNA, 525 bp, Homo sapiens
atatgagaaaggtacaagatgctaaaatcaagcaaattaaacccccatacaaggatttatagggaaggaaaaaatatataactgaaagtctcagtgggtagataaagcagtggaacagaaacatctcaagagttagaaactgcatagaaaattctgtgaatgaagcagagggagacagagatagaaaatctatgagacagctgaggaagacaatgagatggtcaaatagaagtttctggaaaagatcagaagcattaggggaggcaatattctacaacataatggtactgactttccacggttgatgaaagacataaaccctcagattcaggaatcacaacaaagtgtaggcatgataaataaaaataatgcaccaccttggtacagtacattgaaacytctgaacactaaagtcaaaaggaaggtttctgaagtcactagaggtagggagggtcacttacaaaggaaaatcaattagcctgatgacccacagaagccaggagactgcagtgttacagctccaga

SEQ ID NO: 809763 - DNA, 572 bp, Homo sapiens
acaaactcttggactaagaaagaggacaaaatcagaaatgaaaatggagaatatattacaacaggtacttcagaaataaaaaggatcayaagggacttttatgaacaattatatcccaacaaattggataacctagaggaaatggacaaattcctagaaaaaaaccaacctgctaagattaaatcaggaatagaaagcctgaacagaccaatagcaaagagatcacagtggtaaactaaagagcttctgcatagcaaaagaaattatcaacagagtaaacagacaacatatagaatgggagaaaaaatatttgcaaactattcatctggcaaaggtcctatgtccagaatccataaggaacttaaaccaatcaacaagcaaaaaacgaataatccaattgaattggcaaaggacaggaacatacatttcttaaaagaaaatacagaagtagccaaacaaaaaaacattctcatgatcactaataatcagaaatgcaaataatgaggccaggcacggtggctcatgcctgtagtcctagcactttgggaggctgaggtgcgtggatcatctgg

SEQ ID NO: 809764 - DNA, 583 bp, Homo sapiens
attcccccaaaacaaaaacaatmaaaaaaacccaaagagggttcaaccaataacacaaatgcttgaagcagtgattttccagaacaaaattttagtgtaatagaacatttggatcttttttccagttaaatctttcaaaagcattatgtcctgaccatgtttctgatttcttgacctctgtacaacttaatataaaaaatcagaagtttattgctgtaaatattttaaaatatgttaaactagctaatgtatactttattttcattatgcttttgttctgtcatcaggtaagagacgtgtacacatggcaagcaagatgattgggaggttagaatgggcacttgctggcaaacctatttttgacggagaaaaactgtactatcccagcatagtcatagaaactgcaggttctggctgctttcaacccttcttttttaaaagacccaaattgcctatgcacaaatatatttaataattataattatcattaagtagcaaggtagattaaatatcctcagtcattcttcttaaaaaataaaaacaaaaacctcaacctacatttaagcaaaaaatgcttcttaaa

SEQ ID NO: 809765 - DNA, 609 bp, Homo sapiens
ttggtacaatttatgttgataggtgtaacttattaatacaaattcctaaagcatttctaattttacttctggcttcaccttttctttctatccttttatccaaatagaactctttctttaaacagtttgcaaagaaaagcatttctctatgaagttaatgcttctcaaattattatgtggtaaggggcaaggttttgtttacttacatttcatttcctatatctgttgtgaagaaatacttgtatatgaggcaataaatacaaattactaaaagtgagatacaaaagacatagaacataaaaactccagttattttttattagattcaacagatcatgtctggccttgtcctcaggcagaggctggaatccttcagtaacacacctctgtaagagttagaggacttctattctcccagggcactgccctgagaaacctccttgaattaagctttgatggttaccacacaaggaatcaactcaactagttctgctgagactttttttttttttttttgcctttcccrctttagaattttcaaactttgtgtgaaaataaatcaccctgggtagcagaagttatgcactgccaggccagaagccatattca

SEQ ID NO: 809766 - DNA, 630 bp, Homo sapiens
agtctgttttgtcagagactacgattgcaatccctgctttttttttttttcttcccatttgcttggtaaaatttcctccatccctttatttcactctcaccacttttattcaacatttttctagaagctctagccaaacaaaacaaaacaaaacaaaaaactgatgaataaattaaaggcatccaaataggaaaagaaaaagtaaaactctcttttcccaatgacatgatgttatatatagaacatcctaaagaatctaccagaaaaaaaatccctattagggttaataagaaaattcagcaaagtttcaggatacaagatcaacacacaaaaaactacttctatacgctataatgagtaacccaaaaaggaaattttaaaaaaattcaactggtaaaatcacaacatcacagtggctattatcaaaaaggcaaaaataacaagtgctgttggggatgtagaaaaaagggaatgcttgcactctgtggaaaggaatgtaaattagtacagccmttatggaaaacagtatggaagtccctcaaaaagtaaaaaatagaattaccctatgatccaggaattccacttctgggtatatatccaaaggcattaaaatcagtatgtcaaagaaat

SEQ ID NO: 809767 - DNA, 533 bp, Homo sapiens
gtttttacactgtaaatatataaaagttttatttrgcaactatatatttttttttttttgagacggtgtcttgctctgttgcccaggctggagtgcagtggtgcgatctcagctcactgcaacctccgcctcctggattcaagcaattcccctgcctcagcctcctgagtggctgggattacaggcatctaccaccatgcctggctaatttttgtattcttagtagaggtggggtttcaccatgttggcctggctggtttcaaacccctgacctcaagtgatccacgtgccttggcctcccaaagtgctgggattacaggcatgagccaccacacccagcgaactataatttttcttaaaaataattaaaaaccccattcaatttataatagcatcaaaaataaactacttatgaatacatttaaccaaggaggtgtataatttgtacactaaaatctacaaaacgctgttaagataaattgaagaagacttaagtaaatggaaagacatctcattttcatggattgggaaaa

SEQ ID NO: 809768 - DNA, 550 bp, Homo sapiens
aaaattaatgttttttgtgccatctcttgcacatatgcctttggtctgttttttgtttttgttttttttttttacaatgacaggattcccatatgaaacacgttgatggaatgaggtttttctccacaattacaggttgcctactttcacttcactttccaaaaggatacatttctatttcacttccataacaattctggaggtcgcctgataaacagctaacatggtggtagactggacatagtgttcaaatttgacctacctagagaccaatggccacccagttccccagttatcatatcttgcaaatcattcttcctgtgagaatatttgcaaaatctcatgttttataccaccactttcttgaaggcttagggaaatcaaggaatacaacctggatgatattcttacattgacagactgagaaaaactgctataggactggcattttccctgtggcataagtaatgaatattgagcatatgtaaaattatgaaaataattgctttcaatcctttatgaactggwtttgctatatgatcatatgtaa

SEQ ID NO: 809769 - DNA, 575 bp, Homo sapiens
aatgattaactaagtagtctacggaggaagtttggcaaagccaactatccttaattttcagtgtgtctgtgtattgggtgagggtgaggggaatgatattctaacttagactctggacataaagaagggatcaacagacaccagcatgtacttgagggtggagggtggaaagacagtgaggatttaaaaaactacctagtgggttttatgcttattacctgtgagatgaaataatctgtacaccaaacctctgtgacacactattttacctatgtacaaatcttgcagatgtactccctagacctaaaatacaagttggaaagaaaaataataataatgaagtaaattctataatgctgatttcaaaattgcactattttatccttttatttgcttagcacaaaatgaatttgtatgtattttcaattgtttatttacatatactttgttttctcactcagctataaactccatgaaggcagataatatgtgtgtatagtttacaaccacatacctacaatctatcacaatgcctgaraaaaaataattattacattaatattggttggattaat

SEQ ID NO: 809770 - DNA, 682 bp, Homo sapiens
aaaagaaaagagaagagactcaaatagacacaataaaaratgataaagggaatatcaccactgaccccacagaaatacaaattaccatcagagaatactataaacacatctatgcaaataaactagaaaatctagaagacatggataaattcctggacacatacaccctcccgcgaccaaaccaggaagaagtcgaatccctgaatacaccaataaaaagttctgaaattgagtcagtaattaatagcctaccaacaaaaaaaaagcccaggaccagacagattcaaggccgaattctaccagagatacaaagaggagctggtgccattccttctgaaattcttcccaacagttgaaaaggagggactcctccctaattcattttatgaggctagcatcgtcctgacaccaaaacatggctgagatataacagaaaaagagaacttcaggccaatattcctgatgaacattgatgcaaaaatcctcaatataatactggcaaaccaaatccagcagcatatcagaaagcttatctaccactaacaagtcagcttcatccctgggatgcaaggctggtttaacttaaccaaattaataaacgtaatccatgacataaatagaaccaatgacaagtaccacatgatcatctcaatagatgcagaaaaggcctttgataaaattc

SEQ ID NO: 809771 - DNA, 635 bp, Homo sapiens
tttttttctcacagtagagttgattcaaaaataattcttctggctgaaagtctagtttaaaaatactgaacatctgggtgcagtggcacacgcctataatccctgcactttgggaggctgatgcgggaggatctctagaggccaggagttcgagaccagcttgggcaacacagtgagacctccaactcaaaaaaaaaaaaaaaaaaaaaagcccaggcgaggtggctcatgcctgtaatcccagcactttgggaggctgaggcgggtggattatgaggtcaggagtttgagaccagcctagccaatatggtgaaaccctgtctctactaaaaatacaaaaattagctgggtgtggtggtgggcacctgtaattccagctactcaggaggctgaggcagaagaattgcttgaacccggaaggcagaggttgcagtgagccgagactgcgccactgtactccagcctgggcgacagagcgagactccaacaaaaaaaaaaaaaaaaggaagaagaagaagcagcagcagcagcagyggaggaagaggaagaggaggaagaagatggaagaagaaggagaagaagaagagtttaagccactaagccaatggcagaattgagtgtgatcctgaagactg

SEQ ID NO: 809772 - DNA, 529 bp, Homo sapiens
ctttcaaagcacttatcacagtgtggtatcctcttgctattgatttatccacgtgtgtattgtctggacttttccaccagaaaaaaaaaatgcccctgaaagccaggctcttactcatctyggtgtacttggcgggcaagaacaataatagcaatatttatataacctttatgatgagccagatactgtttttagtactttacgtatattaattcactgaatcctttggggtggaattattggtctcaccatcttccagatatgaagccaaagtgcagagaggttcggcaactttcccaaagtcacacagctatcaggacaagagctgggaacctaaagaagctgtctccagagtggaaacttgacctgctctgctctctgcttctatgtgttgggggaggacgggagacttcctggaaggagacacagagaggctgtgggggcctcacatcagcctgcctgcacccagtcctcctctttcgtgcctccctctgtgccctctgttctgaggatcccatatgccagaaga

SEQ ID NO: 809773 - DNA, 527 bp, Homo sapiens
ttcataggttttgggcttatgaaactggatggatggggatcctaatccctgagacagaggacattggaaagggactaaatccatattttggagaggatgagatcaaggtacctagaagcatctatgtagagatgtcatataagtagtcagatctagaagctaggctaatgatttatattaatgagttatcatgtatagataacaattgaacccatgagtatcaataagaaaacctaggcagaaaacatagagttaaaagagtacataatgaaaagtagacgtgactgtgattaaattttgataaatactaatatttaatgacctaaagaggcagtggatggagatactggaggaacataagggagatgtcatgtcacataagccaaaatagagtgtgattcaagaggggagtgaacagtcaacatgaasatatgtgaccaagaggtcaaataatagggagctgaaaggtggatttagaaaagtggtcatcttagcgggcattatattgctagcttgatatgattgta

SEQ ID NO: 809774 - DNA, 560 bp, Homo sapiens
gcttcctgtagatacatgtyttaagggccagtaggtggattctgttagcccctttctggccagaagggattctatacagtgctgcccaggcccagggaatgtatgaaatgagctccaaggaagcttcggagaggtctccttttctagtaagttccacacccactaagcatttattaaagtgtcagctgtggatattgcatagtcaagcaaatacagggtaaacacaaaagatgtagaaggtccttcatgtcttccagaagcacaccattgtctgtgaaggccaaggaaaggcaagaaatcaagttcaagactggaaaacatacatttttatagccaatttactaaaatattttcagttctctgaacctagcatgctttttttccacctccaaacctgtgaacacagacctttattcttgctgtctggcttccatgtgtccatgagattttaatttagaccacactttctctgggaggccttccttgatgccttcagcctgggtaggtgccctttctgtgggcttttactggctccttttcttctcccaccatagcatcta

SEQ ID NO: 809775 - DNA, 632 bp, Homo sapiens
tttgcttaacaatctataaacaaagccactttcagcaatgctaaccataayggatagatacttgcatttactcaaatcccacaaatcataaatgctggcacttctgcaagagttgaatgtgaaatatttttgaaagcttctaagttttaggtaaagctagatctcctggtactccaggtattggttttgttgtttggttactccatcaaggtataaatacacacataaaagtgcacaacacatccatgtatagctccgtgaatttcaaaaagtgaacacacctgtgtaatcagcacccaaatcaagaaaaagaacatcacccacatcccagagatcccttgtgctaccacttagtcattattcccagcaagataatcactatctcaagttctaacatcatgtattagttcttcctgtttctaaaaatggtataaatagaattaaacagcatgcactctttgggtcttctttcattccacatcgtgattatgcagtttatgtttttgtatccacgttctttctgatgcatgatattccattatatgcgtatactttcatctatttatctattcttcctcagatggacttttgggcagtttccagtttaagatgattataaaattgctgctacg

SEQ ID NO: 809776 - DNA, 568 bp, Homo sapiens
tagctaatggcaattgccatgtatggatggatatgagaaagttttcagaaaaatgagatatttatcttgaggaagatttggctgktgggaggaggagacataatagcttttttcagatattcagtgtaagtgagtttgcacaagttttaaaatctttggaagctaacttgatatcagcaagcaaaaaatataatggagaaaattttgatggttggggaaagtttgtagcactggttttggtgaataatatgttaggtaggttctttcaaggttgtgttatacttttaccactaccattattttctttttagttaaacttgcatttccattgctcaaattctagaagaacctgttctgttgtctcttccttttccaatattcttgtccacttgacttcatgctctcttataataaaattattaaaattattgttacatggattaaaatattgacattcagaaatagattcatgcttctctgcaacatggatgaacctggaggacattatactaagtgaactaagtcaggcacagaaagataaatactgtgttctcactcatatatagga

SEQ ID NO: 809777 - DNA, 617 bp, Homo sapiens
tgctctattttatgtattttatatatttctgggttctctattctgttccattgatctatttgtcttgtgttgatgccagtaccacattctgttatggtagcttaataataatccttaaaagcaggaacagttagcctttgaactgtgttcttttccagttgtttggctcctctaagtattttcttttgtctatgaattttagaattagcttgtcaatttatacaaaagagcctgctggtattttgatttgtattgtttggaatctgtgaatcaatttggggagaattggcatcttagcaatatggagtttttgtgaacaagctgtagctctatttgtataggtctctttaatttctctcagcagtgctttctagtttctagtgtacatatcttacacactttttttttgctgggtttattcctaaatatttcctatttttgctgctaaggtagatggcaatttttaaaatttcaattttcggtgctagtatctagaaatgcagtgggttttaaaaatacttttattttatatcttttaatcttactggactctattagtagmagtagcttggaaattttgtcagattttttacccagactgccatgttgtctgtgaa

SEQ ID NO: 809778 - DNA, 663 bp, Homo sapiens
gctgaaaaacaactcaaatgaaccaatgaaccaaaagataagccaaatccagaaacagctgtggctcaacccccagcaatggactggaaatccatgagacagctccgcagatagagaatgaaaagtctgttcttacatacgttatactcagagtaagtaatcttatgtgtaaaagcagccagggaaaaacaaaatcaaaatgtcccttccccaaaacccttctaggaaacagtcatcttgtgaaaaaacaaagttttggcccagtgttttgaaaatatcttacagtgaggcatacattttttaaaaatgtataacccaaatttattacttatttattgctacataacaagtcacttccaaacactgtgctgtaaaacaacagtcttactatctgtcacattttctgtgggccaggaattcaaacagagcacagtggagatggctaatctcctccagaatgtctggaacttcaaccaaaaaacttgaaggctggaggctggaataggctgatggcttcttcatgtacatgcctaacagttcatactggctgttgactaagggccagcagcatcacccacacctggcctcactatgtggcctgggcttcctcacaacatggcagctgggatcaaaaggcawgcatcagcagcgtgcagtagcaca

SEQ ID NO: 809779 - DNA, 663 bp, Homo sapiens
gctgaaaaacaactcaaatgaaccaatgaaccaaaagataagccaaatccagaaacagctgtggctcaacccccagcaatggactggaaatccatgagacagctccgcagatagagaatgaaaagtctgttcttacatacgttatactcagagtaagtaatcttatgtgtaaaagcagccagggaaaaacaaaatcaaaatgtcccttccccaaaacccttctaggaaacagtcatcttgtgaaaaaacaaagttttggcccagtgttttgaaaatatcttacagtgaggcatacattttttaaaaatgtataacccaaatttattacttatttattgctacataacaagtcacttccaaacactgtgctgtaaaacaacagtcttactatctgtcacattttctgtgggccaggaattcaaacagagcacagtggagatggctaatctcctccagaatgtctggaacttcaaccaaaaaacttgaaggctggaggctggaataggctgatggcttcttcatgtacatgcctaacagttcatactggctgttgactaagggccagcagcatcacccacacctggcctcactatgtggcctgggcttcctcacaacatggcagctgggatcaaaaggcaascatcagcagcgtgcagtagcaca

SEQ ID NO: 809780 - DNA, 520 bp, Homo sapiens
aaaccttttacacatttttctgttgtattgtctttttcttatgaattggtaaaagatacacgcgtgcacacacacacacacacacacacacacacacacacacacayatatcttctggatattattccttgtcagatatagatattactaatatcttctctcaaacattgttttccctttttactttcttaatagtgccttttagataacagaagttcctaattttaatgcaatccaacttatcaacagcatagtggttaaataaataggctctgaagttggacagatacatgttaaaaggctagttctgactcctactaaatatctgtgtgacttgagtaattattttctctctctaaaatccagtttcctcatctataaatgaataataatctcatatccttcatggtgctgctgtaaagattaaagaggaccattggtgagaagctactatgtgctaaaactactattctactccacatcattatcaatgtaatacccattattttattcccatgtt

SEQ ID NO: 809781 - DNA, 637 bp, Homo sapiens
tctttggatgtcatcctgtatgtacagaccatgtcttatataaaaactggagacataaaaataatacataaaataatgataataagagatataaaactttcctaaatctgtagaaaggcaatttcttcakaaggaaaaaaaaaaaaagaggctttctgtgtgatttctctgacactaaaaggaaaagagtagatttgtaattggtcaagcagggtaataaagtccagatttttaaaaaatcaggatagaaagggaattttcttcccctgggaaccttattttctgcttctatgttcttgttctctttaagtcaatatttcagttggtttctgagtctactaataaccacattttataaaccacactttgtttgttctagtgactataagccataccttgaattgtttccagaagcccatgtgttcaccatattaggccaaagaaatctttagttttcttttctttttataagctgaagtattcagtggaacttaaggttttgtagacatcggtcatgcatttcttggtcaaaggcaacagatgtggaaagatactcgctttcatctgtggagatgggacacctgatccagattggattttcttattaaggagagatgaggacagaatgggttgtact

SEQ ID NO: 809782 - DNA, 629 bp, Homo sapiens
caaaacagttttttaattgtgttaagacctgaacatttagtcattcttactaagttcttccaaatggtagagaaatattatcagctgttacccaaattatttcctcttcacagttatcraaagcaaaattgaatattctccatctctaataacatcaggaacaaattagaaatagcattttcctctgctattcgaaatttaactataatacattgaaaattaggtttctcaatactttatctgtgaatctttattgttttcctaagtaaagaaggtagtgatttaaaattttcagatttatgctcaaatgaaggttatgttgttctatttttcattaacatgttaattcctccttgtatttctttagcttttctaaagaaagtaaaaaagcagcaacaacattgcttcttataaatggttcattttaaagtcatcagtttattataaaatcagaatatcaagtttgctatgactacatctatgactatgatccaaactactggattaaacaacaagcaaatgaacattctctgttttacatattcatccaaattccttttgtggtgactatttagagctgattttgacaagagaacttactaaataagcttgtttgaccacactgtttt

SEQ ID NO: 809783 - DNA, 530 bp, Homo sapiens
gaatgaaagtttaggtttaaggaataagtaatttggggccctcaattggtatccagattgttgttggtgttgttcccagaatgtgttaaaatggtacagtcaaacctaggatagtacaattctggttgactatgattttgagacctgggaaatcatcatactcctagaacatattgtcagacaagggtctttgcttagtaggtcagcttcttttcttgtgtattcgaattcttccaacaccccagaaaatttggtggtcattgagagcagctgttaggcttctatgtgaccaagtcctaaccctttgctttgttaaggggctaaatactatcttacccagcctgatattcccacttttttgtcttactaaagagaaactgctttttgctctctcctattagtgaaaataagcttttcaattcgttgagattactcagggaaatagaagggaattgatagagctcatattcattatgaatcrgataatgaggaagctactttgagcatatggctttatttgatctcccaaa

SEQ ID NO: 809784 - DNA, 492 bp, Homo sapiens
atccatgaagtttattcagatttcatcagktatacatgcttcatctatgtgtgttatctacagttctatgcaatttcatcacatatagacttgagtaacccccaccacaatcgagacacatagctgtactacaagatttccccatgttattcttttatagccacacccacttctccatccttcatccctaacccctggcaaccactaatgtgttcttcatctctttatgttatttcacagatgttacataaattgaattatgaactatggatccctttaagatttttttttttccactcagcaaagtttctttaaggctcatccaagtagcttctgggtagtattccatggtatagttataccacagtttgtttaactgattaccctttgaagggcatttgtatagtttctagttttggctgatacaagtaaagctgctatgaacactcacacacaagctcctgtgtgaaagtaaggctttgtttctctggg

SEQ ID NO: 809785 - DNA, 624 bp, Homo sapiens
aaaggaataagaaaatatgaaaaaaaagagaaacatgcaggcacattggawaaaggagaataggaaaaacaatagcagataaaaagttttaaattgacaaagaacagattaagcagctaaataattgatgaactgaaagctctacctggggatattagacagcgtattgcactgggaaattgtgacatggagaaagggaaattgattaagatttaagaaacatggaaggtagaattagaaggtccctgcacccctaataggcagtacaaaagaacagaacagaaaaaatgggagagatatagtcttgaaaattcttgtaataattttccagaagtggcaaaatgtataaattcatcaaatcaagaaccacatcattttcaagaaggataaataaaaataaatctacacctaaatacatcacagtgaagctgtggagcttaaaatcttaaaagcaaacacagaagttacttaactaagaaagccacaactattagacaaaaacaaaaaacttttcaatagcaaaaatagagaggagaaagtagcgaaagaatgtatttaaagggctaaggaaaagtaactgtcaacctagtttatactcagctaaattgttatttaagaacctgt

SEQ ID NO: 809786 - DNA, 620 bp, Homo sapiens
gatgtccttaaatatatgaatattgccctgggagttacccttttagtcattaataactgggcataaatcacttatcwgccaggtaatcaagaacaggacccagaacaagtgtttttctttctttctttctttctttttttcttaggctggagcagtggaaagagaactatgcacaaggatgaggagaataattgtgattgtgggacagggccccaggagagaggtatagcagactggccttggaaagcctgcagctgcatcaggaaggcaaagcatgcttggaaaaaatgctgactgaagtaaggcagaacctagagggtgggtggatactccataactgtattcaaattgggcactctcttgttgtaaagcctttgcgtaagtgcaactgagaaaatatatggtagaaaaaaaaggctatgttctgaccagctcgaggatgggggaatatcatgcataatatgtgcaaactatgtgaagaaaagtacaagttaatatgatcacaaaaatattcagaaaaacacagagtgaaggaggtaagacaagaggtaatgaaataattagtgaagtatgggctcctgtgcaagggaatatcttgagacagatttttgaagagaagt

SEQ ID NO: 809787 - DNA, 485 bp, Homo sapiens
atttttgtttatagctgagggtgatcacatgactgagatctgaccaaaatggggtttaagtmgaggcttatgagaaagtctttgttccataataaaacagacagggatgaaaaagatagcttattggctcctgtgatcctttctttcagcctacacacagacaggatgcttggtgctatgacagccatcttgaagccatgaaatcataaaaacaaggacaaaaagtcaacttactgagaatggtagagaggaagaatagaaagacccaattcctagtgacagcattaagtcactacttatgtcctgaactctgtatccagagttcagattttgtaaaaacaaagcaaaaaagaaaacagaaacaaccctatctatttatgttattattaatttactttgttatttgctgctgaaagcgttcctaactggtataaataagaaggactaaagaacttaccctcgtcagagatttactctgtaagtga

SEQ ID NO: 809788 - DNA, 614 bp, Homo sapiens
aggtaaaatatgtgacatgaatgccctgaataataggctcttstctataggaacttatcattagatggagggaggtaagacacacgtagaagtaactacaagacaaataaaaaagcagaccatgacaagtgctaagacagaggcagaagcaaggttctgtagaagcatggggccaggtatgctagctcatgcctgtaatcccagcactttgggaggccgaggagggtggatcacctgaggtcaggagttcaagaccagcctggctaacacggtgaaaccccgtctctactaaaaatacaaaaattaaccagccctggtggcttgctcctgtaatcccagctactcgggatggggaggcacgagaacgcttgaacccagaaggcagaggttgcagtaaggggagatcatgccactgcactccagctagggtgacagagtgagactccatctcaaaataaataaataaataagcatggaagctggtgtggggtgtggcaggaagagaaattgaaagggatttctcagaagaaatgagaccttgagccttgtcaagtgggtaggttattaggacagatgacagcagggacaagagtccaaagaggggtgcaggagac

SEQ ID NO: 809789 - DNA, 594 bp, Homo sapiens
tgtaaatgctgacaggctgtagcagtagcctcctcactcaatagtaagtgataatttctaccatgagacaggcgtggtagacagtggaggattcaccagatatgttccagatacttatcacttctgccatggaccaaaacagcatctgaatctaggaggattacactttagccagtgtttacttggctgacactcaactggccataacacctccttcaaggaactcagtgctggttatgcagctgctccacaagctgagtatttacatcgagtaatgtttgttctggaccaggaactacgggatctgcataaaaagctgcctaagttgcttgggctttggttcagaaattcttctacacccacctttcctctgttcatttgcttcaactgctggcttgcgccctgcatcacttaacttatatggctcttgttcagactgggtgacctggcttccaacaagttatttgggctctaattagtaaacctaatatgacatttttttttctgytaacccttcctcagctccgccattgcaaactcaggagatacacacacacacacacacacacacacacacacacacacacgtcctgc

SEQ ID NO: 809790 - DNA, 593 bp, Homo sapiens
tctttgatgattctttttctttcttttccagtaactctactttttttttagaattgtwttgaaagtagcacattcaggtatagattcatttattcattcattcgataaatatctactgggtatcaaccctgtgccagctctagactaagcactgggacatgttataagaaacttttaatgtggcactggacttcaggagagatctcaaggctaaaaatataggattgggggttaggtaaatggtggtaatagtgcctttaaggcatatggaaatggagagagttaagtgaagagacatctgtatattgaggtgaagaggaggggagggtagatgagaccagtttgtagttgattgcttcagaaagtcgttgcatgaatggtatagaaaagatacaaaaggctttgggtaagtgagtaagaatgattgtagagctgttagggagaatgttcccagcaatgaatcagaggattgttgttggcgtttccagcacagtggaagctagcatcagtatgttatagtgagccagggcagtcccaggttttctccagcaatgctcatcagcaaaagcagaaaaattagagagtgtgtatga

SEQ ID NO: 809791 - DNA, 484 bp, Homo sapiens
ttggagttgtcattttcgatgtttttgtctcttctcacttattttctttttactgagctataatctatatctcttctcatttaagcattgtcttgtgtaaatttttaattctctatttcttttcttgactggacttcgctccagagtcatgatccaggttaaacctaactgtctgcttatcctattcccatgtctgagcagttaaaatggctggaaaaaatacctacacacacacaaacacaaacacacacacagacacacacacacacacacacacacacacacccatccccccagtgttgcttggtctctctttaagttctacagacataaatctcaggtggacactcaacatctccagaatcttactaaactttcataatattttcatcagcttacaygtcctgatgaccatgtcatgccttctgtgtgaacctcctacattacccaacctctctgccatgctcatgctcactataagctt

SEQ ID NO: 809792 - DNA, 635 bp, Homo sapiens
tgcctaccacatgttttcctaagatgaatcagagcaggatgacatgcttgtttagtctttgatgataatgaatatgtrtttacacgattgtcagaaagaacacatttctcccaagttgttacctaactggtattgtgtgtttaagaattttctttctgatttaaaccagctaaagccagttttttaaaggacatatatatatatatatatatatatatatatatatatatatatatatatatatatatatatatatatgatgttagatattggtttgtgcccaagaaaacacagggaaaactaaataacccaaatcaagccctgagtattcatgtgcagactatcagcttcacacttagtcatagtcaacttcacacctaaatgccattgaaaagaagcagggccaaatgttcctggaaaatgggactcttaggttcacagacgtttgctgaaaatacctgagccccatgctttggggagatttcactaagaagattgatatgcagcttccaggggaaagaatgaaggaggggcaggatgtggtcttggtgaatcagaagcggccctccttccccacccctcttctgagtcagcatgcagccacatggccccacatggtgcagttctggttctcg

SEQ ID NO: 809793 - DNA, 612 bp, Homo sapiens
gctgggagctgcagactggagctcttcctatttggccatcttgccagccttgacaaaatcttaagagttgttctgtatttctttagctatcaagtatttatggaggtcctggtatatatttaatgttaggctaaggataattcaaaaatcactatataaaatgaagcagttggtaagaaaacacaaacaagcaaacgactgcctgtagcaatttgctttgtattttgttgcagagggtaacaatttgagaacaattcaagataatacattaaagagtcatatttcacgattaaacagtcaatttggacagttcaaagagtatacactgaaaacaccatcatagattgtataagacttgaaaagggtctagagggatgatggagaaaggctctttaagagggtaatggcataaacaaagccgtagaagtgggaatgatcttggttagctcacaaagcagccaaacagacttcagagggagaggtgggagtgtagctaaaatgtcrtgggaaatagggttgagagagagacaagagccaactaatggaaggccttgaaagtcaaacagaggagttgtcactgtcttgggagaaaaataggatccttttaatatt

SEQ ID NO: 809794 - DNA, 580 bp, Homo sapiens
taaaatattttcaaaacaatatgtattttggaggatttgtttttgaatatgcaatctagtgtcagagtaaaagaggaaggcagggaagaagagctctttcatttagtgcacattcacagctgtcggccagcttttggtaaacagtagttactgtgattgtttactgtcgcccccaaatcagtgcattttgttgttttggcttgctggaggaagggtgctagaaaatataccaaatccaagttgaaaaccctgaaaggccaggagcaaactgtaggttgttcaagactaaccatggttaaaacctagtctggattcagcacagtccctgattggatgaaagcaatcagctgctactcaatcttatggaggaagatgaacactagtaaagcaaagtggtcattaacctacactattggccatgggtactagtaaactgttggcgatatctttctaaaattaagtggtgcattccatctgtttactccactgtggtctatttctactgtatactatgttcttatgaatactttgacacawaatggttgacaaaagggtaaacatgatagtactaaaagaacaa

SEQ ID NO: 809795 - DNA, 561 bp, Homo sapiens
atttctctgttattgatttctagttttaccgccttgtagtcagaaaagttatttaatatagtttcaataattttggaatttttaaggctagctttgtgacataacatacccttcaaaatgatccatgggctgaggagaagaatgtgaattctgcagtcattggataaaatattctgtgcaacatctattaggtccatttggtctatagtccacctccaacccgatgtttcattgttgattttctgtctgtatgatctttccaatgctgaaatgtggtgttgaaatccccagctattattttattgaggtctagctctctctttagctctaataatatttgctttatataatctgtgtgctccattgttgggtgcacatgtatttacaattgttatattctcttgctgagctgacccctttatcattatattctgacatttgcctctttttatagtctttgtcttaaaatctgttttgtccgatataaatacagacaamtttttttctatgtttggttccattggcatggaatatctttttccatccttctatttttagtgg

SEQ ID NO: 809796 - DNA, 481 bp, Homo sapiens
ttcaaaacaaatcctcctccagccccgccccaagctctaccctccagtaccttcagcactggaactgacacaaagtccagggctgcgacggtgtccagacccgggcccctgtccaaggagctgcgygctcacagatttggctggcgcaacataggcgggggcactgggcggcagcccatcatgcccgggacccccaaggacccgcgcggaagcccagagctctcagccccggcgggaggctggttcccctcgccctgcgctgccgtacctgcacacggtgatcaggttcctcctctccaccgcagcattgcgggcgctcaggcttttcttgccgcctccgccgccaccgccgcggatcccgctcaggccccccaggctccgggaggccatggcgggcttacccccgtgccccttttgtctcgtgccaccccgcacgccccccacacctgcttaagggggttctcgctcggtccgcaaccgt

SEQ ID NO: 809797 - DNA, 646 bp, Homo sapiens
acatccaggtactcacattgggattaatcaaggaaacaacttgacccatggagaatgaagaaaagcaagacaggacaacagcccacccaggagyaacgcagagccaggggaacctcccctgcccagggaagcagtgagtcaatgtgtgacctcaggaaaccacacttctcccatgaatctttgcaaaccttgggtcaggagatctccttgtgaacccattccaccagggccttcggtctcacagacagagctacatggagtcttggcagagatgctgctcagacatgcatggaaaccctggaggcttagatactgggctttccagcaaaagaagttgcagctctggcaaagtggaaggctggacccctgtacataccccttggaaagaggctgaatctagagggctaagcagccaaaacctacaggccccacttccacggcaccccacaagataagacccactggcttggaattctacccagccaccggtagcagcactgcacctccctagggaggagcgtccaggggaggggtgggccaccatctatgctgtttgggcaccttagccattccagcctctgggctttggagagtccaagctgaccagaggtggaaaggatcccccagcatagcacaactgctctac

SEQ ID NO: 809798 - DNA, 628 bp, Homo sapiens
cactatatagaaaggaaagaccaataccagctaatacaaaaacatgcttaaacacacagaccagtgtcactgtaaaacaaycacagaaaaagccaacataataatcagttaataacacaaagacaggatcaaatccacacaaatcaatattaaccttgaaagtaaatgggctaaatgccccacttaaaaggcacagtgagaagctggataaaaaagcaagacccaatggtatgctgtgttcaagagacccatctcacatgtaatgacactcataggctcaaaataaagagataaagaaaaatctactaagcaaatggaaaacagaaaaaagaagggattgcaatctgaattcagacaaaagagatttcaaataaacaaacatcaaaaaagacaaagagggcattacttaatggtaaaggattcaattcaacaaaaaaacctaaataccctaaatatatatgtacccaacacacaagcacccagattcataaagcaagttcttagagacctacaaagaggcacaaactcccatggaaaaaatagtgggagacttcaacactccacagacagtattaaacagatcattgaggcagacaattaacaaagatattcaggatctacactcaac

SEQ ID NO: 809799 - DNA, 559 bp, Homo sapiens
agtacctgtctcatttgccatttttataccaaacagggctgagactagagtgaggcatgtaaggtgctcatcttgggttcaraatttaggtggtgtgaagaaaaatctcagcgatcaagataaataacactttaatgcaatatttcaaaaactcgaaagatagcttcagtaccttgtatgctctccatcagactacccttcattagcacccaaccccacatccacaacccacttcttcataaacaccaatactggtgaggttatagaaaaatgagcccattcatttactgcggatgtccctgtaaactggtaaatgtgaaaaacaatatggaaacatctgttagcggccataaagatgtcatggaacattcaagaaatttaatttagtatcttgatgctctggatgtttgggaatgctgtttccactcttatagaacttatcttctagagtagcgaggacagcaaacaaaaaatagacagtataatctcaaagagagctaagtacatgaagacaataaaacagagcaatgtgatgaaaaagagcactggcagcctgtaa

SEQ ID NO: 809800 - DNA, 622 bp, Homo sapiens
tcaaggagaactacaaaccactgctcaatgaaataaaagaggatacaaacaaatggaagaacattccatgctcatgggtaggaagaatcaatatcgtgaaaatggccatactgcccaaggtaatttatagattcagtgccatccccatcaagctaccaatgactttcttcacagaattggaaaaaactactttaaagttcatatggaaccaaaaaagagcccgcatcgccaagtcaattcctaagccaaaagaacaaagctggaggcatcatgctacctgacttcaaactatactacaagggtacagtaaccaaaacagcatggtactggtaccaaaacagagatacagaccaatggaacagaatagagccctcagaaacaatgccacatatctacagacttcactttcaaaacacgagtttaaagacaaaattcataagcatttcaagactgtaaccacagagcgtacaaccaagcacagaagccttctggcctctgggtgctgtatgactacccaggtcggacactyatgaagccagccttggttccagctttttcaaatgacttcttgttttcacagccctaagacaagtatttgtcaaataaacaaaggaacacttac

SEQ ID NO: 809801 - DNA, 616 bp, Homo sapiens
tatgtaaaccaactaaccaattcttgtgtcaatctctgaattttggccaattaaaggtgaccaactgttcaaaccatgttcaaataaggcaaatactgagctgtaaccaatccactgtttctgtacctcagttccattttctgtgcatcgatttcctatttctgtccataaatctttaaccctgtggctgcactggagtctctctgagcctactctggctcgggaggctgtccgatttgtgagtcattctttgctcaattaaactctgttcaatttaaggttttccttttaacatcatatcgtgacaatatcagcatttccattaaaagacctttttccccttgtaggatgtattaatgtctagtaaaaaatggagatatacaaaagttagcacatagtcttgcaactatatttattgctgaaaagttatcttggctgtttttaaatgatagtatttcaaccatacaaaaagtttttttttttctactttattttttatttctggcctcatatgactcaagaacagcttcattttcaaccattagcccatgatgttggctgctgcgtttaggcartttggggataaaaataaaatgaccaagttattttgtttgga

SEQ ID NO: 809802 - DNA, 484 bp, Homo sapiens
aatgaaacaaaaatatttccctgagaatgttatcatagaactgtatctctcatgactgtggagatagattttatattacctgcatggtatccaaatccctaagcttaaacatttacataaaaattgcacgagggccctgctgaaaccctagtatagctagcagaagcaaccaaattaccttttggaaaaacatggcttcacttcatgaatactccattgaatatacactcacaacctgaaattacaaaacatctgagagtacaacagtagacgtcacccacagtagaattagactccaaacaacttaatataactactaggaaaatgctataaaaattagtataacataaatgaagtcctaaaagtaatcaaaccacaagaaaggattaagactacctacatagaacacacagatgttttaaataatcaactcaaatttttrgaaaaaacaaacatagcgacttgaaaattcaatgcatacatt

SEQ ID NO: 809803 - DNA, 585 bp, Homo sapiens
tacaccaataatagacaaacagagagcaaaatcgtgagtgaactcccattcacaattgctacaaagagaataaaatacctaggaatacagcttacaagggatgtgaaggacctcatcaaggagaactacaaatcactgctcaaggaaataagaaaggacacaaacaaatggaaaaacatcccatgctcatggataggaagaatcaatatcatgaaaatggccatactgcccaagtaatttatagattcaatgctatccccagcaagctaccattgactttcttcacataataagaaaaaatctactttaaatttaatatggaaccaaaaaagagctaatatagccaagacaatcctaagcaaaaagaacaaagctggaggcatcatgctacgtgacttcaaactatactacaaggccacagtaaccaaaacaacatggtactggtagcaaaacagatatatagaccaatggaacagaacagaggcctcagaaaaaaacaccayacatatacaaccatctgatctttgacaaacatgacaaaaatgaccaatggggaaaggatcccctatttaataaatagtgttg

SEQ ID NO: 809804 - DNA, 602 bp, Homo sapiens
ccataaaaaaggatgagttcatgtcttttgcaggaacatggatgaagctggaaaccatcattcttagcaaactaacataggaacagaaaaccaaacaccacatgttcctactcataagtgggagttgagcaatgagaacacatggacacagggaggggaacatcacacaccagggcctgtcagggggtagggggctaggggagggatagtattaggagaaatacctaatgtagatggcaggttgatgggtgcagcaaaccacgatggcacgtgtatacctatgtaaaaagcctgtacattctgcacacgtatcccagaacttaaagtataattaaaaaaaaagaaaattgctaagaccataaattttaaatgttcttattccaaaaaactatgtgaggtaatgcaggtattaaatagcctggtttagccattccatgatttatacctatatcaaaacatcatgtttatactattactatgtatactatgttatacaattactattacactcttacatacatgctatactattactattaccttaatatgtttataytattacatgatgttttgatataggtataaatatatatatacaattt

SEQ ID NO: 809805 - DNA, 638 bp, Homo sapiens
gaagaaaaaatatgcacagaatwtttttcaatccacaaaaagaatgcagtggagaaagagataaaatgtcatgtcagcgtaatcccttagctaactagtcaaccagagaatggccactcaagtccagcacctatgcctttctttattgcagtcacattttgaattatctttctatgctataaaaactctgattagagaaatgttctcagttttacatcttgaaaagggtaagggtaggagcggaatcagttcagacattagtcaaggatataacagagcaaataaggaaggaaaacacaagaagagttatgaaatgacacttcaattttattttaattgtctaaagttactatcagtaaatacactaaatttaaatgtatcatttgtgtttgttacagagactgttacagcttgccaaagtcctttgtgtactcaggaagaagtccaggttcttcattttttccagggtacacggctataatacagtctctcttaaaaatcagtgtggtgatattatttagttccagccaatgaagtatagtcagaagtaatgtttgctactttcagacccatacctgggcccataaaatcctcccttggcttgcttccttaaattttctcctattccagcttgaaag

SEQ ID NO: 809806 - DNA, 529 bp, Homo sapiens
ggctggtcttgaactcctgtcctcaagtgatctgcctgcctcagcctcccaaagtcctgggattacaggggtgagccaccgtacccggcacaaccagaatattgataccgatatagtcaagattcagaacattcccttcatgacaggattcttcatgttgccttttttaaaaaaaatcctactttagctccctggaaaccatttatctattctctatttctataaatgccgtgtcaaacagtatgtgatattttgggactggctcttttcactcaacataatcctctacaggttaatccaggttgttgcatggtatgggtatttaaccattcatttcttgaaggacatctgtgttgtttgtggctgttatgaacaaagctgctgtacacatttgtatacagattttagtgtgaatacacatttycaattctctagaataaatgcccaggagtgcaattggtggatcatatggtagttgtaagtttatatttttaagaaactgccaagctattttccagagtacctctat

SEQ ID NO: 809807 - DNA, 629 bp, Homo sapiens
aaagctttaaggttggggatggtgccccacacagggaacatgaatgtcttttttacagaactcctgttgaattcagatttcaaaagaacagagtagcccccmcaaaaatgtgtagtaatgatttcataatggacatgcctcaaggtttggaaccttcttaaattattcaaaaatcctctgaaatatttaattttcagccttgaaggacagggtttattttgtttggggaagaaaaaatgtctctatatttctgagagcttgttcttgaataaaaataaaccaagataagtagatgtatgcatatatatatatatgtgtgtgtgcatatatatatatatatatatatatatatggatatgtggcatatgtttcctgtattttcatcccaaaatgttgagtaaaacattcagactctgcttaatgccaaatgttgcatcaatgcaccatagaagtactactgttgttgagctgctaggtcaacattgaaattatctgtaaaattttaagctgcttttagtaataaattgcttttttgcaaagatgctttgatcataatgtactgtcaccttttctcactaattaaactatgataagggagtctgaatagacttctagtatcttattcctat

SEQ ID NO: 809808 - DNA, 661 bp, Homo sapiens
aagattaaattcacacaaaacaatattaaccttaaatgtaaatggactaaatgtcccaattaaaagacacagartgccaagctggatagagccaagatccataggtgtgaggtattcaagagacccatctcacgtgcaaagacacacattggctcaaaataaagggatggaggaaaatttgccaagcaaatggaaaacagaaaaaagcaggagttacaatcctagtttctgacaaaacagacttgcaaccacaaaaaagacaaagaagggcattacataatggtaaagggtttaattaaacaggaataactaggtatcctaaatatatatgcacccaatatgggagcaccccgattcataaagcaagttcttagagaccttcaagagacagacttccacacaataacagtgggagactttaacaccccccactgataatatacagatcatagagacagaaaattaacaaagatattcaggacctgaactcagctcaggatcaagtggacctgatagatatctacagaatgctccatccctaatcaacagaatatacatttttctcatcaccacatggcacttactctaaagttgatcacataattggaagtaaaacactcctcagtaaatgcaaaagaactgaaataataacaaacagtct

SEQ ID NO: 809809 - DNA, 510 bp, Homo sapiens
acagtaaaaatgtttgtggttgctagtaatcatagaatgtaaattaagacaaaataacttatttttacattcaaattaattaaaggatatgatctcgaaaatgtcatgaaaatggtgctttcatatctcgcaggtgggaagacaaattgatgcaaccctcttgaaaagcaatctggcaatatgaaccaagagccatgaaaaggcttatgctattataattagtaagtcaatttatagaaatttgttttttaaaagtaaagtaaaataagagaaaacccttgttgggaaagatgttcattgcaatattgcctacaacaggaaaaatattggaagaaaaaatctaacaaattgataaaatcatattaggtaaattagggtggacctctgtggtagwcaattatgcaactgatagaaatgataataataaaaatcacatagcaacatagaaatgccttaattagaatcttaagtggaaaatgagcatatgaaatagaatgcaggctattgtca

SEQ ID NO: 809810 - DNA, 576 bp, Homo sapiens
tgctagtaggatcactcctgtatagggtgtctgacaacccctgttggagggtctcagccagttgggtggcatggggagcaggacccatttaatgaagcaatttttcccttggtggagaaggtgtgtttctcaggggaaacccactcatctaggctgcctggattccttagaattaacaggagaggctaagtctgctggtccacagagactgtggctaccctgcccccgaccaggggcttaggcccagggagatttgaattctgtccctagcctctggctggagttattagagatccagcagggaagccccacccactgaggaaggatggttcagggttaggctttaagaggccctctggccacagactgtcacagctggtgtgttgggctgtggggacaagtcttgggaccaagccgtccagcctccctggctccagcaggggaaaagtgcagcctggagctatagaaacagatgtcgccctttcccctcccagggagctgagcgtgttaggcagttgtgagtcccrgtgctggctgttgcccctcccccaaggtactcaaaaggcttagacagca

SEQ ID NO: 809811 - DNA, 661 bp, Homo sapiens
aagattaaattcacacaaaacaatattaaccttaaatgtaaatggactaaatgtcccaattaaaagacacagagtgccaagctggatagagccaagatccataggtgtgaggtattcaagagacccatctcacgtgcaaagacacacattggctcaaaataaagggatggaggaaaatttgccaagcaaatggaaaacagaaaaaagcaggagttacaatcctagtttctgacaaaacagacttgcaaccacaaaaaagacaaagaagggcattacataatggtaaagggtttaattaaacaggaataactaggtatcctaaatatatatgcacccaatatgggagcaccccgattcataaagcaagttcttagagaccttcaagagacagacttccacacaataacagtgggagactttaacaccccccactgataatatacagatcatagagacagaaaattaacaaagatattcaggacctgaactcagctcaggatcaagtggacctgatagatatctacagaatgctccatccctaawcaacagaatatacatttttctcatcaccacatggcacttactctaaagttgatcacataattggaagtaaaacactcctcagtaaatgcaaaagaactgaaataataacaaacagtct

SEQ ID NO: 809812 - DNA, 676 bp, Homo sapiens
tggattatgtttattgatttgtgcatgttgagccagccttgcatcccaggggtgaagctgacttgatggtggtggataagttttttgatgtgctgctgtaytcggtttgccagtattttactgaggattttctcatggatgtttatcagggatactggcctgaaatttcttttttcattgttgtgtctctgccaggttttggtatcaggatgatgctgacctcataaaatgagttagggaggagtccctctttttatattgtttggaatagtttcagaaggaatattaccagctcctctttgtacctctggtagaattcaactgtgactccatctggtcctgggctttttttggttggtaggctattaattactgcctcaatgtcagaacttgttattggtctatcagggatttgactttttcctggtttagtcttgggaggatgtatgtgtccaggaatttatccatttcttcaagattttctagtttatttgcatagaggtatttatagtattctctgatggtagtttgtatttctgtggcatcagtggtgctatcccctttgtcattttttaccgtgtccatttgattcttcttttttttcttcttcattaatctggctggtggtctatccattttcttaatcttctcaaaaaaccagcttctgaattcactg

SEQ ID NO: 809813 - DNA, 497 bp, Homo sapiens
taccaaagcacagagatgaacttatttggtctccatagttgyggattttacagtcatatggtgggcactgaggacctaaagacaatagcttagatcagaaatccctgcccttgaggtataccagtctaatggggctgataaacatgtcaaaagaaaaattaaagggctttgttatgggcagggccatacctctcatagtatgtcaaaggtgctaggtattagtgttttcattcagcaagctgttatacaaattatcacttggggcttttctgttgaaatgtgttcactgcttgactcttgaaactcaaaatatttgcaactacttgtatgaaatgtactaaaatacatttgctgtatgacaaaaacgggatataaataatgcttataacacagtcagagtacaaaatatgttaactgaaaataaatttagttcctttgtctgaacttggtatagttatatagacatatattgaacacttacagtcactttgatagat

SEQ ID NO: 809814 - DNA, 452 bp, Homo sapiens
tgttattcacaaaagcaattagaaggttaggaatctggtgccctctggctgtataactcctaagccataatttctaatcttgtggttaatctgttagttttacaraggcagtttggtccccacacaaggaggaggtttgtttcagggaggggctgttatcgtctttgtttcaaactataaactaaattcctcccaaagttagttcagcctatgcccaggaaggaagaggggcaggttggaggttaaacgcaggatggagtcagttaggtcagatctctttcactgtcataactttctcactgttgtaatttttgcaagggtagtttaactttctatatctgggaactcatctcttatcagttctggaaattctcttttattatcttttttaatattggtttttcatctattttctctagtcttttctgccactcctattatattaaatctta

SEQ ID NO: 809815 - DNA, 521 bp, Homo sapiens
tggtacattattaagtaactgtagtttgacctcttggagtttgttgggaacaaatccaaataaactggcatctaccttctgtttgccttgttcrtgctttgctgtttgtcaaatcacctctctcagcagagtgtcctctttttttttttttttttagcagtgtcccctggtaaaaaccagggggttgtttcagaatgaatctgaggtccagttaactgcaacattctcttattctaggattctgttttcaggaacacagatactttcagacaaatgttaaaaggcttggttaacatgggaaatagttcctcaaaacttagaggttaaagtactgtactgttaaagaagttaaagtactgattttaaacttttctagaaatttctgggaacaagtagtgtttttcaagatttcttagagggaagagacctttcttccctaccagcagtctgtccatcctttcagacaatcattttggattaaggatatttaagtaagtggttagtgtgcttcagaatacctg

SEQ ID NO: 809816 - DNA, 633 bp, Homo sapiens
gttttagttctttgagaaatctccaaactgttttccacagtggtttaactaatttacmttctgccagcagtgtacgtttcccttatctctgcagcttcaccaacatgttattttttgacttttaattatttttttgagaagaagcctcactctgtcacctaggctggagtgcagtggcacaatcttggctcactgcaacctctgcctcctgggttcaagcgattctcctgcctcagcctcctgaatagctgggattacaggcgcctgccactgcacctggctaatttttgtatttttagtagacactgggtttcaccatcatggccaggctggtcttgacctcctgactttggaatccaccttccttggcctcccaaaatgctgggattacaggtgtgagccactgtgcccggcctgactttttaataatagccattctgaagggtgtgagatggtacctcattgtggttttgatttgcatctctgatgagtagtgatgttgagtactttttcatgtttcttgactgcttgtatgtcttttttttttttgagaagtgactgtttatgtcctttgcctactttttaatgaggttatttttcttatcgatttaagttccttatagagcctggata

SEQ ID NO: 809817 - DNA, 624 bp, Homo sapiens
aaacaaaaacagtcaataactgactctgaaaaggttcagatgttggatttagcaggaaataatttaaagaagttgttacaagtaattttaaatatgtaaaggaaaatatggtcattttgagtgaacagatagggaatctgagcacataaatggaaaaaaagaaccaaatgaaagtggaaacaataaatgaaatttttaaaaattctgacaggcttaacgacagattagagacgacagaaggcagaatcagtaaacttgaagctagagcaaaaaaaattatacaatctgaaagccaggcaaaactataacattcataacttgggaagatacagtgaaagatatacataaagagaaacaatggcattaaatgtatctctaaaacaacaaacacacactaaaaatgaataagaagccacctgatgacccacatacataaggtcaaactaaacctaaatgaaagagataatatatataagaaaataattttttaaaaaaatagaaaataaatgccccaaaggggatcaacaaagccaaagtctggttctttgaaaaaaattgaaagatgtattacttccagtacttaattttccrcatatgtctaaatgttttatatatgaatatata

SEQ ID NO: 809818 - DNA, 618 bp, Homo sapiens
tttccctagctcaccttgctccagccatgcaggacactgggcagttcctctaacatctcaagcacgtgtctgygtcagggactttgctcttgcttttcccactgccagggacattcttctcccagataatggaggcctctgtacaaatttcaccttattggagagctctccttcatctattctatataatataataaccacctttgtcattccttattccatttactctgctttatttttctcaatctgatataacatcaccagctaacatatattgtttattgtctcttcttcctgaagtgcaatcttttgaaggcagggcgtttacttcaacatgatgtcttattccaacattatatctctgactaattttatgtgtgtttaaaaagtattttgatgatatgaactaaaattagcagtttttttaaaacattgtattttcgtagcaaaacaaaataattgaaaatcctgtttattcttaaaactgtttctggaattgttactggtctaagacatctgaaagtttgattttaaatttctgcatactataaggctctagggagattcagggggaaatatagactgaatatccgaatgaggcaacattttaatggccac

SEQ ID NO: 809819 - DNA, 560 bp, Homo sapiens
taatcctaattatcatccaaagctccatccccaaacaccataaacactgggggttagggctttaacaggtggagttgggaggatacaaatattcaatttatagcaccggatatcctttattttaatttgttttgtttccatttatttttgttacaaatgaatctgtctagagtttttttccccaacttttaattatacagtattttcaacaccacagatgttgaaaggatacaatactacacgccccccaccaagattcaccagttgttaacattttgccatccttgccttatgtatatgcctatctacctatatatattttgaaagtaacttgcacatcatgatatgctacctcctaccgagtcagcattcatctcctaaccaaaataccattattatactcaagaataattatcttatatcatcttctrgcccatctatattaaaatttctccaaatttttatagctattttcccctgaatttggatccaatcaatttcattgcatttgaaaaagtgctgtcatcttctatgataacaatgcttttttctggaatacc

SEQ ID NO: 809820 - DNA, 625 bp, Homo sapiens
gtctagcccaggagcagaggggtgggggtgcagaattcaaaactccttccccatggagccatctgttctcttgtctctgcttcctcacaagcatctgyctgctctctgctcactacaagctcctctgcacccatatctaaggctcagacatgattttgtggcatgatttgccacagtatgactatttcagtctctcagagcctcagaactaaattcccaggacagaaaatatgatggaattcgtttccttacaatttgtgcccacccatctgcttatggaagcagacactggggcagaaatatggacagctggtcctcctcccagcaggagctagggatcaggagcaagtccaaagaagaagaggggcattcacaaacaaatccaagtgtgtattaattttaataacagaaggacaaaagagagccaagttttatttgcaacttatgtttttccaacacagatattagcagctacctgaaagttaataattcaggaggaaatatcaatacctcaagaatatggttcagcccagcatgagctgacttgattgactcaggaatatgacaccaaaccctaccaacagctgtatacacctgaccaaagagtgatagagagacagacaga

SEQ ID NO: 809821 - DNA, 532 bp, Homo sapiens
tatctttcaaagcacttatcacagtgtggtatcctcttgctattgatttatccacgtgtgtattgtctggacttttccaccagaaaaaaaaaatgcccctgaaagccaggctcttactcatctyggtgtacttggcgggcaagaacaataatagcaatatttatataacctttatgatgagccagatactgtttttagtactttacgtatattaattcactgaatcctttggggtggaattattggtctcaccatcttccagatatgaagccaaagtgcagagaggttcggcaactttcccaaagtcacacagctatcaggacaagagctgggaacctaaagaagctgtctccagagtggaaacttgacctgctctgctctctgcttctatgtgttgggggaggacgggagacttcctggaaggagacacagagaggctgtgggggcctcacatcagcctgcctgcacccagtcctcctctttcgtgcctccctctgtgccctctgttctgaggatcccatatgccagaaga

SEQ ID NO: 809822 - DNA, 635 bp, Homo sapiens
aggttgtttacaccttttggtgagtctgtttgcatcctacttggacatggtttttgtacaccttttcatcactccagtggaggagactcacctgcccaggacactctgcttcccctcttgtagctgaacttaactccactgaggttttctggggcccgagatctcggttcaggggagtccagcaacaaacattagaccagggttggaacggctggcacagtaacatcaatggaaagggacagagtttgagagttcaaacgtgatgcactcagcagccaccgccagcacatcctccacaccgtctcgtgcaggggcccacccatctctgtgtctttccagcacacaacagtcacccacactgggcattccattcagaggtgggagagaggaggacacccctcctggcccaggagcagaggccatcaaggtgtccccggaacttagagtagatacattgccaaaaggtgatatcctcattctcagggattctggtcttggagcagcccactccaaatgaggggccgtacagaccaaagtcacccctctgaggcagcgtgtggtgatrctgatgcagccagagttcttagcaaaagttgatggatggggacaagcagctgctagattaagtaattcct

SEQ ID NO: 809823 - DNA, 599 bp, Homo sapiens
ctgcgtggggtgggagcaaaggcccgctggatcagctagagaaaggaggggaaactgctcagtctgcagatccccagtgggagcagttaaataacaaaaacctgagcatgcctcttctccctgccgacttccmcaaggaaaacaccgtcaccaacgactggattccagagggggaggaggacgacgactatctggacctggagaagatattcagtgaagacgacgactacatcgacatcgtcgacagtctgtcagtttccccgacagactctgatgtgagtgctgggaacatcctccagctttttcatggcaagagccggatccagcgtcttaacatcctcaacgccaagttcgctttcaacctctaccgagtgctgaaagaccaggtcaacactttcgataacatcttcatagcacccgttggcatttctactgcgatgggtatgatttccttaggtctgaagggagagacccatgaacaagtgcactcgattttgcattttaaagactttgttaatgccagcagcaagtatgaaatcacgaccattcataatctcttccgtaagctgactcatcgcctcttcaggaggaattttggg

SEQ ID NO: 809824 - DNA, 621 bp, Homo sapiens
agtatctgctgccttactgaatgaatggagggacggatggaagaactctcaaatgaagtaatatataatgtacagtcactccctcatgagcgttrcaatccagcaggagttacaaaactaataaaaataatacaactagcaaataacacaagtcagaaactaaacgacagagggccctgaacgcctggagcaaaatgctcttggaaactgggactcttattagaaagacatctgaaaacttgaacctgggtcctacagaaaccatcacacccagttctggtgggtgccattctccaaataatgacagctaacacatattgaacatttatcatgtgttcatctatattatcttatttaatcctcacaacagctcattaggtagctattattaatcatcccccttttacatatgatgaaacagacacagagaggtcaaagtcctaatgcaggataaagcattaaccctctagtctttgaaaaaatgaaaagaaaaataacatcaaatggcttttcagaatcagaattttacaataaactagcaagttgtttgtttttaggggtcttagggggagtgggtcattataaaaagtcattaagcccaaaatctgaccacgatggcca

SEQ ID NO: 809825 - DNA, 591 bp, Homo sapiens
ggtcagttctcaattatgagaagccctgggagtcagggatgacctacatctccaccacacccagtgttctccaagctgtctttgtttttgtgttttgttttgggggaggttttttgagatgggggtctcactctgtcaaccaggctagagtgccgtggtgcaatcttggctcactgcagcctctgcctccaggtgcaagtgatcctcctgccacagcctcccaagtagccaagactacaggtgcacgccaccacactcgactaatttttggtatttttggtggagatgggctttcgccatgttacccaggctagtctcgaattcctgagctcagatgatctgcacaccttggcctcccagtgctggattacaggctccaagctgtctttgaatcactctaatcactctttcattccctttggtgttgggatgggaacagaggagtatgagctcttccaaccctcagtgcacagtgtggcttccagcaaattccagcrtaccctgctaatcacccaacttaggtgcctcctggttaccccagcactgtgaaacatgccaacacatgacagatttatgtcaaagatgaggact

SEQ ID NO: 809826 - DNA, 409 bp, Homo sapiens
ggccaggcaggcagcgtgcagggatcctcctggtgcttcagccagtcctggggctgccacttcccagagcactgccgggtgtgcagggcgtgggtgcagcgccagctgcctcaggctcatgcccactgttcggttgcaggcaccaaccccttcctcaggtcgatgcaccaccgcgtgacctccaggcagctgcagctcccggacaagcactaggttaccaccttgctcagcacctgtgcccagagcatccacaaggcctgcctctcggctgcctagccaggactgcagggatggcccgcagcctcatcggggccaaggatgcatgcctcctgtcagacacttmtagatgttggcgtccatggagagcctggagttaggttagctttcctccttttctctcctgccttgg

SEQ ID NO: 809827 - DNA, 601 bp, Homo sapiens
acctcaaaacagtgtaattgtgtgtgtgtgtgttttcttttctttaaattttttttataattwttatttttaattcaggggatgtatgtacaggtttgttacaggagtatatggcttgatgctgagacttgtggtgccactgatgctgagcatagcacccaataaatttttaaaccttgacctcctcctcccctcccacctctagtcgttcccagtggctattgttcccatctttatgtccatgagtcaggtgagctcatcttgatagtcaccccttgtgactttttttccacaccttacaggggaaatggcatggttctccaacggcctcccagtcgttagcaggaatgaatgagggcccttggagaacatttcatctgcctcctagttacagtcaagtcaatagaattccagagagcaacacaatggcctgcctcagattcccacagatagtgaattgccctgactagttaattagaaagttcttttctatatattacacatggacaaatacaatgactagcatttcggtgtattttttatttttttaattgacacataatagttgtattatgtattatgggatacagtgtatgatgtt

SEQ ID NO: 809828 - DNA, 630 bp, Homo sapiens
ctgaaggaagcactaaacatggaaaggaacaactggtacaagccacagcaaaaacgccaaattgtaaagaccattgatgctaggaagaaactacatcaacgaatgagcaaaataaccagctaacatcataatgacaggatcaaattcacacataacaatattaactttaaatgtaaataggctaaatgctccaattaaaagacacagactggcaaactggataaagagtcaagacccatcagtgtgctgtattcaggagacccatctcatgtgcaaagacacatataggctcaaaataaaggaatggaggaagacctaccaagcaaatggaaaacaaaataaggcaggggttgcaatcctagtctctgataaaacagattttaaaccaacaaaaatcaaaagagacaaagaaggccattacataatggtaaagggatcaattcaacaagaacaactaactatcctaaatatatatgcacccaatacaggagcacccagattcataaagcaagtccttagacacctacaaagtgacttagactcccacattataataatggragacattaataccccattatcaacattagacagatcaacaagacagaaagttaacaaggatatccagga

SEQ ID NO: 809829 - DNA, 630 bp, Homo sapiens
ctgaaggaagcactaaacatggaaaggaacaactggtacaagccacagcaaaaacgccaaattgtaaagaccattgatgctaggaagaaactacatcaacgaatgagcaaaataaccagctaacatcataatgacaggatcaaattcacacataacaatattaactttaaatgtaaataggctaaatgctccaattaaaagacacagactggcaaactggataaagagtcaagacccatcagtgtgctgtattcaggagacccatctcatgtgcaaagacacatataggctcaaaataaaggaatggaggaagacctaccaagcaaatggaaaacaaaataaggcaggggttgcaatcctagtctctgataaaacagattttaaaccaacaaaaatcaaaagagacaaagaaggccattacataatggtaaagggatcaattcaacaagaacaactaactatcctaaatatatatgcacccaatacaggagcacccagattcataaagcaagtccttagacacctacaaagtgacttagactcccacattataataatgggagacattaataccccattaycaacattagacagatcaacaagacagaaagttaacaaggatatccagga

SEQ ID NO: 809830 - DNA, 506 bp, Homo sapiens
ataaaccaatagttgtccacctgggaacaaagagatgcagccacaaacatgagcatcagccagcagcagcaccaaatccaggactatctgcctgagccaggggcccggctggaacctcactgtcagagttatgtgtaggcagaacagcagcatttcatagaagtttagagggaatagtcactcaaggctaaaatgctggaatcttctcaaactcacattccttcaccttttaagtctgttagatattccatatctgattgttcatttgtttgttttatcattttagtgccttcttctcctgaaactcactttgtcccaccttctccactggggctactattcttatagtgcaaatactcatcttctagtacaaatacatccagaccagagtcaggaacgagaagcctctagtcagtcttcaattttcccattatggttccttcttcgggtttattttytaaagaatgaacaaacatgggattattcaactaagggctgaatgttaa

SEQ ID NO: 809831 - DNA, 530 bp, Homo sapiens
agtggatcctaaaaaggatcctaaaatccttttcaggaagaatcctaaaaagagcccaggcagccacctttaaccactagaagcaaggtggtcacaactgtcataatccatggagacagttaatagaatacaggatttctagggcaagtcattaagagtaatgttcaatatatagacccccacttccccccacccccccaaaaaaatcaaggattcgtgattaagagactaagggcagcccaatgaaaagtcattatccctggcccagtttctggatctgagccagtgttctgacccagaatctactgactaaaggaggggcaagttctctaggagggaggatcctgtaacaccatggtaagtatatatagtaatgattatctcaatctttccctaaaagaatctatgatcctttactcaagtractgtacacttggaaagggggaaatcccaagcattttgagaatggctggacacagaacacaagtttgcactgaaacccagggatccaaagtaacatcatgctccac

SEQ ID NO: 809832 - DNA, 530 bp, Homo sapiens
agtggatcctaaaaaggatcctaaaatccttttcaggaagaatcctaaaaagagcccaggcagccacctttaaccactagaagcaaggtggtcacaactgtcataatccatggagacagttaatagaatacaggatttctagggcaagtcattaagagtaatgttcaatatatagacccccacttccccccacccccccaaaaaaatcaaggattcgtgattaagagactaagggcagcccaatgaaaagtcattatccctggcccagtttctggatctgagccagtgttctgacccagaatctactgactaaaggaggggcaagttctctaggagggaggatcctgtaacaccatggtaagtatatatagtaatgattatctcaatctttccctaaaagaatctatgatcctttactcaagtaactgtrcacttggaaagggggaaatcccaagcattttgagaatggctggacacagaacacaagtttgcactgaaacccagggatccaaagtaacatcatgctccac

SEQ ID NO: 809833 - DNA, 606 bp, Homo sapiens
agcctgaaaatttgaggtgcagttattttgaaaatacayaattgatggcctataaatagaacaggtgagttaagtggaacattgacaaccatatggaagtttatacagtgccacgagaaaagcttgatttttttgttaaagctcagcagcggttaaatcaactgctaaaggaacagccccttcccagaatgttttctctttttttgagacagagtctcgctctgtcatccaggctggagtgcagtggcacgttctcagctcacggcaacttccgcctcccaggttcaagtgattcttctgcttcagcctcccgagtagccgggattacagccacatgccaccacatctggctaattttggtatttttagtagagacgggtttcaccatgttggccatgctggtctcgccctcccaacgtgctgggattagaggcgtgagccaccgcaccaacccctcagaatgttttcttgatggggttgctggcacttgctcttctgccactgcggtagggtagaaaagccctgtgactctgagggattccctttctttctcttccagatgtttcctctgggatccacactctgggtcctttcatatctctggaa

SEQ ID NO: 809834 - DNA, 632 bp, Homo sapiens
atagtattttgttaatatctaggacattatcattatcatgtatcattatcgctgcagttcatttgttttaaatgccatattatattccattggataaacattctattgtttatatagtcactctcttttgatgggcatttgagtcttttccagaattttgtcattgtaaacagttctgaacattctgacacacgaacattcttatatatgcaagacttccattaggtatatatgaaaagcagaatttctgggtcagaatattcactgtcatgagaaagttatatctatcagctctaagtgtcccctcctctgtgaaatatctattcctagtttttcccatttttcttttgggtgtttgtatttttctcatcaacctctttggcctgcttcctgcctgtagaatactatcgctcaagatcctttcatgtccttaaaaatcagtcttatttaacctaggctggcagcactttcagcaatgtaactctctcgaaaacccttttcgaratgtcagtagccaaatccactattcattttgagacatgtcttgctctccctctatatgtagtttcaagtactctgacatcatcaggctttaggagacctttccatgagacattctgtctaatggacag

SEQ ID NO: 809835 - DNA, 632 bp, Homo sapiens
atagtattttgttaatatctaggacattatcattatcatgtatcattatcgctgcagttcatttgttttaaatgccatattatattccattggataaacattctattgtttatatagtcactctcttttgatgggcatttgagtcttttccagaattttgtcattgtaaacagttctgaacattctgacacacgaacattcttatatatgcaagacttccattaggtatatatgaaaagcagaatttctgggtcagaatattcactgtcatgagaaagttatatctatcagctctaagtgtcccctcctctgtgaaatatctattcctagtttttcccatttttcttttgggtgtttgtatttttctcatcaacctctttggcctgcttcctgcctgtagaatactatcgctcaagatcctttcatgtccttaaaaatcagtcttatttaacctaggctggcagcactttcagcaatgtaactctctcgaaaacccttttcgaaatgtcagtagccaaatccacwattcattttgagacatgtcttgctctccctctatatgtagtttcaagtactctgacatcatcaggctttaggagacctttccatgagacattctgtctaatggacag

SEQ ID NO: 809836 - DNA, 643 bp, Homo sapiens
tctaattctcattagttgactttcagtaatcgatgttggccccakgcagatgttttaaatcactaacacaaacattgctgtctttggtattcttgcagtgttttcatttatgagaaaacctgcagaagaaactgcttgaaccaaagcaaagtagcaaggaaacaggttactatataatcagaaggccctaagaaaggtagcagcaggtcatataattacctccttgtggataaaatccctgtcctcaaactacgcaacctactacctgtacttcttccttaggaaccaattttttcttgccagtcttctacttggcagatgccctttaaagaaacctgtgaaattaagccaccttttttgatttttttttccaaattcaaaccaattagaattgtttcacagatgcttttaaaaagttattggccatatgatgttcatcaaaaccacaaatgcatttgcttaaaaccaaacttcaaataagttaggaaggggcgaaagtaattcaattacattagaagatgcaaaccagtagtctaagcctcagcccaccatatattgttggagcacatattttattgaaagcgtttaatcttcaaaattcaaacatcaaatctcataaaatctccggccttccttgatcaat

SEQ ID NO: 809837 - DNA, 630 bp, Homo sapiens
ctgctcccctgcaacacggagagcctgagctagcacaaaggtccccttccacacgctggccatcacacatctgtkggggagatgtcattgtggccacaaactccgtcgtctgtgatcgataacggatgactgatgtgagtggaaattttgaataaaggaacatgatcgtgccagagaagatatgagaaataaacatggcgaagcgggtcctcttctgcaggagcaggctcttgcctgtgccaggacctggcacataacatggtcacattaagcattgaataaacatttgttaaatggatggatggattatgattatcctgtgaatccacacaaatttggtagtaccacaggtatttcaaaattgatgtgccacaatctgaattcatcatctccgcaacattctcttttctctcatggtccattggttatccaaccaggacatagctgccagccttgactcctccctgtcccccactccgccccatcctccctgtcaccaaagcctggcaagtctgtacacgttaagtctcaaatgtcgttaaacccctgtctttcccccaccctggaggccaccctcttggtcaggagtgattgagatcacaagctcaggagtaggcatgcctgaacaag

SEQ ID NO: 809838 - DNA, 630 bp, Homo sapiens
ctgctcccctgcaacacggagagcctgagctagcacaaaggtccccttccacacgctggccatcacacatctgttggggagatgtcaytgtggccacaaactccgtcgtctgtgatcgataacggatgactgatgtgagtggaaattttgaataaaggaacatgatcgtgccagagaagatatgagaaataaacatggcgaagcgggtcctcttctgcaggagcaggctcttgcctgtgccaggacctggcacataacatggtcacattaagcattgaataaacatttgttaaatggatggatggattatgattatcctgtgaatccacacaaatttggtagtaccacaggtatttcaaaattgatgtgccacaatctgaattcatcatctccgcaacattctcttttctctcatggtccattggttatccaaccaggacatagctgccagccttgactcctccctgtcccccactccgccccatcctccctgtcaccaaagcctggcaagtctgtacacgttaagtctcaaatgtcgttaaacccctgtctttcccccaccctggaggccaccctcttggtcaggagtgattgagatcacaagctcaggagtaggcatgcctgaacaag

SEQ ID NO: 809839 - DNA, 583 bp, Homo sapiens
aaggagggaaaggaaaagtggagagtgagaagcaaggttgcagttctttccccagcaaaactctctcaacagaaagaaggaaatagggggctgggcgcggtggctcacgcctgtaatctcagcactttgggagaccaaggtgggaagatcacaaggtcaggagatggagaccatcctggctaacacggtgaaaccctgtctctactaaaaatacaaaaaattagccaggcatggtggcgggcacctgtagtcccagctactcgggaggctgaggcaggagaatggcgtgaacccaggaggcggagctggcagtaagctgagatcgcaccactgcactctagcctgggctcccatcgtatgtaacatagcagtgttactaatgttactaggtcatatccctaactactattgttactagtgttactaggtcatagcccctaccctgcccaggagcacatgcagcctctgcacccaggcttctgaccttgcaccrtccaccagtaatgtaggaaggccatagcggatgggagcccctgcactcctcactctccattaacactctttcatggatccctttagcatc

SEQ ID NO: 809840 - DNA, 649 bp, Homo sapiens
ttaaagctgctgtttcagaagatcccgtggattatcttggtataattcctggcatctgtgttctattatttagcagccatgagccctctaagcgagattgcattgccacactggatcataacacctgtatgagaccaagctttctaatttccctgaggataaaataccttcttctctagatatgagagataggagattacatcggagcctactgcatatacataatgctgtgcttctctatcttagaaagtttatttggattataaaattaaatgctgctggcagtgaaacaatgccaaaatgctctgagagaaagtaatggtgaaataactggaccagacctagggcttcactgtttggactcacgtgtctcacaggggacacacagcccttggcaggcactttccacatgcttagcagttttcaagacgactctgcaaagtgggtttattcttcctagagatccgcatgtcactttttaacagccaatgtttcatggaagacactttgtaagacactgggtcagtggaaaggtaatcattggtgttagmctgatcctaaccacaatttataaaagcctgatggatgataggcactgtgctgagcacattgcattcattatgattatatcttttagtcattacagtag

SEQ ID NO: 809841 - DNA, 480 bp, Homo sapiens
agaacatggatgacacaaacagcgagcagcagtttagagtcttcagagacttcgacttcctagatgtggagctggaggatggagaggtacggtgtattctctgtaaarataatccccgcacccttttccttgactaatgaaactattctttttacctgctaaataatgagtttttgtaacaagatctttaattggaaagttgtaaactttattttgaatcaacttattcaaagtacagcagctaaactttggcaaaagttaccacacccttcctgtctgagcccacggcaaaagctgccaagttatttctaaacggcaaagacctgagttttaatgaccacacaaagactgtatgtgtgtgtgtagtcccaagctggacttaaaaaaaaaatcacaaaaaacatttcagttcttagcctgttcactggtacctgggtaaaatatgctaagcatttaatcatttctaatgtgaagtttctc

SEQ ID NO: 809842 - DNA, 614 bp, Homo sapiens
agtgttcccttttctcagtgaccttgatagcatttgggatcaccactattttggataaaagtcatttcaactagggtaggatgatatctcattatggttttgatttgcatttctctgatgatgaataatgttaarcaccttttcatacaccttttagccatttgtgtgtcttcttttgagaaatacctattcagatattttgcctatttttaaatcagattattattttttttcccattgagttttttgagctccttatatattctggttattaatctcatattggatgaatagtttgcaattttcttccaatctgtgggttatcacttcactgtgtggattgtttcctttgtcatgcagaggctttttaacttgatgtgatcccatttgtccattttggcttcagttacctgttctcatggggtattactcaagaaactgttgcccagttcaatgtcctgaagagtttccccaatgttttcctttagttagcttgaggtctgagactaaaatctttgtaattcattttgatttttttttcatatggtgaaagaaaggggcctagcttcattcttttgcatatgaatatccagatttcccagcaccatttattg

SEQ ID NO: 809843 - DNA, 506 bp, Homo sapiens
acctgatacctgactgaagcagctttcaggaaacaaggagacagcaaacctgaggaaaataatcatagaaatgttagccacaatagtgtcgagtcactcaatcagtagcagccctggttttgcctgattttattattctattaaaaaaagcaccctgattttctaagaggcaacattaaggctttctgtttcttgcagttataactaaactgctgtttttttaatgaaaagatattgattgatgttttgtatgtatcccatagagtctacaactgacatgtgccgatagtagctattttttttaattgttcaaattttatagctgtaacatgcacatggatccattggctgtgtgactacaggagggcaggcagggatttggtgaccttcttgtacwgtgtgtggtctgcaccatgatgctgctactgctctcttggcttctaactatgtgatagtatcccagacagtcccagcagctacactcaaatttagggaagagttgatgg

SEQ ID NO: 809844 - DNA, 475 bp, Homo sapiens
aataaactaatgatgaaaacaagatacaaatattccattccactgcaatagaacaacccacaaacatacaacaattttaaaaaatccgcattgcttcaaaggtattattggagctagaaaacttaaggaaaatatatatctatgatcagagaacaataaaaagtatctgaaacctgagcaagttcaagggaaatatgcaatattgaagatgttatatttgttatggagacaaaggcaaacaatagcagtggaatttggagaataaactttgtgctctcaaagagtaagaaaacggtattaagtataagaaatgataacatagggtaacaataaagacattttgtcttactctttgaatctctttaaaatacaattgayttttaaagcaataataaaaacaataaaacaataaaacaatgaaaacaataaaaacaattgtggaatttgtaacacattagtaataaaatgcatgata

SEQ ID NO: 809845 - DNA, 581 bp, Homo sapiens
gagtaaataacatttttctagtgcatttcaaatgttgatgctttatataactcacyattaattaaaataaaagccctgagatatagacattaagttcccccattatagacaaggtaatgtaggtttgtagaagtggcaaaacaaggtttctagtacagacatatttgactataaagttttgactatttcactttatcaaaatattaacatccaggcagcagcttgccaaagacatcactgagtctatgggaattctgtgtcagtaagaaaactgaacctcctacaaaaaaaaatctctttcacctgtcaacatggagaggtaaccctagggagaagtaacttaaggacaacgaacctgaaaccttctgcaccatcagaaatatggttcccagaggacgtcacacacagagggtagaagccaggaataatgcaaagcctctgattttattcttgaggtagcaaagttggattgctcaggttcttgttattgattatctctttatgcctcaaattttaactcagtatttatcaatgccataccatagagtctattgtcataattatatttcaccagggatcag

SEQ ID NO: 809846 - DNA, 487 bp, Homo sapiens
aactgtcaaaacctatatttcatcaatataatagatacygtggaggacggtggatctccccagggcggagccccagaatcatcgtcctcctccagccgcccaagctcctccgccactcgtcagagtcctccttcagccgttcccagcccggggcctcccaggtgatgagggccaagtaccctccggcaggagccacacagcagtgacttccagaccctctggggcagcggactggctcgcactgcagattcttcctaatcctttggtgaaaactgcaacacaagaaggccgcaaataagcccaagggtcagaactctatggccttacacaaaatcatcatggtggacagtggtggtgtgggcaagtccgctctgactctatgtgtccggagttggttccttccggtgggttcctggtatctctgacttcaagaatgaagctgccaaccttcttggtgagtgttacagctcttaaaggtggcacaaac

SEQ ID NO: 809847 - DNA, 482 bp, Homo sapiens
ccaagctggtggcaggaggccctcacatccaccctgtccagcccaggggctgtgcctacccagggtgagaaggaccaggagcacacagtgtccagggccagtccatccctgtcacccccacccgccaggcccaccagaacactctgctgtcctatgtgggagaggatgtccccaagctaaacccaggccactcacctgtcttgagggaagatcagcatgtcccgacacccaccctgcaggctctggctcctgcagggaaaccagagggcatgagtgaggtcaatccagctgggtaggtccctgccggataaaggtacacaagcccagaccgtcctctaagcaggaccttgtcatgcctgatctgaaggtcatcccgtggtgctcctgactcataaccacacactcatgtgtaccttcttgcycccacatgtccaggactgtaggtgacactgggctgccacggttccttgtcagcatgtcta

SEQ ID NO: 809848 - DNA, 437 bp, Homo sapiens
aatgactcatagctagctaacattattatattatatatactatactgtattagtgggaaatagctaacatttattgagtgtttactgtgtggcacgcactgtgcttactgcctcccatgaaacattccacttayctctcataacaactctgtgaagtattcttgctcacctcagcttacagatggggaaactgaggcaggacactcaagtactttgtctgttgaaacactgtgaacaaacgacagagcttatatttgaactgaagccacttgtcttggagggctcctctgatcccacatcctgttcttttttttttttttttttgggagatggagttttgctcttgttgcccagtctggagtacagtggcgcaatctcggctcactgcaacctccctctcccaggttcaagcagttctcctgcctcagcctccggag

SEQ ID NO: 809849 - DNA, 482 bp, Homo sapiens
tatcgtacaaaactgactacattgatcattgataccgttttaaaatctcattatgaagcctggaaaattgtagatgcaatacaccattcatgtattaaaggcatattaaaagtcagaagaaagtaatccgtatatccagatgagaaaaatgcataggaagccgaagataagcatggtaaactgataattatacttcagttgattatttgccaatctaaatcaaaaggagctttggttttaacaatcattaagggaaagaagacaaatctttagtcttattcatgttgagaagtgagatgtattgctcccataaggcctggattctcaactggaataacctcaagaaaggggtagactggaaagaaagaaagaaacctttaaaatatctgctactcaggaaagagaaagtttttatatgaaatttggagagaagagtttaccctgagaattsttaatcatctggccctaactaaggttcaggg

SEQ ID NO: 809850 - DNA, 607 bp, Homo sapiens
ttattgtacataagccccttttgcaaaggcaaggcaacatgcttcataatggaatttggtcttgtcctatgtctctgaggatyaggttcagctgcaaggaacagaaaataaaacaaaaaaacaatggcttcaatcagaaaagagatatatttccctttcttataaaatatgtgtggaaatagtaggttcagggctggagtatgatagctctctaagattgtcagagatccaggtaccttccagccagccactctgccatccctaggatgtggttcttgtcttcatggttcctggctccagccatcacatctattccaggcagcaaatttgaggaatgcagacaaaggcctgactcctctcttttaagatgacttcctggaaacaccacaaaaaacgtgtccttctccagaattagttaaattggccactctttcccaaaagggaggccacaaaaatgtggtctttcagctgcacatgcccaggtaaaaatcagggtttgggtactaaaggatatagggagtgttttggttatctattgctgcctagtaaaccaccctaaaacttagtggcttaaaatgatagcaaccaaaaataaataatacagcaa

SEQ ID NO: 809851 - DNA, 616 bp, Homo sapiens
tacattttttagtctatatttacatcatccacaatcagttgtatataattctcaggtggaaaagtcatggtgacttagaggcatacttctgaaattttaytgtgttcagcaataaactgcagaactggttcaaatgcagattctgattcaggagatctggggctggggctggggctgcgtttccgcatttttaacaagcttaccagtgacaccaatgcctcaggtccagaggccacacttttgaatagcagagaggttgaacactgaacgaagaattcagggatgatgtggaattgagagttttatgaaatttacaggttataacataatagcaagaatagtagaatcctttttgaacacttactatttactagatgtcatcctagcagtttttcatgtattgataaaaaccacaaaaatctatatgagaaataatactattcttcctctttaataaaaatattttgctgacccttcccctctctgtctcaagcctgaaaaaaaattttttgccaaatatctagtatatagtagagcttattttattatttatttatatttatttatttttttatttattattttaccccagtatctaacttagaattcattttaa

SEQ ID NO: 809852 - DNA, 616 bp, Homo sapiens
gaggacaaagattcagttgatgtgttccagaagcagactggagtgtctactgagaacacactcacggctttaccccagaactctgttcctacagacattctcatgtggaaaactgcaatatggttccaccacgtctgattggtccagtatccccttctctattcttcactttctccttccttattcctttactgtacataaattatcaagtgtagctgcacaagcatattgatgattttgtttgcttgcttgtttgattgtaccgaatggccaccagtttgtgttgagtgattgccaatggacacaaggcgagggaaaacactgattctgggaaaagactccctttctccaccaggggatgctcacttacctcttatctctatgttccaggactttaacaacataacaaacataatgatccttaacgcttgttgcagggagaagaaaaaaccataataatctttgcatacattgttcgattggagaattttgtttttgaaatattccattgtgaaactaaggacaatttcwtaactttcttaaatgtagctgttacacatagggcaaatctgtcctcacacaggactaagtgacacttacaacaacagaatgaatc

SEQ ID NO: 809853 - DNA, 571 bp, Homo sapiens
gtatgtccttattagcagtgtgaaaaggagctaatacagtgtgagagtgtttttagaaaagattagcatttgaattgctakacctagtaaaaaatattttcttcagcattgtgggtgagcatcatccaatttatagacagcctagatagaacaaaaaggcagaggaagggcaagttgactctctgtgcttaagcagagacatccatcttctcctgcccttggacatgggtgctttttattttccatcctttggacttgtaccagatcttacactattgttccccagttcttaggcttttggatttcgagtaggatttacacccactccccattcttaggtctttggaattggaataggactcacaccattggctccctggttctcaggcctttgggcttcaactgtaactataccatggctttccataatctccagcttgcagacagtagattgcaggacttctcagactccataattacacaagcaaattctgcatactaaatctctttccatatttctaaatatatcccattgattctatttctccggaaagccccaactagtacaaaa

SEQ ID NO: 809854 - DNA, 606 bp, Homo sapiens
tagccttcaaaaagaaggaaattacatcatatgccacagcatgaatcaactctgaggatattatgcttagtgaaataagccagtcacaaaagaccaatattgcatgattccccttatgtgaagtccctagagtagtcaaagtcatagagacagatagtagaatgatggtttccaggcattgtggggagggagaaatggggattattgtttaatgggtatagagtttcagttctacaagatgaaaatgttctggagattggttgcaaacaatgtgaacagagttaacactactgaactatatacttataagtagttaagatgataaacttgatggtatgtgtattttaccacaaatgttaaaaaagcataaacataaatcacggcagttgtgctataatcctgatcaaatataaaggcataattttgtggtgatgcccaaagtattgctgacgtgtaaggatctttgttcacactgatgcaacctcsatttctaagcataacatgaaatggcagccagatgcacctggaatccacacatgaaatccactttgccctttttttctgtttctgcaagtcttttttccatattagcacattattagcaac

SEQ ID NO: 809855 - DNA, 580 bp, Homo sapiens
gtgttaaccaattatttgcaccagtgcttaggcagacatatagtcagaggctccagaatagctgggaaaatgagaaagggaagctcttgaaggccctgaaggcatttaatctcaagtgggggatcttrctggcgatttgtaggtcatgggaaccttgctcctttgcctggatggctgctaagtcctctgttctctgtgcccatttgtggcaataagtgtttcagttttcctcctacccctcacatcactacctcttcatgatacctgtgccagaatttctgctgtagttcaaatataaaggggctggtagggtgatcaacccattgtagtttgcctgagactatctcagttttagtactaactgtcacatggcacaggaacccctctcagtcctagacctgttagagacaattggtcaccctaagtgctggccaaggttggaggtcacaagggaaggctgtatgccaccaaaaggtttcccacagtgtcatttcagttgatgaattcaccccagtcccagcttagaaataagatgttcactctctacactgaaagtagatccatctcaaaggaagactca

SEQ ID NO: 809856 - DNA, 553 bp, Homo sapiens
gatttgtgaagctgaaacaaattccttcttaatcattttagacatttctgtaataacacatgtacatggtttctcagctcttttgattcattgtacattagaaacattcctttaaggttagtagctataatttcattttgtggtagaagaaaagaactgcagaggagtttgacagctattttaagacaatgggaaaaagtttgtatgtgtttttggatgatatgagcttaatgaaagctttttatgcttcctgctcttgcatgaggaggcaggtctaccaaaaatggtagatcacagattgacaacttttactacttgtcaaagagacttcaggagccacagggttggatggatagttgctgagggcagactgtcttctggagattctctgttaaattttgcactaagagttcctcggagtcaaaatagtattcagagtatcagggagtatgtaaactgattcttttyttcccatttcaacttcatattctgctttattgtagacatcattacagaagttaatggcctgcagaatagctaattatattagtac

SEQ ID NO: 809857 - DNA, 526 bp, Homo sapiens
tctataaaaacataccggtaacccatatagatgcataatcccagacactgaagtttgattaaggtgtgtttctgtctgggcttttagttcaaagacaaaagacaaaaggcaaataacaacacccccctccccctagaaaaggggaggggagaaagaaaacagaaaagaaaaagaagaaaaccttaaaggattaacacctagttatttacaacttacagcttttttaaaaaatagatgttttgctaacttttaacttggtttaatagatttaaagagaaatgctataaatatggaattttcaccttaattttaaacatttgctaggttttaataagattttaccatatggccattataaaagaatgctacagaaatgctatttgtagaaaaataacttgtgtgtttctrgagttctttttttactcatccttagttatttatgtagcctaattttgttttttagaactagaattagtttttaataattggggaaaatgaagaactaattatttgtagtttacttaga

SEQ ID NO: 809858 - DNA, 501 bp, Homo sapiens
ctcactttaacaaggagggcaccaagccattcatgagggatctgccccaatgatccaaacacttcctaccaggcccaacatacaaaactggagattacatttcaacatgagatttataggggacaaacatccaaactacatcattccatccttggccctcgaaatctcacatctttcttacaaagcaaaatgcaatcatgccttcccaacagtctccaaatgtcttaaatcattccagcattaacttaaagtccaaagtcttatttgaggtgcaaagtaagtttcttccatttatgagcctgtaaaataaaaaataagatatttacttccaagatacaataatgatataagaattggataaacattctgatatggtttggctgtttctccatccaaatctcatcttaaattgtrgctcccataattcccacatgttatgggagggacctggtaggagataattaaatcatgggggaagtttcccccatactgttcttgtgg

SEQ ID NO: 809859 - DNA, 599 bp, Homo sapiens
agccatgactaaaagcagccaatgtacagctcaggccattgcttcagagggtgcaagccccaagccttagcagcttacaagtggcattgatcctatggatgaacagaagtcaaaaattgaggtttgggaactttcgcctacatttcagaggatgtatggaaatgatatctaaacagaagtttgcaagggtagagtcctcatggaaaatctctgctaggtagtgcaagaggggaatgcaaggttggagctcccacacagtgtcccacaactggccaccatcctccagttcccagaatggtagatccacccacagcttgcacagtgcacctggaaaagtcacagacactaaatgtcaactgtgaaagcagctagggtcgggggctttaccctgcaaaaccacaggggcggagctgcccaacactatgggagcccaacacttgcatcagtgtgacctggatgtgagacatggagtcaaaggagatcattttggaamtttaaggtgtaataactgctgtagtgcatttcagaattttatggggctatagcccctttgttttggccattttctaccttttggaatgggtgtatttacccaatgc

SEQ ID NO: 809860 - DNA, 611 bp, Homo sapiens
ctcctaaagtcctgggattacaggtgtgagtcacaagtgtttagtattagtgacagtgcctcagtgttgcagatggtttccagagttcccagaatttttgttttggggatggggtggggagttgcatgggagaaagaaaagtgtctcaactcagaatcttggggagattcaggagataattggataaccagacaatccccacagatatctttagtgattttttaaaaattactttattttcttaatttttttactctttacaactatgttggtattctgtttctagactgtgatttaggttaaacacaaagtttatttagtatttgtttacccaattatatcatctttacacataaaataattttataaaaacattaaaattactaccatttgtaacctgagtatcatgattttatctatcctatgtacaggattcaaaacataaaaagtttcccaaaaaaactttctgtcaaacagtaggctggttagcatcaatactaccatagaaatccagtctggcctgatcttttatcctcagatctctagttgtatctgaaatggaatagataccccaaaagtagaaaataytccttattagatgcattgtgtga

SEQ ID NO: 809861 - DNA, 526 bp, Homo sapiens
ttgatttgaaaggtcatgaaaatgtgctgagagattcctctttccacaggtggttttggcagcagagtcttgtcttaaagattcacgttattcaggtatktttgttaacctgccataataagtagtaatgtagaatttcaagaaaataccgaagcatagacatttcccaacggagaaactctaacaacttcctgcagtaaaccacataagatattaacaatagaataacccaaaatacatcttcctatctaaaactgatattactatgaaaatgagaagttgaaagtgggggaacttaagaattagtgataaataaaatcaatatgggcaattaactatcctctatatagaaaacaattgcaagtataaaactaatacttgcttatatggctgtgaataaaaccagtgagacgtggctacagagagtaggctttcaccattacactcttctggtctgactccaccaaaaagcttttagaaaatagattactggcagtactcgggatccactgaatcagaattccgt

SEQ ID NO: 809862 - DNA, 526 bp, Homo sapiens
ttgatttgaaaggtcatgaaaatgtgctgagagattcctctttccacaggtggttttggcagcagagtcttgtcttaaagattcacgttattcaggtatttttgttaacctgccataataagtagtaatgtagaatttcaagaaaataccgaagcatagacatttcccaacggagaaactctaacaacttcctgcagtaaaccacataagatattaacaatagaataacccaaaatacatcttcctatctaaaactgatattactatgaaaatgagaagttgaaagtgggggaacttaagaattagtgataaataaaatcaatatgggcaattaactatcctctatatagaaaacaattgcaagtataaaactaatacttgcttatatggctgtgaataaaaccagtgagaygtggctacagagagtaggctttcaccattacactcttctggtctgactccaccaaaaagcttttagaaaatagattactggcagtactcgggatccactgaatcagaattccgt

SEQ ID NO: 809863 - DNA, 629 bp, Homo sapiens
gtatttagccaagagaaacaaaagcatatatcctcacaaagagctgtacttgaactttcataaaagctttattcttcacggggaaaactggaaacaatccaaatgtccatcaactaatgaatgaatacacaaattgtgatatgcaaaaagggaggtgggcaatgaatgaactaccaatagacacaacacaggtaaattttaaaaacttcgtgctaagtgggagaaagaacacaaaatctgcaaaagatataactccattcatattaccttttttaaattaaaaaaatctactgatagaaagcaaatcagtgatttctaagaaatgggattcaggacatgacactgcagagagacaggagagaacacttgaggtaataaacatgttctaaatcataactgcagtggtggttacaccactgcatatatttgttaaaaaaatgaaacctcaaattgtacacttgaaattgatgggttttaccgtgtctatattttacctcaattaagccgacgaagaaaaaaataatgggctgkaaagaaccttaatgtccactcctcagcctcaaaaaagtcatgaatgttaatatccaagcctcaaatatgactgtaataaactttcaaaagatttacct

SEQ ID NO: 809864 - DNA, 550 bp, Homo sapiens
cttttttataagagcgttggtccattcatgaggactgagccctcatgacttaatcacttctcaaaaaacgctacygcttaataccaccacagcggggattaagtttaaatataatgtttggaggccaggtgcagtggctcatgcctgtaatcccagcactttgggagggtgaggcgggcagatcgcttgaggtcatcagttcaagaccagcctggccaacatggagaaactctatctctacaaaatacaaaaattaactgggcgtggtggtgcgtgcacacctatggtcccagctactcgggaggttgaggcatggcttaaagccaggaggttgcagtgagctgagatcgcgccactgcactccagcctgggcaacagactgagactctgtctcaaaaaaaaaaaaaaaaaacttggagaaggcaaattcaaagcacgacagtagagaaggtccatcctcgcccaacgtgagtgggcactgtccaatcagcagtgggcccagataaggaaaaaaggtagaagaaaggcgaactctccctctctgcctctc

SEQ ID NO: 809865 - DNA, 617 bp, Homo sapiens
gacaggacaatagatggttcctcccaggtgaatgagggaaaaagccacaatgggtattcattaagtaatggggaaataggagtagagttaggaaaattgcctaggagttggggagttgtttgcactgagccaagccttaagatactgacagaatcaggaaggagtcattgtgaaaagtgaagtagagtttacctcctcaaaagactttcctcccccatctaatcaggaataaatagtaacttctcttagtagcaaaatgtattcaaagaccagcgctaacattcttaaatatctgctagacgtaataaagaaatcaatgtactttatgtccttagctcccacaatttagtctaaatgtttgctctggcatgcttatactggtccaggcaagcattaggtcctatcctgttcctcttccttgtttgtgtctcacatgtccgtgtgaaaagaccaccaaacaggctttgtgtgagcaacaaggctgtgtatttcacctggktgcaggcgggctgagtccgaaaagagagtcagcaaagggtggtggattatcattagttcctacaggttttggggtaggcggttgggttaggagcaatgttttgccagcagggggtgga

SEQ ID NO: 809866 - DNA, 546 bp, Homo sapiens
gcaagtacagttttatttaccctttctaaaatggatgctttttaaaaattgcctaattaccctcactaaaactttctgyatgttaaatagaagtgacaagagtagatatccttgtctgtttctgatatttgggaaaaagatttcattcttttttcatgaagtatgatgttaatcggaagttttatcagagtgaggaagtcccttactcttcctagtttgagtgttttttgtgtgtgtttttttttaacataaatagttgttgaattttgccaagtgctctttctgcatcaattgaaatgaccatgtaaagaagttttcttttattttattagtttggcctattacatactgattttcattttgtgatcccccttgcattcctgagataaatctcacttgatcatgtcatacaatcttttttatatattgctggattggtttgctagtattttgttgagtatttctgcaattatattaataagggatatggtctgcagttttatttccttgtgatgctttgtgtggttttggtatttggtataatgc

SEQ ID NO: 809867 - DNA, 582 bp, Homo sapiens
atttactatggcatgcatatattcccatcgcaatattttattcccaaataagtrttttcttttagaaagcctctgtttgttttttaggttggcaatcctttcaagtgcatatatcttaccaagacttccaatagattttccatttcctgttcatccattccaataataacagtatcacccatatagctgaccagtgtaatgtgctgcaaaataccaaggtgacccatatcccttcagactttattctgattatgggaggaaaattagtttggccttgggacaagactataaatatatactgttttctatcccatgcaaatttgattctgtactgtttctggttgtccttcctaagagtgatggaaaaaaaaatgtattaattaagtcagtggtcacatgctatgtaccagaagccatatcaatctgctctagcaaagatacagtatctaccaccactgctgccatcaagaggcttctagttgatggagtctgtgatatcctactgtcgttcaacagagtctgtgcagcattgtagcaggcccgagaatggtgggttaaacagagacatgatggggatcatca

SEQ ID NO: 809868 - DNA, 577 bp, Homo sapiens
agttggtacaatattggcaaggttatgttcttacaatcaaaacaacctgatatcagccctgagcttggcttatttttgttgttttgcctccagttttaaagaaaartcaagggaaaaaagaagtcatgaaagtctaaattagtctcatgagagccacacatagcttattttttactctattctgtctctactacttggggactaatcttggttccagaggagcctacagaaagtattcataaagtctttctttctttcctttccttttttctttctttcttttttctttctcttctttctttcctctccttccttccttcctttttctctctctctttcctgaattcccagatataaacagaatttaaaagtcaacgtaagatgataatggtcttttgaggatatttatttatggttgataacaacagcaacttttgccagtggctgtgaatttggggaagagtgcagctgaaaagctgagcaaaaagaagagtgtttatacatgtgggtgaatgcagatgtgtggtgcagggagaagacaaggagggagaaagtgatataaaaatcttcttgctca

SEQ ID NO: 809869 - DNA, 523 bp, Homo sapiens
gcattgttctaagtcaatgtggatctggaaacattttctgcctccagattcatctctgatgaagtctgcatcataggttagggatgactcagatattccaactgcttcatcgactgagttcaccaacagccagtccatctcctgattcaatgactgttttctaattttttgctaaacatataaagcattttcatgccaaaagtacttgaggctcagattcctgagataataaaatcttaactctaaaagagatcaccttttatagatatgatacaatcccatttttacagccaatgaaactaagggcaaaggtagttactgaggtagcaatttggacataagaaagaggtaaaatgaacctcagatttggacaggagactcaagtcctgttctyatcttggttgctggcaacggtcaggcacttaccctctcactgcctcaattgtaaaataaggatgatgatatctgacccattcatcaacagagatgtggagagcatgagaaaggtaatcaaagtaaagaa

SEQ ID NO: 809870 - DNA, 608 bp, Homo sapiens
cccattgatctgttgcctacaagaaacacactttgcctctaaagacacacacagactgaaaataaagggatggaaaaaagatattccctgccaatggaagctaataaagatcaggagtcattatacttatatgagacaaaatagatttcaagacaaaaactataagaagagacaaaaggtcactatataataaacgggatcaattcagtaagaggatataatattttaaatatacatttatgcaacactagagcacccagatatatgaaggaagtatcataagaactaaacagttaggccccaatacaataatagctagaaacttcaacactctacttttagcatctgacaaatcttctagatagaaaatcaaaaaagaaagatcagatttaatctgcactatagactaaatggatctaatacatatttacagaacatttcatccaagaacttaagaatacatattctttttttcagcacttggatcattctcarggatagatcatattttagttcataaaataagtcttaaaacattcaaaaataaaataatatcaagcatcttttctgaccacagtaaaataaaattagcaattaataaaaagaga

SEQ ID NO: 809871 - DNA, 648 bp, Homo sapiens
ttattttatattttaaagtaactaaaagagtggaattggaatgttcctaacatgaagaaataataaatgcttgaggcttgaggtgatgaatacctcaattacccttatttgatcgttaaacattatatggctgtgtcaaaacatcacatgtagcccatatatatatatatatgtgtgtgtgtgtgtgtgtgtgtgtgtgtgtgtgtgtgtgtgtatatatatatatatataactattacatgccagaataattaaaaagtaaaattaaaaaaaaatgaaacataagttccagaacagtggaagatgatcaggataagttctctagtctctgatttttattattctaataatcaatctgaggccccttcaattgcagtcataggcccgggaaaatgaaaaagggagtaagagttgatatgcaattgggatgtaacaaaacaagttcatttgtttgcatgttggttaaaatccttgtaagcatttctcaaccccagacatttctacggatttatcttaaagtgagtttgctgtatactttttacctcagtatcttgaaccaaaaaayattcttaaaatgtcccggttgggactgacaaactcattttccattcaaaaggtgtgaagtttttatgtatgcacagacgtatt

SEQ ID NO: 809872 - DNA, 632 bp, Homo sapiens
actccagagtcaattcatcctactagagaattactaagtgcagaacatcttattagtatatctcgtttaatatgcatacaaaattacatattttctgcctctttggaaataagctatcttccacccagaatttatatggggtgagcatgggacccagacctgactagtcaatagtacaatcccccagccacaaaggtaagttcagagttgggcatgacacaaggcctttcagaatcctttctggggcctttgcaaccagggctatcaagaaatctcatctatctgctaattgtctacctctgtcctaaccgtagactggaaggacttgaagcaaccaatcaccatcttttccagaaaccttgaaaatgtttcttcaaaagctgaaattattttttaaaaattcactgatatataaacaagatgaaaattatgattgagaatatgtgaaaattttatagcatttatgcagaggaattgtgatacatgttagcagttttctccactcacaatgcagttttaaaactactaatacaatattcggtccaaagcaagcatcargaaatagaaaatcaccatatgcagatttttgatgaacatataacacatttagtttccattatattgtgatgtga

SEQ ID NO: 809873 - DNA, 602 bp, Homo sapiens
ggagagacaagctcctgacggtccacacctgttaacattagaagtgttcattgaatacaggccccccagggaagaagctkcttcttgggcatgcgtgttaagagacataatgaccaagtatgacgttccaggggcacgcgccactggaaaaaggaaaaaaaagcctcagatgggcatacctgtaactccctaaatacacacgtgctgaattccaaagggtaaagaaagcactgtccatgcgggaagcccaccctaagggaagaatcatgggaaagaggcggcctataaagtcttaggatcaaggttaaaggctctctttttctttgcccttttttgctatcttttttctctctttgatcttcagggcgcccacttggacctcttataagagctcttttctttctttcctgttctgaagtattttttaataaacttccactcctgctctgaaacttgcctctgtctgaaacttgcctcagtctctttttctgcagaatgttcctcagttgaattatttcttcttgaggaggcaagaactgaagttgctacagactcatacaaataggccaccagtaactctgggtaacttggatctcttccac

SEQ ID NO: 809874 - DNA, 612 bp, Homo sapiens
gcccagccactggtgtctcccaccctagccttccactggtggcctgaggattgccccacccctgcctaccatggctagtacctatacatatcatcagggaagctgagggcaagcctgcctggcacagcttcaccccttccaactgtgacaaagcacacagtctagggggccacactcactcagcccagtacaccattgctggcactggaacactcctcccatgggcctacccacccagccactaccaccacagctggggcctacctgcatacaccacatgcaggcctggagactcagccactcagcccattgcagccactgccaacaccagcctgcaccactcaggaaccacagggttgtcttgccactggcactgccactgcccatgccacataggatgcccaagggccccaaaacctgcccacttcccagcccacacctgccatactgggatctgagtaagccacctggagtcccaagaatcagcccaccaggaccctcaaacactmgtgctacctaagccattctggggcccacagacaggcaagctcagtccactggagccaccactaaggtctgaagcctggtctacctggcatccaaatatccagc

SEQ ID NO: 809875 - DNA, 677 bp, Homo sapiens
aatttgcaaatattttctcccattctgtaagtggtgtatttactctgttgttagtttcttttgctgtaaagaagctattgagattaattaggtcccatttgtcaatttttatttggttgcaactgcttttgttttcttcatcataaaatctttgccaggtcctatgtcaggatggtacttcctaggttatattccagggtttttatactttcaggttttgtatttaagtctttaatccatcttcagatgattttgaatatggtgtaaagaacaggtccagattcaacattctgcatggggctagtcagttattgcaacagggagttgcaatatttattaaacaggcagtcctttcctcattgcttatttttgtcaactttgtcagggatcagatggttgtgaaacaggagagttctgttatcccttttgcagggtgttcaacaggggtgtggctcacttcttcggtgccccactgctcaaacccctaggggaaccgtgcagacaagcaggtgaagaggttgtggggaggatttttgggcttcgaccccatggcagtatctaggggtcagtgtttacaaagcctgaaacccaaataggcatgtgttacaytgtgctctttcagctttgctagctacaggcagcttgtgttaatcagctcaatcagactctacaccttg

SEQ ID NO: 809876 - DNA, 474 bp, Homo sapiens
agaactgaaatcagtcatcaaaagacatgggcaaaagacatacatcaaaacttactttgtgaagcaaaagcagacttaaggatgtgacaaaccaggagatacccatctgaggtgaacaaaggcaacatttagaagatatagagaaaggtaagatttattaagagaatgagctcaaaagtcatcatgggcacataattttttcagacaaatttctagagattaatcccatgtctgcttttaggttcttggagggaagaatagtatgaggcactctctgtactaccagattctggaacagaagtgactggctttccttcccatttaaaaacttaatgagacttttaaggcctattattgtacttttcttatttrtatgttcatatcaacaggccccaaatcattttagtcctcccagcatgctggacatggaaagttctttttatcaaggtcattaatgaattcacactaacaaag

SEQ ID NO: 809877 - DNA, 598 bp, Homo sapiens
caatacagtgtgagaagtgctatcacagaaggacagagaaagtgagattttaatacagaaaccagtcacctgactcttccagcaatatcaagaaagcctttgcagaaaaggtgrtgtgcaggctacttcttgaaggatgactaggagttttccaggccaaggaatcagtacagtcaaagtcagagagacatgaataaggaaggttgcaagatcatggtgcctaaagcaagtgggaagtggtagcaaggagccataggttactccagggccctttgatcatgtcccaggcttatgagaatataaaattgagtcttatttagtggaggtgggacaggagtgcaggggagataaattgtgtggctcatcagaaacactgaccaatcgagaaattcatccagacatatctaccaacacttttgattgtaaagtgtcatcattcctataatgaaagggcatttgtcaggctcagctgggtccagggcctcaaaaatggcaagaagacctggtctttctccttccatctctgggctgtcccggccagctctgaggagtaagctggggctgaactgcactcagcgtcgtgtgagttacatgacct

SEQ ID NO: 809878 - DNA, 514 bp, Homo sapiens
atgtcttaaagcccataaaacttcagaaaaccctcattaacctggaatacctttgaacatggtggatcagaattgaaaawatgctacaggtgtgaagaacttagacttcagaaacttttcctgggattagttttgaaataagattttcttttcttaaagtatcttctcacaggtatgaaacacctagcgatgctattgaggtgataagtcctgccagctcacctgcgccaccccaggagaaactgcagacctatcagccagaggttgttaaggcaaatcaagcggaaagtatgtcttcttaagctaccatttacatgttttcatatttgcatttatcatttgcttctaattatctgtctagaccatagtaagaattaacttgttttgtttgttttagggtaatcttacatgagccttctttagaaacagcaatcgattcttttttattttttaatgatacagaaaattgtttatattaattttgtttgcttacttctgcatttatattttgttc

SEQ ID NO: 809879 - DNA, 514 bp, Homo sapiens
atgtcttaaagcccataaaacttcagaaaaccctcattaacctggaatacctttgaacatggtggatcagaattgaaaaaatgctacaggtgtgaagaacttagacttcagaaacttttccygggattagttttgaaataagattttcttttcttaaagtatcttctcacaggtatgaaacacctagcgatgctattgaggtgataagtcctgccagctcacctgcgccaccccaggagaaactgcagacctatcagccagaggttgttaaggcaaatcaagcggaaagtatgtcttcttaagctaccatttacatgttttcatatttgcatttatcatttgcttctaattatctgtctagaccatagtaagaattaacttgttttgtttgttttagggtaatcttacatgagccttctttagaaacagcaatcgattcttttttattttttaatgatacagaaaattgtttatattaattttgtttgcttacttctgcatttatattttgttc

SEQ ID NO: 809880 - DNA, 623 bp, Homo sapiens
ctgtattatgttgttcctgctgataaccctgaggctcatcaaaaacaagaaatacaccatctattttaggaagatgcccagtaggagtttttttaatttggctactgaaatggaatttcagtatggaagaggtagacttccatacctacttccccactgatgccatgctttaagccccctgactctagtacttggagatctgaattctgtacttgcttgtttattattcctcactccattaagggactcttcataataagttataaatccctttcatggagataattcatagctcaacctcccttttcttccaaaacatattactcaccctacccatgtaccccagccttgggacacattcagttaaaattgttatgtcttatattggcagtagcaagcattcatagacaaagcaatgcactccttacatctaagaacttactcggatggaggggagacccaaagagatgatttcaattcaatgtgtttaatgttctaacacagagctttacacgttatacttaaattctataatatgccaatggtttaagtgtttttaatgtggtcccttgcccttccctcacctcytgccattttaactgtggggcaagggaggcaaggat

SEQ ID NO: 809881 - DNA, 645 bp, Homo sapiens
tataaggccttatattagttgtttattactgtgtaacaaattaccacaaatttccaggcttaaaatgacacacctctcaacctctgggtcaggaatacaggcacagcttagctgggtcctctacttcaggatctctcaaaaagctgcagccaacatgtcagctggggctgggatttcatctgaaggctggactagggcaggatctgctcactctagtgttggtggaatttagttcctgagggtttttcgactggggtctcagtttcttgcaggctgttgactgcaggtggtcctcagctccttgtcacatgggtttctccaccatgacactccggcaaagctagcaagggtgagtctgctactgagtaacctaactgcagaagtgatacgccttctttgctgtattctgtcggttagaagccagctactatgtctggcccacactcaaggggagaggattatacaagagaatgaatatcagggggtgggataatcggaggccaaggtaaggttggcagccacrgtctttcaatccccttcctgatcccatgtagtaggtataatctgctctcagtatctgtgggttccacatccacagatcaaaaatattcagaaaaaaataaatcataaagagtaacaacacaa

SEQ ID NO: 809882 - DNA, 623 bp, Homo sapiens
ctttttcttgctgatttgtttgagttccttgtagcttcygtatattagttccttgttggatgtatagtttgcaaaaattttctccccctctgtggatttctgtttactctgctgattatttcttttgctgtgtagaagctttttagtttaattaagtctcatctatttatctttgtttttgttgcatttacttttgggttcttggtcatgaactctttgcctaagtcagtgtctagaagagtttttccaatgctaccttctagaatttttatggtttcaggtcttagatttaagtctttgatccaccttgagttgatttttttataaggtgacagatgaggatccagtttcatttgtctacatgtggcttgctgatgatcccaggaccatttgttgaatagggtgtcccttcctcaccttatgtttttgtttgctttgttgaagataatttgctgtaagtatttggctttatttctgggttctctcttctgttccattggtttatgtgcctatttttataccagtaccatgctgtgttggtgactatagctttatagtatagtttgaagtcaggtaatgtgatgccttcagatttttttttttgcttagttttgctgtagcta

SEQ ID NO: 809883 - DNA, 605 bp, Homo sapiens
ttcttcttgatttaatttgagtagtttgtgtctttctagaaatttttccatttaagttatctaatcttttggcgtatgtggtttctggtattcscttatgatcctttttatttctgtatgattggtactcatgtcctcctctttcatttctgatttttgtaactcgaattttttctttcttttttcttggtcagtctagctaaaggtttgtcaattcattatcttttcaaagaaccaacttttagttttgttgattttatctgtttttttttttctattctctatttctgctgcagtttttattatttccttcctctggcttgctgtggatgaagtttggttttaattttctaatttctgaaggtggaaagttaggttatttatttgagagctttcttttttaaaaatataaatgtttatagttataaattttcctctaagtactaatttagtggtctctcataagtttggtatgttgtgttttcacttttattaatctcagatcatttctactttcccctgtaatttattatttaatccagtggttattgaagagtgtgttgtttaatttccacatatgtgtggatttcctgaattttctgttg

SEQ ID NO: 809884 - DNA, 548 bp, Homo sapiens
ctctcataagtttggtatgttgtgttttcacttttattaatctcagatcatttctactttcccctgtaatttattatttaatccagtggttattgaagagtgtgttgtttaatttccacatatgtgtggatttcctgaattttctgttgttattgtgatggttaactctgtgtgtcaatttgactggggcaatgggtatacagattatacattatttctcagtgtgtccgtgagggtgtctctggatgagattagcatttgaatcagtggactcaataaagtagattgtgctccctagtgtaggtgggcatcatcagtctactgatggtctgaatagaacaaaaagcagaggaaggagggattcacttttttgcttcctgcttgtttacttgagctggcacatcagtttctcctgctcttggactgggatatacatcactggctcccttgktttccaggcctttggactcaatctggaactatacctccagctttcctgggtctccagcttgcagatggcagattatgggacttctcagcctccataa

SEQ ID NO: 809885 - DNA, 566 bp, Homo sapiens
aaaagagaatttgttgaagaaaaatagcagagagcttatttagagagagacagtacactctggaaaggtgagacagagctggctgctgaaggggagtgagccagcagcagcttgagagttctgcactgggtttttgagatgatgtccgacactttcttgaagttcccacctctgtcgtgagcctctgccttttcctttgtccaggttcctgcttctgccttaagtccccttctcttccctgcctagttcccatgccaggcttgtggaaccctcccttactattggctgatgtgcatgcatggaccctgtgttggatatgaatcctgcctaacagccgcattgccacccaagggaggctgcttaataataggtctagtgattgaagcacattctttcctatatccgtaacatttctatattgatatattcccaaattattttcatcacagaactatcacaaataaygcctagagtatttcttttagaaaagactatctcaataaagtagaaaggttaagaatttaaaattacgtgctatggaatgagaactttaccctctttattac

SEQ ID NO: 809886 - DNA, 539 bp, Homo sapiens
aaaaactataagttctgtaaagacaaagatcacttcagacttgtttactactttgcttctaatgctaagtacrgagaagagtacatagcagcccctctttaaaattatgaaaagtatgttatctggctgaaagtcttcagaatcgaatttccatggttctcagatgcttagaggctacaaacacaatgacctccatgcctttctctcagccacctcacaagttcagacactctgtaggttttaacggaactgtgctattgaattgtagtagcttctaactgttattctagcatttttccacatagttcctcttgtttagccacctattctgttgctaaaataagctctggaagtgcagctctgccttccctagttttagaacttccagtggctctccattacccactgaacaattgaagctatataataaaagtgtaagtttcaaactaattttcagtctcagttaaaattagcaaggaaattgagtcagacagattatagctgatgagaagccatgaaagaactattctgattaattg

SEQ ID NO: 809887 - DNA, 643 bp, Homo sapiens
actgccatgtgccaggtgcttttctaagacgcattacatatattaatgtactttgtccccacaacaaccctgtgaaaggaaaaycattattatcataccacttctacagacaaggaaactgaggcacagagaagtgaaggtcacacagctagtaaatagcagaaccagctaaagacgcagttagttgtgcccagagcccactttcttgaagacttcacacactgcctttcaataagcaaagctagggacctacaattcttggcttagcccatgtattaataacacatgcctgtgtctgggtctcttagttacacaaggaagcaaggaccccagggtcgcatggtggtcctccctaaactcccagcttctgaacatcaccccatcaccacacacaggaggaaacaagctctttttcaggccgaggtgggtataaggtatggtttatgaaaaggtcctatttggtcctttctgtttgacccactattaagcttccataaagcttcctagtaaaagaaaagcttccataatgagaaattccccatgagggcaaacctgtcattctctcaggccagatcgtcatggaaacttttatgaagaggagcccaacactcaggtcttcaggcagcaaaagactccatgcagt

SEQ ID NO: 809888 - DNA, 501 bp, Homo sapiens
agctaggtacaagttgctttagaacattcagactccttcatagcccaggtgattaccatatttttttaaagtaagaatatgtgcatatagttcatcctgtaataatagtattaatagtagtagtggtggtgatgacgatggtggtagtagtagcagcagcaacagcagctaatagctgttgagtgcttactatatgatcagtaccattttaaatatttttaggtattagctcatctaatcctcacaagcatgcaaggaagcaggctcagttattatccctcttttacaaatgagcaaactgaaactacatgcctattaagtaaatattttcttttccaatgatttctgttcttattttgttgctataattcagctcaacatgttttctagtatttgttgtgatttcttctttgacccaaaatttatttagaagtgtatttcttaatgtataaacttctgaggatttctrgttcttttttctattactgaattctagttgaa

SEQ ID NO: 809889 - DNA, 407 bp, Homo sapiens
tctgcatttctaaccagcttgcaggtgaggctgatgtttctggtccacagaccacactttgagtagcaacaggccagaagacctccctcttcatccaggccacacgctgtcggagggcaagctttgtcagcattgctggattagtgtcccagcgctgcagtagaaaagcaccaccaactgggggctgaaaacaacagacacttattgtcttgtagttctggggaccataagtccaacatcaagacactggcagggctgtactccttctgaagaytctagggaaggatccttcttgtctctcccagtttctcatggttgctggcaatctttggtgctccttgccttgtagctacatcatttccaccgtgcctctgtttttacacagctttcctcagtggctatctctg

SEQ ID NO: 809890 - DNA, 604 bp, Homo sapiens
aagtccttgtctcctctatatgttgctcatgtctacttatggttkgtggtctatatatttactctcttttgggtgacttctgataaatagaagttctttattttactataaatgaattcatccaaatattcctttatgttttatatcttatttaagaaattctccatacccaaagtcataaagcttttctctatttgctaaaggtttctggtcctttcaaatttaagtctttaatacttaatgtgtgtgtgcacgcacgctcatgcttgtgtgtgtatgcacatgtgtatgtggtagatttatgctgtctcgtcctcattttgtcactgtggaagattaaccactgcttcaattttgtttatatttatgggactatttaaaatttttaaaacattaaaaaaacttgtatttgagtattttgttgggttgtatttatgcaagaatttgtcaatttcatctaatctatttcaaacgtttgcataaaactgttcatgaaatgctcttatttcttttatctctgcagcacgtttaaggccttcttttttcctaatattttaaaatttgtgctttcttatttgtttcctctctttatttatattgtcag

SEQ ID NO: 809891 - DNA, 321 bp, Homo sapiens
aaaatttcagactctttaagagcttttcagtgatacccattgctttacttcttgcttatattcaaggtcarttagaaactcagcattttttaaccctggcactgcattgtattcatcactagtgaaagggtctagtccaccagacatgatttagaatttctgatattgacactggtagtcaatgtgatattttaataagccacagttgtcatattgagtggttacaattctggtgaaaggcaaacttacttggcatttcttagttcttgaacagcccttattgagaataaatttccaattttcaacatgtttatggaatat

SEQ ID NO: 809892 - DNA, 653 bp, Homo sapiens
tggtattgggtatgggagaaatgagggaattctcttgaggcagttatagcagagccttgaaagagtcttgaacaagaaaatattgcttagagagaatggagacttyactattccttagtggtctgaatcctctaatgctgtactgtccaatatggtagccactagccacatgtacataattatatttaatttaaaatgtagtgacttaaataaaattaaaaatgcagttcgtcagttgaactagtgctcaatagctacacatgccagtagttatcatcttggacactgcagatgtggaacatttccattaacataaaaagttatatcagggacaactcttttgacatttcttgtctaattaagaataaaacaggtaatgctagttttagatcctcatgctgaggattgaattaagagttaggggtaatttcctctgtgatccaaaatacccatcgcaatacatcatggatcaatttaaacaaattttagtaagagactggggataaggaatatgattacgtttaagagaccatttgtgaattagatgtaggttacatattgataaaattaaagaagattgtaccaagctggaataaagagcctgtctaacaaagttaaatctaacaagataaatgtaatgcttatattgttgg

SEQ ID NO: 809893 - DNA, 585 bp, Homo sapiens
ccaaattctggtgaggtgacttcttgattatttatgaagctggaaatgtttaagtgtttcatttattcttaaaattctgtcttactattagatgtatattgaagattacatttatcttggcacatatatttgacttacctttgggccacatcttttctaaatttacttgaaagtggagttggaaatatttcttaagtatctgcagctattttattcaggaatattgaaatgtaagggaatattagaacacatttaaattttccaatgatgtcatgttatatgaacttaatgatttattaatttgtcatcaagttggaagttaattaaaaatcaaagttctttagcaacatgaatcactgaagctttttccctgaattttttttcttggtgactggcattgttgaaggagttcattcctgattactggcctttaaaaataccaactaaacttgcttacaaattgcaagcataatgacgtaagatattstcttgccgttgaataagcataatattctcctcttaaaattttctcacttagctttaccagaacccaactttccagactagggagagttggtacttcat

SEQ ID NO: 809894 - DNA, 617 bp, Homo sapiens
ggagaatctccaatctgaaaatttagagataggctccttttgtatgttttgtgtttttgtaacaccctatatgaagactgtgtgcaaaataaattatgttctttcacacatgtgtgctcatttgcgcttcatacaaactgtgaaataaatagaaaacatgcccttatggccattttaagtggaaactgaggctcagcaaagtgagtgacttgcctaagatcactggctggtgtgttctggaacgcacatgaatcaggcttcctgatgttcaagcatacagaactcacttgttccttcacagtggagatcgctgctcaacctttagctacatccactcccgattcatccacttgtctggagaacaggaccataaccatagctgcattcaccaagccactgaggaacctcgagagaaaaaaccctgcaggagaagaggaagccagatgggtcctgcatggctctgtggtcagaggcaggcgagctcctccacatggcctggcagtggacagcaggtttgtccccaggccagcatctcagtggactgattgtttagscaaaccctctcagagatgtgagcacacaaagaagggatcctggtgccccatgcagggtgtaag

SEQ ID NO: 809895 - DNA, 595 bp, Homo sapiens
tgttattcgggggtagggccttgctgagacttgggtgaggggcaggcctcccttggaaggagggtactccagggcctagggtccatgtccatgcctctcaaagaggcctgcttcaggggtggccaagacccrgggccatggacggcaccctcacccctgcccccattggcacggcaggtgatggatgaggcagaccggctgctggaacagggctgcactgacttcaccgtggacctggaggccatcctggcggctgtgccggcccgcaggcagacactgctgttcagcgccacgctgaccgacacactccgggagctgcagggtctggccaccaaccagcccttcttctgggaagcacaggccccgtgagtccacagcccagacagcgtggggagggcagccccatcctacagacagggacactgaggcgtggcggtctatctgtccatccccagggtgagcaccgtggagcagctggaccagcgctacctgctggtgcctgagaaggtcaaggacgcctacctggtccacctgatccagcgcttccaggatgagcacgaggactggtccattatcatcttcaccaacacgtgca

SEQ ID NO: 809896 - DNA, 619 bp, Homo sapiens
atatcaacacattttgaacactggaaaacagccgaatgactgaatgacttagcaggcaagagaaagctgaaatttaaatctacattgatgatagtcaacaagmactttcagatttatgcatgaaaaagcctaggatttggagcaatctaaaatgtcaatgaaagtaaggtttaaaaacaggtggcttggttgcaaattagtataagaaacaattagcctcctccctcacccaggtttacttctggaaaggttgaacaacagagactctgtattcttcaacaccaggcacagctgaggacgtattaaagatggaggttaatattatatacggggattttacatactgaatgtgagaactccaccccccttttcttttcagctctgagtaggctgacaatcagtcttacatctaccaagcgtgtagaattcctttttagggaaactgaccaccccatgagaaaatatctacaaattggcccagttcctgccaaattaccctatagcaaacttcccagcctataagctctacccatacattcagagctgccaatcagtgttttagtgccttactcttaagtaagtgcagagtcttcaccagattgtcaaagaaagtctgtaa

SEQ ID NO: 809897 - DNA, 619 bp, Homo sapiens
ctgtattttataagcattaacttctattcacccacacttatggaaaaagtctgtatccttcatttattaataacagccaragatatatggttgtggatgcatatttctgtttcaacttttgtttgagcagcttccaaaacatcatcctataggtttttggaatccgtgccaagttcagttcagattaagtttctttgttagaattgctttttaaagcatctggatcagaaatcatatacttctgctgcatagcaaagaaacatttggaaatcatcagggacattataatagaggatgaatagtattgtatgttttttctcagggtaggtaaaggctacaacaaaaaagaattttattaagaatttagaaaatgctaggttgatattgttaaaatattttaagcagctgatagcttgctttcaaaatgataatattgtacatactatttttcctaaagctactatggaatatttctgagtaaaggcagtaatttcttccttttacctattttcaatgctacagacacacacacacacacacacacacacacacacacacacacacacacacacacacacagagagagagaaggagagagagagattaagaaggtatgcag

SEQ ID NO: 809898 - DNA, 508 bp, Homo sapiens
gtagataggtagacagataatagattagagagatagagaaagagagagagagacagagacagagagataaagatacacaggtaggtagtaggtagacagataatagattagatagatagatagatagacagatagagatagatagatatacacaggtagctagtaggtagacagataatagattagatagatagatatgcacaggtaggtagtaggtagacagataacagagtagatagatgatagatagacagatagatagatgatagatagatagatagatatacacaggtaggtagtaggtagacagataatagattagatagatagatagatagatagatagatagatagatagatagatagatgatagatagatgggggaagggtaggaagccctgatctattgcatttgcaaatttctgtggcacatacactcccaccaggaatcaytgctaccaatatgaagatcttgaacatgggtttggcaagagatgctaataatggg

SEQ ID NO: 809899 - DNA, 634 bp, Homo sapiens
tcctaaggaaactgaacactcaaacaaaggattcttagccaagcaattttacttgcgcagaggggtgcttctccttggccagttgccatgagagcacacctgaacaaaggggcacgagagcctttattcctaatgcaagtcctgcccctgtaccctttccccattggccggagtcgggccatacaatctaaactagtcccagttggctaaacatttgaactttctttagataaggtgggcacgtaagggagagaggggaaaggggaaggggtgtctgcagtgagctagagagctagtcttctttccaaataaggaaaagaacgtgagctggtactaataacgcctggtactgtggcgtgtctgggcatggaacaaaggcagaaaggaaaaagaaggagcaaaaggaaaagggggtggggggatactatgaattaaagaataaaggattgatcggctatttgaagagaaacctcatcatagcccacatttacttattttattatttattaacttttttggagacagagtctcgctctgttgcccaggctggagtgtggtggtacaatcatggctcactgcggcctccatctcctgggcccaracaatcctcctgcccaatcccctaaaagcattg

SEQ ID NO: 809900 - DNA, 598 bp, Homo sapiens
ttgattttctctggtgttttcactagttccggcctttggcgctctatgacgtcaccgaagtgacggagcggaaaagcgcgagaagcggcttggttccttgtacgcagaggcggtagtgacacaggcacaactgasagtggcagaagctcagctgacaaggactggggacggcggtgtccttgtcttgcctttgtcgcccccgcccctctcttccctggctggacttgcggagtccccgccgaagaacccgaggtgggtgccccgtcccaggcccccccccacctccgcccgacccctccttccagtgctgaagcccatagaaggggccctgcaggtcaggccccttgtctcgaagagaggggcgttcctgtgtggggtccccgtatcagctggtttgatgcagcctcagagctcccttcggggatctcaggttcagagcatggaggtgctgccaagtgggccgcgtcggggagcccggagtgtgggttgtttctgcgggaaagagagggttttgtgaattttctcttggaatggcagcctgagcagccggtataaccatggaaggttgtcaagggaagaccagtgggaggggcaggtc

SEQ ID NO: 809901 - DNA, 671 bp, Homo sapiens
gaaattctttatggacagctgcacactcattattcaccagagagttcatactggagaaaaaccttatgaatgcaaygaatgtgggaaattctttagataccgttccacactcattagacatcagaaagttcacactggagaaaagccttatgagtgtagtgaatgtgggaagttctttatggacacttccacactcattattcatcagagagttcatactggagaaaagccttatgaatgcaacaaatgtgggaaattctttaggtattgcttcacactgaatagacatcagagagttcactctggagagaggccttatgaatgcagtgaatgtggcaaattctttgtggacagctgtacactgaagagtcatcagagagttcacactggagaaagaccttttgaatgcagcatttgtgggaaatcctttagatgtcgctccacacttgatacacatcagagaattcacactggtgaaaggccttatgagtgtagtgaatgtgggaaattctttaggcacaactcaaatcatattagacatcggagaaatcactttggagaaaggtcttttgagtgcactgagtgtgggagagtttttagccaaaattcccacctcattcggcaccaaaaagttcacactagggaaagaacttacaaatgcagcaaatgtg

SEQ ID NO: 809902 - DNA, 537 bp, Homo sapiens
ttggaggaaaaaaaactttttagacatctcttagagacttgggaggatttagacagactaaatccttttcccaaaaccttttctctgaayctgcctttgatctcattgtttaagtggattaatgaatgtaaagtcctcagaacagtgtctggcacccagtaagagctacgtaaacatttattattcttcttcgaccatcaaaaagtttcctttccctgactcctgagcccaagaactctctatagcaaaggaaatttatagcaaagtgttttgaagctcaggatctgcttctgcagggcttcagaagcgtagaaggggaataagtcaggttatgtagcctcttcctcacccatccaagagcctggcattgcactctcagctctgggaaggttctgtgacccagactgtttctactgtaataatatctaatacttactagagtctctacctctgagctggaactggcttttctgtgaagtaggcactatgatcatgcccattgtacagattagaaaactgaggcacaaagagctgagt

SEQ ID NO: 809903 - DNA, 634 bp, Homo sapiens
catttgattttgggaaattcactggatccctgcagcccatagttttggttataaaaccctgagctaatcattaatagccgtacattacacaatccatatatcccaagtacttggtgactttatttggcccaatcagttgacccagtaactccatgaagcaggtgctataaagactgtgaactattcttagacccgctaatttcccatcatgaagcatcatgccaactttatgagcaaaaacttgggagttgggaagcctaggttcaaatccttactatgccacttacctacaggatgatcttgggcgagttactcaacctgccttagcctcagtttccctatatttccttggcatacagggaaactataacaaatgctcaatgaatgctgttcactactttattacttcatgagttcagccaaccactatagtggcttgaaggcaaagattccactaaagggtgaccttcacccacccctgagtggatggctacaaaagggaccccaatgatcatctagtttgaaggtcaagatgggaaagmatgagccagcatctcacggcaggtcagatacagagctgggggtaggacccaggctctcaaccccagtctaacagattccacccctgcccact

SEQ ID NO: 809904 - DNA, 622 bp, Homo sapiens
aattgaagctgaaatgaaggctcctgcacagccatactgcctcctcatatactctacatgcccctagtcccctgtgccaggaactgaatacctctgcagatagactaaaggtgaggcttcaaggtctgcctgctaggcgtggtgctgaacgccttctcaagctgcccaagcacatggagtcttggaggctttcctttccagagaaagaaagtaggaccaatccccactccctgccataataagaaagagctcttggggacagcagcatacagagcacagaagccaaagagaattcaggcagggtgaaggaccccacacccctgccaccatcccacaaatcagtacataggccaagtgcccagtttgccaggggtcttgctacctgaagtgacctatgatctctggccatgacaatctctagcgagtccttcctgccattctgcagcctgttagccaatgcatgcaggccaggcggcacttactgcaaagccatcacagaaagcagcgaggccttcagactcctaggagaaayagtgattccttctactgctccatccccactgctaactctgggtccccacccctgtcctcccagagtcactctgatcctgctcatcacacc

SEQ ID NO: 809905 - DNA, 501 bp, Homo sapiens
cggccgccctgagggaccccgctcaggtgagcgccgcgtcctccyggcctcccccgaatcctaaagccctgtgagggccgcctgctcaggtccccgggtgcagaactgtggggcgttcgtgcgcggcgtcccgtttctgacacgcagtgtgatggggtggcaatggagggcaaggggcccggctcgcaaagatgtgaggcgcattcagcgagtcccgaacctgaggcctcctggtgtctgtagtgggcagcttgggaagggacgaggcgcgtgtcgagcgacagcccgagcagctgcgctttcatcctgagggggccacagtggccgcggagggctggagacagaagagtgacaagatctgtttctcaaagtttgccaaaggcccttcaagtcaaaacagactggggtgggggtgaggcgggtgaagacagacctgtgagtaggtaaattcagtagactagtggagagtctactgggactgggccacagaggaggggaagt

SEQ ID NO: 809906 - DNA, 501 bp, Homo sapiens
cggccgccctgagggaccccgctcaggtgagcgccgcgtcctcctggcctcccccgaatcctaaagccctgtgagggccgcctgctcaggtccccgggtgcagaactgtggggcgttcgtgsgcggcgtcccgtttctgacacgcagtgtgatggggtggcaatggagggcaaggggcccggctcgcaaagatgtgaggcgcattcagcgagtcccgaacctgaggcctcctggtgtctgtagtgggcagcttgggaagggacgaggcgcgtgtcgagcgacagcccgagcagctgcgctttcatcctgagggggccacagtggccgcggagggctggagacagaagagtgacaagatctgtttctcaaagtttgccaaaggcccttcaagtcaaaacagactggggtgggggtgaggcgggtgaagacagacctgtgagtaggtaaattcagtagactagtggagagtctactgggactgggccacagaggaggggaagt

SEQ ID NO: 809907 - DNA, 585 bp, Homo sapiens
cgccatcagagagttcatactggaatgaggccttataagtgaagcaaattttggaaattctcttgcccaggctttttgctccttcaaggccagagagttcacaccrgatcaaggtgttatgagtgtgacaaatggggaatattctttagctagaatgctagcttctttacataaaagagtgctcccactgaagaagtgccttttgagtgcaatgaatgtgagaaagccttcagccctctctcattggttaccacaatatttacatgaggaaaataccacagatgtggaggtaatattattttttcttcaatataacactggaggaaaccccttatgaggatgccatctgcctaaattgaatgtcatacatcaaatagctgcatacattccaggtatgtgggaactgcatagtatttttcgacctgcccaggtctcttgctagacttctgtgacttacagttctcttctaaaaagcatttcacctttaccacttggcaggtgcccacagtacatcattcgcctaactcatcatgatccagaagtaactttgattttgtttcattcaacagagggattttttagtat

SEQ ID NO: 809908 - DNA, 638 bp, Homo sapiens
tgtggtgtttgcatcaagtcattttggggtgctttatggaattgcttcctagtagggaattccctgacttcacactttccagagacgacgctctctctctttttctctctaatacttacaagaatggactgcaaggctacatttagtcaggcgataccatccccagcacatggtggcttgttggtgtgaggtctaaggattccggtcatttgaaacgaatggcctcctagatttgtggcatttttctgtatattgagaataggtaactaaaataagtggtaactatatttgcatgtgatttgtatgttatagttaacatttaaattctcttatgtactaaaatttttttggttgccacagtaagcctctttatcctgtaaggcacagagtgtctttccacctcaatttttgctttaatgtatgaaccctaatgggaccatagttcaactaaaggcacctaactcatgaatgatatttgctccatgtttgaacaacaaatgttttaacccactgtcttcactaatattgtaactactgtcttacagattgacttgatgcacaacatcacaaaggcgakttttgaggtatgagctttagaaacttacctctcatgtggcatgtacatcaggctttaactt

SEQ ID NO: 809909 - DNA, 582 bp, Homo sapiens
agattttaagtgattaaattatggtattgttgtgtttggaatatctgatattagggtttttttkttttttttttttttttttttttacagtttttgatatgctttattttgggtatgtagtttaaaaaatataaaggaaatataaggaatattctttttttttttttttaataaaaaatgtatttttaactgggcatggtggctcactcctgtaaccccagcactgtgggaggctgaggctggtgaattgcctgagtccaggagtttgagaccagcctgagcaacatggtgaaaccctgtttctatcaaacaaaaaaaaaaaaaaaaggaaaaaaaataagttgggcatggtggcatgcacctgtaatcgcagctacttggaggctgaggcaggaggatcgcttgtgcctgggaggttgaagctacagtgagctatggtcaagctactgcactccattataggcaaccctgtctcaaaaaagcaaaacaaaatgaaacattttccccttgattatagaggtttgagaaaaatttgagggaagattcagaaaattacctgtaactgaacagaatgccaccagc

SEQ ID NO: 809910 - DNA, 634 bp, Homo sapiens
tcactgatgattagagaaatgcaaatcaaaaccacaatgagatattatctaacaacagtcagaatggctattattaaaaagtcaaaaaataacagatgctggtgaggtcgtggagaaaaagaaacacttatacactgttggtgggaatgtaaattagttcagccattgtggagacagtgtagtgattcgtcaaagacctaaagatagaaatactattcgacccagcaagaccattactgggtataatagaatataaatcattctattataaaggcacatgcacatgtatgttcattgaagcactattcacaatagcaaagacataaaatcaacctaaatgcccatcagtgatagactggattaagaaaatgtggcacatgtacaccatggaatactgtgtagcaataaaaaaagaacataattatgtcctttgcagggacatggatggagctggaagccggtatccttagcaaactaacacaggaacagaaaaccaaataccacatgttctcacttacaagtgggagctaaatgatgagaacacatgaacacagaggggaamagcacacacttgggcctttcagaggtggaggatgggaggagggagaggatcaggaaaaataactaatgggta

SEQ ID NO: 809911 - DNA, 584 bp, Homo sapiens
caagatcagaaaaccaaacactacatgttctcactcatgcgggagttgaacaatgagaacacatggacacagggaggggaacatcacacatggaggcctgctggggggtggggggctaggggagggrtaacattaggagaaatacctaatgaaagtgaagggttgatgggtgcagcaaacaaccagggcacatgtatacctatgtaacaaaactgtacattctgcaaatgtaacccagaacttaaagtataataataataataaaatgccaagttttaaaaaagaaaagttattatttctgtcttttagtttactccttcattttggtgtaataaattgtgcaacagctttctgaaaacttgcaaatttgaagaaaaaatctaggctcccctttatacttgatcgatagtttgaatgaggatagaattctaatctggaaattattagtagtcagaatttttaactcactgttatagtgtcttctagtttctaacattactgtggaaaaatccaatgtcatactgatttccaatgctttgtacatgatctgctgtttctctcttttaaagcattgaaacattttc

SEQ ID NO: 809912 - DNA, 652 bp, Homo sapiens
caattgaaaggctacagatattaaaggatcctttggtctaaacagctttttttttttttttttttttttttttgagatggagtctcgctctgtcrcccaggctggagtgcagtagcgcgatctcagcttactgcaagctccacctcccaggttcacgccattctcctgcctcagcctcccgagtagctgggactacaggcacctgccaccacgcccagctattttttttttttttttgtatttttagtagaacagggtttcaccatggtctcgatctcctgacctcgtgatccgcccgctttggcctcccaaagtgctgggattacaggcatgagccaccgcgcccggccaagagctttttatatcattagtacaaaagcattggattagaaactaaaggcctactcttagctccacctcacaggatgtaacccttctgcaatttacttaaactcattgtgcatattccacaggaataaacagaataagaacagttaatcatgcttcaaaagaaagatgctctaaaaataaagggtattatctttatttaaggtttgagctaatgacctaatggtagagtaagtctaatttttctaaaaaatatataaatttgaatactgcctttttatcatcaaatgatactgagaatgat

SEQ ID NO: 809913 - DNA, 589 bp, Homo sapiens
ttcctatttgcctcggtgcttgtggctgcagcgtttwccctaagaaaactttgccaggaaatctatcacttttattattattttcacattgctctagtatatcaactttggaaacaaaaggcatcattctattaatagcattctgtttttagtagtggtatttccatttacaaagtataataattctaaatcaccgaaaatgtcaaatcccagaaaacatagcattcctacgtgtgatgttaacatcattctcgaacagttgttggccgaagattcacttcatgaaccgaattttctgaaatagacgattctgatgattcagatgattctggtattagttctgtttagaaataactccaataacaatttttatattttattttctcattgaaaatcagtctgatttgcttcagcctcaaagagcgtgtttatgtaaaattaaatgagtgctggcagtgagctgcacttttttttttctaaacaagaaaagggttagatttgaaacaggaagaaagagtgtgtttttgtctcctttccctggaccctctccttgctctgcttagctctcttgcatcaggtttacaatgaa

SEQ ID NO: 809914 - DNA, 613 bp, Homo sapiens
tacaaatgaataattaagaatagtsaagcattggcgaaaagtctttaatagaataaaagaatatgaaacacacattgaaaaaaggaacttggaagaaacagaaataatgtagggaggagaagaagccataaaatccctataattaacattttcagagagatgcatagatacatcatgtccatgaaacatggatgctagaaataaaaagaaacattctaagaataagaatgaattctgtctgtgtcagggtggtgcatggtccacattgagaaacagagatgctcaggctgtgccctcaagatgaccaagtgggagacagaagcaccagtggtggcagaaacccctgacatcaagttctttgggaagtggagcactgatgatgcacagatcagtgacatttcccttcaggattacattgcagtgaaggagaagtataccaagtacctgcctcacagcatagggctgtatgccgccaattacatccacaaagtgtgatgtcccatcatggagcatttcactaactcaatgatgatgcatggccacaacagcaagtagctcatgactctgccttgtcaagcatgccttcaagatcatccacctgcttacaggcaag

SEQ ID NO: 809915 - DNA, 613 bp, Homo sapiens
tacaaatgaataattaagaatagtgaagcattggsgaaaagtctttaatagaataaaagaatatgaaacacacattgaaaaaaggaacttggaagaaacagaaataatgtagggaggagaagaagccataaaatccctataattaacattttcagagagatgcatagatacatcatgtccatgaaacatggatgctagaaataaaaagaaacattctaagaataagaatgaattctgtctgtgtcagggtggtgcatggtccacattgagaaacagagatgctcaggctgtgccctcaagatgaccaagtgggagacagaagcaccagtggtggcagaaacccctgacatcaagttctttgggaagtggagcactgatgatgcacagatcagtgacatttcccttcaggattacattgcagtgaaggagaagtataccaagtacctgcctcacagcatagggctgtatgccgccaattacatccacaaagtgtgatgtcccatcatggagcatttcactaactcaatgatgatgcatggccacaacagcaagtagctcatgactctgccttgtcaagcatgccttcaagatcatccacctgcttacaggcaag

SEQ ID NO: 809916 - DNA, 492 bp, Homo sapiens
aactaaattacttgaaacaatattatgtatacttaatatatacagttgagtgctttaaatacatgtacatatgtatataaatatatacttcagtatcaagtttggcagtctaaatgttagctaagttatcattataaatatttattcttactttcttgggtagaacatagtatttcatgttgtgcatgtaaaacagttggtaaactgggcatttttgatatatatcatacacactgagattgaagctatatgccaaatggctactttgtatgacttttaatggagttctaaaaaataataataaatgacataagctaacccatctgaaagaagacagaaaagagcagcttcaatggtcatatacttttattgagagacctgtctatggctgggaatccatgactgttgaagatygaaagaaataatgtttgctgagttatgaaaggtaagtttgttgaactatgtcacattagaaaatgcaacttggctgtc

SEQ ID NO: 809917 - DNA, 583 bp, Homo sapiens
aatgtcttgaaaacctgtttttaaaagcataaatcattgccacattctgtaaatttgctttagattattttctcttctggaaaactgyaattaaaaaataatttctcacaataattatgcatgaaaagaatattaaatcaagaatacttttaaaagagatttgttcaaattagaatcagagtacttttcaagtggtaaactaatatttgtttttcacttcttaaagtttatattcataattgatttggtagaaatataaagtaacacagtcacactagacttttggaaatttcctctgtgtttatagcttttatctacatttctcttggagaaaacatcagtttgcaatttaaaaatcatgtatcatacagttggaacaatctactgcaattataatgtttatgactggaaatgtaatagaataaattgactgtattaaaaaattaagtgctggtctattgagattatttaaaagatatctaaaaataacagtgtatttatttacttaattgaaatattttctgaattatattaatagtgtaattatttcttcagtccattctcctttattatacattattat

SEQ ID NO: 809918 - DNA, 583 bp, Homo sapiens
aatgtcttgaaaacctgtttttaaaagcataaatcattgccacattctgtaaatttgctttagattattttctcttctggaaaactgtaattaaaaaataatttctcacaataattatgyatgaaaagaatattaaatcaagaatacttttaaaagagatttgttcaaattagaatcagagtacttttcaagtggtaaactaatatttgtttttcacttcttaaagtttatattcataattgatttggtagaaatataaagtaacacagtcacactagacttttggaaatttcctctgtgtttatagcttttatctacatttctcttggagaaaacatcagtttgcaatttaaaaatcatgtatcatacagttggaacaatctactgcaattataatgtttatgactggaaatgtaatagaataaattgactgtattaaaaaattaagtgctggtctattgagattatttaaaagatatctaaaaataacagtgtatttatttacttaattgaaatattttctgaattatattaatagtgtaattatttcttcagtccattctcctttattatacattattat

SEQ ID NO: 809919 - DNA, 583 bp, Homo sapiens
aatgtcttgaaaacctgtttttaaaagcataaatcattgccacattctgtaaatttgctttagattattttctcttctggaaaactgtaattaaaaaataatttctcacaataattatgcatgaaaagaatattaaatcaagaatacttttaaaagagatttgttcaaattagaatcagagtacttttcaagtggtaaactaatatttgtttttcacttcttaaagtttatattcataattgatttggtagaaatataaagtaacacagtcacactagacttttggaaatttcctctgtgtttatagcttttatctacatttctcttggagaaaacatcagtttgcaatttaaaaatcatgtatcatacagttggaacaatctactgcaattataatgtttatgactggaaatgtaatagaataaattgactgtattaaaaaattaagtgctggtctattgagattatttaaaakatatctaaaaataacagtgtatttatttacttaattgaaatattttctgaattatattaatagtgtaattatttcttcagtccattctcctttattatacattattat

SEQ ID NO: 809920 - DNA, 583 bp, Homo sapiens
aatgtcttgaaaacctgtttttaaaagcataaatcattgccacattctgtaaatttgctttagattattttctcttctggaaaactgtaattaaaaaataatttctcacaataattatgcatgaaaagaatattaaatcaagaatacttttaaaagagatttgttcaaattagaatcagagtacttttcaagtggtaaactaatatttgtttttcacttcttaaagtttatattcataattgatttggtagaaatataaagtaacacagtcacactagacttttggaaatttcctctgtgtttatagcttttatctacatttctcttggagaaaacatcagtttgcaatttaaaaatcatgtatcatacagttggaacaatctactgcaattataatgtttatgactggaaatgtaatagaataaattgactgtattaaaaaattaagtgctggtctattgagattatttaaaagatrtctaaaaataacagtgtatttatttacttaattgaaatattttctgaattatattaatagtgtaattatttcttcagtccattctcctttattatacattattat

SEQ ID NO: 809921 - DNA, 581 bp, Homo sapiens
tgggccttgtgggaggtgtttgggtcatgggagcttggttccctcatgaatggcttggtgccctccctgtggtaatgagttgctgcaggatctgattctttttttgagatggagtctcactctgtcgcccaggctggagtgtagtgccgccatctcagctcactgcaacctctgcctcctgggttcaagtgattctcctgcctcagcctccagagtagctgggattaaaggtgcacgccaccatgcctggctaaattttgtatttttagtagagatgggggtttcaccatgttggccgggctggtctcaaactcctgaccctgtgatctgcccgcctcggcctcccaaagtgctggaattgtagatgtgagccacacctggccgagatacagaaaacttttatttcatcactctttcttgcctggtgccaggcccatgcaatgccacaatcttggytcactgcaaccttcaactcccaggttcaagcgattctcctgcctcagcctcctgagtagctgggactacaggcactatgccccgctaatttttgtatttttagtagagacggggtttcagcatgt

SEQ ID NO: 809922 - DNA, 574 bp, Homo sapiens
aaaacatgaaaggtaggggatgaagctatagaggttcaaagattttgcatgctattgaaactaagttggtattaattagaattagattgttaaatattattatttaaattttttgttgtagttgcagtttttgagaccaggtcttgctctgttgcttgggctggagtgcagtgttgcgattatggctcactgcagccatgaactcctggactcaagtgatcatcccacctcagcctctgagtagctgggactacaggtgcacatcaccacatctggctaatttggtgggggggtggctagatacggggtctttctttattacccaggctggtctcaaacttctgacctcaagcaatcctcctacctcagcctcccaaagtggtagggcttgagtcaccatgcccagccaaattgttcaatatccaagacaaccactaagaaaataactaaaagaaaagaaaagaagggaatcaaaagaaaaaaagagaatcaaaatggggcactagaaaatatttaacacaatagaaggcaataatgaaggarttgaggaacaaaaaaacaaaaatatataatg

SEQ ID NO: 809923 - DNA, 512 bp, Homo sapiens
atacttgttatcttaactacttgggaggctgaggcaggaggatcactgaagaccaggagttggagaccagcctgggtaacataatcagaccctgtctcttaaaaaaaaatttattgccaggcrtggttgcacgtgctggtagtccagctactcaggaagctgaggcaggagaatctcttgaaccccagatgtggaggttgcaacgagccaagatcatgccatggcaactccagcctgggcaacagagaaagattctatctcaaaaaaaaaaatttttttttaagttaaaaataaaataaagactttggggcaatacagggggtcctgggagtgtaacccataacccccaagagtgatttctgcaatctcgtttcaaattacagggtcaactgctatgatgtgtttggagcccagtcaccctttggtggctacaagatgtcggggagtggccgggagttgggcgagtacgggctgcaggcatacactgaagtgaaaactgtgagtgtgggacc

SEQ ID NO: 809924 - DNA, 577 bp, Homo sapiens
gctatgatgtgtttggagcccagtcaccctttggtggctacaagatgtcggggagtggccgggagttgggcgagtacgggctgcaggcatacactgaagtgaaaactgtgagtgtgggacctgctgggggctcagggcctgttggggcttgagggtctgctggtggctcggagcctgctgggggattggggtctgttgggggctcggggcctgccagaggttcaggacctgccggggactcagggcctgctggaagttcaggacctgctggggatcagggcctgccagggatttagggtctgctgggcgggccaccttttggcctctccctcatgcttgaggccatcagtgtttcctactaatttcccattttaagcctgagaagtgacaagagagggtaaagacccagcctctgctctgtcccatgagaaatactgagggacgtgcccccatcaggcctatgcggtcatttgctgggcttcgttatacgccaaggcctgtaggcctgagaagagggagagacttcagggggcgragcggagaggaaaagcttctagtaagaatcttttcagatttt

SEQ ID NO: 809925 - DNA, 532 bp, Homo sapiens
cttctgcctggttgcagtcagcccygttcccattcctcgccccttacggccactgatttgctttgtcactatagtttttgccttctccagaaattatttccttaatagcttaccaattttatgtgtttgatttcttagcaaatttctcaggttcatccacgttagtgcatgctttagcagttcattctttttattgagcagtagtctttattgcttatccattctcagttataggacatttagattatttctagtttttagctgttgtgaataaagtgataaaactgtacaagttttgtgtgaatatatgtattcatttcttcagtgtagatagctagatgtggaataactgggcagtatagtaaatttatgtttaactttttaagaaaccaccgaactgttttccaaagtggttgtaccattatacattcccactggcagtgtttgaaagtcctgtttttttctaccatcttcacaaatattaggtattttcagtcttcctattttagtccttctggtgggtgtgtagtgg

SEQ ID NO: 809926 - DNA, 593 bp, Homo sapiens
gaactggagggcccagacaggactggacatccgagaatcctatggccagacagaaacggtacctgttcccaggggaaccatgggctgkgtgcactttttgggcttcaaaattctctttgacaataaaaattgttagccaccatgtatcattcatctattcgagaagtatttattgagcctctatgaagggacaggtactgagtattgaaaattccgcacagaacaaaaaaggcaaagttcctgttttctgggagattacattccagtgagatttggggagagagaaaataaactaagaaatatctagcatggcaggtggtgagaaatgcgatggaaaaagtaaagtagatgacatggggtgagaagttggtaaatcagatatggtagtcagaaaattcctctgtgatggggaaacattttagcagagaccaaagtttatcaaacatgtcaagcactgtacaaagctgcttagactgaagtgaggaatgggaagaagaacccaccatgactttactgcacctcctgacatatcttcttggaactcttgaggtctcatgtgcacaatgtggatttatgctattctatactatttt

SEQ ID NO: 809927 - DNA, 593 bp, Homo sapiens
gaactggagggcccagacaggactggacatccgagaatcctatggccagacagaaacggtacctgttcccaggggaaccatgggctgggtgcactttttgggcttcaaaattctctttgacaataaaaattgttagccaccatgtatcattcatctattcgagaagtatttattgagcctctatgaagggacaggtactgagtattgaaaattccgcacagaacaaaaaaggcaaagttcctgttttctgggagattacattccagtgagatttggggagagagaaaataaactaagaaatatctagcatggcaggtggtgagaaatgcgatggaaaaagtaaagtagatgacatggggtgagaagttggtaaatcagatatggtagtcagaaaattcctctgtgatggggaaacattttagcagagaccaaagtttatcaaacatgtcaagcactgtacaaagctrcttagactgaagtgaggaatgggaagaagaacccaccatgactttactgcacctcctgacatatcttcttggaactcttgaggtctcatgtgcacaatgtggatttatgctattctatactatttt

SEQ ID NO: 809928 - DNA, 606 bp, Homo sapiens
ttatttgtgtcttcttcaatttttacatcagtgttttatagtttccagtttgcaggtaatttactttccttagttaaatttatttctaagtgttttattttttcactattataaatggaattgttttcttgattacttttttagatagttcattgttagtgtatagaaacactattaatttttgtatgttggttttgtgtcctgcaaagttactgaatttgtttattagttctgtttgcagatgacaggatcttatatgtagaaaaattctaaagattccattaaaaaataattgtrcactgccaaaaggtgttattgttgttgtttttaagacaggcttttactctgtcacccaggctgaagcgcagtggcacgatctcagctcactacagcctccaccccctgggttcaagaaattctcctgtctcagcctcccaagtagctgagattacaggcatgtgccatcacacatggctaatttttgtatgtttagtagagttgaagtttcaccttgttggagagcctggtctcgaactcctgacctcaagtgatccacccgtcttggcctcccaaagtgctgggattacagtcatgagccaccatacc

SEQ ID NO: 809929 - DNA, 575 bp, Homo sapiens
tcattttgggtttctggtctcagcatgacattcatgggttacgatgacctcatgatcatacatttctttcagccrttgtcattccagttgaagagaggccatttggcattctagaggtggctgtatgtaaacatttaaaaacttggagagaatttggcacaccagggagactattattattactatcaggaggatagagtttggagtatgctcccaaagaatgagctaggtaaagagtctattcactttactaagcaatctcattaatcccctgcaactgaatctctataatacctgatgttttctccatagggcataagtgccagcagctgcacagatacttctctgtttagccaattctattatttagcataactttcacaaaagaatttaaagtctgttgtgtaaccatagcctttacagtagaatctcctatagagcctatcacgagggatacatttctaatcattgcctcttttattccaaaccatggaaaaaggacctaacaaatgatgcccttctagaagagtgaaggcttcctggcattttttttaaacccatgatgtgggttaaga

SEQ ID NO: 809930 - DNA, 555 bp, Homo sapiens
ttcccgtgttaccataaattaatcgcaaatatcattctcatggctacaaatatcacatcatataagcataccattatttattataccagcagttggcaaaacatttctgaaaaggaccaggtagcaaatatatgaggcatgatgggccctatgatctctgtcctacaagtcaagtctgttgttcaagtgtgaaagtagccatagacaccgggcgcagtggctcacgcctgtaatcccagcattttgggaggccgaggcgggtggatcaccaggtcaggaaatcgacatcatcctggctaacatggtgaaaccccatctctactaaaaatacaaaaaaattagccaggcgtggtggcgggtgcctgtagtgccagctactcaggaggctgaggcaggagaattgcttgaacccaggaagtggaggytgcagtgagccgagattgtgccactgctctccagcctgggcgacagagcgagactccatctcaaaaaaaaaaaaaaaaaaaaagtagccctagacactatgtaaacaaatggatgtggttatgttccaat

SEQ ID NO: 809931 - DNA, 636 bp, Homo sapiens
gagaatcgtgaagttcgtctactgattcccaagtggaaactgaggaacaattaggatgctcagtatattcagagagaatctatacaacttcaaaatgtgttaacatgaaacaggkgtgggcaaaataaaagcccacagcctgttttttgtacttcaggaagctaagaattgtttttacatttttaaagggttgtttggtgtgtgttttttttttttttaaagcaaagaacgtgaagactatgcgacaaagactgtatgtggcccacaagcctaaaatatttatctcgccctttactgaaaaaaaattgctggcataaagtaataatactggaaagacctagctaaaaataattataaagctctatgcaagttgctattcctttaaacatgtttttctatgccttatttgacttttgagagacgaatgtgtaattcttcaagtcaattattcaaattggttaatttgaatataggattttaggaatcttaaaaagacttaaaatgtaaaaggctattacaagtacaagtacattttgggatttagggagagaaaataataaagccaagagtgagatgagcacagtctacatacagcctcaggactttaaacttgatggaagatggcagcaagtttga

SEQ ID NO: 809932 - DNA, 636 bp, Homo sapiens
gagaatcgtgaagttcgtctactgattcccaagtggaaactgaggaacaattaggatgctcagtatattcagagagaatctatacaacttcaaaatgtgttaacatgaaacaggggtgggcaaaataaaagcccacagcctgttttttgtacttcaggaagctaagaattgtttttacatttttaaagggttgtttggtgtgtgttttttttttttttaaagcaaagaacgtgaagactatgcgacaaagactgtatgtggcccacaagcctaaaatatttatctcgccctttactgaaaaaaaattgctggcataaagtaataatactggaaagacctagctaaaaataattataaagctctatgcaagttgctattcctttaaacatgtttttctatgccttatttgacttttgagagacgaatgtgtaattcttcaagtcaattattcaaattggttaatttgaatataggattttaggaatcttaaaaagacttaaaatgtaaaaggctattacaagtacaagtacrttttgggatttagggagagaaaataataaagccaagagtgagatgagcacagtctacatacagcctcaggactttaaacttgatggaagatggcagcaagtttga

SEQ ID NO: 809933 - DNA, 248 bp, Homo sapiens
ttaaaaagaaaagaaaagaaaatcatgtataatsattgtgtacctctgtgcatttggtacaggatggcaagaaacacagacttattaaatatttctgcaatttctgtttggaaacgaaatattttagtgaaaatatcaccagtgaaagaatgtctgggaagcaaatccagcattttttctttttgggattggagaaagaaacctatgccgtcatttcttgtaccaggctgcgtgctggtagttaacag

SEQ ID NO: 809934 - DNA, 675 bp, Homo sapiens
caggcgtggtggctcatgcctgtaaccccagcactttgggaggccgaggcaggcaaatcacctgaggtcaggagttcaagaccagcctggccaagatgatgaaaccccgtctctactaaaaacacacacacaaaaaattagctgggcgtgacggcaggtgcctgtaatcccagctacttgggaggctgagacaggagaattgcttgaacctgggagggggaggttgcagtgagctgagaccatgccagttgcacactagcctgggcgacaagagtgaaactccatctcaaaaaaaaaaaagacatttgaactggttagcaacaacctaaatgggaaattttcccatgataactttgatttctgacctatttggaaaaatctgaaaatctgtctgtgttggacgagtgttttcacatggcaacaattcacctgttgctgatcagtggtcgcctcttttagacagcctgtgctctccggttcaagttctacagtgtctggtccatacttttactttgtttgcctagccgtctcagtcagcatttggattttcaagacaaatctattaaggcaaatccacattgacttataatgaattttttttaatttctacaatttrtttgaattcattatctgagtctccagtctttgcatgttttttattttttagaggctgcc

SEQ ID NO: 809935 - DNA, 587 bp, Homo sapiens
atgctttatccttattccacagcctcccctgttctccctggatccctttcctagcacattrcatgatgagaaaccaaagtgcagagcagtggttctcaaccaggggccaggggatacttgtcaatgtctggaggcctttcgggttgtcaccacaagggctcaagtaaggaaaggtcaaggaaactgctgagcaccctgcaatgaacaggacagctccataaacaaacatagaattatcttgccccaaatgtcgatagggctgaatttgagaaacctcaggatagagtatcaataatcatgaagcaagtggatttttgccactctggttctgcagaggaaaacaaatatttcgcagcatctaaaccatgatagaaccgtcaaaagcatgtgaagtcagctacataaattgcaaaacatgagtcacagttatgtttgttctgaaacagcataaaaactcacaggattctttttctttttatgaaaatagaaaaatgatgagcattctttcccagaaaagccagggttcttgcctttctctttggtcacctaacaccaatgaatgcaaacttgcctgtcatggttgttaa

SEQ ID NO: 809936 - DNA, 546 bp, Homo sapiens
atcttcagcctctagaagtgtgtttggctcacagctggtgctctataaatatttggggaaagagtgcttgaaatgagatcaagtacgctgaatgcttgacaaagagcaagcgctcagcctcacccacaccaaggctgcccaaaggctgctctgatgcttcttggctgtcctcccacggggtctaggattctgccattgtcatgaaagcagccacaggcaatacatacatgaatgggtgtggctgttttccaataaagctttatttaagaaaataggctgagggctgggtttggcccataggtcctagtttgctgattcctgatccaggacagtctcctctggggtccctcttgtatgaaatggaagtttcagggcaggaactagcatttgcaaagcagctatgtctcagtcaaggcccctgaaacggtgcstctcagcaggaccctgggcgtgaattacaacaaagttacagttcataaactttattgttcagcagggctttgaccccaactttgctttctgctgattttttcaaagagccttgga

SEQ ID NO: 809937 - DNA, 542 bp, Homo sapiens
gaggcggggaggctcaggcatggcgggctgcaggtcccragccctgcccgcaggaaggcagctaaggcctggcgagaagttgaacacagcagctgctggcccaggtgctaagcccctcactgcccggggtccgcggggctggccggccactccgagtgcggggccgccgagcccacgcccacccggaactcgcgctggcctgcaagcaccacgtgcagcgctggttgcagcccgcacctctccctctacacctccccgcaagctgagggagccggctcccgcctcggccagcccagggaggggctcccacagtgcagcagcaaactgaaggtctcctcaagtgctgccaaagtgggagcccaggcagaggaggggccgagagagagcgagggctgtgagggctgccagcaggctgtcacctctcaaaggtaagtttaagaatattttaaactaaatgaaaatgaaaatacaacttatcaaaattcataggacataataaacgcaacacttagacgggaatttatagcattgaatgcatatat

SEQ ID NO: 809938 - DNA, 607 bp, Homo sapiens
ctcaggagctgccacatcttctcttctgccttccggactgctaaatagggaaaaatttcatcataaccaggctagggatatgctgagtctgataggagcagaaagcaattatatgcctaaaagactacatccctaagaactggcaggagtcagggaagttctcctgtgatttgaatttgaggatgcttgatcaaggagacaaaaacgtaaagctggataagcaagatttcattgaattagaagtattttatttaacacagtttaatgttctagcaaggtatggagggaatgagacaaactcattgctactgtggctcttagaaacctggaaaaaaacaatggtcagctttcagcaatgtagaaatgcctgcatttccctagcaggtgatagaggaagaaataaaggagctaagggaatatacttgctaaaatggataaatgacatgagtctagaaggtccaacagataagcatgttccatgggaagcccagagaacacagatagctttcaccaagatcrtcaggaatgcactggtgacgaggggacagactgccatcactaagaagttcaaaggcagtttcttcgcagactagggttgaagggaggt

SEQ ID NO: 809939 - DNA, 440 bp, Homo sapiens
ggccaggcaggcagcgtgcagggatcctcctggtgcttcagccagtcctggggctgccacttcccagagcactgccgggtgtgcagggcgtgggtgcagcgccagctgcctcaggctcatgcccactgttcggttgcaggcaccaaccccttcctcaggtcgatgcaccaccgcgtgacctccaggcagctgcagctcccggacaagcactaggttaccaccttgctcagcacctgtgcccagagcatccacaaggcctgcctctcggctgcctagccaggactgcagggatggcccgcagcctcatcggggccaaggatgcatgcctcctgtcagacacttmtagatgttggcgtccatggagagcctggagttaggttagctttcctccttttctctcctgccttggggatctgccaaatgaaatcccacacttgtac

SEQ ID NO: 809940 - DNA, 471 bp, Homo sapiens
attttggggtttgaaaaattcatataatgattaaaggagaaagctcttatgagttattgtatgctgagatatatgtggacacacacacacacacacgcagtttattgcattgttgggttttatacataaaattacccaagttgcaaatatatgtctaccacccttgactctcaggatagtgcagcaggatgcagcggaacccccctgacttgctgacaagcgcagaccagtctagaagtggccctgtacatgtttctgcggaaccctgacactgaagctgttctggttgccatgtcctgtttccgccacctctgtgaggaagcagatacccggtgtggggtggacgaagtgtcrgtgcgtaacctcttgcccaactcttaacacattcatggagtttgcctgtcagcaatgtgatgtcaacaggtaaatatgaatagtggtttttttactcaacctccctaaagcacatgg

SEQ ID NO: 809941 - DNA, 605 bp, Homo sapiens
atctacttttttcatgatgatttcctaatatcatacatttctcatytggtaaacattcgtacactgagctgacagattttactatagaatataaaaaatacacttgttaatatcgtcaccaatctcaccaaaaaaagtatttaagaacggaaatgctatcaagctcatggtgatggaatacattttccaaaattctactttttgcttgaaagctcacattttatcattggcaacaaatactgtcagtttgtttctttgaagtgacaagcttactccactcattttcaaggaaatatccaccatatgtccaagtttgaataaacataattatctgtcagtcattccttcaactaaaaatggcattccatgaaaaaagcaactagatcagctttcaacctaacctcataagagcttttccttgaagcaaccatcatactttaaggattagaagttcttctttctcatcatgtagaaacctggtaaactgagatttaataaacttcataattttccttgctttatcaatagcattcagctgtaactggacagaaaaaaaaacaaaaaacaggaagttcatggtagcgaagaacagaatgactaataac

SEQ ID NO: 809942 - DNA, 605 bp, Homo sapiens
atctacttttttcatgatgatttcctaatatcatacatttctcatttggtaaacattcgtacactgagctgacagattttactatagaatataaaaaatacacttgttaatatcgtcaccaatctcaccaaaaaaagtatttaagaacggaaatgctatcaagctcatggtgatggaatacattttccaaaattctactttttgcttgaaagctcacattttatcattggcaacaaatactgtcagtttgtttctttgaagtgacaagcttactccactcattttcaaggaaatatccaccatatgtccaagtttgaataaacataattatctgtcagtcattccttcaactaaaaatggcattccatgaaaaaagcaactagatcagctttcaacctaacctcataagagcttttccttgaagcaaccatcatactttaaggattagaagttcttctttctcatcatgtagaaacctggtaaactgagatttaataaacttcataattttccttgctttatcaatagcattcagctgtaactggacagaaaaaaaaacaaaaaacargaagttcatggtagcgaagaacagaatgactaataac

SEQ ID NO: 809943 - DNA, 634 bp, Homo sapiens
gtactaaggaaaatgtaataatgaaragaagatttggctttttttttaatagttcaagtggagagtgggtataaagagggtgtcacaatctgtgtcagtcttatttcccatgcctccaggtaaacctaaagcacctactgataagaaggctgagtttctcatcttatccaggtgtcttctgaactctcctttcttcctgcctggctggggttcagattgcagggacagggtagccaggcacatatggggacgtggccttgccagcaaagcactttacttgcattctatggctaggagctgttttcaggaaggaaaacagacacgtgcagctccatctccagcccctccaagcccagggtgaggagtccctcttccctggcttgctcagccaccaacagccaaacttcaccccagagtcaagtgacctattaaacccgtcttagtctggcagttatttaacttttataacaactgtgagaagtaggtattgtcattgttgtaaaagagcccaacgcagtggaatgaaaaacaaacgaacagaccaaacctacccaagcttataggttggctggtatgtggcagagccaagttggaacacagacctgtctccgaggtccttctcgggatcatatag

SEQ ID NO: 809944 - DNA, 514 bp, Homo sapiens
aacaactaaaaaacagtttgatagtgatccactgtctcgactgcatacccatgagcgagtcataacttgcagttttaaaaatggtgtcttaatctaccacttgcgtcagatatgaatattcttttaggaaaaaaatccatgtgtatatgcgagaaaaaaatggattggaaaatggctaatctctctgattttcttactaatataaatcacaatatcaaatcctgattaagacagttatataatacattaggcttcaaacaggcttttctatggacattaatgtattttctttagaatgcaagaaatcaggagtttagactttgtggtagcagtagtagctagataccactactttagtcatctacacttaaatcttcctaggaacctaatcttctagtattaaatcatcttgatgccaaccattacacaatttccraaagttgcatctgaaacacaagttgaaatatacacaccccctgtaacaaaacccttcagtggtttccactgggtatat

SEQ ID NO: 809945 - DNA, 596 bp, Homo sapiens
tccgtttctttcagtaggggaggattttaatgcaactatggaaaaaaaggaaaaacaatgattttaaaagtaagcaagagtaaagagctataatagaaaacttctgaacaccaaacaaagacaatttgaaatactggcatccactggtatttttagtatttggctaaaacaaggtaaataataaatactaggtaagtaatcctgttgccagtgggtagctccttattctatgctagtaacaaaactgaagggtttagtcaagttgtcagctgacagattgttaaaaataatttttgatgagttcacgatataattttgtcacaaaacttaggagtttcaaagaactgcacaacactgttacaaacactcctctccactcctacctcctttcttaggagactaaagttctccataatgtaacctataaaaatgaatccaacatttttatgtatttattgaaatattagggaactggtggtggtgaggagaaaaaaagcaactatacaccttattgagagayggatttctgatgtttggaatcttcttgtccagcatttgggtaaaaactgttaattactgtgactatttaataggtt

SEQ ID NO: 809946 - DNA, 454 bp, Homo sapiens
gtatatagtgggcacccaataaatatttgttgaataaaataatgcctgaggaactgaattaatwgacaaacataaagaagttttaaaagccttgagtcagaagtgaaaaaatatagctgccgagaattaaaaaaaacgactttaaagttttagaagtataaattaatgcaataaaatgatttggaatgtaaaattaatgttattttattattgcagttaacatttattgggtacttactatgtgccaaatactgcgctaaatgtgtttttaaaaatttaatcctaataaaaataatctatgaagcaggtgctattattggccacagttttacatacgaggaaatgaacctttgagtggttaagcaactttattatgatctctctgccagcaagtagtggaactgagatagctatgctaataccaagtgcttccacagaactctgtacttccctc

SEQ ID NO: 809947 - DNA, 494 bp, Homo sapiens
gtttaagagtctcagatgaagaaattccactctattcttcttccagattttgtatttttcatctcttagaagaatctaaactcatagatcttatatgctttattcggtatatgacattataatrtgttgatatgttacaatagctccccaggaagttttattctcactctccttctttttatatataaagtccattaaaatccctggggtaaggatttatgaaatcccaatcacttaaatcaaaggcccatctctcctctgaggcttcttgtgaattttgtagcatatgatgatctacatttattgactatatcacttgtttggcaaatatatcatgttttatgtgttcaaaatcttggttgccatttagagtaggtgtatgatgattatctcatttctgccatttcaatcaggggcttttaggatctagtattatatatctgtttagttaccagttgctcagcccagtgttctagtaatactgagaaacgtaa

SEQ ID NO: 809948 - DNA, 543 bp, Homo sapiens
ttagctgtatattttcagaccacagcccttcaggttatttgttatttacaagcctctacatatgtgtattctacttttatgcttagtcccttttagatttaagcagtgttttacaagtgccctgagtttcacacctcctgtgctgtatcacacagaaatgaacaaggtgccacagttagtaattgacaggtgataaagccctaatgataaagctaacaacgataatacaaataatgacagctgatttttgagagttgtgtgtcagatgacgttttgtggactttaggcatattagcttatttttcacagacagctttatgagaaaggtactattatgatctccattttatacattaggaaagcaaggcacagttaggttaagtaacttactcaatattaaagattcatctgttaagtagaagagygaggacttagatcctgaagttcagcaagaacaatgatgtaatctggagtaatccagctaagcacaacaaatatcaaatcgagtgtcacttcacaacgttccagcaatgatccaacata

SEQ ID NO: 809949 - DNA, 530 bp, Homo sapiens
cccatgtagcagtttagctgccgtatatgtgatgtcactcctaaaggttcaagtaaatggcgtcacacatacgaccaccaagctgccaccaacagcagtagtcagcagcccaaacatcatcagtttttttcagtcgacaaatactttgagtgcctctcacatgtcaggcactcttctaggttctggaaattcagcagtgaaccaaactggcaagccacctgctctcatagagcttacattcttgattttatccacactaatcatggaatccacaggaaaggaatctgatttgaaatggtcatatgcttatgcaattcctactgtgatgtaggacagtcagtttgcttttgggttacaggcagtttctagaagtacagagacagttacagagctgttcttcatggaactttgagaaatggtccatctctgcaatagttcaagcccactgagtgtatggacccaagctgctgtgctgaagggagagcttyctattgattgccacatgcaaaactactctaaaaagtatgtaa

SEQ ID NO: 809950 - DNA, 623 bp, Homo sapiens
tggattttattttggtgtacatatcaatttaggaagaattgacattcttacagtatggagtccttccatgcagacatacagtctgtttctctaaaaagttttctttacatttctataaactataccctataaaatttgtagcagttttcattctaagtgggcagagtacattgtttctggggtaaagtgacttttaatgggagaagttccttcatgaaccttttaatttatgcaagagggtctccagaactagtctagaattatagtaaatgagagagataaaaaattaaattttctctgcatgataaagaagagggaattttcagatttcatctgtgggcaaaagaaacactggtttgtgtgcactgagaatgggatgaacaggacagataagataagaatttcagcagagaagatggagaccccttcctgtcctgatggtcttgatttcttgaaaagcctttgtgtggaaagagactggtactaaacgggaggaccaacacagrtaagtgcttcccaacccttccagacacttcctatgctgcagtgtaagccatagagagtatcatctacacataatcttttaaaaataaatacaatgccctgcctaacatgtagaggca

SEQ ID NO: 809951 - DNA, 632 bp, Homo sapiens
attgctaacaatttataaaatattatggcccccatcaaacrtcttccagtagagaagctaggtgccttaaaactgttggaaaagacgatggacaataacctaaacacacttgagcatgaggaacttgaaccaaaacatttggcacaaaacatttacattaggaaaagagaaaccaaaggtctgacatggccaaggtagcttcactcctagtatcaaaaatctaatacctctgagttaaacttaatatttgtttctaatggcactgactaccattccagtgtccagggaaacatttagataattttctctttcccagttactcagaacactaggaggaaaggagtttacttatagagtttacaacacacagattttcaaaccaacaaagtctgtccccaaaacagacatttgaaacctcgaacacaggtaaaaatagctagataaggcagaatccagaggaaattcaactttgttccccactagtagctatataaaaggaaaagtgtttgtgttctagttcagctaatggacaacactcacactgtcattatttttataactcttatatcgggtatttggaatgcagtggtttgagcatttcaaatagtttctttttccatgttagtgccatg

SEQ ID NO: 809952 - DNA, 612 bp, Homo sapiens
gaaggagaaatgaaatcctcttcagacaagcaaatgctaagggaattcattaccgttagacctgccttacaagagttcctcaaggcagtgctaaacttggaaatgaaagaacaataactgcatcagaaaacacacttaagcacataccccattgacaccatagagcaactatacaattgagtctacataacaaccagctaacagcatgatgacaggatcacatcctcacatatcaatattgaccctgaatgtgaggaggctaaataccccacttaaaaggcatgaagtggcaagttgaataaaaaagaaagaatcaactgtctactgtcttcaaaagacctatctcacagttaatgatacccataggctcaaagtaaagtgatgaacaaagatctatcaggcaaatggaaaacaacaaagagcagggggtagctattcttgtatatgatattcaaacagattttaagcaatgatgaaaaaggacaaagaagggcattacataataataaagtgcttaatccaacaagaacacttaactcccctaaatatatacctacccaacattggagcaytgagattcataaaactggttcttagagacccattaagaga

SEQ ID NO: 809953 - DNA, 606 bp, Homo sapiens
ggcaatccagaggagagagtgttgacttttcctggaattatgaggaaatgcttggaaggacaactgacttttgagctgagccttgaggggtgggagggaaccatctaagtcaaactagaagtataggaaatctttgtgtgtaaggacacatcatctgagagatgtgaatgaagatggctcatgtgtagcataactagtaattcaggagggctgtggcatagagaacatgttagggttggttggaaacaaaatatattatgacattagttacttaattgcttatttgttacctgtctcttccactagaatttaaatttcatcagggcaaggacttagcttattttattttcttccatattcccagcaacttccaaagttcctaaagcatggtataattatatattattgtttgataaaattaatcagttatctattaattacccaatttacttgcctctaacaatgttctcatccctttcttatgtgcttctgtgtcactttgttaataactttctagtgatasttttgtgtgctggtctcctaactcccttacagattagaagctctttatgaaaagtgaccagcatcatggctactggcacatag

SEQ ID NO: 809954 - DNA, 636 bp, Homo sapiens
gctgagaatttttcaaaattaatgacagacacaaaaaccacagatacagaatgctcaaagaacaccaagcaggataaatacmaaaaaaaaaaaaatctacatctaggcctattatattcaaactgcagaaggtcaatgacaaagagaaaatctcgacagaagcctggtagagaggagtgtgggatacattacctacagagaaacaaaaataagaattacattgaatttctctttggacaccatgaaagcaagaagagaagagtgaaatattggaagtgtggaaaggatattcttattttttttctttctttgagacagagtcttactgtcacccaggctggagtgcaatgatgccatcatggctcactgcagcctcaacctcctgggctcaaacaatcctcctgcctcagcttcccctccaagtagctaggactataggattgccactatgccaggccaatttttgtattttttgtagagtccgggtttggctgactgtaatatatatatatatatatttgtcatttcataagtcttcgaaaagtcttcttagtaatcttcccagaaattgagaaaatgaatgactcaaatgactaacaggatccttttaaagtcaggtggggctgggtgtggtgg

SEQ ID NO: 809955 - DNA, 596 bp, Homo sapiens
ttctagatttatgatgtgggcatttagtgctataaatttccctcttaacactgctttagctgtgtcccagagattctrgtaggttgtctctccgttctcattggtttcaaataacttcttgatttctgccttcatttcaccatttactcaggagtcattcaggagcaggttgttcaatttccacataattgtgtggttttgagtgagtttcttaattctgagttctaattggattgcactgtggtctgagagactgttactttttcagttctttcatatttgctgaggagtgttttacttctgattatgtggtcgattttagaataagtgccatgtggcactgagtagaatgtatatgctgttgatttggtgtagagagttctgtagacgcctactaagtccacttgatccagagctgagttcaagtcttgaatatccttgttaattttctgtctcgttgatctaatactgacagtggggtgttaaagtttctcactgttattgtgtgggagtctaagtctctttgtaggtttctaagaacttctttcatgaatctgggtgctcctgtatttggtgcatatatatttagaatagtt

SEQ ID NO: 809956 - DNA, 529 bp, Homo sapiens
agggaccaggtctgttcagcctagcaatatagacccagtattggtcaggaaattattttaggggcactgtatagaatatttaggagtaggggytgggcgcagtggctcatgcctgtaatcccaacactttgggaggccaaggcgggtggatcacctgaggtcaggagttcaagaccagcctggccaacatagtgaaaccccatctctactaaaaatacaaaggttagctgggtgtggtggcaagcacctgtagtcccagctacttggaaggctgaggcaggagaatcactggaacctgggaggaagaagttgcagtgagccaatatcacaccactgtactccagcctgggcaataaagcaagactccatctcaaaaaaaaaaaaaaaaaaaaaaaaaggaatatttaggagtaggaattagaagtgaaaaggttagaggcaaaagaaaagaatccaagaagagcaattaaagtccattctgatgatctagcaatcccactactggctatgtttccaaaggaaatgaaat

SEQ ID NO: 809957 - DNA, 507 bp, Homo sapiens
aatcagttatatataatttatatacttgttatcacaaagttaaactttaattctgtgaataatttatcacattcagctaaaacagtaagctatagccagctgtattgtacttatatgaattgcaaacataaagyttcattcagaagggcttctgaagtagctgtgcaggtcagagagagaaattcaaacatacagagtgggataatgctgatctaactgcactaattttgtcatagacactttagttgatatttagggtacaacatgacaatcagttctccctaactgcagtaaagcaaaaaaaaaaaaaaaaaaaaaaaaaaaaaagattgcctctaacttgggtggttgcagcctactttccttggaaaaggaggctatatgtagctgtatgacagcgtaaacccaatccattaactaattaaataaaccagtgcttaacagggcatgggacttcataagagcctttgttttcttgtgacgaaaaggtcaaaatctaggtttttt

SEQ ID NO: 809958 - DNA, 602 bp, Homo sapiens
ttctcccattctgtaggctgtttattctgttttcttttgttgtgcagaagctcattaattaggtaacatttttcaatttttggctttgttgaaattgctttgggagtattatacgaagacgtataatatctttgccaggggctacatccagaatagtatttccttagttttcttctagggtttttatagttgtaaattttacagttaagtctttaattcctaaagttgattttttaacatggtaaaagaaagggctccagttttaatcttctgcatatggctagccagttatcccagcaccacttattgaataggaagtcctttccccattgcttttgtcgactttgtcaaagatcagatggttgtaggtgtgcagctttatttctgagctctctaacctgttcccttcagtctctgtgtctctttttgtactaataccacacagttttggctactgtagccttgtagtgtaattygaagtgaggtagtgtgatccctccagctttgttctttttgcttagcattacttgagctatttgtgctcagtcttggttccacatgaattttagaatacctttttctaattctgtgaaaaatgtcac

SEQ ID NO: 809959 - DNA, 602 bp, Homo sapiens
ttctcccattctgtaggctgtttattctgttttcttttgttgtgcagaagctcattaattaggtaacatttttcaatttttggctttgttgaaattgctttgggagtattatacgaagacgtataatatctttgccaggggctacatccagaatagtatttccttagttttcttctagggtttttatagttgtaaattttacagttaagtctttaattcctaaagttgattttttaacatggtaaaagaaagggctccagttttaatcttctgcatatggctagccagttatcccagcaccacttattgaataggaagtcctttccccattgcttttgtcgactttgtcaaagatcagatggttgtaggtgtgcagctttatttctgagctctctaacctgttcccttcagtctctgtgtctctttttgtactaataccacacagttttggctactgtagccttgtagtgtaatttgaagtgaggtagtgtgatccctccagctttgttctttttgcttagcattacttgagctatttgtgctcartcttggttccacatgaattttagaatacctttttctaattctgtgaaaaatgtcac

SEQ ID NO: 809960 - DNA, 567 bp, Homo sapiens
gagcttgcaccctctgaagccatgggccgagctgtaccttggacccttttagccacagctggagcagccaggatgcagggcaccaagtctctaggctgcacacagcaggggraccctgggcccagcccatgaaaccattttttcctcctaggcctctgggcctataataggagagcctgccacaaaggtctctgatatgccctggagacattttccccattctcttagtgattaacatttggcccctcattacttatgcaaatttctacagctggcttcaatttctcctcagaaaataggttcttcttttctatcgcatcatcaggctgcaaattttctgaacttttatgctctgcttttaaacataagttccaattccaaaccatatctttgtgaatacataagactgaatgcttttaacaacacccaggtcacatcttgaatgctttgctacttagaaatttcttccaccagatgccctaaatctctctctctcaagttcaaagttgcacaaatctctagggcaaaaatgctcccagtctctttcctaaaacattgcaagagtca

SEQ ID NO: 809961 - DNA, 632 bp, Homo sapiens
cctagtaaaatttcagaattttaagaataaaaggaaaatagcctccaaacataaataataagttatttaaaaagagaaggagacagcaatcaatcatctcatttgtaacattagaagttagaagaccatggaatgacaactacagacatgagtgagaaggtctgaaacctgagaatccattattctaaccaagatagcattcatctgtaaggagaaaggaagatatttgctgatatacagtattttaaaattacatccaatttttataagcaaaacactttggaagggattcctaccaagtgacaaaaaaatctcaagagagttatcaagagagggaaaaagagagaaaacactaatcagcaatgaaccaattcctctcatatgtatgtaaatagataaatcagtgtataatgttaaataatgatgcagcaattaaaaaatttaaaaatagtctgggaccaaaagaagtaggggattttgtcaaattcaataaattgaggtaggaaaaggaataaaaaagtaaaaaccttttccaaaggtaatttagagtgaagcagtaaagayattttacaagtttcatcttttgggcctgagggaaggcacattgttggaggagaaatggtggctgtgtt

SEQ ID NO: 809962 - DNA, 470 bp, Homo sapiens
aattaaagcttgttgtttataagmtacccagtttatggcattgtgttatagcagcataaactaagatagtcacccaaagcataggcatccaactccaggtaactccaggtgataatgcaagaaattagttttcaaatatcatggtctataagtatcctatttattactggcaatgaggttattagtgcttttaaatctaatcacattttagaaccaattccagattcccatctttaatattctgtacccctggatccactttagtgccaaaagctatgtcagtctgggtttgttcagaaaagctgagggactacaaggatgacagaaataagtgtaaatcaaatttataagtaagaattcatgtgtacacaaatttgtgtgtagctggtggagatttgtctggaggcctgcaactggaggatcagagagacttccattaatcacatcattattaagctctggcactggca

SEQ ID NO: 809963 - DNA, 619 bp, Homo sapiens
caatctctggctagaggcttcagagagtgcatggccttgctgacatgttgatttaggacttccaggttccagaactgtgagagaataaatttctgttgtttcaagtgactctgtttgtgataatttkttataacagaccttaggaaataaagggaaactaatatatctaagaagaagcaaatgttatccaaatttattgctaaagcatctgtggggaaaatgagtatattttgagtgctggtgtgtgagagagctatatataatttattttgtctgatcttcataataatctgtgaggtagatattagtatctacacttaaaaaatgaggaatatgaggattgaaaaagttcaggacattttctatagtcatgcatatcttttagtttcaaagcttagggcagatcttaagcactctcattttctctctctcaaacctcccccgcccccccaccccacacagtggtaactgggtgaggtgatggatatgttaatttggttgattatggagggtatttcacaatgtttatgtatataaaattatcaagttgtacaacttaaacatacaccatttttaaccgtcaataaagttgggaaaagaagaaaaaataaataaacaa

SEQ ID NO: 809964 - DNA, 603 bp, Homo sapiens
atattcagcttgttcttcactgcatcaaattgctcttaatgtcttcaaacttgtaygtgaacttaagggacctccttcacacccatttgttgccctttccccagatcctttgttgggctgatatggacttagactgcagaatgagaaatcaatgagagacttgacagccagagaaagcaaacaaactcagtgatgtgaaaactgctgtcaggtcagtgtaacaagcagctctttctagatttcactgcactgcagtgatcagaaactggggtgggggggagattataccttagttctatgtctatagacaactacagattcaataatcagagagattatctcctgtacataacaatattctacaataagcactggcataagttcatttcttacaagtagaagtcaacataatgtaagctcacatttaaggagcatgttctgtgttgctaagaactgctcttatgccttcctcacttaatgttcatcacattcccatcagggtggtgccataaatattccattttatagatgtaacatttgcagtatagagagcttcagccacttgctaggagtctcagagatgatcaggtgatggaggcagaa

SEQ ID NO: 809965 - DNA, 527 bp, Homo sapiens
agcagtaatattttgaaaggcatcttcctgagcagtaggtctcaacagtgggcttaaaatattcagtaaacccatgctatasacagatgtgctgtcatccaggctttgttgttttatttacagagcccaggcagactagatttagtgtaattcttaagggccttgggattttcagaatggtaaatgagcattggcttcaatttcaagtcaccagttgcattagcccctaacaagagagtcagcctgccttttgaagctttgaagccagacattggcttcatctctctagctttcaaagtgctaggtggcatcttcttccaagagaaagctgtttcatctacattgaaaatttgtttagtgtaggctccttcatcaaggatcttagctagatctggataacttactacagctcctccatcagcacttgctagctcaccttgcacttttatgttatgaagacaccttctcatcttaaacctcatgaaccagtctctgttaacttcagacttttcttctgtagctccctc

SEQ ID NO: 809966 - DNA, 605 bp, Homo sapiens
tgcacccggctcaaaatatcttattgtactgtactcaccctttttctttttgtgatgaagaagggatggagcaggacggcaagagagttcatcaggcaactcagaatggcacacaayttaaactaatgagttgtttatttcttgaatttccgtttaatattttcagaccatggttgaccacaggtaactgaaactgcagagagcaaaaccaccgataagggggaactcctgtattgataacatctttcaaggcccaatctcaaagccacctccttcatagagtttttcctgcctcccacacatctgagacctcctcctctgagttccttctgactgttacctggtctacctcaggctgcttctcatactctgaggctacacttttaaaaatataagaacctagtgatattatttttaataacacattttatttaacataatatatcccaaatattatcatttcaacaagtaatcaataaaaattaatatatcaaaaactaaaattaaaatgaaaaataacaaaactaaaattgcctgtgttgtttgcattatatttctattagagaggcctattctaaagttactttttctccagcttaattaaa

SEQ ID NO: 809967 - DNA, 588 bp, Homo sapiens
caaagttcactaacctttaccaaaatatggatgaaccattcccctaaactatccaattccctgtgatctgatcctgcacctaccaagcaactttccaacttctgagctctgataccagtaagagtgttccctgaaaagccaactccagcaatccctagtaataaatattccccacttaaactaattagatggtaaaggaaacaattttttaataagtgaatgttagtgtccagtctgatccatcctgaattttctccttataaataagtacattggctacttggtttatacatcagtctcttttgaggtaagtcactagggctgttccccaaatagttccagtcttccacatattaggcttatggtaggattggacctcctgacccctgtggttggatgaggccatgtgacaatggtgtattcatgagtggaagtgatgtgtcacttcacggctagagcacctaattgctggtgtagactttccagagctttcatttccctagtgagggtggtttggcaacatttaagacatgggctgctckgtaataggtcctggaaggaggtcactgtggagcacaggtccccaga

SEQ ID NO: 809968 - DNA, 440 bp, Homo sapiens
tcaatacacaaaaaccgatttggataacaaatcttgctactaacacaaaatattcacgatataaaagtatttgcaacttagatgaggcaaacatggagattatgtatgtatacacacacacacacacacacacacatacaaacaccatatatattcactatattatagtgaaattatttgtaacaatttttatctgcttttatcttttaaatgcagttcataatgttatacataccctcagatgttagtttcatattcacgtgaacccaaatgaatttgttcagatggggcattgaaaacaaaaggaagcgattctggttaacttaacataaaaccaggtgtgtgtatgtgttyggaggagcaaaaaacaaaagcgaagttgattggcaagggtatggggaagtcaccaaactaaaaaaggtagatgaccagaacaggag

SEQ ID NO: 809969 - DNA, 599 bp, Homo sapiens
attttaggacaagaatgtaatatataacgttctttttacataaattctaccccccttttctttytttttttttttaacttaggatagttctgaactggtgaggtgtgctcacagtgaggtttcctttaaaagttatttttctactttttttctgttagcaaagctgttgccactacagattgaatgtatttgggccatccacgggttactgggttaaggaattttgataggaaggctacgggttgtcagtggtctcagtgctttcgggctacgcccttgtttacactgacaacaaagtggtattggagtgttatatgatcacggagaagacctttaattatcaattataggttctaaatttaccttggcttttaaaggaatagtgtacactgtttttttcttaactacttgtatatctctctctttctctctttgacttccttctgtctctgtctcttcctctctctctctgcctctttctctttgacttcctctttgtctcttcctgtctctcttgctttctctctttgcctcttttcttctctctctctctttcctctctctctctttctctcctctctctctctcccttttctctc

SEQ ID NO: 809970 - DNA, 562 bp, Homo sapiens
ttatgaacaacacagatttgagctgtgtgggttcaattatactcagatttcctcctgcctgtgccaccccgaaatarcaagagcgacccctcctcttccttctcctcagcctgcttaacgtgaagacgatgaagacaaagacctttattgtgacccacttccacttaataacagtatatgtattttctcttcctaatgtttttcttcgtaacatttgcttttctctaggtttattataagaatacagtctatattacatatatgatacaacagatgtgttaattatctgtgttgttgggaaggcttctggtcaacagtgggctattagtaggtaagatctgggggagtcaaaaattctgtgtggattttaactgcatggggcattggcacccctagcccctgtgttgttcaagaatcaaccgtaatattttcatagcacactggaatcgacagaggggctcctggggctggaggtgtcctgtctggggctccagttgcctcagttctctcttccaagggctgagggggttctacaattgtggcgtgccttggaaatgttagg

SEQ ID NO: 809971 - DNA, 631 bp, Homo sapiens
cttaaagaactagaaaatcaagatcaaaccaaatccaaagctagtggaagaaaagaaataataaagattagaacagatataaattaaaatgaggaaaacaatacaaaagattaatgmaacaaaagtttgtttttttaaaaagataaatgaagttgacaaacctttagccagactaagaaaaaaagagaagacccaaataaataaaatcagaaatgagaaaagagacattacattaatactacagaaattcaaaggatcattagaggctactatgagtaactatacaccaataaattggaaaacctagaagaaatgaataaattcctagacacaaaacctaccaagattgaaccgtgaagaaatgggatcaaagccaaaataacaaaaaaaacaagtaatgggatcaaagccaaaataaagtctcccagaaaagaaaagccaacaaaaacctgatggcttcactgttgaatgttaccaaacatttaaaaaagaatgaataccaatcctactcaaactattccaaaaaacagagaaggagggaatactttcaaactcattttacaaggccagtattaccctgataccaaaaccagacaaagacacatcaaaaaaaaaaagaaaactacaagca

SEQ ID NO: 809972 - DNA, 602 bp, Homo sapiens
tccttgtttgcagaaaacatgatcttatatttggaaaaacttaaagactccaccaaaaaactattaragccaataaacaaattcactaaagttgtaggatataaaatcaacatacaaaaatcagtagcatgtctatagggcaacagagaacaatctgaaaaagaaatcaaggaaataatcccatttacaatagctacaaataaaattaaatatctacaaactaaccaaagaagtgaaaaatttctacaatgaaaactataaaacactgatgaaagaaattgaagaggacacaaaaaacatggaaagatgttccatattcacagatcagaagaataaatattgttaaaatgtccatactactcaaagtaatctatactttgtagagattcaatgcaatccctacaaaataccaatgatgttcttcacagcaatagaaaaaaaactaccctaaaatttatgtggaaccacaaaagatgcagaatagccaaagctaccttgagcaaaaggaacaaggctggatgaatcacattacctgactttcaaattatactgcagagctatagtcattaaaacagtatggtaatggcatataaacaaaaata

SEQ ID NO: 809973 - DNA, 619 bp, Homo sapiens
aggctggtctcgaacttctgacctcgggtgatctgcctaactcggcctcccaaggtgctggggattagaggcatgagccacaatgcccggcctcagagtaattttttaaattaaaattttaaaatgtggatataattataaatttaaatatacttataagaaataaaagcctgggcaacatggtgaggcctagtctctacaaaaaatttaaaaattagctgggcatggggtcgcacgcctgtggtcttagctacttgggaggctgaggtgggaggttcacttgaggttgaggtcgaggctgcagtgagccatacttgggccactgcactccagcctggttgacagagtgagaccccgtctcaaaaaataaaaataaaaaaaagaaaatgcagactccgtgtatcctttatccagtttcccacaacaataacaccttgcgaaactataggacaatatcacaactaggatattgatattgacacaatttaccaatcttacccacatctcccgtggyttaacctctactgtgtgcgtgcacacgcattcacgtgtgtgtatacttagttctatgcaatcttgtcacgggtaaatttggggatccaccacagtcaagataaag

SEQ ID NO: 809974 - DNA, 637 bp, Homo sapiens
ttctcatttacttcccattgtctcctctgtggactttgcctatttgaaatcctacctatcttttcaggtttactgcaaagcccatctttttggatgctactcaagggtgcttttcatgatccttccagagaaaaggaatttttctttttttaccaaccatttttgctttacttttatttatcattcaccctatttatatcatacttatataatatatttatgtgtttatgtataatctctctccagctaaattataaatttttagaaatcagaaaatatgcaatattttttccttgaggtcatagtagcaactaggatgatgcctcaaatatttatgtgctcaataaatattgggtgaatcaataaaatactgtcagcaaattcaacactaacagcactctaataacatattttatgattctaatattctagttcacagaacaaatattttaagatttggagtatttcaatgtatgacaaggataaaaatttatgaagtgatatttaattccactctgtgattatttcgtttatttcgttggttattttakttgtctatcactagactggaatctccataaaagcaaatacatactttgttcaacattttattctcaagtatgtattgagtatgtgt

SEQ ID NO: 809975 - DNA, 565 bp, Homo sapiens
tgatttttgcatatagtgtaaggaagggacccagcttcaatcatctgcatatggctagccagttatctgagcaccatttattgaatagggaatctttccccaatttttgtwtttgtcagctttgtcaaagatcagatggtcatagatgtgtggccttatttctaggatctctattctgtcacccaaaacagcaaagatggtggcccaccccttcctctgggagtgccatctcaaggggatttcagatctctgtcatctggagagcttggaccgcagtagctggaggccctagttgggaggtcccacccagtgaggaagaacaggatcaggcacccacttaaagctgcagtctggccacattttggtagagcagctgtgctatgccgatggatcccttccaccccagcttggctcagacactccaaagcctgaaggctggaacactaaggcttctgaacagcaaagatggcaccccacccctccacccgggagctccttcttagggaggtgaaatgctgctgctggtagctagctggaattctaagccattgggtctcatcttgtg

SEQ ID NO: 809976 - DNA, 481 bp, Homo sapiens
ggcctggcagaagcaggaatggatgatacatggctctcatgatccaatggagggaagcaggtgcttaacacatgggctgggtgtggcaccatggggatgagtgctgcctaagcacctascatgtgccacccactctgctaggtgcatgaagccagttactgagtgggcctcttaactgtcctgtgtggtaggtacgtttatccctatttcacagatgtgagcactgaggctcagagaggcaagtgaacattgtctcctctgtaatgaccgtcccctataaactcctggcaggagggccttgccagctgagtcatggcactcatcataaaggcttcaaggaggaggggagtcattatagaggagacaatgggccacatagtagatgcagttttctgtagaagttttattttaaaaatcaatgttattgtttttaaatacagaaacttttgatatttccattagccctggttaaaagctgaag

SEQ ID NO: 809977 - DNA, 663 bp, Homo sapiens
acattctcctgtcctcagctsggatccatcctgccccaaatctttgaccattgtccccacagaccctccctttccagtaaagtcctctgttgcccccagctctgtgccaacttggacacgtggtgcatcatgtcaccccagaactgctgcccccagctgcaggagcacagccaacagccttgcaaacagtacaacctctgccacaggcgcagccaggtatgcgggggcagggacacggcgagagcgggagccggtgtgaagttaggacacctaggcttgggccctgactctgccctcactagctctgtgacttcaggtcacttgctatgtatccaagcctcaatttctcctttctgtgaaatggggcagatacagcccatgcccacagcccgctctttggattgactcagaaggcaccactggtgtctgtcacatcactgtcatgctggggagtgcactacaaaccagagagcagggatactttgtgctgaggctctactgagccctctctagtgtggacacggcctcgtgtctgccatgactggactggacaaggactaggtgtcaggtccataactataccaaatgttacacttggggtcaggtttgagcccatgctgtggtctggagggagggagtgagtgagcagatagctgaaagaac

SEQ ID NO: 809978 - DNA, 663 bp, Homo sapiens
acattctcctgtcctcagctgggatccatcctgccccaaatctttgaccattgtccccacagaccctccctttccagtaaagtcctctgttgcccccagctctgtgccaacttggacacgtggtgcatcatgtcaccccagaactgctgcccccagctgcaggagcacagccaacagccttgcaaacagtacaacctctgccacaggcgcagccaggtatgcgggggcagggacacggcgagagcgggagccggtgtgaagttaggacacctaggcttgggccctgactctgccctcactagctctgtgacttcaggtcacttgctatgtatccaagcctcaatttctcctttctgtgaaatggggcagatacagcccatgcccacagcccgctctttggattgactcagaaggcaccactggtgtctgtcacatcactgtcatgctggggagtgcactacaaaccagagagcagggatactttgtgctgaggctctactgagccctctctagtgtggacacggcctcgtgtctgccatgactggactggacaaggactaggtgtcaggtccataactataccaaatgttacacttggggtcaggtttgagcccatgctgtggtctggagggagggagkgagtgagcagatagctgaaagaac

SEQ ID NO: 809979 - DNA, 423 bp, Homo sapiens
aaatttaaatcccaaacttcatttttgttgactttgttctacttgacatcagtagagcacttcttgctgaattgggtygggggtcgtcctcaggctcaagattcataccaatacctggccatatacctagtcacatgtcagaccagatgtgcccggaccttttgtaggacatgctatctgtggtagaaattttgagcgtggtatgtcttgagttcagttagacagtccagaggatctttgatacttatttaaaaaccttagaaagctaatttaagctgggctgggagcagtggctcatgcttgttatcctagcagtctgggagggtgaggtgggtggatcacgaggtcaggagttcaagaccagcctggccaagatggtgaaatcctgtctctattaaaaatacaaaaataaaagatacaaaa

SEQ ID NO: 809980 - DNA, 599 bp, Homo sapiens
agtttcgctctcgttgcccaggctggagtgcagtggcatgatctcagctsactgcaacctccgcttcctgggttccaccgattctcgtacctcagcctcctgagtagctgggattacaggagcctgctatcacgcccagctaatttttgtatttttagtagagatggggttttgccatgttggccaggctggtctcgaactcctaacctcaagtgatccacctgcctcggcctcccaaagtgccaggattacaggcgtgagccaccgtgcccagtcagaagtttttactttcagctccattctcaattttctcattttagcttatgcttttgtagttgtatctaagaactctttgcctagctcaaggtcatgaagatttttttgttttcttctagaagtgttataattttagcacttacatttaggtcaatggttcattttgaattactttttatatatcctataaggtaaggatctaaataatttttttgcatgtggagctacagttgtctcagcaacgtttgttgaaaagactattgtattagtccattcttgcattgctataaagaactacctgagactgggtaatttatgaagaa

SEQ ID NO: 809981 - DNA, 580 bp, Homo sapiens
ttagaaagaaaatctaaaaatcaactcaagactagaagcaagagagacattctgtttagaataatgaagaataggagaactactagcaagaagttaacctttgaagcrcaaaatgtttaactgtacaccggatgcttcatcctgaggtcagacaaccaaaagaaactccgcccctggtttcctccactctcaagatttaaaacaggccagcacggtggctcaagcctgtaatcctagcactttgggaagccgaggggggcgaatcacttgaggtcaggagttcgagaccagactggccaacatggtgaaatgctgtctctactaaaaatacaaaaattttaggcatggtggcgtccacctgtaatcccagctatttgggaggctgaggcacaaaaaacactgtaacctggaaggtggaggttgcagagagccaagatcatgccactgaactccaacctggacaaaagagcaagactcagtctcaggaaaaaaaaaaaaaaaaaaagatttaaaacaatgtctccctccctaactcccctattgagttgtagaagcagacacaggtgatgacagccaccca

SEQ ID NO: 809982 - DNA, 618 bp, Homo sapiens
aggtcacattctgaggttctaggtgaacatgaattttgggtacacactattcaaccaagtataggcaccaactgtgtctaatatttttatagattccctggccctagtgtaaaatacatacagaktaagccagagatagcttggtgactgagcatgcaggtgccggagtaaaattccctgggaaaaaaacattctttctgcctctaacaactgtgagcctttaagcgatggttccaaatgctctatgccttggagtcctaatgtttaaaatagtacctatttcacagggttctaatgagactgaacttagttaattcagaacaagtgcttagaacaataactagtccataagaagtattcaacaaagattatttttagacagcaaacacaatatttttaaatgaaataatgcaagcaaggagttccagaaagcactaaaacagcctatattcagctgttaatattataaaatattctcacatcaaccctttctctgtgtgtagtatttttagagcatcaatgaacattcaatttaaaagagagaatggctgtaggagggaaggaggtgaaaaggaaaaggcttgccttccctttcccctcaggggaaaaaattaaaaa

SEQ ID NO: 809983 - DNA, 585 bp, Homo sapiens
aatggccctccaatgcagtgctgaagtgctgtctagtgtttctatgctcaagaaggctgcgattggggcaggcttagtggcttacacctgtaatcccagtgctttggraggccgagacaggagaatcacttgaggccaggagttagaggctagcctggacaacatagtgagaccctgtctctacaaaaaaaatttttttaattaactgagtgtagtggcttacacttatagtcccagctactcaggaggctgagatgggaggatctattgagcccaggaggttgaggctgcaatgagctataattgctacactgcacttcagcctgggcaacaaagtgagaccctgtttctaaaggaaagaaaaaagtaaaaaagaagtctgtgatgtgccttatagagaaaatatgtgcgttagataagctttattcaggtatgaattatggtgctgttggctgtgagtttgatgttaatgaatgaacagcatatattaaataatattttaaaacagaaatgcacataaaaaggttatgtattgatcaattgatgatgatgttatcagaggccggcaggaatctaatgctgtat

SEQ ID NO: 809984 - DNA, 586 bp, Homo sapiens
caggctcagtggctcacacctgtaatcccaacactttgggaggccaaggcgggaggattgtttgagcctaggagaccagtctgggcaacatggcaaaacccsatctctacaaaaaatacacaaagattagcagggcatggtggcgcatgcctgtagttccagctactggggaggctgaggtgggaggatcacctgagcctggaaggttgaggctgcagtgggctgtgatcatgccactgcacaccagccttggtgacagagcaagatcctgtctcaaaaaacaaaccaaaccaagccaaaccaaaacaaaaacaaaaactcagaacgtctcagattttagcagcccaaggttctctcagcagcagccccagctgtctgcttcccttccaggtcccgttccaggggcaaggactgggtctggacctgggggtgggggtggggaggggccatatggggagtctcctcatcttgcgtacaaatagtccaggaaccggggggcctgaggacacttattcatggtggtctgattctatggggtggggtaagtgtcagggcatggaccgtctttaggcattaaggacattca

SEQ ID NO: 809985 - DNA, 401 bp, Homo sapiens
tggaaaggtgggacaattggaagtggagacttccaggtcataggcagattcaaacgttttctgattggcaaytggttgagttactatctaaagacctggaatcaataggaaagaatgtctcctttaaggtaatgggttgcggagaccaaggtattatcttgcagatgaagtctccagataacaagcttcagagagaatagattgtaaatgtatcttatcatacttaaagagtctgttctatcagtctttgcttttttgggtgggggagtgcggagtctcagtctgtcacccaggctagagtgcagtgacaccatcttggctcactgcagtctctgcctcccaggttccagtgattctcctgccttagcctcccgagtaactgggattacaggcatgtgcca

SEQ ID NO: 809986 - DNA, 394 bp, Homo sapiens
gtagttaattaggtttctattttctttgttatttagctattttatgtgctttgtgtccttctccgtgggagctgatctcctatagggcacttatttctttcatattctccttaacacctagcacaatctggggactcctagtatttacattcatactcgtattgaatttaattgttgtgttgagtcattatcttgctttttcttttacaaaaataattgtgtattgctcaagaaatacttgggaaaatttaatctttatttaatttcctttttgtrtttactaaaatgagggcattttctatgtgtgtttgaccaaaaggaagatataggagggaacaatttttcagaatgtgattttctattctgtttgacctccactgagtaaataatgtac

SEQ ID NO: 809987 - DNA, 394 bp, Homo sapiens
gtagttaattaggtttctattttctttgttatttagctattttatgtgctttgtgtccttctccgtgggagctgatctcctatagggcacttatttctttcatattctccttaacacctagcacaatctggggactcctagtatttacattcatactcgtattgaatttaattgttgtgttgagtcattatcttgctttttcttttacaaaaataattgtgtattgctcaagaaatacttgggaaaatttaatctttatttaatttcctttttgtgtttactaaaatgagggcattktctatgtgtgtttgaccaaaaggaagatataggagggaacaatttttcagaatgtgattttctattctgtttgacctccactgagtaaataatgtac

SEQ ID NO: 809988 - DNA, 571 bp, Homo sapiens
ttattctttccactatgaaactatatttatctataaatgtataagtaagaatatattttctgtattatataattatacttgtatttatatattatataattatatataagattatatttataacaatatattatatatttataatatgtaagaatatattaatatatcaataatataagtagatataaaagtaaatatttatattgtatttatgtaagtatataagtacatttgtaaatatataagcatatttaaatatatattatatataacaaatatataagaagatatattcttttaaaaagtttcttttaattgcagtatagtattccagatgtgtatatgattatttaaagccttatagctgccctataagattctatcacgtttctaaggttttactattacaagcaatgcttcagtaaacaatccttgcacttattttcctgtgtttgtgtgcaaatatttactgaggatagttacttgacgtgtactctctrataagatatgtgcattttaattttgtgtgcttctgacaaaatttccccactcctgctagcaaagtatggtg

SEQ ID NO: 809989 - DNA, 492 bp, Homo sapiens
cacaaatcggggagcccccagaatcacagcagattcacagagactccagcgcagccacgtggtggaagatttatagaccaaaaaagggaaatgacgtacagaaatcggcagtgaggtacagaaacagctggattggttacaggttggcgtttgccttatttgaacacagtttgaacacttagcagtctatgagtgattgaaatatggcctttgggaccaggccaaggctcagttactgttacaggcacatactcctaagttaggttttcaatgttgtctgactattaaggtaggttacagttcatccatccacaaggactcaaatatagaagtacagagtccttctcaggtcatatttagtttgctttaacatcatccaggtaataagcacagtacctaacaggtagtttttccrttcttaccattctcccaccatacacctttacacccttaagtaggctccttgttcccttctttgtatctatgtgtagt

SEQ ID NO: 809990 - DNA, 648 bp, Homo sapiens
agaagctggaaaaggcttgtaagtagattatctcttgaaaattccagaaggaatgaagctctgccaacgtctcagtgttagcctgtaacactcacttcacacttctgacttccagaactgtaaggtaataaatttttgctgtcttatgccattaagtgtgtgataactttttatagtaggaaaagaaactaatacaacatagatgcaaaaatgtttaacaaaatattagcaaaccagatcagagaaaatgtagaataggaattgtacaccatgaccaactggactttattctagggctggctcaacatttaaaatgaattaatgtaattcacaacatcaccaggataaagaagaaaatcatctggtcatgtcaattgatacaaaaaagcatttaacaaaatccaatacccattcataataaaattctcagcaaacaaggaatagaggggacttcctctactctgtaaggaatacttacaaaaatccaacagctaacttcatacttcctggtgagaaacagatgcttccttactaagatcaggaacaaagtaaagataytccttcacagcactcctattcaacatattactggtagtcttagtgcaataagacaagaaaaggaaataaaaaaaaaagattagaaaggaa

SEQ ID NO: 809991 - DNA, 565 bp, Homo sapiens
acccatcaccaccatcacaaccaccgtcactacaactgccccctccaccatcacgataaccacgatctccaccagcaccagcacgggcaccaccatctacagccaccaccttcaccrtcacaaccaccaccagtagtaccgtcactacaaccaccacctccaccagcaccaattccatcaccagctccaatggcttagcctttctcttctaacacaagcaggaagagcagagttttcagaatggcagaagctaatcctcatcagaattatttttcatttccacacacttccccctcctctcatgagaagccctgaaggatgaggaaaaagggacctatctgagtcaggaaacctggaggagggagggttccaggggcctaggaactgtttttgagggacttctaatccccagaggtccccaggacaacttacctaacaaccttgggaaggtgtcctagaagggtgctgtcacacgcctgtcttcccctgactttcctgagttgagaaaaatagattactaccctatgaccctggataagttaattctcaagccaaatctcagttt

SEQ ID NO: 809992 - DNA, 585 bp, Homo sapiens
ctctggtcatcccactgctcattatatgctaattataatgcattagcatgctaaaagacactcccaccagccccatgatagtttacaaatgcyatggcaatatccagaagttgccctatatagtctaaagtgggggaggaacccatagttctagaaattgctcacccctttcctggaatactcatgaataattcaccccttgtttagcatgtaatcaagaaataactataagtatatttagtcaagtagcccatgctggtgctctggtctatgaagtagccattgttttattctttcactttcttaataaacttgctttactttactctatggacttgccctgaattctttcttgtgtgagttccaagaaccctcccttagggtctagatcttatcaaaggggtctagagacccctttctgataacattttcagtcattttgattttgtccctcttaggatatttatttctaatttatttgttctgactagtatttattttgtcctcgatatattctttcttacgatttgtgttggcacttggaaaataaaacccccaaatatggtgctttgatatgctaaacta

SEQ ID NO: 809993 - DNA, 585 bp, Homo sapiens
accctacctggaaaataaaaaaaataaaaagaaaaaaaaggtaaatataaagactttatttttaattctttttaaaatatagttttctgtttaarcccaaaataataacaatacagtatgtggttctgagcatgtatagaagttaaatgcatgacaaccatagcatgaggactgagagaatggaaaaggtagtatagagttgtaaggttcttgtaccataagagaagtagtataatgttactttaaggactggggtaagttaaagatttgtactataaaccctaaagaaacatcgtaaaactaagtactatagctaaaaaggcaacaaaatagataaaatgaaataacaataaattctcaatccaaaaaaagataaaaaatattgatggatttattagacacaaatagtcagatggtagactttaatcaaaccttaatagttaataataatgtcatatattttacaatagctaaaagaagggatttcacatcttctcatcacaaagaaatgataaatatttgagtgatggatttgctaattagcctgatttaatcattccacaatgtatacatacatcaaaactt

SEQ ID NO: 809994 - DNA, 668 bp, Homo sapiens
aaggccctgctcccttaactcaatcaggaatagccccagctcctgagcttcctgaaagattggctgaggcttctgttgtaaccrtgtttctggttgtttctccctctgcctaatcctactctatttgttacctgttgctgccacaaacttaaaagcttaaaaaaatacacatttatcatctcacagtgtccatggtcaagagtctgggcacagcctaactggttcttctgctcaggctgcaaagtgtaggtcagactgcattctcatctggagatttgaatggggaaaaatctgcttccaagcttcctccagttgttgtcagaattcatttccttgtaagactgaggatcccagcttcttgatagctgttggttggaggctgtccttggtacctagaggtcaccagcaattcctagagcaagcttgtctaacctgtggcctgtgggccgcttgcagcccagggcagctttgaatgtggcccaacacagattcgtaaacatttttggcgaattttgtttagctcatcaggtattgttagtgttactgtattttgtgtgacccaagacaattcttcttcaaatttggcccagagaagccaaaagattggacacctctgtcctagaagctgaccacagtttctttcacatgggctttcccaacatggccac

SEQ ID NO: 809995 - DNA, 535 bp, Homo sapiens
ctttttatgtctggattatttcacttagcataatgtcctccaggtctatccatgttgaggcaaatgacaggatctcctcttttttaaggctgaataatatcccattccatataccyaccacggtttctttattcattcatcccttgacaaacacttaggttgtttccctatcttggctattgcgaataatgctgcagtgaacatggcagtgtagatatctttatgaagtggtaatttcatctaatttaggtatatacccagaagagggattgctggatcatacggtaattctatttttaatttatttaggaatcctcatactatttttccataacagcttcaccagtttatattcccaccaacaacctgtgcttagagtggttaaatcacttgtccaagatcacacagctggtaagcgaaagaagcacattcctagtctcttaaccctgggtgtgtactctcttgatacatcagtttgtatctttagctttaaaatatgtgactggatctctaagtttttaaattcttcttttgt

SEQ ID NO: 809996 - DNA, 504 bp, Homo sapiens
gtttgtaaaaggatccatttggctgctgtgcagagaaatagacaggacaaagtaagtggagaagccaggatacatacaggaagctatggtcattgtcctggtgaaagcaatccacaacttgggcctggtagggacaaaggtgaaaagttgctaattctacatgtattctttgatggattgggcatggagagggagagaaagggagtggtcaataagattccaaagttttgggcccaagcaattgagtaaaaccgtggtgacttttactgaaataggaaaaactgaggtgggtcagtctggggcagggggaaatatgaaattccatttgagagctgttaagtttgagatatctattatataatcaagtgggtatgtcaagtaggcatttgttggtttttataattgtattagtcagggttctctagagggacagaactaawgggataatatatgatatatacatatatatgatatatatatatatatatcaattgtaccccaaac

SEQ ID NO: 809997 - DNA, 567 bp, Homo sapiens
gattttttttttttttttttttttttttttagctattctagggcctggtgctttccagatacattttgggataaggtgttctatgtctacaaaatcccttgctgggatttttgtaggaaytggattatatctgtagatcaatttgggaagaatggacaacttttctatgttgagtcatccaactcataaatacagtatgtttccctatttacttaggactttaaaaaattcatttcatcggcatttcaaagttttcagcatacagattctgtatacaatttgttagacttatccctatttcattttctttggaacaattgtaaactgttatgtttaattttagtttctacatattcattgtcggtatacagaaataaagttgatttttatgcattgatctgagtttaagaaagccctcatgcttattagttctaggattctatttttttttttttttggtctacatagatctatatctatgtagacaatcatgctacctacaagcaggtccggttttatttcttcctttttgatctgtatatgttatttattttccttgttttattg

SEQ ID NO: 809998 - DNA, 659 bp, Homo sapiens
ttttatttttatcacagatcttggtaaatgctttttttgtgtgtcaattgttaagatcacgcaaagttttaaatttaacttatgatggattacattgattgatttcaaatgttgaaccagccttacatacctggaataaaccccacctggttatggtgtagaattctttgtatacattgctggattcaatttgttaatattttgttgagaatatctgcttctaaattgatgagtgatataaatcattgtattgtcttttgtaggcttgttataagggtaatactgacctcataaaattagtagggaagtgttttgcttcttctatttctgtaggagaatgtgtaaaattggtgttaattcttctttaaatttatggtagaaatcttcaatacaactatccagacttggagatctctttttgtggaaacttttatttacaaattcaatttctttgaagattacagaactgcccagattgtctgttttatcttgattgaggtttggtagttttaggttttcaaggacttttttcttttcttttcagttgttgactgtgtgagtttaaagttatacatyatatcctttatttttcttctaatggccaaaggattcatagtgatttcctttttttcatttctaatttttatgtgtcttttttt

SEQ ID NO: 809999 - DNA, 596 bp, Homo sapiens
cttaccctagcctgctgagttcttcctgaacataagctctttatgtgaaagatatctgaagacagcagatccccggggtattttactgaaaaactgcatcactatttcctggtctaaaatatacagattgctaaaattagccctctaataaatggagaagttctcctctagtggttcagtgcacttaaatacatagtctcaccagatctctggggtaggggctgtttcccccactttgtggatgggacactgagacgtgaagttatgagagctggccagggtcttagtgaatggtggcagagctggtcaggatcctggtgtcctggatggtccacagaaggaccttgtgttacagacagttcacctctgtcactggttcatggcacaggatgaccgctatatgctcaaggagtcaaatcacacattggagtttcacctaacagtgatggtgctcacagtgggtttaaggcaagtcttcaaggacagtccacattagagagagagaggaaaaaagtacccaaataagtattytacagagcagagctatgaaaggtcccatgagaaggccaaagtgtgggacctggaaggagagaaag

SEQ ID NO: 810000 - DNA, 553 bp, Homo sapiens
taaatgctttagggtttatagtacatatattttacttatcacagtctaccttcaactaatattatatcccttctcatatagtataagagccctacaaggcaaacttctatttcttctcctccagcttttgtacarttgttgtcatatattttatttctttatatatcataaaccccacagttcatttttattatttttgtctaaacagccaattatcttttaaattattccactaatttgaaaaaatcttctgtattcaccttggtagttaccatttccaatgtacttcatttcttgggtagatacataattccatctggtatcatttttcttttacccatgggaattattttaacattttttatagtacaagtttgctggctgtaaattatttcagcttttatacgtctgaaaagtcttttatttcatgtttgttttaaaaagatatttttattggttataaaatattagatggaccttttttccccctaataagtagcttaaagatgtttctctaattgtcttcacacttgcactgtttccaatttaaaaa

SEQ ID NO: 810001 - DNA, 569 bp, Homo sapiens
tattttatgatagagacaaacccacaatcgccttttgggaggcatgctcctataagttaatattctgaattctggttcatggaagcttctcctggggaagaaataatgctagattattgctggggaatggaactgaataacacttctaaaaatagaatcgtttatgtaagtcaatcctggcaccactggcatttgggactggataattctgttgtagggggctgctctgtgcactgtaagatgtttggcaacatccctggtctccatcactggatgccaggcgcgccccgcattgtgacaaccaaaattgtctccagacattgccaaatgtcccctgggatgggaggagcaaaattgcccccagttgagaatcactgacttaagagtatacagaaatgtatttctgctttgctgatttttaactacatgaaaatacatatatatattgtcaaaatattttccaaccaattatgtaataccaagtgtgctgtgttttgttgaggtgggagaaagaaccatacctmttcactgaggttacatggataactgctttagaagatccattggta

SEQ ID NO: 810002 - DNA, 282 bp, Homo sapiens
attctctatttcccccttttggcttttgcactgctattttagggaaagattcattctttccgctatggcttgtccttgagaattgtatgggataccagtaatgtgtttaatattccatatagagaaaaatgtagctagagcttggctagtataacctgggkcattatctgttttaatagaagctggaatgcccatcacagcaaaacactgcaaaaggtgacatttaacacagcagaagactcttctgattggcatgtagcccagacaaagtgagaaaaggtg

SEQ ID NO: 810003 - DNA, 610 bp, Homo sapiens
attttaacagaatttcactctgggcagtagaattataattttttttttttatgatactttcccmaatttttcaaataaactataatgagcatgcattacttttagagtcagaggaaataatctttaaagatatataggtatcttcaggtaataaagaagagaaactgttctttttaatagccatgtaatctcataaacattttcaaatggccctcagactatcctgataaaagtgaagaaacagttcaatagagcttgaggtcaagtaacactgtagagtaagcctgggaagtgtagatgaggtatttatttatatcccacttcatttcaagatgatgtgaggcagcttccatttttaaaagacaaatgattacatatcactctcttctccacccattttctaagttggttgggtccctggaagggggaagacactttgattccaaagatgagctggggtgtaaaagccaaacacaaagaagtgctgagtgttctgcatggtacaggttgggaagggtagaattctatgtgggggtgggagcaaggtgaaaggaactggaattgacctagacatggggctttgccatgggaaagcattgagaacaattcc

SEQ ID NO: 810004 - DNA, 649 bp, Homo sapiens
ttgcattatacagagacttggatccccagtgactccttttgcataatacagacattagtttcttattgggggtttactcacactggttctttcacactgtccacctttttctcggctgtctgctctggctctgcggctcctgccacccccacgcctgcagctgcactccctggcctgctaggccagcttttagtcacaaagctaacctttaaaaggccttgcccactggttcttccagatttaatccaaaatattttctcatctgatctctgagcctctgcaggaatgcagagggagtttcctctttttcttgttgaatctcaaatgcctttacgacattttatgccctaggagtggactctttgatctcttctaattattcattcctccatttgggcccagtccctgggatctttattatccaatttgggaatgacatttgggaatttttgtttggctggcaagaacccttgcccaggagagtgttgcctgtcccagatggtcatgactgctctcctaatcattcccctttcttctcctgtgaacagtatatttataatagaatrattttagcccaggtgtaaaagctgggtcctaggatttggtacagctggtctgctaaactgaggggatcttctaggagtggttt

SEQ ID NO: 810005 - DNA, 597 bp, Homo sapiens
attcctcctgcctgcctgcctgccttccaactaagacatcaccgtttgtttcctgccttcagtctcaaactggaacatttggctcttcctgggttttgagcctgtcggccttcagactggaactacaacatcagctctcctgggtctccagtttgccctctcactctgcagatcttgggatttgcctccataattgcataagctaattctttataacaaatttcccttggccaggtgctgtggctcccacctgtaatcccagcaccttgagaggccaaagcaggagaattgcttgaggctaggagtttgagaccagcctgggcaacaaagcaagatccccatctctacaaaaatgaaaaataaaaaattagctgggcacagtggcatgtgctgtagtccccgcttctcaggaggctgaagcaggaggatccttgggcctaggagttcaaggctgtagtgagctatgatggtgccactgcactccaacctgcatgacaaagcaagatcctgtctcaaaaacaaaaattaaaaattaaaaawtatataaaaactctatatatatatagattgataagtaggtacatagataacagatag

SEQ ID NO: 810006 - DNA, 553 bp, Homo sapiens
tttattatcttattgtttctgtgggtcaggagtccaggtgcagcttagttgggtatctctggctcagggtctctcacaaagctataattaagtgtcagtggggtgacagtcatcttaaggcttcaccgggtgaggatctgtttttaagctcactatatggctattgacaggacccaggtcttcattgctgttggccagagacattggttccttgccacatggatctttccataggacagctctcaacatggtagctggttttccttagagagagatggggattcagagagagaaagagcgagcaagacagaagccacagcctttttgtaacctaatatctgaagtaacattccatcatttctgctgtattcaagggaattaataagtccaggccacactcaagggaagtggattacaccagggcatgaagaccaggaggcagggatcaytgggctatctaagaagctgcatatcatatgatttaacaaatatttcatatatttctcagtgtttgtttctaataagataattataaatagatataactcacata

SEQ ID NO: 810007 - DNA, 499 bp, Homo sapiens
atggggtctcgctgtgttacccaggctggtctcagaatcctgggctcaagcaatcctcctgccttggcctcccaaagttctggaatttacaggtgtgaaccacctggtctggactttgcttttcttgaaatgcttcaattatagtttgcctatttccaacatggaagattctatcaggagatactcagctagacagtgatgactacagattgttaagatccaaaaaagagaaagatgtcaatttaaaatatatttataacaaaaaattttctaaggcgaaaataagacctattttttaatcaggggaatatttaatattatatatagttaactttttcaagtgttgcagaatgcaggtatcaaacattcatctcaaaatgtgagcaagttactaatgaaagaaatggtttttcaaggttttctttgtagttttacaacatatgtgtgtacttctaacatattgtttagttttaartgtttttgagcttcatataaataa

SEQ ID NO: 810008 - DNA, 586 bp, Homo sapiens
tccactctatatgtccatgtttatgcattatttagctcccacttataagtgagaacatgcagtaatttactttctgcttctgagttatttcacttaacataatggcctccagttccatctacaktgcgtaaaatgcatgatttctggccaggtgtggtcatacctgtaatccaagcatattaggagaccaaggtgggaggactgcttgaggtcaggagttcaacaccagcctgggcaacatagccagaccccatctctataaaaattttagaaaattagccaggcatgatggcacatgcctgtagttagctacttaggaggctaaggtgggaagatcatttgaaaccaggagtttggggctgcagtgagttttgatcacaccactgcaccactgcacctcttgcactttgtgagagagagatgctgtctcacaaaaaagagacaagatttcattcttttttatggctgaatagtattctatggtatatacacaccatattttctttattcaattacacattcatgcacacttaggatgatgttttgctattgtaaaaagtgctgcaatgaatgtaagaatgcaggt

SEQ ID NO: 810009 - DNA, 563 bp, Homo sapiens
acaaatttcaacttatatcatagaactccttagtgtactttattattcaatcccytcactccttcccttatgcctccaaacacactcctcttcctctcactgccagagtgatgtcagaagattctgtagcaggttctcggaagcctattgtacagtaacaaagaattccagcagtgagctgtgagttctgtccttgctggctttcccaagtggaaggctaccctcatctttcactaatggcagactaggacaagcattacccaggcctgcaagcttgttaaggactaggaacccaagcaagaactcaccatgccaatcaaacctgttgggtggatatgtgggcaggtgttgaagaacttttctggaagaagtatacacaatcttgttgtaaagggcgtatgggtgtgggaacaattgggaataagatcccctagagttcctttactttccgagtcatctaggaatttgatcaagtgtttcatgttattttgaaacatttaggggatgttttcaaagttttctttttcctaacctctttttgtcttagtcgaggggatccagaa

SEQ ID NO: 810010 - DNA, 642 bp, Homo sapiens
ttttctctaatcttgtctgcatgccttatttcgttaagttgatcttcaatctctgatatcctttcttccacttgattcattyggctattgatacttgtgtatgcatcacaaagttctcatgctgtgtttttcagctccatgaggtcatttatgttcctctctaaactggttattctagttagcagttcctgtaaccttttatcaggttcttagcttccttgcattgggttagaacatgcttctctagctcagaggaatttgttattacccaccttctgaagcctacttctgtcaattcgtcagtctcattctccgtccagttttgtgcccttgctggagaggagatgtgatcatttggaggagaagaggcattctggtttttagaatgttcagcatttttgtgctggtttttcctcatctttgtggatttatctgcctttgctctttgaggctgatgacctttggatggggtttttgtgtggggggtcccttttgttgatgttgattttgttgctttctgtttgctagcttttcttctaagagtcaagcctgcagtcctgcaggtctgctgcagtttgctggaggtccactccagaccctgtttgcctgggtatcaccagtggaggctgcagaacagcaaag

SEQ ID NO: 810011 - DNA, 477 bp, Homo sapiens
agcctgatgccaaccagagctctcctgtttgaggtgtctgttgacccctgttgggaggtcttgcctgctcaggaggcatggggctcagggacccacttgaggaggcagtctgtcccttagcagagctcatgcrctgtgctgcgagaatcccccttgtcaggatcagctgctctcttcagagccagcaggcaggagagttcaagtctgctgaagctgtgcccacagccaccccttctccaggtgctctgtcccagggaaatgggagttttatctataatcccctgactggggctgctgcctttctttcagagatgccctgcccagtgaggaggaatctagagaagcagtctggcctcagctgctttgctgtgctttggtgaattctgcccagtccaagcctcccagcctccttagcactatcaggggaaaaccgcctactaaagcctcagtaataccaaatgcccctcccgccaccaa

SEQ ID NO: 810012 - DNA, 546 bp, Homo sapiens
ttgtaagacaaggggtaaatgtttgaggtagtagatacccccatttacctctatgtgattattatgtactgtctgtctatgttagaatatctcatggaccccataaacctatacacctactatgtacccacaaraagcaaaaagaaaaagagcttatgggtatcaatttttctgttagtaacgcttttgttgtgtcccagcaagttttggtacattgtcttctcatctttatttgcatttaagtattttctaatttcccttctgattttttttttttttaatttaagtcccaggacacatgtgcaggacatgcaggtttgttacgtaggtaaatgtgtgccacggtggtttgctgcacctgtcaacccatcacctaggtgttaagccctacatgcattaactatttatactgatgctctctctccctctgcccccctttttctttgattcattggttaagagtatgttgtttcatttccatacatttgttaatttttccattttacttctattattgatttctaagcttatcccattatcgttgga

SEQ ID NO: 810013 - DNA, 514 bp, Homo sapiens
ataagcttatctgcaacaatcccatcattacgtctttctttctttttgccaggatgtcattcttcttgtctacagttaacsctttagcctgtgccctggatcacattctctgattttctcttggctcatgttgcaccaattttcctttcattcttctgcatctttcactattcttactctttattcttggtcattgtcatatgcagtagctcaagtctttatcatagaaaacctttcatcgaccatataacatccttaacttattttctcttcttctctcctcagccaagattcttgaaagtattgtttacaatacagtaatctttttgtttaatggaattaaattccttctgaaactggattctgcttttaacatcacactgaatttgctccagaaaaaaatcatcagtaacctctgtacataccatgtatatcaaatctggtctttctggacatttctccatcgttggaccctggagatgattttttttttcgacagctcccttttccactg

SEQ ID NO: 810014 - DNA, 629 bp, Homo sapiens
aggatgttcctaaagagcatacctaggagatgcttggtcatgaggkatatgcacccaactttatgacatattgtgaagactagtgggtacaacaatttatgtagccaccagcacaatatgagagtccccattgcccatatatttgccaatactttacactatcaactttcccacttttttttcaatgtatgtgtgagaagaacttcatttatttatttatttatttatttttatttttatgttttgagacagaatcttgctctgtcgaccaggctggagtgcagtggcttgatcttggctcagtgcaacctccgcctcccgggttcaagcaattctcctgcctcaacctcccgagtagctgggattacaggcgtgtgccaccacacccagctaatttttttatttttagtggagacggggtttcaccatgttggccaggctggtctcaaactcctgacctcatgatccccccgtctcagcctcccaaagtgctgggattacaggtgtgagccaccgcagccagccaagaagaacatatcttgtcatggtattcatcttcatttcttttagtattagtgaggttgagcagcttttattgcacttttggctatgtggtttttctcttatat

SEQ ID NO: 810015 - DNA, 629 bp, Homo sapiens
cgaatttacaagtcactttgctactgttgatgacaaaggagtgcttccgtgctgtgcgtgttattgtggttatctaccattctttaccaaactagcccaaaccttagcygctttaacaacaccaagttacttgcccagagcttctgggtctagaatgcaagcagggcatgtctgggtggttcttttactccatatggcaataactgaggcaatttactgtaggggcagggctcagaggaaggtttcggagggcttcactcacacgtctgtcacctcagtgcttctctatgtggcccctctctccacctggctaacgcgggcttccccacagcatggttgtcagcagagtagccaaagtccttatatggaggctggctgccaagaagaagcattcggtcatatgaagggaatctacagctgttgatctcttaagccttgccttaagatgctagaaagcttcagagcatcacttcagctgcattttacgtctcaacatatcactggcaagtccagagacaaggcgagggagaaaaatggacatccctttttaatggatgaaatggcaaggatacgtggctaactttaatccatcatatgtattgctgacctaagtgtgtctaggttaacta

SEQ ID NO: 810016 - DNA, 339 bp, Homo sapiens
cagttttaaaccccgcgcagagtcagacagaagctagttactatgggagcatcctagcggagcatcttacagtggggttcagtgtgcacctggcatgcttccttgatgaagtggtcccagarcaaagctataaaggagcaactagaaagaagcggtagccagaacaaagtcagagttgagagggtgtgtgtggggtgcagggaggcaggggaagacaactggcagctcagtgtttcttgagcaaagacagagtggtaggggtggtgagacatgaaggcgcagagggagataaggctgctgcatcccactgtaatggacttagcgttttatccatccagc

SEQ ID NO: 810017 - DNA, 339 bp, Homo sapiens
cagttttaaaccccgcgcagagtcagacagaagctagttactatgggagcatcctagcggagcatcttacagtggggttcagtgtgcacctggcatgcttccttgatgaagtggtcccagaacaaagytataaaggagcaactagaaagaagcggtagccagaacaaagtcagagttgagagggtgtgtgtggggtgcagggaggcaggggaagacaactggcagctcagtgtttcttgagcaaagacagagtggtaggggtggtgagacatgaaggcgcagagggagataaggctgctgcatcccactgtaatggacttagcgttttatccatccagc

SEQ ID NO: 810018 - DNA, 598 bp, Homo sapiens
aaaaaacattctaagtttgcttcccaatatctttgtgggggtcatctgtgttgtacataccsctaccctggagaccactgatacagaactctaagaggtttgcaggcctaaagcagacaccctaactccttgaaagaagaggacaggttcttatgaggcctaccagcctgaaaatgttcatggtctctggctcttagctcagatgagtggctgagggcacccgagcaactggtcttatctttctgcccttaagaatagaccaccaggtggaggtctttcagtacaattcataaggcatttccagatgatactgcaagagaagtggggcagaaagatcgaagaccagttgcttcccttcaaggggtcaacacttgggaatgaagaaaagtagacatgcctcaacagttagggaattattagacggtgtcattgaaacaagcatgtgaggccagataaacaaaggtaggatgaagaataaagggctggaggaaagatagaaaaagatggtggtaggtggagcctaaaaggagaagctaactgagaaatcccctttggtggggaagcatctagcttgtaacttcttccagggagtgtgcca

SEQ ID NO: 810019 - DNA, 685 bp, Homo sapiens
agttgggaagaatgaaggaaattgtctaagtagttctggcatccctgatcgattgcttattggatgtgtggtctttgttatatttttcatttccggcatctaccttatttttcttattgtagaccagtawctcttctctgttagagagttttagtattattcagtgagaagtgtttaagcaaatactgcattttgaaataataatttgaagtcatggcagttccacttcatcattagacttgaaaccagagaagccatattgactttctgtgactctaagtcataggatacaaaaggattggttctgaggggttgggattttcttgttgatggttggctcagtcatttggattgtggcaaagctttggtcttttctcttttgactagtcatcctatatgccaacagaaaacccacagaaatgtcttatccaattttctttgtaaagccagcagtcactgagatcatttttaaacctgtaaaattccctttacagccccatttgctaagaagattttatttgtaattgtatgttattttccataaaatgtgaatctcttaaggattgttatcatagctaatatatttgtaggtactacaccagctattgagttctatatactgttgtttttaaacatgaaagtcaaatataactcttaaattatatgaaagaagtgtcagtcatgt

SEQ ID NO: 810020 - DNA, 612 bp, Homo sapiens
ttcaaggcctcccgtcgctggctccgtggcctcttgcaggagcttcttcccaccgcatctggcttttttytgttgttgagatggagtcttgctctgtcgcccaggctggagtgcagtggcgtgatcttggctagtgcggtcacatgatctcggctcactgcagcctccacctctggatcaagtgattctcctgtctcagcctcccgagtagctgggattacagggtgtgccaccacgctcggctaattttgtattttttgtagagatggggtttcatcatcatattggccaggctggtcttgaactcctgaccttaggtaatctgccggccttggcatcccaaagtgttgggaatacaggcatgagccaccgcgcctggcctgtgtcttcattttcatttggttctaaatactttttaatttcacttttgacttcttctttgacctatgggttatctaaaagtatgttatttagttactaaatattcaggacatttccaaagatacttctgttattagaattattcttaattccactgtggtcagagaatatattttgtatggcttgcataattatcaatttggggcttattttatggctcacaagaatatg

SEQ ID NO: 810021 - DNA, 644 bp, Homo sapiens
ctgactgcctagtggctcaacctcctgaacccacccactcccagcgatgctacccagaaccccaacggcatgaatcctgcacagtgccgggcagtgccagactccaaagggctcgctgtggggacagccccgccatggccacagactctgtcctcacctttgattgtcaggatgacagcccccaccaccatgatgagcgtctgcagggcgtccgtgtagattacagcagccaggccccctgccagtggaagcaaggttgctggagggggccctggccccagggaggagggacacggggaggaacttctggggctcctgctggggccacttcctgggctgctccctcgggcctgtagggggaggtggccttctgacccctttacacgtcccctgggtggacctccctgctgcaggcaccatacctgcgatggtgtacagggctgtgatgccgagcgtgaggatggtggagaggtagaagttccagcccaggcagatgtgcacaaacagagcccccgcgtacaggtccagctgcggagggagagagccttgtgtgggrctgttattcccagggctccagcaagccactccctgggtgacctcgggcaaggccctctctgggcctcggtggcctgtggataaggagg

SEQ ID NO: 810022 - DNA, 612 bp, Homo sapiens
atcggccgaggtgggcagatcacaaggtcaggagatcragaccatcctggctaacatggtgaaaccctgtctctactaaaaatacaaaaaaattagctgggggtggtggcaggtgcctgttgtcccagctactcgggaggctgaggcaggagaatggcgtgaacccaggaaacggagcttgcagtcagccgagattgcgccactgcactccagcctggggggacagagccagactccgtcccccctcaaaaaaaaatttagtgttccattacccaatctgtgcagaagacatagctacaagctcaagtcatgtgaacttattccttctttcatgttctttctttctttatgtagatccaaatttctgatctgtattgttttcctcctttccttaaaaaaattgatggccaggcacggtggtttacacctataatcccagcactttgggaggccaagacgggtggattgcttgagcacaggagtttgagaccaacctgggcaacacggagaaaccctgtctccacaaaaaatacaaaaaaaattagccaggcgccgtggcaagtgcctgtagtctcagctattcaggaggctgaggtggaaggatccttgagc

SEQ ID NO: 810023 - DNA, 561 bp, Homo sapiens
ctcaccctcgccaagtgtgacctggaggcccagctggagtccctgaaggaggagctgctttgcctcaagaagaaccatgagcaggtgtgtgacccttggtgtgatgcattgagactttctggaggtgaattcaggctcatctggggggaaaaaacggaggcttccttctgcttgggattgaagctttgcaggtgagctctggcttttggtgggagattgcttctcatccacagcttctggaagctgctaggctggtgcaggcagcggtttatcttcagaggagcacagggaaattactggggaggatggaaagtgggagttgagagtttgggtgaagggcagttgggggccctgcaggcgggtcatactcctctgatgcctacaggaagcccacactctaaggggtcagctgggagacaagctccggatagagctggacattgagcccaccattgacctgagtagrgttctgggggagacgtgaggccagtacgaggccatggtggagaccaatcgccaggatgtggagcagtggttccaagcccaggtgagggggactgc

SEQ ID NO: 810024 - DNA, 618 bp, Homo sapiens
tgtttacaattagcgttttagtccattggtgagtactgttggtaagtttttaatcttttgtaggtcataagtgtttaggcctaaatactctcctgagttctaaagcaggagccagcgtcacctcttgtttatacaccctgtcctggcctgagcctcctgaaggctggcacattcagcacagacccctctcactcctacttcccacccaccgcccttctgtgggtcacctgcccactactcaagatagcactcttggcttcttctggaacttctgtcttcaccaccctgtgttcggctctattccaactcatctctaatttctctttaccgagaccaggccgctgacagccctctcaacgattctaggagatttttgttatttcttctctggaaatacaatataaagaatttttatatggttttctaagtagatatgaagctttttaaattaaaattttgtgttctgataagagaaatgaaccatcttcatcattttaagaagtagaaaatatattatagaaaarcaccaaagaaaataaaaacaacatagaaagtaaaaagtgaaagccctaccaccttcaagaggtgacctctgtcaacagttgatatatctctttc

SEQ ID NO: 810025 - DNA, 615 bp, Homo sapiens
aaccacaaaataactcacagaatgcataaatgaatttagcatgttacatggttagtgcagaaaacaataaactgagtttttacaaattacctcaagcatttggaaaatgaaattcaaaaatataattccacttatagtacccccaaaacataaaagtatttaataaaaaaagaagaaatctaaacactttaccttgaaaattaagaatgttgcttcaaaaagttaaaggtaatagatgaagaatgaatgctaaatgtgtgaattacaggactcaacattgataagagcaattttcccaaaactgatctatagttgttatgtatttgattgcagaacaatcaaaattccagcagaatttttctgttgttattgaaaagcctattgcatttaactgaaacagttttttaaatgaaaaagaagattgcaggacttaatctctcttatttaaagacttttctataaagctgcaaaaatcaagaccatttggtattgaagaaaatatgtacatatagatcaatggaaccaaaaagagtgcagaaatagacccacatatataaatatatacccaactcattattgacaaaggtaamaaagccattccactaaaaagtgttg

SEQ ID NO: 810026 - DNA, 647 bp, Homo sapiens
taagctagttatttgtattattgttttgtatgatgagaattcatttagagtaaccacatatttacccctttattattctcctttccttcctgcatctctgaacttctaagagaaattctcttctccataaagaataccctttggtatttcctttagaagttggtgacaacatttttcaatttttatttctctgaaaatgtgtttattcaaacttcgtttttgaagggactttccccaggtaaaaaatactatgcctgcagaggtttgttttttttttttcaggatttaaaaaattttattcctctgccttctgacttgtgatgttgaaaagtaggcatgtgtttttgctccttgaaagttaaatattctatttttccctccagtttcttttacacattcttttgtcctgtgttttagtgcttttacaatgatgtacttgggtatggatttctttttgaatatttcccatgtttagttttaatatccacaggtctacgtagtattttcttatcttccccagtcatttttgtcaatgtgtgactrtaacaataatttactctttcaactgaagttttcaggaattgacctggatcaggcattattccagccctttccatcagaaattatatttcagaactacactccct

SEQ ID NO: 810027 - DNA, 549 bp, Homo sapiens
ggggcaggagagggagagttccattgaaaatagggcagtcaggggaggcctcggggagacagtggatcgccgtgccaagtgctgaagaggtgagggggtgagcaccaygaataagtagagggaaggagagaacatcatgtgcaaaggctctgaaggggaaacctgtggctgcagggggaaccaggggagaggaggagatgtggccagagaaacgatgggggcaccagaccacgggaccttcgcaagtgcgccagcctcagcctaggtacttttcagcggagaagcagcctgagctgacttacatttttactgggtccctctgacccttgggtggaaaatagactttaggagagcaacggttgaaatagaaagtcctgttagcctgggaaagatcggagtggctaggaccagggtggcgggggtggaggtggtgaagagtgattacagtttggatatattttgaaggtagatcctatggattgtatcaagaaattgagaaacagagcatgaaaggatgcctcatttcagggttctaaagccagaccgctg

SEQ ID NO: 810028 - DNA, 616 bp, Homo sapiens
tcttgatatgttgaccaggctggtcttgaacttctggcctcaagtgatcctcctcccttggcctcccaagaaaataaaaacttttaaagagagacaaggatatgatcaggaacctatatcttaaaaaaaaaaataagatgattattcaaccatttaaactagtaaggtgatttttttcttgtggcagaggctaggcagctgtgcctccaaaattcatttgaaaactttttggttcagtgattattcagcaaaccagatgatctatgatatggcaggtcaaggagaacagaaagaggtgaaatgccatagtttcaatgcagttcagtcctgcagacccactctggaccaggatgggggaagagccttgcaggtgtcttcttaaacctgactcaatttactgtgtattctgtgcaaacttcagagggagaacactgtgcttttcttcccttttatccaggttctcattgtcgttttattacctcctgctcataatatgtagagacaaatgccttgggaagggtagtaacaaggctgtaaatccagtggaggaaaggactsttcactgttttgaacagtgaacaatatgcctactgccattactggcagataaaataca

SEQ ID NO: 810029 - DNA, 623 bp, Homo sapiens
atagctagggaggtgcaatactgggataggccactcctggattggagtgaggggtttccttagggaaacccatgacattgtttccagcaagaggttggggggatggatgcaggatagtaaaaaccaataaatatctgcgaaattattctttttttaaatgaagatatctttgagaaggaaaatgtaatgaacagatcagtgattcagctgtcaatccagtcattcaacaaatatttattgactctatgccaatcactatgcaaggcatgtataacagcaatgaacaagctggttgagatctctgacctcctgaagcttgctctctggtagggaaggaagacataaaaatttagttacatatttatatcttatgtgaaaagtgcattgctgtgaggacatataagaaggggatgtcagagaggtcaagggtctaggaagccttcagagaaaggatttctagattaagtgctgtttcagctgagatctgtgggatgagtctaagcatggacaagggaacaggrtggaagaagaaagttccaggcattttacccttaaacagtttgatcaaaggaaacagggagagcccagacagaggagggagagagtgtaccaattgggttaat

SEQ ID NO: 810030 - DNA, 629 bp, Homo sapiens
gatgaccctccccagctgcattacacaaaggtagggccatgtgactaatggcagccaatgagctataactaaaaacggtgcatgtcttttgtgggcggaagcactgaaaagcagataagagtaacaatatggaagatatttatatgtctgtgaggagcagatgtccctaccaatacaaaatggttaagttgcatacgtaagatctaggcttttgttttcttgagctcctgagatttgaaattatttgtcactatggcatagtctatcccatatttcctaatataatgaatatcaaatgcatacaaaacagtattgataataggattataaatattttaatgcgttttctctttctgtatataaacagaaatacacacacacacacacacacacatatatatatgtaagatttatataaaagaactggcttatgtgattgtggaagctggaaagtttgaaatttgtagggcattcgagcaggctggaaattcaagtaagagttgatgtcatagtcttgagtttaaaatatgtagracaggccagataaaactcaggcagagttctacattgcggtcttgaagtagaattgcttcttccccagcaaacttctcttttctcaaggccttcaa

SEQ ID NO: 810031 - DNA, 620 bp, Homo sapiens
ccacagggtatgaaattaagaacttcaaaagagggctgtgttcatgtgggaggatgacaattttttactatcagctggatgtgcatacaggtgttataatctcatctgattcctcagccctgttaggacactctctgtaccacacaagggttttatgtggtatgcacgagagtcacaatctgttctgaaaccttcatactagtatggattcatgattttacctgtggctttaagcccaggcatgagggtcaacatctcttcgattggtggattccagatagaaaagtctttgcctactgaaatgaatcactatcctaacaggtgctgactgttctgtcacaattgcaactgtagattgcatctgcatttgggattcaggacctctccagtgggctcagtctatgtgtgagggtgatcatcttaatgactgccacagtgtaaatatataaaacacaatctcaattctgtgctgtgccctgtgctgacactctcagtacctacctacaaaagacagtatttctcctattggaaggtttgaggaatgagrgtgatcatcacatctgttacctgagtaaagacatatgtcacaattccacctttggatagggagtgagcagcag

SEQ ID NO: 810032 - DNA, 609 bp, Homo sapiens
ttttttttatagatgggattttgccatgttgtccatgcctgtctcaaacccctgagctcaggcaatccacctagctcatcccccgaagtgctggattacagacrtgtgccaacatgcccaaccatactatattttctttatctagtctaccagtgataggcatttaggttgattccatgtctttgctgttgtgaatagtgctgcaatgaacgtgattgtgcatgtgtctttaggatagaataatttatatatttttaggtatatacccaattgtgaggttactgggtcaaatggtaatttgtttttagtttagtgaggaatcaccacactgcttttcacaatggttgaattataataatggccattctcactggtttgagatgatttcttgttgtggttttcttttgcatttctctaatgattagtgatgagcatttttttacatgcttgttagccacatgtttgtctccttttgaagacaaacgtctttttcatgtttttttttggtcttctttttagtttttttttcttgtaaacttgttttagttccttatggattctagatagtagacctttgtcagaagcatagtttgcaaatattttctatta

SEQ ID NO: 810033 - DNA, 524 bp, Homo sapiens
acccaaagtcctgggattgcaggcatgagccacagtgcctggcctaataacagaagtctttagcagagcaaaaatgtataaaatgtataatgacattgtataagtaataataaacctactaaccataaaaagccctggatcatatgaaatcacagcgaagttttaccacattgcaaagagttttacctaagcctactgaatgcattcgaaaaaatcaaggtgggatttcaccctaacttgttatattaaatcagtgaaatatatgaaactaaaatctagtgaaggcaccacaaaaaaaggaaagtacaggtcaatattctgggtgaatattggaataataatcctccatgaaatactagcaaactgaattcaaaagcaaatcagaaagttattttgctacattmatgtgagcttttccatatatatgaaggtgtttcatgatatggaagtcaataagtgtgattcaccatgtaaagataattaaaagaaaaaaaaataacagtaggggcagaaaaagcattcaa

SEQ ID NO: 810034 - DNA, 325 bp, Homo sapiens
tgtggaagaaaactgtactacctttttctataaaaaaaaaacaactcaatatagattaaagacttgatctgtgagtctccaagctacaaaaatcttagaataacacttagataatactggcctctgtaaagaatttatgactaacatctaacatgagtgcaacaaaaataaaaataaaaaatggcatctaagccaaagagcttytgcacagtaaaagaaactatcagcaaagtaaacagatgacctacagtatgaaataaaatatttgcaaactgcagacaatgaaggattaatgtacagaatctataatacatttaataaaaaa

SEQ ID NO: 810035 - DNA, 589 bp, Homo sapiens
atgcatatatatctatattatctatatctatatctatcttattagacataaattcattccaattcagcatctcaagctttattccaatttctcttttctctatgtttaaaataaacatattgatatatttcattattagctgccttaaatacacagaaactaatctaaaatctgccaagtcatattgctaaatatagtcacaaaacctataattgagaattcactatttctttataaatttctttttttcttttcttctgaaggtgatatacagccaaaatatattgttcagaagttttctgggttattgaattccatcacttgtcatcttcttgagggctttttttctgcaattatctccttttactagcatcatcatttttatcttcctgcttgtccatttctatcagcatgcaagggtgctttcttctcatacatgtatataattacatttagaaataaaaatcagagaacttccattggtacttttcyccatttatcttctctttttcaaaagagctaattacattcactgattttcctttatgaattttcatggctgaaatagacattgttgaggtcatcaatg

SEQ ID NO: 810036 - DNA, 612 bp, Homo sapiens
cctcagctaaaggacttgcttctcttcagcacacggggcttgtttgtgttggggtctgagccctgagcccatggtcaaggagacccccaggtctttctgaacagagacagctggcctgagggcctccctctcactgcgtgcaagaggctgttagggtgcaagactcaaggcgctgagggaggctgtttcaggagggagccccaggagggtggtggagacagaagggggcagcatctgccgaggccctactgtgtgcctggcaccgtgtggggtttctggcccatatgggctaagtgaccctgcacactcctcttaggagaaaggctcagatggagaaattgcagttcaggaaggtgaagcaagctgctagcctgtggccatgttgggatctgggcctcagccttccagccacaaaggcagccaagtgtcataaagaaggcatcacagaggcaattccaggctgtagtggtgaactttccactctgcatccccgggtgctgtgccctgtgccctgtgccctgtctaaggtagccctgygggtttctatatgtttaagttatccccagcatcaatgatgctctcctgtggatcccaagccatggagatgtcctg

SEQ ID NO: 810037 - DNA, 557 bp, Homo sapiens
acttcagtctcctactggtcggtgccggatccttttgtggccaccccaggygtccagatatacacaggagactgtggctggggacccagatgaaagtcgagagtgtggtgagcacttccctgtccggatcatgtgagggatgggctcggtgtcacagtgtcctgcccagcccacctggccggacctccctctgggccagaacagcggatcatgaggacagtgtgaggaagctgccctcgggccagtcggggtctgaccccagggctccccaggccccgctgggcacacgtagacttactctgctgaaccttaaaggcgattcttgttatcggcatcaacgcctgttcgccttctaccagatacacgtcccacaggcgcagggtgagcccgagagagatctgtggggacagcaggtgtgaaagaacctggtccttccaggctggggctggtggctcgagctgcgcacactggggcttcagtctccagagtcagtgaccttccccatgagggtcgcctgagccctccaggacgctgggtcagacaaggtcttgaagctc

SEQ ID NO: 810038 - DNA, 591 bp, Homo sapiens
cccgtggccacttcagtctcctactggtcggtgccggatccttttgtggccaccccaggtgtccagatayacacaggagactgtggctggggacccagatgaaagtcgagagtgtggtgagcacttccctgtccggatcatgtgagggatgggctcggtgtcacagtgtcctgcccagcccacctggccggacctccctctgggccagaacagcggatcatgaggacagtgtgaggaagctgccctcgggccagtcggggtctgaccccagggctccccaggccccgctgggcacacgtagacttactctgctgaaccttaaaggcgattcttgttatcggcatcaacgcctgttcgccttctaccagatacacgtcccacaggcgcagggtgagcccgagagagatctgtggggacagcaggtgtgaaagaacctggtccttccaggctggggctggtggctcgagctgcgcacactggggcttcagtctccagagtcagtgaccttccccatgagggtcgcctgagccctccaggacgctgggtcagacaaggtcttgaagctcctcatggggggcactcatttgagtg

SEQ ID NO: 810039 - DNA, 580 bp, Homo sapiens
ttcagtctcctactggtcggtgccggatccttttgtggccaccccaggtgtccagatatayacaggagactgtggctggggacccagatgaaagtcgagagtgtggtgagcacttccctgtccggatcatgtgagggatgggctcggtgtcacagtgtcctgcccagcccacctggccggacctccctctgggccagaacagcggatcatgaggacagtgtgaggaagctgccctcgggccagtcggggtctgaccccagggctccccaggccccgctgggcacacgtagacttactctgctgaaccttaaaggcgattcttgttatcggcatcaacgcctgttcgccttctaccagatacacgtcccacaggcgcagggtgagcccgagagagatctgtggggacagcaggtgtgaaagaacctggtccttccaggctggggctggtggctcgagctgcgcacactggggcttcagtctccagagtcagtgaccttccccatgagggtcgcctgagccctccaggacgctgggtcagacaaggtcttgaagctcctcatggggggcactcatttgagtg

SEQ ID NO: 810040 - DNA, 593 bp, Homo sapiens
aaagtaaatagaggttaagcaattttccgaaggccgtaaagctgatgactagcagagcagggattcaaatccaggtagtctgactctaggtaccacacgctacacrtcctgtaccacaacttattatatttgatcctcacaacactcctataatggtagattttttagagtgtcttctcagattgtaaaccaactccagaccatgtcttgttggttgatttaaaccaaatcctagcacatgatgattataacatgatgagcctcgtgacctagtctctatctcttattattgtgttctttataataaagatgatttattgaatatataattctatctcagtgtttatatatttgtaagactttctctatcaatccccaaaccaggaactatccctttgccatgtgttttgcttggattgaaatatagttacatgcacagcatgtgcttaatttatatacattgaatgaataatataagggagatgtaggacggggttgagttgggagggtcttagacatttcctaggtggtaaattgatgttcccagttgaaatgacgtacccatggtcatgtggatggaattggtcagtttt

SEQ ID NO: 810041 - DNA, 593 bp, Homo sapiens
aaagtaaatagaggttaagcaattttccgaaggccgtaaagctgatgactagcagagcagggattcaaatccaggtagtctgactctaggtaccacacgctacacatcctgtaccacaacttattatrtttgatcctcacaacactcctataatggtagattttttagagtgtcttctcagattgtaaaccaactccagaccatgtcttgttggttgatttaaaccaaatcctagcacatgatgattataacatgatgagcctcgtgacctagtctctatctcttattattgtgttctttataataaagatgatttattgaatatataattctatctcagtgtttatatatttgtaagactttctctatcaatccccaaaccaggaactatccctttgccatgtgttttgcttggattgaaatatagttacatgcacagcatgtgcttaatttatatacattgaatgaataatataagggagatgtaggacggggttgagttgggagggtcttagacatttcctaggtggtaaattgatgttcccagttgaaatgacgtacccatggtcatgtggatggaattggtcagtttt

SEQ ID NO: 810042 - DNA, 538 bp, Homo sapiens
gtgtgaacataacttttatatgtaaagggaaactaaaaaaaaaaaacgtgtgactcaatttattgtgatatttgctttgttgcagtggtatggaactgaatctgcaatttctccaagatatggctgyagttggataacttccctccctacgtactcttcctataacatacataattgtaaattacataagcccctttccttcccctgccacttggtggctggctgaccacaagagcacccattattcccttctctttctcaatgaacaggatcctgccttagtctaacactgctgaatgagattgtctgtttaattctgattcttaatatttgtaatctaaattttctaaaggtattagctatgtccttcaagtgagattttttatcaatgataaaggtaatattttgtccctcctctgctgactcctttgtatgcttctcatttggttcaaaactcaggcagtgataaaatggtgttattattgggccctctcaaaaactgaaagagtgatgttaattggtttgtaattttaatgac

SEQ ID NO: 810043 - DNA, 538 bp, Homo sapiens
gtgtgaacataacttttatatgtaaagggaaactaaaaaaaaaaaacgtgtgactcaatttattgtgatatttgctttgttgcagtggtatggaactgaatctgcaatttctccaagatatggctgtagttggataacttccctccctacgtactcttcctataacatacataattgtaaattacataagcccctttccttcccctgccacttggtggctggctgaccacaagagcacccattattcccttctctttctcaatgaacaggatcctgccttagtctaacactgctgaatgagattgtctgtttaattctgattcttaatatttgtaatctaaattttctaaaggtattagctatgtccttcaagtgagattttttatcaatgataaaggtaatattttgtccctcctctgctgactcctttgtakgcttctcatttggttcaaaactcaggcagtgataaaatggtgttattattgggccctctcaaaaactgaaagagtgatgttaattggtttgtaattttaatgac

SEQ ID NO: 810044 - DNA, 546 bp, Homo sapiens
gcctattataaaaccagtggtgagcggtcttaaaattaaaatcctatgatatattttrattactttatacagtcaatattcatttagttttcatcacatatttgctcttcctgtcctcttaaattcttctgcatctctgagctccatctgcaatcacttttcttctgcctaaaggaatcctcttagtattttcattactgtgggtcttctgatagtgaagtctccattttttgcttgcttggaaatgtcttcattttaccttcattttaccttcacactggatatgaaagtccatagtagctcccacctcctacttgtgcttacgtgctccttgtcccttgtcccatgggttgtctcctccatatgccctatttgcagacagaaggactgatgctgacattacgccagggtaagagcaccagctgctggagtcagcaaatttgcagtggatatggagaaacataagagaggcaggagacaatggggtgccttaaccgtgagggaaccagcatccagaacctgagaaaaaccaagtaaatttcttcc

SEQ ID NO: 810045 - DNA, 461 bp, Homo sapiens
tctgcctcccgggttcacgccattctcctgcttcagcctcmtgagtagctgggactacaggcacccgccacccagcccggctaattttttttttgtatttttagtacagactggatttcaccatgtcagccaggatagtcttgatcttctgacctcgtgatccgcccgccttggcctcccaaagtgctgcgattacaggcgtgagccactgcgcctggcctgcaattcttaaaaatcagcatcctcccaaccagcaccaattcactgacaatacagagacctggctctggaccagtgcaggtgctgtagacagagaacaagattccaggaaaccacaccttaaagatggaaatctgggattggttatctctgcaggttgtgtttaaaggcagtaacggccacattgctggtggaaagtaggatcccaggagtccaggtcacagattggcaagatagatact

SEQ ID NO: 810046 - DNA, 460 bp, Homo sapiens
atctgagtaggttatttcaattttgaatgtcatataaaccaaataccatagtccctctatacttacatatggagagatgagtagcagaattttggcagaatctgsaatagaagatgtttggccaggataaaacagaagcatgagcaattgtgtcaagttatttgaaaactaatagctattaggttggtgcaaacgtaattgtggtttttgcattgttggaatttgccattttatattggaatacactcttaaataaatatggttatgttatatatcattttaatgggcctttcttactttatgatttttagttaatgacttattacttgctgtttattttagactatggaaatgatgttagacaaaaagcaaattctagcgatttttttattcgtgttcaaaatgggttgtaaagcagctgagacaacttgcaacataaataacgcatttggcccaggaa

SEQ ID NO: 810047 - DNA, 626 bp, Homo sapiens
acaggaggcaggaaatactaggtagaaaagggcagagtccctgatgagggcgccaccctcaagcctggacccgcagcccaaagtgagaacatgcattcctgttttcttacacaaatgttgcctctcccaaaccaccctggcctgtgtcgccccctgtcctgtacccataaaaaccccaggctccactagcagagcatcagagcagcagagaaagagagaaaagaagcaaccagacatcagagagaagcagcttgacttcagaggaacagcttgatagtgggaccttggagaatagtttggctgttcctggccaggggaagaccactttctcactccatctcctttacagctccccatcccactgacagcaacttcccaccactcaataaaatactccacattcaccaccctttcaattcgttcacacgacctgattcttcctggatgccggacaaggacaggtgcaagaagtggtcacactgaccctccgctgagctgtgtaacacttaagccttccatggatggcaaagctaagagatcatactgcaatacaagccctctggggcttcaggggtcacaggcaacccctagacaccacygcgggcccacaaggagttctgttcatg

SEQ ID NO: 810048 - DNA, 638 bp, Homo sapiens
tacattatgttacatggcaaaatagactttggacatgtaattaaagttactaatcagttgaccttaaaatagcaatatcatcctggattatccaggtgggcccagtggaatcacatgaccttttaaaagcagaagtcagagaggtctgaagtacaagaaggattcaactcactgctgacttgaaggtggagaaggccaagtgtccagaaaatggggacctcagtcctagagctgcagggaacagaatctggccaacagcctgaacgagcttctaagcagattttactcagagcctccagaaaggaactcagcctatgcaacactttgatttcagttttgcgagatccttagcagagagccccaccatactgtcctaacttctgacatacgggagtgtgctacagtaaaatgggtgctgctttcaaccactaagtttgtggtaacttattattccagtaacagaaaactaacacaaaagggcatgaaggaatttttttgatagtagaaatactctgtatctttattatgatgatggttatacaactgaataagttcgttaaaattctttgacccatacattttaaaagactaaagtttacttyatgcaaatcatacctcaataaccctaaaaaaggtaa

SEQ ID NO: 810049 - DNA, 627 bp, Homo sapiens
cctggaaagcaaaagcattagagcaggtgacttttgggatccattgcaagtctagaattctagcattttggtgacagccacaaaaatcatcacattattggtgtaaaaamaatagttctcctgtttttccaggatagtatataagcttctgagccccactgtgaggtgggcaatcactctgtgattctccccatgcacacattgtgtatgcattaaataaattgtatgccttttctcctgttcaaacatgtatatatatatgtacgtatatatataggggcagaaaaatgataatttataaacatgtatctgtcaaggttgagctaaaattccattgtttcccagtaataagaaaatactcatttcatttctgacccattcatttaccaagtagtactaccaatcccccaaagaacaggagatacagaatctttatcaaggaaaaaaaatgccctttggcaatagtttagaggagttttcttttgtatttccatgttattctggaggaaataagataatgacacgcacattcagaatgtggccattctgcaggacaaatgaccctgtttcttgaacaaattagtagcatttaaaagaggaaagagattggcttacattaagagaaac

SEQ ID NO: 810050 - DNA, 618 bp, Homo sapiens
aataaataaacattgagtttattgaataaaatggcaaatcagaattgtctaattctactcatctctgacattagttttatattttttattattttctattatttatcattttattcctaaacctcctstaagcttaacatttatttgtggaattaattcctggggtgtgtattttcttttaagtttccagtcactgcagaattacaggaatgctagaaaattaacggtttgattattttggtgcctgatcatcttaagaaatgattttgtgttccaaaaccaagtttggccaagagtagggcttatttggaatcttgagaattcctacaaagagaccgtagctggaaaatgatgtagaacgaagagtagaggcgctggaccaagaagatgcctcatctccaaagagagaaacagactccaaacagtggcggtccatggagagttgttgatggcctctgtgtcaaagttctcattcttactctacattgacagggagctggcatgcaccatagctgtgtcaggaaatgtgtttttaacatttgagaggtgagaagagagccaggaaggagactttgggaccttttaaatgattacacaagttaagccagatatttattc

SEQ ID NO: 810051 - DNA, 618 bp, Homo sapiens
aataaataaacattgagtttattgaataaaatggcaaatcagaattgtctaattctactcatctctgacattagttttatattttttattattttctattatttatcattttattcctaaacctcctctaagcttaacatttatttgtggaattaattcctggggtgtgtattttcttttaagtttccagtcactgcagaattacaggaatgctagaaaattaacggtttgattattttggtgcctgatcatcttaagaaatgattttgtgttccaaaaccaagtttggccaagagtagggcttatttggaatcttgagaattcctacaaagagaccgtagctggaaaatgatgtagaacgaagagtagaggcgctggaccaagaagatgcctcatctccaaagagagaaacagactccaaacagtggcggtccatggagagttgttgatggcctctgtgtcaaagttctcattcttactctacattgacagggagctggcatgcaccatagctgtgtcaggaaaygtgtttttaacatttgagaggtgagaagagagccaggaaggagactttgggaccttttaaatgattacacaagttaagccagatatttattc

SEQ ID NO: 810052 - DNA, 625 bp, Homo sapiens
aggagtatctaaaggttgattctcctccttctttcaagagaaaagactataaaataagacaatttcattaaatacccaaaatattaaaagcaaaattttgtgatatctataataaaaacggtttctgtgggctcccatccatgtcttcaaaacacatgctaagtactaattaaacctatatcctaaattcatgcctcttttcgacctctgtattcaaccagttgcttccgtctgttcataagctcccatctctcctgttatcaattttccccgttgtggacttcaccacttgctatctgcacacatcatcatcaacaccacattttcctaaccttagttattaacctttctgtctgattatctgatctaagtatagaaccccatgaaacattcctagtttgatcatttttcctgtcagaggcattcaaaccagagctactccaaatcacaactgaataggggctgggtaaaatgaggctgagacctgctgggctgcattcccaggaggttaggcattcatagtcacaagatgagataggaggtcacaagawacaggtcacaaaggccctgctgataaacatggtacaataaagaagccagccaaaaccaatatggcaacaaaagt

SEQ ID NO: 810053 - DNA, 585 bp, Homo sapiens
gatctccccattgtctttgatgagacttttttcagctctgcaacacagtctgactttcttcttgcctagtcctgattccttccctttttsctttcataaatatcagattcgtattctggcctcaagcttcacccacatcaattccgtttctttcccctttatatttcacaagatttaccatcccacctcccacccttcccaaatctcttgtattcctgacttgctcttaagtcttagtatcttattcatgaagtatctgaatggagacagttgttactgggagcattctaagtaagtagtagtttggggttagggattgggttatccgccctccaccccgcccatggctgacactgagaatctcatcctggatggtgggtagaatgcagatagtccctggcacaaagatgtggtacatttgctaaaaatttcactagggtgactggaaaggatgtttgagtggagggaattatactaggtggtgtaataaaagtgtggaggacacaaaggataatgatattgactgattgttaataaaccacaatgatgtcctaatgaaaaatagtgaaaagttgcaatcagtta

SEQ ID NO: 810054 - DNA, 515 bp, Homo sapiens
tttgctgaagctacttcctttctagcaaaaggccaactgtattccacctaatgacctcttaggaatttataaaagaggaaacacatcaaatctaattatyatgccaaagagagatataaaaaccacatggtagtctatatatagatgagtatacattactgcatatgtttttgcaatcataaattcaaaataagacatctgaatctataattacaagccatactgtaatggaatctttagtatttattttggttcactgaacttagtgacaaaatacaatgtagctaaacagtgaattttgttttattttaacagaatattaggaaatttaaaagttatatgtataaagaaagttttatggctataaagaggtataatttccctgaaaaataagtatagcaaaatatatgttttgttaaaggagaggttgctatcagtccactctacagtagtccagtcttatccaggagggatgtgttccaagacctccagtggatgcctgaaactgcaggtag

SEQ ID NO: 810055 - DNA, 603 bp, Homo sapiens
acacacacctatacacacatgtacattttatctgatacagcctaaaaaacaaaaaaaaatcaaggtatcctggcagagaaggttaagggaaaggtgaaaactagacttctgagggatgttgttttcttttctcattcttattccaatctgcattgcatcaacagctccctgttgcttttagtggcccggagtatcttaacctttgttgtaaggatttgttaagcaagatgcctgatacattctacctagcagaactgttgcttatacaatacaaattttgacatctgtactctttcgttatttaattaattctcttctacttacaaactcacaaatcgacggaggacttcggtgaggattccattaatctaacacagtgctggaaaagccaaaacagtaattcaactgtccactttgaaaaaaatgtgtgatttatagatattctcatatcataacatttcctgtcaaagagaatcatagctaatrggtacaggaagattataaaatattttgattcaaagaatactacaaatggctgtcaaaacttcttatttctcattcaagtaagtctgtggaatggaatatttctgactacttctttta

SEQ ID NO: 810056 - DNA, 518 bp, Homo sapiens
gagaagactcttgcgtctgtatccttactttcattctggcaccaaggtttggggatgagtctttcctctgtgcttgtatcttgtaatgggggctatatttagactactgaacctaacacaggaattgggtatttacttttagaaatcagtgtccatctagtcagagcccaagtggaaatctcttcagattacctatcgaatagatatgaagagatatcgaataggtatgaatacatgtcaaatcctgtcttgacatgtattattgcaaataaaacttagagagctagtgccttactcattccaagcttagatatcctgatctacaaagtgtggttaatacgaaggttaaatgtgataatgcatgtgaagtacttatcatgatgtctgctgaagacagtagtgggagttttatttgtttaccactgtattttcttcttctgtwctactaccaagtgttgagagaatccctgtggaaacttacataatattttttcctctagacagacagacatgcacac

SEQ ID NO: 810057 - DNA, 482 bp, Homo sapiens
cagctctttgagataaattttcctgtctccattttataggtaggaaaaagggtttgagggcttaactcttaartgactaatctaaggactcacagtaaatgacagtgatgggatttgaacctggagtctttctgactccaaaggccacgcccttacctactacttctgaggcacgaggtacagaccaggcagggccctcagggggctgcttggtgctggctcttctacgtggagattgtggaaagggactggaaaaacaaaaaggccattttttacttatttcatcattttaaccagtcctggcccagcaactaatcaaatttctgagaacttgtcacatcacaggctttctttttaaggtgaatatgtttaagctgggtaatgttgtatgctctgtcctcctgggcatgtgatatgttttggatttgtgtcccctccgaaatctcatgtcaaattggaagaggagcctggtcagaggtgat

SEQ ID NO: 810058 - DNA, 515 bp, Homo sapiens
ataaagaaaatagagaaactaaatactaacatatcatgttattttaataactatttaaatatgaggtgtggtggctcacacctgtaatcccagcactttgggaggctgaggcaggtggatcacraggtcaggagatggagaccatcctggctaacacagtgaaaccccgtctctactaaaaaaaaaaatacaaaaattagccgggcatggtggcaggtgcctgcagtcccagctactcgggaggctgaggcaggagaatggcgtaaacccgggaggcggagcttgcagtgagccgagatcgtgccactgcactccagtctgggcgacagagcgagactccatctctaaaaaaaaaaaaaaaaaaaagagtaaaacataatgaaaagcatatgcttgcttggtgctaatgacgttttacagtcttatagatgaagcaacatgtgtaatttcaaccagatgttgaaatggtttaggattagtatctaaagacaagtatttcagaaaatatgtagaaa

SEQ ID NO: 810059 - DNA, 633 bp, Homo sapiens
agggatagtaaaaccaagttcccacctcccattctcaattatattctccctgctgaggaccagtgtttgcccagccacacagaaagatctctttttgcagagaaattcattctgaattttttcttaccatagtggtcattagtgaacagggttaggtaggttaatgcattctcaatcttataatggtactttggtactttcacaacagatgtgttattgctactgtgtgttctggaatatgaatcataccattcagcaattattactgaattacttttaagtacatcactgcaatagaatgcctcattaaccagccatgctctctccattagcaaactaatcattagagtgcagccctctactctaacgggaaaaaaaactcccaactcagaacatttacagcctctttaggcataattgcaggccatggcttatgaaacttggctctctgattgcaaggtaagcgccaaaactcaaaattaaccttggctgctaccaagttctgmgaatcagttttcagaaggaactggcttcccaccccgcctcatctcctgtattggagagcataatttgaatggacaagtataaaataccattttttaggagaaaaatatccaaatgacctatggtgtt

SEQ ID NO: 810060 - DNA, 639 bp, Homo sapiens
ctcccaactcagaacatttacagcctctttaggcataattgcaggccatggcttatgaaacttggctctctgattgcaaggtaagcgccaaaactcaaaattaaccttggctgctaccaagttctgagaatcagttttcagaaggaactggcttcccaccccgcctcatctcctgtattggagagcataatttgaatggacaagtataaaataccattttttaggagaaaaatatccaaatgacctatggtgttttaaatttgtgctaagaaatatagaaagaatataaaaagcgtaaggaagaagtttcaaaatgtttataatctgggtggggagaatgctatagagtgaatggcttcaacaacaaatacttatctcacagctctggagaataaaaaataggtggaaaaatataaggtagtatataattaacccaatgctaaatgatatatcaataataagcagtaaatgagctcaaagatgagatcagtcatgctgggggatgatatacattcaagagtaactattatgtctcaagaaagggattaaagcatcattttaggttatcctytaaagactactagcttaatatgctgctgggatcataaaaaacaggaagatactggccattgtcagaaa

SEQ ID NO: 810061 - DNA, 568 bp, Homo sapiens
ggcctaattaataaaaagttataagttgctaacattctcacagccattgaatcggtagtgattatgccatttttcttgtattttatgttacctgaaaatatttgagtttttccagtggtgttgccattcatatacaattgagttgattttctttttttttttccaatgcatattgagcatgttttccttgcacaactaaaggcttgaaaagtatattgaacatcaaaactctaaaaggacagttttaagaaataagattatggcattaaaattgaagataaggcacatttggcatgccctatgtgatcagcgggcatgtaattcctaatttgggttgtaaatgtttctgttgagtttcagataagtggagaatgtccttaaaagtatattattgggctgagtacagtggcctgtaatccctgcacttagggaggcagaggcaggaggatagcttcagcccaggagttcgagacctgcctggacaacataatgagaccccattctccataaaagaggggcaaaaaagacaaagcrtgttattccattgagcaattaggtatcacacatg

SEQ ID NO: 810062 - DNA, 565 bp, Homo sapiens
aaaaaaaaaagaaaaagaaaaagaaaaaaaattcttcatttttgttacgttgttttttatgtctagcatttccttttcattctttgagtttctatctctacttrcattgcccatgtggtcttgcatggtgttcacttttccattaaacccgttagcacattaagtagttatttttaactcccagtttgataattccaaaatttctgccacatctgagtcttgtcctgaggtttgcgttctgtcttcttctttttttttttttttttttttttgcctctaagtataccttgtacttatttgttgaaaaccttgaaaaccagacatgatgtattagataactgtcacaaaagtaaacagaggtttagtgtgaggttttatgtttccagggctaggagttacggctgtgtctcatgttcatttagctgcagttttacctggtgtccttgtttttgtctcccttgttgtccttaggtttccctaaaaactgatttttaaatagaatctgtgctttgcaaatctctcagttataatccactgatattatactggagtctgtcaatgtgtt

SEQ ID NO: 810063 - DNA, 619 bp, Homo sapiens
aagacaaggatatctttctctcagcacatctattcagcgctgcactggaagttatagtcggtacagtaagacaatagaaggcaagagatttaaaagaagaagaaaaactstgttttttcacagatgacctgattatgtatatagaaaatcccaagaaactcaccaaaaccctgccaggactaagaagtgaatttttagcaaggttgcaggatataaggttgatatacaatgtaccttgtatttctatacatgagaaacaagtggaaaataaaatcagtgtcttagcactatttacagtggcttccaaagccgtgaagctttttaggaataattttaataaaatatatgcaaggtttgtattctaaaaactccaaaatattgttgagaaaaattaaagaagtcctaactaaatagatacaccatgttcatcagttggaatgctcaatattgttaagatgtcagttcgctccaaactgatttatagattcaattcagtcccaatcaaaacaccagaagacatttcctttttccttttggtagaaattggcaagcttatcctgaaaatttgtgtgaaaattcaaaggacttaaaatagctaaacaattttgaaaaagaaaaa

SEQ ID NO: 810064 - DNA, 632 bp, Homo sapiens
catactcatgaacaattttcatagtctaaaattcttcactgaattgggtaggaaattaattctgtcttcgaggaagccataagaccagcgaaacactctggcatttactgcatcacattcttttctccaatttgttacttaagatcttatcattgcagtatttatgtagtctgagcattagatgaggctatgcagttgactcactggtgtctctttcctcacttataaaatacgaataataaatacatgtgtttctcggactatggagaacaatgtttgcattgttctttgggatgacctgaaagaaaaataagtttatgcaatgttacatgctcttattttaatgattggtgaatcagtctccataacctgacttctatccgatgagtggaccttccccaacaatcttcccaccccttatgagtaatgagtccaattggttgttcaaataccctgtagatgacataacttttctgattaaatttttgagttaattttggtgatgtgactatrgaagctgtactttacacctttattttcaaaatgtaaaaatcaatttttaaaatcttttggctttaaaaaaaatttcccactcactcaatcttgccaaaaacctaccttcaagaactttc

SEQ ID NO: 810065 - DNA, 619 bp, Homo sapiens
aaagaaagtatccaactattttccagagtggctgtaccattttacattccaccagcaatgtgtgagagatccagctattccgcatcattttctaaagggaktctttggttttcttactgttgagttttgagaattctgtatatgttacagtagtagttcttcatcagatatgtagtttgcaaatatttcctcccagttatagtttatcttttcatccttttaacagggactttcacaaagcaaaatgataataccaaatgcccaccagcatttggtattatcactgttttctgtttagctgttctaatagatgtgtagtgatatctcatcttggtattaatttgcattttcctaactgctaatgatatcgaacacctttttatatgctaatttgccacccatacgtggttttcagtgaaatgtctctcatgtcttaagctcattttctaaagggattctttggttttcttactgttgagttttgagagttctgtatttgttacagtagtagttcttcatcagatatgtagtttgcaaatatttcctcccagttatagtttgtcttttcatccttttaacagggactttcacaaagcaaaaattttaattttgatgaagt

SEQ ID NO: 810066 - DNA, 659 bp, Homo sapiens
tgtgctaaaatatatatcttagaatttaaatttttaagagctaataagtgaattgtaaatttaattttctatgatatagaacaatgtacatttccatgcagaatcttctatttttaagtgtaatgttaaasatttcaaagtaataaagtgacctctgtagatttaaaatttggaataatattttttgcatattgatattacaatttggggaatttctcactcttatatcagtttttttggtgggtgaagtttacagtttttattcttaatcacctaatggtagacaactttttggtcattttctctggaaaacatttggagatcatgtcagattttggattaaagctttttttaattatttcgtatgcaaacttgtttactgtgttctgagtggccagtcatgagaccataagcaacacctgccctcttagtgtcttttgtaccatctgtaatgaataaatgtaaatttattctgtaaaacatgacattttgaagtatgtatatacattgtcaaatgcttaattctgggtaattaatgctttacctcatatagttagttaacacttttgtggtgagagcacataatattgtctcagaattttttaaaaaatgcaaatacattattattaactatagtcactgtgcagtagaaaaaaatt

SEQ ID NO: 810067 - DNA, 560 bp, Homo sapiens
gtatgcttccccctgcacagatctccacccccccacacacacccccgccccacaaaatgcttaaaaagtaaactaactctttgttcagggcttagtcctttggatgttaatccgactgggccagtgcacctaaataattaatacatatcctcctgaaccccatcaatctctctgattccttaacaatcctgctacattttctttaaggaatctgagtaggctagattagaatgggttgcttagatggaagaattatgggacataacactggaaatgttgcccgaagctgcaaggagaattttgaatgcaatactgaagagttgcaccactacaagtgctttatgcaagacaaaatttagttctgcatctaatttccctacttaaaactaacacagcttaagaacgttaaataggaaatgaatgtttattaggtggcaggtcatattcagggtctcaaaagacactctatgtcagagcaatgtcagaagaatacaggagagctgttgggagrgacctgaggggccagagagatataaatttaagagctacaatttgaatgt

SEQ ID NO: 810068 - DNA, 655 bp, Homo sapiens
aaattccaaagtatgacaaaaatgaataattctctttgagattttgaaattaaaaaataaaagaaagaaagaacaagcaaagaatccaactcctctttgggttaatttgaatagtcaaatacagaagaaatcatcaagctcccatcagttttgacaatgtgttctcagcagcatttggtccacagatactctcacaataaacccattaataaacaggaaagaccactgggtaaacacgacaccaatatccaatacccaaatgaaagattattttttactttaattactataaactcaatacacatcttttcagaagtacctagctccattcatactttcacaacgtgaggtggaatgaaagtgctaccaatcagtaatacagatatctgtgtacatgtcagtttcttccaggaaattataaactacttgaaagcaggaattcattttgttaataataccttatatttgtataatattggatctttgtatacataatttcatttgatcagagtaaaccactaaggtctaaagagcagtagtaatttctatttttattgtggggatatggcagccaagagacaygaggaatttaccctaggttactcaactattaaataataagcagaggaatcaggataagaatcagttttctgac

SEQ ID NO: 810069 - DNA, 612 bp, Homo sapiens
attgtatttttcagttataaaatttacattttattcttctttatatctttttttttctttttttgtgacatggtctcgcatatgtcatccaggctggagtgcagtggtgcaatcatagctcactgtagcctctgactcccaggctcaagcagtcctcccacctcagcctcccaggtatctgaaaccacagacacatgccaccatatctggctaatttttaaaaaattttatagagatgaggtctcactatgttgccaaggctcatcttaaactccagaactcaaatgatcctcctgccttggcttcacaaagtgttaggattataggcatgagccaccatgccctaccacatcttctatttctttgatgatattttttaatttttcttttgttccaaaagttttcataattgcttgttaaaacactttttgacagcttcttgaaaaccacattcagacaattacaatatctgtgtcatcttggcattagcrtctattgatcatcttttctcatttgaatttagattttcttagttcttggtatgaccagtaatttggaatgtatcctggacattttgaatgttgttttaagactctggttcctattaaatat

SEQ ID NO: 810070 - DNA, 372 bp, Homo sapiens
ttagaggcagtggtttttgtggcaatagtatagcctactgctaccctcttcatatctggatacaaatcctgactccaccaacacagcttgtgtgaccctgagaaagttacttaatttccgaacccttattccttttcacgaaaatagatgaattactttttgtgaaagctcagtagtggatgggtggggtgtggggaaaaaaagaaaactcagtagtaagcacttgataaatgttaaatttcttactattggcgtcagggagtgggatagggtwtgctagaggacagagatcacaagtcctcagaaacattgtaaaattgtgtgtgtgtgtgtgtgtgtgtgtatgtatgtgtttatagacctatacagaag

SEQ ID NO: 810071 - DNA, 585 bp, Homo sapiens
ctcaagaggcttgaccacattcttggagcaggagagaggaaaactccagcatgaaacaactcaccaattaacatttcaataaattatgcagccacatacatttttttytgagggaagaagagagcccatacctttcattagattctcaaagcaaagagggagcctgatttgatccagcaaaagagatgggtgtcaaacctctgtgctccacaaagcaggaaaacatcacatttgcattgattatagagccttttcatagtgctgacacatctatgagctttgagtggcctcattatttttttattaaattgggttggggggggccccattcaacctaaatgcagatggagtcattgtgaatgaactgcaatatacacaataggtaataaattctgggaaatgaaatctgtcatcagtccactcttttacacaacaaaaaccaagatggggtataacactgagacttgaggcaaaaaagtctccaggataaagaggcagaaattgcattcattgacttgtaaagcatgtgggggggcctcttctatgaacagaacaggaaagggccagtactaattcagtaaaaag

SEQ ID NO: 810072 - DNA, 617 bp, Homo sapiens
ttatataaagttctcctttgtttctctgccccttcttccaaaaaactaaaaatctrctttcagaacaatggtcacctcaacttcctaatttataacttatttaagcctttgtctactaatagtttttaaaaaacatatcctactctatctacattgtctagctatatcttatcatttaaaatgtttaaaatttttaaaattacatttttgtctctaatattctgagaagacttactatattttaacaaatagttatgaacttaagctgctttgaaaaatataagaatgatttagatatcagctaaaactatagttcagaaaacctgtagattagaggagaaaaaaggcatctatgtaagtgactgtagttgaaatcatttccatgagaaggattattttctcactatcacataatactgagtaatgtttacctgagaggctcttatttattttgacttttgattttttttattggaggtggggagcatttttgtttatatgtaactatttctgtgtttcaaagagctaacatttaaagatttcccttaaactgagtaaagtaatttatatgttgcctaaaaagacagaccttctcaactggacccaaagcaatgata

SEQ ID NO: 810073 - DNA, 458 bp, Homo sapiens
ctttacaatttggagcaaggtgctcactgaagttgggctccttccctctcacaacgactgggagacagtggtgtgaccttccttgatcacctttcaaagggcccatagaccttgggaaaaatattctatggtcttaacactggtaagagacttaaaaattttacaattcaaaggggtagagaaaggatttgcaaaagtgcaagttaaaagtacacgctctaagaaaagggcagtcagggcctgcagtcagaaagaagcctatctaaagtttactcggctgaagggacatttaggctgcgttggtcagctggtgttatggactgaattgtgtgtttcgccacaaygacaccgccaagttcatatgttgaagccctaacccccagtgagactatttggagatggagcctttaaggaagtatttaaggttaaatgaggtcataagagtggaactccgccgg

SEQ ID NO: 810074 - DNA, 582 bp, Homo sapiens
ctggaaaatcaggtcactcccaccctaatactgcgcttttccaatggccttaaaaaacggcacaccaggagattatatcccgcacctggctcggagggtcctacgcccacggagcctcgctcattgctagcatagcagtgtgagaccaaactgcaaggctgcagtgaggctgggggaggggcgcccgccattgcccaggcttgagtaggtaaacaaagcggcacggaagctcgaaacgggtggagcgcaccacagctcaaggaggcctgcctgcctctgtaggctccacctctgggggcagggcacagacaaacaaaagacagcaataacctctgcagacttaaatgtccctgtctgacagccttgaagagagtactggttctcccagcacgcagcttgagatctgagaataggcagactgcctcctcaagtgggtccctgacccccgagtagcctaactgggaggcaccccctagtagtggcggaccgacacctcacacagctgggtactcctctgaaacaaaaattccagaggaamaatcaggcagcagcatttgcggttcatgaatatccgctgttctg

SEQ ID NO: 810075 - DNA, 554 bp, Homo sapiens
ttaggacttgtggtcagttggttagtaaaaagtaaccccttaaagcttaaagaaattgtaagatgatacacacagagctaaccattttaacttaagactatccctgaatcccttgtagtagagctgaatactttttttttttttttttttttttgcacgggcctgctcatgctcaaagtggagttgcacattgtcttttcttgcataaaacatatccttattcatcaacaataactactaatttgggttcttcaaagtacagtgagaacttaattgatacttgtgaagctatattgttacaggccagtctttgttcttggagctcccaagatgggggcgggccactcccaagatggcaggaagccttttgttctctgacctggggttcttggcctcacagattccaaggaatggaaccttgggccatgtggtgagtgttatagctstattagaagccatgggtcaaagaagagaaccgtggaacccagtgactagtgttcagctcaatcaggacgaacccgggcacttagccttgcaggaacaattgcgaacct

SEQ ID NO: 810076 - DNA, 619 bp, Homo sapiens
aaatatagtcatcccccagtatcaatggaggagtgggggattgattccaggacccctgtggataccaaaattcatagatgctcaagtctcccatataaaatggtgtaatatttgcatataacctatgcacatcctcttgtataatttaaatcatccctaaattacttatcatactaatactatgtacataatattatgtacatatttgttatactgtgttgtttcaggagtattgacaagaaaaaactatgtacatgttcaatacagacacaattgccctttttctgagtgtttttgatctgaggttggttcaccccatgcatgtggaacccactcaattcaagggttgtctgtattaaattgtaaagaccgactcaatcaggaaatttcagtacctaaataatgctttgacaaaaatgttaattttaaaatgtatgcatctgacttaaatgtgtttttatttatttttatttttaaaaatttcactcaagaagtatagaaagtgtgtttttaattaattaagaaagtctttacagggtcatttcacgtgattgagaggtaaggacactcacccaaaggcatagttataaaaaatrtaaatgaaactatgatatcagga

SEQ ID NO: 810077 - DNA, 499 bp, Homo sapiens
gagctctggactgactcactaggctttggactccaggacttacaccagtggtaacctgggtcctcaggctttcagagccctctgactgagagttacaccattggcttccctggttctgaggccttgggacttggactgagccatactatcggcatcccagggtctccagcttgcagatagcctgtcatgggacttctcagccaccataattgcataagtcaattctgctaataagtccactatatctatatacatgtcatattggttctgtctctctgaagagccctaattcagatttggtactgggaaagctgaatatcatttcttcttactgtattccttacaacataatggaagagagctgtgaaattgttctcttgcaaaaaggctgtgataagtgaaggagtctacttaatrgtaaagataaaagcttaaaagtgaattattattggtgctatgaaagcagaaaatcacttaattgaaatggcagagcaataac

SEQ ID NO: 810078 - DNA, 513 bp, Homo sapiens
tattccaagtgtagcaaaaccgttacactttggaaagaactgaaaccaatataaaaacaaaatttcatataacttaagtacaataataaaagtgaaacatattgagacmgttaaactttgaagatttttttttcagaaattaaaagctataacctatggattaagtttatacctgaaaaagagtgtatttcttctatttgtctttgtgttgcatcctaaaggattggacgatataaccaaatggctccaaatatacttcagatatgagtaggacccatttaatgatgcctgaggcctggagtcaatataacactgtgattttagccacatgattgtttcttcattgggttaatttacaaagcctcatcagaacagtcaaagaaatggcagaagctggggatagatggaataggacaaagatatctagacaggatgtaggtctggcaagtcttgatgagctgtcaagctatctaaatcactctgatcaaaatctgggtggacacacaaagaagc

SEQ ID NO: 810079 - DNA, 513 bp, Homo sapiens
tattccaagtgtagcaaaaccgttacactttggaaagaactgaaaccaatataaaaacaaaatttcatataacttaagtacaataataaaagtgaaacatattgagaccgttaaactttgaagatttttttttcagaaattaaaagctataacctatggattaagtttatacctgaaaaagagtgtatttcttctatttgtctttgtgttgcatcctaaaggattggacgatataaccaaatggctccaaatatacttcagatatgagtaggacccatttaatgatgcctgaggcctggagtcaatataacactgtgattttagccacatgattgtttcttcattgggttaatttacaaagcctcatcagaacagtcaaagaaatggcagaagctggggatagatrgaataggacaaagatatctagacaggatgtaggtctggcaagtcttgatgagctgtcaagctatctaaatcactctgatcaaaatctgggtggacacacaaagaagc

SEQ ID NO: 810080 - DNA, 597 bp, Homo sapiens
aaaaatcctgtagcaatgtaggcctaaggtttaaaacagactggattgggaggatggctagagaaatctgtgaataaagagataggtaagtgatatgttttagaatacaaaaacaagaccaagctaatatggaggaagaactggagtggcagaacagagaatatcccatgttttcaagtaggagatacattatatctttgaataaactgaggacagcatgttgttggagggagtaagatgatgaatttggttttggagctgtaaggatttgacagctatgtgactcacagaaatatttaacaggagttgtaaatacagtactgaaactcagataaagaacatctatggagatgttattacagttgttaaaggcacagttattaaagggaaaatgaagtgaagaaaatgaatgaattcttcaagaacatattccaattggaaattgccctggtagttttacatattagttaataagtaaaccactttttatttataatgtattcataaagttttagattataatagtggagtagtttattatkcttttgatatttagaataactttttgatatcatgcatgatgatagttattttaat

SEQ ID NO: 810081 - DNA, 496 bp, Homo sapiens
ctaggtgcgtcttgaccctcagttgggtataaacggaggtacagattttgaagtgatgatgataaattagatgttagatatttagaatttgaattgccaaagggcaaccagatagatataatcaccatgcaattgaataatcagatatggaatacaggggcctggcctggatataaagatttaaaaatcttcaacatacatataatttattgcttatggagaaaatagatgtgggggagaatatgtgagaagatgttaggaaatataaaaatgttcagtgtgaatatagaagaagttgccctggaaggaactatagtgaaaatgtcagaggtgaaataaaataaaacaatccacagcagatgaggttgttttggaagccacatgagaaaatgattccaaaaggaacttgtcagtatgccaaattaacatagcatgaagatagtttgttcactatatctgtgtgaygggatcatcgtacaacgggcctcaatggcat

SEQ ID NO: 810082 - DNA, 605 bp, Homo sapiens
tggtgaccggccaaggaaaagcacccctctgcgcaaaagtaaaattgctttgctaagaatcctttgtttgagtgttcaatctccttaagattttaagtgttattcccaacacaagtaatctaggacacgtatttctcaagcagaacacacatcagtcaccaaagcctgtaggttctagctgcacaatattgtcctgactcctccttttcttcatgccctctgctgttgccttcggttaggacctcactgcttcctgcctgaattactgacttcagcctttgtgacttcagtctattttctaactcgtctttctgactacaacctatttgttccctttgcttcttcaagccattctccatcattgtgccaatgttctaaacgtaaacagtttctatcattttcttgcttaaactctttcagtggcttctccaaatgtgtcagcatgaagctttaactgtgagctgagcacaaaaggactttcctcacctgaatcctgtttacatctgtagcctcattcttctwccacaaccaacaaacatgctttgccccagacactccgagtgacgcgactattttatgccactgcgcctcttagcttccccctt

SEQ ID NO: 810083 - DNA, 630 bp, Homo sapiens
ggttcctgatgaacattgcaaatgtgtatctatagaaagggccctacctttctgcaccctccctctcttcccacatgtcctttggccatccttccatctggcacacttattctaccccctaattcttcaagatgctctatcagccaatttattctccatcagcccttgtagttcatcacactcaattatctctaaccctctcccacctccactcccaccacacaccccagtgctcctgcctctcaggatgtgattgattttccttctccttctgccagctttctctctgggttagactgccctgtcagattgtagtgctgaggaaagaagggttcatcctaagcctgacttgtactctgtacagctggagttgtttctcagcatccagccaaggcttctttgaaaacactcactggggaaaagaacaaggttgcatcatccctttgggtcatggctgcagtgtctcttggtggttttaaaaacagctcactccttggctctcaaatgaccctggaaamcaattgcattggctacgtaagtcataatagttatagtcaaatcattgcctactatttatatatatataattatttcccatgattatgctaatgcacatcattaacccagatt

SEQ ID NO: 810084 - DNA, 630 bp, Homo sapiens
ggttcctgatgaacattgcaaatgtgtatctatagaaagggccctacctttctgcaccctccctctcttcccacatgtcctttggccatccttccatctggcacacttattctaccccctaattcttcaagatgctctatcagccaatttattctccatcagcccttgtagttcatcacactcaattatctctaaccctctcccacctccactcccaccacacaccccagtgctcctgcctctcaggatgtgattgattttccttctccttctgccagctttctctctgggttagactgccctgtcagattgtagtgctgaggaaagaagggttcatcctaagcctgacttgtactctgtacagctggagttgtttctcagcatccagccaaggcttctttgaaaacactcactggggaaaagaacaaggttgcatcatccctttgggtcatggctgcagtgtctcttggtggttttaaaaacagctcactccttggctctcaaatgaccctggaaaccaattgcattggctacgtaagtcataatagttatagtcaaatcattgcctactatttatatatatataattatttmccatgattatgctaatgcacatcattaacccagatt

SEQ ID NO: 810085 - DNA, 559 bp, Homo sapiens
tgcctggcacaaagcaagcactcagtaagagggagtgatgaggattgggatgatgatggcaatgacaaaaacaatgatgcaacaataagaccaagataagacaatatgttgatgttgatgtggcagtgatggyggtaatagtggatgatgatgatgatgatgatgatgatgacaaagacaacagtgcaatgataagaccatgatgagcaatgagcaatcatcatgatatactgtttgttgctgctgctgatgttctgtttgttgctgctgctgatgttgtagtggtaaacaatacagagaagaagaaacaagaaggaaggaggaagggaaacataaaaaaaggatttgatatggtttgactctgtgtcccaacccaaatcttaccttgaattgtaataatctccacatgtcatgggagggacccggtgggaggtggtcgaatcatgggggtgggtctttcccatgctattctcatgatagtgaataagtctcatgagatctgatggttttataaagggcagttcccctgcacacactgtcttgcctgccgccatataag

SEQ ID NO: 810086 - DNA, 642 bp, Homo sapiens
agtacatattttcactctccaataactacaggtcatgaaggaaattgtaaataaataaataaataataaattgttactgttttatttccaggtgggattggtaggaaataggagcagtggccatgttcattgagggttaacaagttcattcattcattcattcattcactcggtatttatttcttgggaactatacgccaggcactatccaggaaataataaaatgtagttaaacagacacagacgtgtgtggttcctacttttataatctaacagttcggtgaggggcaggggcagtcatgtaacaaaaatgacacaattattaaattgtgtttgtagcaagggctatgaatggggaaaggcatgaatctggaaagcagaatgggagcccccgatcaaatcttggaaaacctctcagaggaaatgacactggagtcaagatactggccagtgaagccagtcgggagttgggggaggcaatgaccgtgatggggaaagggagcgagccctctagcagaggagacagcctgcacaaaggctcccagygcagcaaaggcagggtgccctggggcagggaggggctctgcgggtgatctcaggtgcgcccccagtttctacgtgaatccctccacatccagctcc

SEQ ID NO: 810087 - DNA, 541 bp, Homo sapiens
ctgcactccagcctgggcaacagagcaagaccctggctcaaattttaaaaagttggaagaaaaatgtatcttggtggtcagaaaagaccacctgcaggaakggtggcatgtgagcagagacatttgtgaagatctgggggaggactattccaagcagagggaagagcagaaataaaacccctaaggcagtggtgggtatggcaggaacagcaagggggccagggtggcccaggtggggaggggctgtaggaggtggctcacggtggctggtggtgccactcactcaccacaagtgtcctcacagcaggtgctgcctgttactcttcttttatccccagaacgtagcccaggagggatatgcagaggaaggttgtagcttgactgctcccacccctcatctgagcctctagcaccacaaagtccccacaaatcctgctgataagagacagcccacagagcacccatccttaaatgagataaaatggagtgttttccaacctagaactttctgaacatccccatcagggcccaacattcatgt

SEQ ID NO: 810088 - DNA, 541 bp, Homo sapiens
ctgcactccagcctgggcaacagagcaagaccctggctcaaattttaaaaagttggaagaaaaatgtatcttggtggtcagaaaagaccacctgcaggaagggtggcatgtgagcagagacatttgtgaagatctgggggaggactattccaagcagagggaagagcagaaataaaacccctaaggcagtggtgggtatggcaggaacagcaagggggccagggtggcccaggtggggaggggctgtaggaggtggctcacggtggctggtggtgccactcactcaccacaagtgtcctcacagcaggtgctgcctgttactcttcttttatccccagaacgtagcccaggagggatatgcagaggaaggttgtagcttgactgctcccacccctcatctgagcctctagcaccasaaagtccccacaaatcctgctgataagagacagcccacagagcacccatccttaaatgagataaaatggagtgttttccaacctagaactttctgaacatccccatcagggcccaacattcatgt

SEQ ID NO: 810089 - DNA, 622 bp, Homo sapiens
aaaatcaagatgtgggatggagccttcgtgctagctataatggaacacaattaatatgaaattagtcctgccgatacaatccttagacaatcattggtctaagaaatctgaggaggtgattatagcactgtaacataaaaatcctattatatgtatcttaaaatagtgttacgtcgtgtgtgtgtgtgtgtgtgtgtgtgtgtgtgtgtgtatctgtgtgtgtctgtgtgtaaatacactaaattcagtagaaattaaattaagccagaaatcattgtcagggcaaaaatgtgctcacatatctgggctcacatagaactaactcccataagaaattgaaaaaatgctgaaccagcagcctggatacttgcattttagtttaagctctgctactattagctgtgtgatctaagaaaaatcaatcttttcacatgtcaggacctcagttttcttatctgtgaaagcaggatgatagactggttgatcttccagccttaagatttcgtgattctaaactgaatgaaatgtccatgaacaagaatgctcagaaatagaatgctatgrctttttttttttcctttctgattaggattctctgttactgaaaatgtaagatatatga

SEQ ID NO: 810090 - DNA, 636 bp, Homo sapiens
tgctcccccatcaccttctgccatgattaaaggtttcctgaggcctccccagcagccaagcagatgccagcatcatgcttcctggaaagcctgcataacgagtttggctcctctttgccatctggtctcccaattatctcctgaggtttctaggacagacttccactgctctagtgcatacttgtagaatgatagaatgttgaatgtggactggcccaggaaatcttctcttctcttctccagttttcaagaggggaatccaagacatcaagaaggaactggttcaaagttattgagatggttctcagtggagacctgactcaccttgaaactcctatagcccctacaccagaacccaacatttaaaactaggtgatatagtctatcttgagatattcctgtccttgtgcagagaagtcaacttgaggagtttaatttatatccctactcaacttccaaggcatttctttgctgatacaaggtctcttttagattttgtatacttccatccccactgacactacaaagaagagtccyttggggtcatcctcatagctgtcacattggcatctgctgaccttaggtttttctttcacaatactctgaattacttcatttacattctttcaatcttaa

SEQ ID NO: 810091 - DNA, 447 bp, Homo sapiens
cccagacagaatggccattattaaaaagtcaaaaaacaatagatgttggcatggatggggtgaaaagggaatgcttatacagtgctggtgggaatgtgaattagtaaaacctctatggaaaacagtataaacagtatgaggatttctcaaactaaaagtaggtctaccattcgatccagcaatcccagtactgggtatctacccaaaggaaaagaaatcattctatcaaaaagacacctgcatgcatatgtttatcacagcacaatccacaattgcaaagatatggagccaacctcagtgcccatcaactgatgagtggataaagaaaatatggtatatatacaccacggaatactactcagctataaataagaaaaaaatgatgktttttttttgcagcaacttggatggagctggaggccattattgtaagcgaagtaacacagg

SEQ ID NO: 810092 - DNA, 587 bp, Homo sapiens
gaagacaataaaatgcttatttcttgatcacatcatggtctcatcaggtgattagataagtgtccttccttgtggtcatttaggaacccaggctccctgkctctctttgggtgacttgtgtctataaagtgggggagaatgaatggattttgaaggatgactaattgctgccacagggatccattaatggtataatatagcaggaggccagaacatggggaaatggggatgtggggatgacaagaggtaaggctgtagaggcatagagagaacagatcataaaagaccttgaatgccaagttaaggaggctggacatatataaatgatagaggaatggggataggaatacagtctggttcttttttttttaagttttgaaaagacactctggctgtaacataaagagaattttggagagacacaagagggtaccagttagaatcaaatctattacattaatcgaggcagaagatgatggcttgaatcaaggtggtatctaatagagaaaattagatggctctgaagggaatatcttcaagacttgcagactaatggactaaggagaactggtaagaatgacagtggg

SEQ ID NO: 810093 - DNA, 618 bp, Homo sapiens
tggctgccaactagaaaatgaggttgggtgaagataaaggtgagaaagggcataataaatggaggtgggaaaggaatcaagagcatcatggatgagattagccttgaatatgagttcccttccccatgagtcatttcctttgtggatgactaaacaatagaactgtatttcttatactgaggggaaatatatttccttataactctcatctattagtcttatttctgcttcctcagctcttatatggctgcaattctgtttcctcttcagtttcttctgtaaacatccatagttccttcaaacatttttcatatgatttgatctcaagctttcatttgagcaatgttcagcttaaaatgtcaagcccagaactgtcaaaaagctttccagatgtggtttggcatatgcagtaccaagcccactgtttatgttttctttcttaatctgaatattaatatatttagtattacacaataattgcaattatgagcaatttttttcctaaaaatgtcacactatacaaacatttcttacrtgcttataaataattaagacccccaagtcttttttccagaaactgctttttaaccagatcttccatgttaaaagcttagtatg

SEQ ID NO: 810094 - DNA, 577 bp, Homo sapiens
gacatccaatatattttactctctcccagtcagtgctatcaacttcaacattcacaatgctgttgtgggaggcagaattctaagatgatgcccatgattctcaccccccggtatccacactgtggtgtagttctctccccttgagtgagggtggaatctgggacttgcttctagataataaagtatggcaaacgtgaagggattttgcagatgtaatgaaggtcccttagcagttgtctttgagctaatcaaaagggagattatcctgggtgggcttgacctacccagaggagccctttaaaaaagggtccagaccttctggaagatgagacctgaagcaggatgtctcttctgatgattttgaagaaacaaacaaccatactgtaaacaagctatggaatgggtggtctctaggttgagagcctcagttctccaaccgcaaggaactaaactctgccaacaacctgaatgagcttggaagaagtccttgagtcctatgatgagaccactgctcctkccttgattgcagaggacccagctaaagccccacaaaacggtgagttaataaatgtatgtc

SEQ ID NO: 810095 - DNA, 495 bp, Homo sapiens
aaacttccatttctgctctgcaacttgcctcagtctttctctgctttatgsccctcagtcgaactctttcttctgaggagacaagggctgaagttgctgtggactcatacagattcactgccagtaactcagggtaactcagatctctgttaccacagcaatttacagagcctttacattgtattaggtattataaataatctagagattacttataaactccttagtatagagattaaattataaagagattacttaaaatctctataatttaaagtatatgggagtatgtgcataggttatatgcaaataccatgccattttatataagggacttgagtgtccttggattttggtatccatgggggtcctgaaaccaatctcccatggatatcaaggggcaactatactgaactgtcccatagaacttatgtttatggtcttttaaaataaacataggaattgacccccctggtcttaaagcttgaaacttat

SEQ ID NO: 810096 - DNA, 646 bp, Homo sapiens
cactagattttagtttcatgtatttcactgatttcatataattagttagggtgaaatcccaccttgattttttggaatacattcagtaggcttaggaccagcttatcttcgtatatgtggtaaaacttgtctgtgatttcatatgatccagggctttttatgattagtaggtctattattacttattaaatgtcattatacatcttatacatttttgttgttaaagattgctgttattaggccaggtgcggtggctcaggcctgtaatcccagcactttgggaggacaaggtgggcagatcacgaagtaaggagatcgagaccatcctggctaaaatggtgaaaccccacctctactaaaaatacaaaaaattagccgggcttggtggcgggagcctgtagcccagctaattgggagtctgaggtgggagaatggcatgaacccatgaggcagagcttgcagtgagccaagatcacgccactgcattccagcctgggtgaccgagtgagactccatctcaaaaacaaaacaaaacaaaaacaaacaacaacaaaacaacaamaaaaaaagacttctgattttctggttcaatcttgagaagttttgtgcatccgggagtttatctattttctctaaatcttctact

SEQ ID NO: 810097 - DNA, 521 bp, Homo sapiens
tttctcctcaggtgtactgttacgtgtataagccttgatctcaggtgccataatttctctaactttgtttttcttaacatttataaataatataaatattaaataacataatttatgtaattatataatttaaatgtaatataaatgttatatattacacacacacacacacacatatatatatatcttatagtagcttgatttatttatttatgtttagagacaaggtctcgctcagttgcccaggctggagtgtagtgatatgatcatagctcactatggccttgaactcctagcctctagggatcctcctgcctcagcctccagaatatctgggactacaggtacacgccaccatacctggttaatttttaaaatattttgtagagataggsccttgctccgttgcccaggctggtctcatactcctggcctcaagcaatcctcccaccccatcctcccaaaatgtttatagtaactttatatgaatgacattgaaattgttcttgtttattttattt

SEQ ID NO: 810098 - DNA, 578 bp, Homo sapiens
ctgctcggttttaatactataaatgtatacttcaaattagcacagttttattactcgtcttttaaaacattttattttaaatgggagctaacttggagaactccctattgtacatatgcaaactcagctatatgttctcattggagagtaaatttataatggttgattattattcaaggttacttttgttataatacctgtctcctcctctagttgacattaaatagttctgtgtttaaatactagactcaaaataaatagtgactgcagagtgattgtaaagataaagaaaataccttgagttatttcaattctatcattctacatgaccacctggagttattttttgtatataatttaaaaagtaaaacagaggacaaaatgcaaattttaatatttttctttgataagtgcaaattttagttcagcaatgaaatattttatggaatttgaataatatctyttacattgaaatttaatttaaaaattgtttttcttattcattattaagctgtaatgttatcatatatcatggaaatagaccaatataaagggttgtttttctcactttatataaa

SEQ ID NO: 810099 - DNA, 485 bp, Homo sapiens
tgaaaaggtatagatatagtgtgagaataaaaaaataacttgtagattttccctctatccagcattagttggaaatgcaacatgagtgcctttacagttcctaagcaataygagtgatatatttgaagcaactcagaatatgtggaaggcaacaataaattgccagaataattaaggcagtgtggaattcaagtgtgtcaatgcctacaaacttgctatacaatagaccagcacagccagtgaagcaggttggtgtatgatggagaatgacacttgactatggaagattaaaagaacagtgttctcagtagctttagtagtccttgatatggtgctatttcactaacacaaggtaaaggtaactagtattctgtagttgaatttggcagatgggttattcttaatatgtcagcaaagagagccaacaacattttcaatcatgttaaacagttatcaatatgcatttattgtactaacaacctcaa

SEQ ID NO: 810100 - DNA, 485 bp, Homo sapiens
tgaaaaggtatagatatagtgtgagaataaaaaaataacttgtagattttccctctatccagcattagttggaaatgcaacatgagtgcctttacagttcctaagcaatatgagtgatatatttgaagcaactcagaatatgtggaaggcaacaataaattgccagaataattaaggcagtgtggaattcaagtgtgtcaatgcctacaaacttgctatacaatagaccagcacagccagtgaagcaggttggtgtatgatggagaatgacacttgactatggaagattaaaagaacagtgttctcagtagctttagtagtccttgatatggtgctatttcactaacacaaggtaaaggtaactagtattctgtagttgaatttggcagatgggttattyttaatatgtcagcaaagagagccaacaacattttcaatcatgttaaacagttatcaatatgcatttattgtactaacaacctcaa

SEQ ID NO: 810101 - DNA, 505 bp, Homo sapiens
tagtatttaaacaggtctcaaagatagtttgctggctgttctttcaccactcaaaaaaaaccccactgagaatatttatagaagtggtagcaatttacaccaaaatcttcaaaaccctcagtaatttttaggacctcttaccatcacagatagaaccttctaacattgaaacacattgcacgggacgaatgctaggattcagtaagtagaaactgccctatggagtggaaaacgcattgaaaaaggagtcaggagaaatggtcctagttttgcgtatttcaccttaagtaggaaccactcagcaagtcataacctctttctctgtatcagtttcattataaaatagacgtgcaggactacatgatttctatctccctgggtctagaatcatttgattcaaccatggtaggtaatcagttacctaaaaataatctaagcttaaaactgtraattaaagagaattttaaacacaaatctagaggcaacgggaaggaatgctaaggag

SEQ ID NO: 810102 - DNA, 630 bp, Homo sapiens
ataataatattctttttatggctgaaaatattccatcatgtacatacaccacattatcttcatacatccattgatggacacttaggtcgattccgtatcttggttataaatagtgctgcaataaacatgggagtgaagatatctctttgatatactgatttcctttctttgggatacatacccagctgggggattcatgaattatatggtagttctaattatagttttttgaggaatgtccatattattttccataatggctgtactaatttatattctcaccaacagtgtacaagtgttccccactttctccacactgttgccagcagttgttatgttttgtatttttgttaatagcattctaactaggatgagatgatatttgatttgcattttcctgataattaggtatgaatgatgttgagcatttttccatatacccagccgtggtgtcgattttaagaaatgtctatccaggccttttttatttttaaattagattttgttttgttttgttttgtttgtttgctacccaatggtttgacttccttatattttctrgcaattaactctttgttgggtggatagtttacaaatgttttctcccaagaagttgtctcttcactttct

SEQ ID NO: 810103 - DNA, 584 bp, Homo sapiens
tgacatgtggatttttgttgcacagaaaggccttttctcagttgttgtttatggatgaaccaagtgaatctcttggggagacttaagtaattctgccttggagtgctcacctattaaggcagaaagagtatgtgttccatgttcttccttgattgagtgtaaagtatggttgtagtatgctttagtgtagcacggaatcacagaggatgaagtgagaattagttagcaagaatccattttccactacagtggtttgcttagaaacttgattatagcagattgataaaaaggagtaatttactgttttagtaaatgaatactgatcatgtcatcatcatttataattttaatattatattactgtaccacttattacaattgtaattatttgtttgatgcttaagtttctccattatactgtcacctttataatgggatgatatatttctgctttagttgaaaatgtatttcgtgggcytacttcaggtctgtggaacctactactaggttcacagtaaatatatgatgttgtaagttttcatttctgaagcaagtgtactatgttggctaacataaaattaaat

SEQ ID NO: 810104 - DNA, 598 bp, Homo sapiens
gttacattcttaaaaaatcactgaggttcctaaaaggttttgtttatgtttatcagtatttactgtactggaaattaaaacagatattttataatatatatttattatgtcatttaacaactataataaatcatatgttaaccaatacatatgttaatgaagatatattttcaaaacaaaatgaattagtgagcaagtaccattgtttcattatttttgaacatctccataacatctggctaaatagatgggttctcatacctgcatctgctttcaatctgtggtgatggcactcatctgtagcctctggaaaactgcacagtacactcacaagagaatgaaaggggaagaaacagcttatatcctaatattattttaaaagtaatgttgaccttgcagagcccctgaaaagttcttaaggaagcttagagttccctagatcacactatgagaaagattggcctagaccaatcaggactatacagggagctggaattrataacaatatcacaaaaagagcacagctgctatagaagaggagcagaatagttgtgaaagttacaatcacaatttgtctaaaccataaagtttattgtac

SEQ ID NO: 810105 - DNA, 598 bp, Homo sapiens
gttacattcttaaaaaatcactgaggttcctaaaaggttttgtttatgtttatcagtatttactgtactggaaattaaaacagatattttataatatatatttattatgtcatttaacaactataataaatcatatgttaaccaatacatatgttaatgaagatatattttcaaaacaaaatgaattagtgagcaagtaccattgtttcattatttttgaacatctccataacatctggctaaatagatgggttctcatacctgcatctgctttcaatctgtggtgatggcactcatctgtagcctctggaaaactgcacagtacactcacaagagaatgaaaggggaagaaacagcttatatcctaatattattttaaaagtaatgttgaccttgcagagcccctgaaaagttcttaaggaagcttagagttccctagatcacactatgagaaagattggcctagaccaatcaggactatacagggagctggaattgataacaatatcacaaaaakagcacagctgctatagaagaggagcagaatagttgtgaaagttacaatcacaatttgtctaaaccataaagtttattgtac

SEQ ID NO: 810106 - DNA, 630 bp, Homo sapiens
ataataatattctttttatggctgaaaatattccatcatgtacatacaccacattatcttcmtacatccattgatggacacttaggtcgattccgtatcttggttataaatagtgctgcaataaacatgggagtgaagatatctctttgatatactgatttcctttctttgggatacatacccagctgggggattcatgaattatatggtagttctaattatagttttttgaggaatgtccatattattttccataatggctgtactaatttatattctcaccaacagtgtacaagtgttccccactttctccacactgttgccagcagttgttatgttttgtatttttgttaatagcattctaactaggatgagatgatatttgatttgcattttcctgataattaggtatgaatgatgttgagcatttttccatatacccagccgtggtgtcgattttaagaaatgtctatccaggccttttttatttttaaattagattttgttttgttttgttttgtttgtttgctacccaatggtttgacttccttatattttctagcaattaactctttgttgggtggatagtttacaaatgttttctcccaagaagttgtctcttcactttct

SEQ ID NO: 810107 - DNA, 600 bp, Homo sapiens
accaatctgtcccttactttggagaaccaatgtctcagtgcccatgaccactggacccctttaaagaagaggcagttccctgaatcttcaaaactttcattttccagtctctgtagcatgtgtgtttcatcacatcttccagggttctagccaacagttgctcaccatacccaatcattttatgttgaaataatcagtgtgatattacatgggatgttcagatggcccagctctcttgagattagattatgatgaaatgtaggagagttagcctagtcctgaaccaaaacagtatgtgtgtattgttatctgttgcatgtgaatttggttcctggtcctcttttctgactggataggaaagaacaaaatttgcaaaatcaatgcctacatttcaaatacctgaatcaaaattaatccgttctagtggaacttcacacctggcaagacagctatgataaggatgctatttgaactcgagatagcctacagwcattctcgaggatccgtctagctattgtgggggctgtattggtgaattaaatggtatattgtatgaaccaccacttatacatttgataaacttttaaaagtggcactagt

SEQ ID NO: 810108 - DNA, 647 bp, Homo sapiens
acagcattgatctctttagtactagttgtctgtaccagtagaaatgaaaaagagcataataattatttcrcttataatcttctattgcttacagcctatttttcttaatttaaaatgtgttagtaactcacagaaatatatggtgaaatatttcccgtttagaaagtgtctgaaactatttctgcacatattgactgtccattagaatgtagcttctgcctaatcttttctcgccttggagggctaagagtgacgccccacattttgtcacgttaagtactgtccagttaaatcatgcttcttcccaaattaccaagctatgtgttagcatccctaagacatgataaccattctccagtattgcacacaagaagtaaatatatggtattccatcgttagactattgggttcatattgctaagggtaaataattatcacttatcttctgtgctacttttcaattaacaccctctacctttttctaaataaaaagtttggccatatggaactttacttcctgattcaaaagaaggacaggtaggaagagcccttatttattctctgaattagttgataatttagtggaaagaaataacataaataaaaatcattgaatttgggaatatgcacaagggaaataacaatga

SEQ ID NO: 810109 - DNA, 631 bp, Homo sapiens
atgtgtttcctcaaactattaatcctccacaaattatgtgacactctcttgcaggrgaagtgcccactaaagacctcccacacccatcccactgaaaagagacacaaaagatttggaaccagcaaagggcattagtgtccagcaaacatgtcatggtcacgcatacctctgaggctttagtatttgtgttgagttcactgagaaagtctcccctttcttcttttattgagtgcctcataaaaatttagaggtacttaatcacaggatcctgcaagtgcagggtcacatttcttttttgttcttcagattcaatagtctttatcaatctgtcttcagggttcactaattcttgcctctgtcatcaatattctgctcttaatcccatccaatgaattgcttatttcatatgtgtgttatcaattctaaaagatccatttggttcttttttacattttctatgtttctcctgaaattttctaccttttcaaaaattatgattttagtttcctttgggatactaagcctacttgtaataactgctttaaaatccttgtctgctaattacaacatggtttatcactgaatgctatctgttgattagggctggaacttgcatgaggcaaacaagaca

SEQ ID NO: 810110 - DNA, 595 bp, Homo sapiens
gcatgcctgtaatcccagctactcaggaggctgaggcaggagaattgcttgaactagggaggcggaggttgcggtgagccgagacagtaccactgcactccagcctgggcarctccatctcagaaaaaaaaaaaaaaaatcccaattcattcctttccactctttcttggttcctaataaatgtttttgtgcttataaattttcctcattgtcggctgggcctggtggctcacgcctgtgatcccagcactttaggaggccaagacgggcggatcacctgaggtcaggagttcgagaccagcctggccaacatggagaaaccccgtctctactaaaaatacaaaattagctgggcgtggtggcggattcctgtagtcccagctactcaggaggctgaggcaggagaatcgcttgaacccgggaggtggagcttgcagtgagctgagatcacgccattgcactccagcctgggcgacagagtgagactccgtctcaaaaaaaattttttttcctcattgtacggcattggctgcatccacagatgccaacagggggctttaattgtctgtcagttctgacggtgtaatctagttcg

SEQ ID NO: 810111 - DNA, 630 bp, Homo sapiens
tctcgcccaggtcatggctgaataggagccgttggtgtctgtggggccaaagcccagccacaacaggaaggagtggccagctggagtctccacacactggtccgagatggacctggccgtgtgcttggcctgcgtgatgagctgagtaaggtgcaggacctgcaagggaggcgagggcaggtcaccggcaggatacgcctgtactgccacccaggcaggctggctgggggccctaagatgggtgcacagccagatcactgagtgacgggaggagcagcttctgctggaggacttttaaagactaaagaatgatcttctaaatgtgaaatttcccaacactgccttcgttatcagaaacaaatcagactttactgaaacggggaaaggagatgtgcgtcaactctccgcccaacctccctccctcccgccagaacacagcacttccctgcctctgctcagccttgtggctccaggggtcctgtgaaggggcaccgccaacccactcaccagggtgtaagcctcgggcccgaacatcgggtgtacttgcagtcctggccctccaggccatagatgtgrctcttcacattgaaggaggcatcagtgaccactggtggccactatgacaggatg

SEQ ID NO: 810112 - DNA, 526 bp, Homo sapiens
acattctaagctttttttttttttttttkgagacaagatcttgctctgtggcccaggttagagtgcagtggtacgatgatagctcactgcagccttgacctcccagggtcaaacgatcctcccactgtagccttctgagtagctgggactacaggcacacaccaccacgcctgactgatttttatattttttgtagagatgaggtttcaccatgttgcccagactggtcttgaactcctgggttcagatgatcctccctactagccttccaaagcactgggattacagatgtgagctactatgcctggcccctgagctctttctttttaaccaatttattatcaagtgtttaaggtattgaaaaatgagtagactcctccccaccactgtattcatgactagctccttcttttaggtgtctgctcagtatcagatactcagaggatccttccctgcttgatctaaagttggtcaccgcctctgatatgttttatctcagccctttttagtttcccataggacctca

SEQ ID NO: 810113 - DNA, 517 bp, Homo sapiens
tagttgcaacactcaaaagacattctttaaatgtagtcagtcttcaccccttcttgtctccctagtttttcaaaaacttgaagcccaaattaaaaatcagaagatatccaggtaattcagtaactcgaattacaaagttatatgctaacatatttaacatagccatgatttttacttacttgtgacccatttcatgagcaattgtaaaagcaagattcaagccattgtcttcagcaataatacattttctcttttcactacacattccactcaagtaagctatacctaaaaaatacaaacattaattattatatgtctgaatgaatatgcaaatatttatactagttattagcagcaggaatgaaaatggcagttgtcacgactaaaatgtcagtattratctgtgaaatctagccctaataaatgaaattttaggggcaagtgtatatgtataggccaggcaaaaaaatgttcatatcattttcattttcatattttagataaaattattttacca

SEQ ID NO: 810114 - DNA, 544 bp, Homo sapiens
gactatgtgtctagatgtcctgcagcttcaacttaaaataatgaaagaggtaggtcaaaaaattcccagtgcctctcacaattttgcagatttgtactcattgaattctcttcttttttacaaactgctacacagcaaactatttgtgatttaaggaaatgctgtctgatatgcactggcttctcaattctactttgaccaataatctaagttatagtaagcacttcaggttagccctataaaattataagaaatgaccattctccagaaaagctgtgtggtaagctaaaatatgagctgacgctagtcagtgacaaaggagtccaattccattatcatcatcatcatcatcatcatcattattctcagcatttttccttttcttactagctatcacatatgacttaagctaagtttatctcctaatccgtaaaaygaagatgatatataatgcacaggatttgtaaaagactgaaatgaaacaacatacatgattgcattgacactgggtaagcattcaacatattttagcattccttcagtg

SEQ ID NO: 810115 - DNA, 544 bp, Homo sapiens
gactatgtgtctagatgtcctgcagcttcaacttaaaataatgaaagaggtaggtcaaaaaattcccagtgcctctcacaattttgcagatttgtactcattgaattctcttcttttttacaaactgctacacagcaaactatttgtgatttaaggaaatgctgtctgatatgcactggcttctcaattctactttgaccaataatctaagttatagtaagcacttcaggttagccctataaaattataagaaatgaccattctccagaaaagctgtgtggtaagctaaaatatgagctgacgctagtcagtgacaaaggagtccaattccattatcatcatcatcatcatcatcatcattattctcagcatttttccttttcttactagctatcacatatgacttaagctaagtttatctcctaatccgtaaaatgaagatgatatataatgcacaggatttgtaaaagactgaaaygaaacaacatacatgattgcattgacactgggtaagcattcaacatattttagcattccttcagtg

SEQ ID NO: 810116 - DNA, 634 bp, Homo sapiens
aatttgattcttgccttataccatatgcaaaaattaaataaaaatggatccaagttctaaatgtaagacctagaactaaaaatcttttaaaagaaaacaggagaaaagcattatgacattggatttggcaatgatttcttgaataggacacccaaagcacagacaacaaaagaaaaaaaatagataaaaaaactacatcaaaattaaaaactgtgcatcaaaggaacattcaacagggtgcaaaggtgcaaaagcaacacacagaatgggtgaaaatatttgcaaatcacatatccgattggggttaatatccagaatatataaaataagtcctataactcaacagcaaaaaacaacccaattcaaaaatgggcaaaatacttgaatagatatttctttaaagaagatattcatgtccagcaagcacatgaaaagatgttcaacatgactaacattagggaaatgcaaatcaaaaccgcaatgagacagcacctcacactcattaggttggctgytattcaaaacaaacaagcaaaacaaacaaaactgagcagaaaataaaaagtgttggctagcatgtggagaaattagaacccttgttcactgttggtgggagtgtaaaatggtacagctg

SEQ ID NO: 810117 - DNA, 584 bp, Homo sapiens
atgccataaacagcaatttaaaaaacagtcaatagaaacaatctatgaggaagcccagatgttagacttactrggcaaagactttagatatcagctattataaacatgttcaaggaactaacagaaacaaagtctaaagaattaaaggaaattatgagaatgatgtttcaccaaattatcaggactatcagtaaggagacaaacattataaaaaagaatcaaatagatattctggagttgagaaatacagtaatggaaataaaaattcactagatgggggtcaacagcaaatttgaactggcagaagaaagaatcagtgagttcaaagaccggtcaattgagattatacagtctgaggaatagacagaagaatgaagaaaaatgaagagagcttcagagacctttgagacactatcaagtgtaccaaaatgccaagtataccaatcataatgagaatcccagaagagagagagagagaaaggagcagaaagactatttgaagaaatagtagcccaaaacttcccaaattttatgaaaacattaatcttcgtatccaagaaattgaacaaactccaagtagggta

SEQ ID NO: 810118 - DNA, 527 bp, Homo sapiens
ttgagttgatttttgtacatggtgtaaggaaggggtccagttttaattttctkcatggggctagccatttctcccagcaccatttattaaatagggaatccttttcccattgcttgtttttgtcaggtttgtcaaagatcagatggttgtaggtgtgtggtctgatttctcggttctctattctgttctattggtctatgtgtctgtttttgtgccatctgaaaaaggtctaattatccagcatctattaggaacttaaacagatgtacaagaaaaaagccaaccccattaaaaagtgggcaaagaacatgaacagacacttcttataagaagatatacatgtggccaacaatcatatgaagaaaagcttaccatcactgatcattagagagatgcaaatgaaaaccacagtgagatgccatcttacaccagtcagaatggccgttattaaaaagtcaaaaactgatagatgccagtaaggttgtggagaaaaagagatgcttttacactattggtgggagcataaa

SEQ ID NO: 810119 - DNA, 601 bp, Homo sapiens
atggaaaggaaaactcaatttttttcaaagtcagttgtcctcaaattgatcaagagagctaatataatcacaatcaaaatatcaatagaaattttgtgaaacatgacaatttcaacataattctgaaatttatggaaaagcaagaatatccatggcatgcctcaattaaaaatggaaacttggccaacaagatatcgaaactaatgatgaagccataataattcagatagtattttggcatagggaaaagccaaatgaccaactgaacgaaagagagaacccagaaagaccaaagaatatatggaaacttgatatataacagatggcaatggtgatcaatgagaaaagtttatactaaaattaaacagataaatttctatttataataaataaatagggaaaaaatctttctaccttagagtaaaatcttatgtagatggaaagatgaaggtagaaaatcaccatttggcaatcatcatagtaataactgattcagacaaaattgccaaccaatgccaaaactagtgggttgcaatttggtaaacaacagagtagttacatcctctcaarctacttctacttaaattactttattacaaag

SEQ ID NO: 810120 - DNA, 563 bp, Homo sapiens
aaagaaggaggaaattctcatgacaatyacagtcctcgtttctgcagctggtcatgtgctcatagctggtattgatgactacctttttctactacccattctgtattccctttgccttcagcaagtacctgaacaggtggtggtttttttttcctggtggagtgacccaaaccttcattcctgaagggtctgggccatttgtagtcctgcctggattgggctgttgtagtttcccattgaccttaatcacagggtaatactaagagacgaactaatggatctcctgtgttccatgtgtactctttcttacctccactgtggagtagtagactgattgatttcatcttgatagtctgggtcagtcaccccagctaacattgtaactcccttcttagtctgttaacttagaggtaggaggagcccaaagtgtccaggtggcaatcttaacttatagtttaatggaattgttttgtctcctggtggcagcgtttctccctctggaactaagacctctagaccagcagaatgtaatgccatagaaacaggaagcaaaaatgttgcta

SEQ ID NO: 810121 - DNA, 622 bp, Homo sapiens
aacagtctgatctctctttcttttcctcacaccatcctggctaatatggtgaaaccccatctctactaaaaaatacaaaaaaattagccgggcatggtggcaggcacctgtagtcccagctacttgggaggctgaggcaggagaatggcgtgaacccgggaggcagagcttgccgtgagccgagatggcaccactgtactccagcctgagaagtgagactccatctcaaaaaataaataaataaaaataaataaataaattagagaactcaaacagttattttccagtgtagcgcacctccccatcggtcacactttcaacctcacctctaggggtccgctgggacttcagtctatttacagatctagaggcaaacagaggtgttgggggtggcttctgagaaaaaccatcattatcttgactggcaactgcctcaggggaagccatcgctgttgcctcaggcagtgcaggatttatctcctcagacaaaggtgaaaaggctgatggcagcatgggtcagggaggggatgttgccactactggagatggggaagctgtttcttctggcaaaaaaggttmatcagagtttacaaactcagtgtcccagcttcatcaggccccc

SEQ ID NO: 810122 - DNA, 477 bp, Homo sapiens
tgatatctatgatattatatgagtattatgagatcacaaggatgaataaatatattcactgttcatgtagttcatagacaatccaggaaaagaatatacatctaatccaatacggtaagtgcaatcattgaatcagagagtccagagaggggaatggttaattctctctgattttgaagattaggtaatggtaaaaaatgagagtcagggaatatttcacagaaggtaaggttcgaactgggaaattttccaggtggcaataggataaaaaaacatccaagtagaaggaatatcatgtacaaggctgcagagtttagtagcagcatgggctgttattcagtgccagggaagcttaggaagcaagaatggcacagcaagatgtamggctgaaggcataggctggagccacatcacaagggcctgttcaccaagccaaggaattcagactttaactttcgatgctatagatatcaatct

SEQ ID NO: 810123 - DNA, 607 bp, Homo sapiens
ttttacttctttgaaataaaagcacattttatacttcttcgcttttattattaaagattataaagctataaattttcatctaaacatagttttggtggcattaagtctggaartgtattggaaaatgacaataagatggtttctgagtgctattggaacttccaagtgttgggctgggtgcagtgactcaaacttgtaagcccagcattttgggaggctgaggcaagagaattgcttgaggtcaggactttgagacagcctgggcaacagtagtgagactccatctctacaaaaaaaattttaaaaataaaaatgagccaggcatggtggcatatgcctgtagtcctagctacttgagaggctgaagtgggaggatcatttgagccaggagttagaggccacagtgagctacaatcatgccactccattccagcctaggcaacagagtaagactgtgtttttagaaagaaaaggaaaggaaaggaaagaaagaaatttccaagtggctcaataaaaaaatttaattttaaattaataatttagagcttttatgagttgtggtcaaataattttttccttttgaggatttgtgaagcatctcttaagc

SEQ ID NO: 810124 - DNA, 554 bp, Homo sapiens
ggcctccttgtaattctccctgatgaaaacagaaggatttcacagcacagaaagcagtggtttatgagtctgggtatggacagacacacaagagaactctgttcatcgtcttcaaagtgatgcagcgatggcaagactgctgctgtggccacatgtaatatagcctgtagctctttaaagaggattagccttagtgcgctgggagcattcaatgctggatttcatgtagagcagaatatgctaatgaaatgtaaatgtctacggcaaacattgcgtaatatagaaaaccttcaaaactgagctttgtctcttgcacggtgggaaaccaaactttattacatcagaaaaaagtaaaaaagaaataaccttatacttttctgtcctatgtatctgcttctaaaaaaaagtgaagttaaatgcatacacatacgtatttatacttaaattaaatttcaatgttattagaaaaagtaatttcagtcactcaaaaatmtcttactagatctatgcccttgggtggatgtaaaatcatttatctctgaagaaaaaaatac

SEQ ID NO: 810125 - DNA, 594 bp, Homo sapiens
atagaacactgttttttcccacttagataaaataatataactaatagtaaactgttctgtgggttgatagaygttttccactggggatatttggaaggaagtagtttggaggtttgcagaactttagctgagatagtctaaggttagtaaagaaagtgtttctcaactttcagaagtagggcttgatgagtttctagaaagcaggaagaaatggaagagaaggggaagaaacgttagtataaatgaagatactctgggttggactaaagtctaaagccagatggcaaactcaaatgtcagacaaataacacacttgtgtgaagtttgttagactaggctatcttgtcagcagattggattgtaagacctacctaaaagcattcaagtaatttttaaaaacacgttgctagctgatggggctcacgcctgtaatcctagcactttgggatgcctaggtgggaggatcacttaagcccaggagtttgagaccagcctgggcaacatggtgagaccctttctcttaaaaaaaaaagaaaaagaaaaagaaaaaaaattagcctggtatggtggcacatgccggtagtcccagctact

SEQ ID NO: 810126 - DNA, 588 bp, Homo sapiens
attgagcaaagaagtcagataaagacaagtcagtattgtttaattttatttatggaaggtcaataagaagcagatcaaattaaactagtaggtctscaataggaaaaaggagatggactgcaactgtttcttaatctgggtacaggttacacaggagtgttcattttgtaaaaagctataaagctgtacacttacattttgtgcagttttctgtttttgtgtgtgttaaccttcaataaaaaatttaccctccttctcaaataagtatagattttatagattcttgaaagctacctataagggcagaactttaggaagacaaggtgatgcagagctttaaataggaagaaaaacttggggaagtgtgaagccgatgcctccaatctgaaatcacttagggggatagaatttgtatttgggtaaaaccttaggtcatgataaatcacaatatagactgatattcaaaagatctgaggggacttaagcttgagtcagaataaacacaaataagcatctggtaatttgtctgataatggatatcaaataagaccaaaggcagggacaggctggaatgccagagtttaaaaa

SEQ ID NO: 810127 - DNA, 657 bp, Homo sapiens
ctaaatcttaaggacagcataggaaaaatgaaacctaatactgttatacttttaagatcattctgctcttttgctctatgtgtcacttgacagttcaacgacaattagacactcgataactgaaaaacttgtttatgttgaaaaaaagtagagttctattcttggacagcacatttatgcacacacttttttgagacatggcatattgagggaatttatgtgctcctattctataatacaggtggtgaggtcaatttcactgtaaggtacaacctctcaacatagcttttgggggcttgttgacatttcttaagcagggagttattcatataccccatcagtccttattcccagcagtcaggactgccacattcagcagtttacaagagatttagagtagatgatctaataaattaaccctggttttgcacacaggcacatcagggaatatcttaagatcttcaggttctgcatcttgccacccttcagaacttgcttactacatgagcagtatgaacaaactatgagttgacaatttgttgaaactttttcacaacttcttcagcctgrgatgctgtcttctgggtgccacgtttatatcttcttggcctgcccctctcttctctgacccccacccaaaactccaatattcctcac

SEQ ID NO: 810128 - DNA, 507 bp, Homo sapiens
tgttttggggggtatttttgaaaatttaacttatattcctaatgtaaaaagagccccttgattatctctcctgttaaataaattcaaaaccttagaatattttaactttaattgctattccaactgactttacattattgtctaatatcttggttctctcttgctttcttggtaattttaatgtcacatattggaaattattactttgaatataatatttgtctatatttattacacaccaaaatctttgcatgttattattttttacttcagattttttaggatcattgtcctttttattatatacatactttagaagaagttcttttaataagagtaagtttataataaactctctctggtattactgaaaaaaatataytgttattgtccacattctctaaatatttctcctagatttaaacttattggtggggtgagattcttagagatttcttgtattttccagtgagttgatcaatgcatttaaaagtatgatcatttaga

SEQ ID NO: 810129 - DNA, 592 bp, Homo sapiens
agcaacctggatggagttggagatcattattctatgtgaagtaactcaggaatgaaaaaccaaacatcatatgttctcacttataagtggaagttagctatgaggacacaaaggtataagaatgayacaatgaactttgagaattcgggggaaggtgggagggggctgagggatgaaagactacacattgggtacagtgtacactgctcgggtgatgggtgcaccaaaatctcagaaatcaccgctaaagagcttatccatataaccaaaaaccacctgttctccaaaaacctattaaaataaagaaaaaataactccttgccaataagattattatattatatagtatacataattattatattataaattatatattacattattgcatattatatagtctataacaatacaattcataactatataattattactttaataactaaattctatataattatgctattaatttataataattatattattacttcccccaccaaaaaaatgaggggctaaacattgatcattgtggaaactgggtgatgggtgcatgaagctttactatacactgttctcccttcttttg

SEQ ID NO: 810130 - DNA, 595 bp, Homo sapiens
aaccttgagagtcttcaacaccataccagcaataggactatttatagatagatacaaatgtgtgtgtgtatatatatatttatattttaatttaattttaaataaatataaatttattttatatttaataaaaataataaaatgtaataaatataaatttatttatatatttaaatttattttaaattccacattgaacatttattcaaaatatgtccttagagtataatggaattaaagaagtaattgataacaagaagatacctagaaaattatcaagtatttggaatttaaacaatacccttctaagcaacccatgggtcaaaggtaaaaaatctcaagggaaattaggaaatattttgaactgactgaaaatgaaaatacaacatagcaaaatttgcaggaggcagctaaggaaatacaggaaaatgtacagtatgtaatactatattagaaaagtataaaggtcacaaatcaataatctaagtttccatgttaagaaactagaaaaagaagagcayactgaatacaaattaagcagaatgaagtaaataataaagagcacaaatcaataaaattagaaacaaaaataggg

SEQ ID NO: 810131 - DNA, 599 bp, Homo sapiens
ttaattcaaaaattttcaaaatagccttaacaatagcacccgaaatgaaatattttgatataaatakaaaagcatagtatcaaggtcaatatgctaaacattacaaaacactgatgaaagaaatgtcaaatctatataaatggggagatatactgtgttcatgtgctagaagagtgaatactactaacatgttaattctctccaatttaatccatagattaacataaagcaacagaacattccagcagaccttttgtagataccaacaaattgattctaaaggaactagaatagccaaacaattctgaaaaataagaacaaaactggagaaatcacactacctgattttaggccttactataaaactagattaatcaagacagtctgatattgatgaaagatagatacatagataggtgaaacagaatacagcccagaagtaagcccttgcatatagtcaactgatttgtaacaaatatataaaaataatttaatggaaaaagttagccttttcaacaaatggtgttaaaataattggatataggtaggcaatctattcctcacacctaatgcaaaaattagcacagaatacatcattg

SEQ ID NO: 810132 - DNA, 599 bp, Homo sapiens
ttaattcaaaaattttcaaaatagccttaacaatagcacccgaaatgaaatattttgatataaatataaaagcatartatcaaggtcaatatgctaaacattacaaaacactgatgaaagaaatgtcaaatctatataaatggggagatatactgtgttcatgtgctagaagagtgaatactactaacatgttaattctctccaatttaatccatagattaacataaagcaacagaacattccagcagaccttttgtagataccaacaaattgattctaaaggaactagaatagccaaacaattctgaaaaataagaacaaaactggagaaatcacactacctgattttaggccttactataaaactagattaatcaagacagtctgatattgatgaaagatagatacatagataggtgaaacagaatacagcccagaagtaagcccttgcatatagtcaactgatttgtaacaaatatataaaaataatttaatggaaaaagttagccttttcaacaaatggtgttaaaataattggatataggtaggcaatctattcctcacacctaatgcaaaaattagcacagaatacatcattg

SEQ ID NO: 810133 - DNA, 527 bp, Homo sapiens
ctcatgatctggaaatattgtgtgtgggaaagacattaaggcactgtggttagggaagttatgtcagtaatakcccttctagaattaaggttgggcagtgctgggctaccatttccattttcttttgttattttttgatcagtagggattgagtgaggaaaataagaaatttgcctgaaacaagcagtttgtagactctatcagcttttccttttgattttctcttgatttctgccataccgatgtcctgaccatcattgaaaagttagcttctcagttatccaagtagacatccaagtctatttcagtgaagtgaggtgaaagtcttatctttcattgattaaaagcaactaaccctatgaagagagacaaatgttaacaatatagtaaattaaaacagttctctatatattactgatccaatgtatatctaatccattgtatttcttaaatcaaatcattgccaatatgtgattcctgattgtggcctgtaaatctcttttgtaagctatagagacagggatcag

SEQ ID NO: 810134 - DNA, 527 bp, Homo sapiens
ctcatgatctggaaatattgtgtgtgggaaagacattaaggcactgtggttagggaagttatgtcagtaatagyccttctagaattaaggttgggcagtgctgggctaccatttccattttcttttgttattttttgatcagtagggattgagtgaggaaaataagaaatttgcctgaaacaagcagtttgtagactctatcagcttttccttttgattttctcttgatttctgccataccgatgtcctgaccatcattgaaaagttagcttctcagttatccaagtagacatccaagtctatttcagtgaagtgaggtgaaagtcttatctttcattgattaaaagcaactaaccctatgaagagagacaaatgttaacaatatagtaaattaaaacagttctctatatattactgatccaatgtatatctaatccattgtatttcttaaatcaaatcattgccaatatgtgattcctgattgtggcctgtaaatctcttttgtaagctatagagacagggatcag

SEQ ID NO: 810135 - DNA, 644 bp, Homo sapiens
aaaatctattgtaaattgttttgtattaaatagttctaaattttattatgtattaaacagcaaaaygctaacattatgtatgtctggtaaatattttattttcttgtttttgttatccctgattcaatattttcttctaatcgttgatactatgttaaggaaagatgcatgcaattttatgtaaaatgagtgctctaaaaacagaagtacaactttgagaaaatattaaataataatctaactctttttcaccttctttgtggtactctctttctggaagaagtaacaactgtagttatggagactttttttttttttttttttgagacgaggtctcgttctgttgctcaggctagagtgtaatggctcactacagcctcaaggtcccgggctcaagcaatcttcacacgtcagcctcctgagtacctaggactacaggtacacaccactgcacttggctaatttttaaattttctgtggagacaggggctcactatgttgccctggttggtctctaactcctggactcaagcattcctcctgccctggcctcctaacgtgctgggattacaagaatgagccactgtgcctggctgagcctagtcatgaagtctcatttagattggttaacttcataggaaatt

SEQ ID NO: 810136 - DNA, 626 bp, Homo sapiens
tgggcccaaagaatgaatgggaggctgaagaagcagattctagctttcaccaagatgatgactaataatgtgggaaatagtggggaagaggattccttgaaaaaaaaattgggatgccataaagaaaaatgtgacaggcaagtattagtaattagaaagagaatctatcacattgtgggaggaagggaacaaagaatagttagaagaaattgcaagatataatcagtaatttcaagagaccatatgcacatcaacaggatctcatactgagtcagatgaaaaagaagtatactacagaatgcttggatctttgccattaccattatggggtgagccaagcatacccttgagtacaacagagactgaactatgcatgcatccctcctaatttccttgctgatggagctgctagctgaggctaattatattgtaatgagctacttcacttgcaaatgaacaatcattccatctcaaatttgctttccctgcagccttccctacttcattgaaatagcrtcttcatccttccagatgttcaggctaaattcatgaatcagccttgattcttctcattctttcacaccttgcatctaatccatcaaaatttctgatgattataccttcat

SEQ ID NO: 810137 - DNA, 618 bp, Homo sapiens
tccattctccacaaattggccaaaattatatttttaaaatgtaaatcagatcatattattccctaytgaaaatacactaaattagtggttctcaatctctggcaatttgcctccccagggacattagacaatgtctacagacacatttaactgtaacaactcaggaatgaatgctactggtttctagtggacagaggccagaaatgctggtaaacatcctacaatgcacaggacagccccacaacaacaaatctggtctaaatctttatagcgctgctgtgaagaaaccctgcactaaatccaaatcccttaacctaatttgcaaggtcatgtagtctgacttctgcctctctctttaatcttgcctctggccacattctctcctgctcattatgctctagccatgctggttatactttgtattccttgaaccacccaagccagtgtgtctcaggaccctttaacctgctaatctctgattccttttcctgtaatgtccttctacctggaatggtcttctaccaaaactttgcatggctgcctccttctcaatatttagatctctgttcaaatgtcacttgctcagagagagtttctgtaaccatttcatctaaggca

SEQ ID NO: 810138 - DNA, 526 bp, Homo sapiens
agatcagtaccatgagatcatctgccttaggaaaycccacacagaaaagaaggttttcagtgatcaaacagaacttaagaatagttgaatctgggtaatcagtcatcatactattcactaatgtacatatttatagaagacccacacagagagctcattaatcaagtgattctataaattagctgagaccacgatatccaggtcatcaaacatgaatcaccattcaagtaataagggtgccaacaactttgtccttaattgagacttttgcaaacatcctcattactactacctagtaatcaggaaaagtaaaaaggaattcaagaaggatgaagtctccacacacagtctcatagccatagaatctgcttgttgtaaagggctccactttcctagatgtgtaagaaggatgaaatgcagcaagagatccaagctcgtggtgaatggtgagctgaagtgagatactggaaacaggatggtgacagaaatgacacaagggcatacaggagcccaacttcaacaggtg

SEQ ID NO: 810139 - DNA, 526 bp, Homo sapiens
agatcagtaccatgagatcatctgccttaggaaatcccacacagaaaagaaggttttcaktgatcaaacagaacttaagaatagttgaatctgggtaatcagtcatcatactattcactaatgtacatatttatagaagacccacacagagagctcattaatcaagtgattctataaattagctgagaccacgatatccaggtcatcaaacatgaatcaccattcaagtaataagggtgccaacaactttgtccttaattgagacttttgcaaacatcctcattactactacctagtaatcaggaaaagtaaaaaggaattcaagaaggatgaagtctccacacacagtctcatagccatagaatctgcttgttgtaaagggctccactttcctagatgtgtaagaaggatgaaatgcagcaagagatccaagctcgtggtgaatggtgagctgaagtgagatactggaaacaggatggtgacagaaatgacacaagggcatacaggagcccaacttcaacaggtg

SEQ ID NO: 810140 - DNA, 580 bp, Homo sapiens
aaaagattctgcactaagtatgtctttttaagaaaatacacagcgggggctcaggyctgtaatcctatcattttgggaggccaaaatgcctccccagtggatttggggacattccaaatccacttctctagttatgttgaaatatacattttagttaactatagttagcctgctgtgctgcctaacactagatcttactccttctatctgactgtatttttgtacccattagacaactcctctatcccctcctcccctgattttcatgttaactgacttatggcatcaggtaagatttaggacttagaatattcacattttctgagtttactgaactattccctaatgttcaagtaataatataagataatatttttattttactaatttattcagtaatttatggtctgcataccaattatatgcaacataaaacacaatcactttaagattatacaaataatagaaataattgatgatggttgatcaattagcggaaggatgagtcatatgtcacagttcttccaagctgcattagtggattgggcttgttggcttctgtcaccagaaatgtgtctct

SEQ ID NO: 810141 - DNA, 510 bp, Homo sapiens
aatttcagtttaaggaatcttagcacgccaacacatgtgatatttttggaaagctggtgcagcycagattgcctttcattgagaaatgcaacagagtacagaaagtcctggtttctacattacatattgtaatgctccctagaaactcaggcttagcagcaaactagaggatacattttcttttcttctttcatatgccatattatctttgaatattgtatacttagaaatagcaatagtttggctgaatagttgtctcttttactttcctgggtatttagaaatcatttcctgttctatattgtatttgagttttagtagaaatcctggtggtggtgctctttgacttaaaagatcctgtaaccacctatgaataaagttatttttatattagcagtagtagattaaaaataagttttgagctttaagataaaggacatcaccactgtattactttgaagggcagctccaaatagctactcaaaaagatatcctgcagcagaaaaaagc

SEQ ID NO: 810142 - DNA, 534 bp, Homo sapiens
ctgatttcatgagacatgacagcaccttccggccacaccccacctccagttccaaccaccagtgcgagaagcagcagttcccaccagaagggtaacagagtccgtttcctttgaaagccccttaaaagtcaggcagtctgtgctgaagaggatagatgatttattgtttaattgctttagaagtgcagagcgtgaggttaaaaagcatgacacacagcagggcttgccctgagcctaaagcaaatcaggtgatgtgcttttgtttaaaaaaaaaattagagggaggtgccaggaaaacaaaacaaaacaaccctggaaacagttaccttaagtacagttctttgtactagtagaataaacattagacaaatcgagcctgagaagaatctgtgtctggggcagcagcagtggtttaaattgggatggaaaagtcacactgctgctagcaactgacagctttttaaacctggaacactgacctagtattacagaccttcayagggagaaaaaccaaactggatacaaaaggaaaca

SEQ ID NO: 810143 - DNA, 555 bp, Homo sapiens
aaagccttgcatttttcaaatggatctcatggaatgctcattctaggggaagctaaacaccatgtaaraaggatgactactgtgagaccactgtgatgtgaggaagttcaggctagttatgtgacgagagacagagaaagaaagagagagagagagcccagacagcactgtgctcttccagacattccagacaaggtaccagacatgtgaaagaacttattttgtatctccagcccaaacactatctaactgcaactgcaaattcatgacagctgtccagctgagtccagtcaatttggaagtgggataatgtacacacacacacacacacacacacacacacacacacacacacacacaccgcattccctttaggaccagttgagggtggaagctgaaagtaggttaaggagactattagtaaagtctgtcttaaaaatgtcagcggatttcttttagttgtgcattttaatattcaggaaaagacatagaaaaaaagaaaaaaaatctgttcagttttcaagtaaaatctagaggaagcatttctgagacaat

SEQ ID NO: 810144 - DNA, 619 bp, Homo sapiens
aatctggaagatgtaaaggcactactctgtgcttttcttctcttaataacatctaatatcttctataagattaaatattttggcgaaaaaaccagaatcctcttttacagcttgatagaattgtatctattcttacagatgatttcagatcccttcaaatatcccttggaaggacagaataggttattcctaagccatagaattcccagtagtacatattatagcaagggacactgaatgagcaaccaattagcattaactgagcacaagtgtgcccaagacggagcatgtgttgttcacttcacattctcctgaggcagatgtcatgtctttctcacacgtgttcagtaggactggtgcagattctgagctctcatctctaaatgaaaattgaaccatcagtatgtgcaggcttgacaaaacaacaacaacaacaacaaaaacagggctagttcagtagttcagtctaagggaaaggacctgagctttgagtgaatttaatgaaaacgtaaaattatgaagaactgttatttasaatattgacataaaaagtggcctcttaagagaagataaaggtgaaagcatttattggtgtaaaaataaagtggagaagagcagg

SEQ ID NO: 810145 - DNA, 569 bp, Homo sapiens
tacattactttttttcttctacccatttcttagtttatccatatccatatcacctctctctttcttgtctcttattttcttctcccctgmcaccacgtttgcatttttaactctgagctttatggatcttttatagattttaggtttgttttagcaacaggaaaatttactatgctgttttcttacctgtacatttcatgtatttcatagatttttctagtttcaacttaccattatacttcctgaaagtattttcaaaagagtcatttgcttgatgaaatttctgagttcttgtttgcctgagaatatgtaagtatgtttcctttgcatgtaaattattgttagttgcatataatatttcagatttaaagtccttttattattactcttgaaaaatgttattctcctctattatgaatataacattaacaataattgcattagtgtttcatttcttgttttttttgtaaatactctgttctttattagaaaactttagtaatctcttttttgtgtttgatgttttaaaattcactttaatatgtttgtattgtctttttaaatcatct

SEQ ID NO: 810146 - DNA, 609 bp, Homo sapiens
atattcatgttggttgggtgaaataaaatcacatatacattgcctaatttgcatgaagtttgatgggtgtgtagatcacaaatgaataagaatgtaactctctcctggatgctactagatctttttctgcagagctacttacttgcagcagcctaaggaggttttgcaaacacagaggatggttggaaaaggatacagattctccacagttatttgttactccaagtgcaaactgacctagttatggttaccatggatactataattttgaatttaatcatattctgaaaaggagtagcaatacagctctatgaaacactgagatcaatctgaagctcagccttaaaaggtgaagaaactgagtcagggagggtaagtggtttatcctatatcaagagagaaattggaagattcacagaaaaatctcaaattttataaagctaagttctatgattagttcagtagccaatgtacttttcaaagtcactcaarccataaaaaatgcttcttagcttaattgatttacatgagactttgctgcacttattaaaaatacactttttctcctagtcatctataactactgtttttcaacttgaagttaaaaaa

SEQ ID NO: 810147 - DNA, 498 bp, Homo sapiens
ttttaggtccttccttcaaaatatatccaaaatccaactacttctcattacctctgttgctaccaacctgagcaaaatcacccgtcttttgtctggactcctgcatgcgtcaccctgcttccayttttactcccccactcccttgaccccttctgttctcagcacaacagccagagggatcctagaaaacatacgtcactgaattaattaatgacttattcatcattctaaaaacatttacaagccagttttgtgttctatttttcaaaggaaatcgaaaagttttcttccttaaatcttccttgctgtcagggagaaaaaagttgaagaaaataacggatcatcaaatttatttccctaaatacttaactctcaataaggcctttttcctacccaagagaggatggccaaaactaagggagcaagtctccataatgccagtccctcaggtaaagcaaggacatgtgccctttatttgaccaacctctccctaccatt

SEQ ID NO: 810148 - DNA, 626 bp, Homo sapiens
aaaatgcagactggaattcagtacatctggtctgaatctgtgattctgcatttttttttttttaagacagagttttgctcttgttacccaggctggagtgcaatgatgggatcttggctcacggcaamctccacctcccgggttcaagtgattctcctgcctcagcctcgcgagtagctgggattacaggcatgtgccaccatacctggctaattttgtatttttagtggagacagggtttctccatgttggtcaggctggtcgcgaactcctgacctcaggtgattcgcccaccttggcctcccaaagtcctggaattacatgcgtgagccaccatgcccggcccgattctgcatttttaattagccccaagatgctcctggtctggggaccacatattgagaagcatgtctctagactagatatacttatgtccatttgttttagattattacctgaaaggaaatactgaaagtaaaaattctcacagaactctaggattttcagggggcctcataccccaatttagggatcccgtcctggtgtgctactgctacagcatacatagtagcaggcaagcatatagccaggaaggttcagtgagcttgccaagggctcaccctggg

SEQ ID NO: 810149 - DNA, 526 bp, Homo sapiens
tctctcttttttcttcttctagtagtcccattatgcctaagttacacttgtgcaattgtcccacagttcttagatattttgttaggttttttttccattcttttttctctttgaccttcagtttgagaaagtttctgttggcatacccccaagctgactgattctttcctccccagtgtgtagtctactgatgagcccatcaaaggcattcttcatttctgttacagtggtttttatttctagcaattccttttggttctttctaagtttctatctctccatttacattactcatctgttcttgcatattgtgcactttttccattagagcctttaatcatagttgctttactatcctactctgatacttccaaaatctctgccatatcagagcctggttctgatgcttgttttgtctcttcaaactrtggttgttgttgtttttttctttgccttttagcttgtctttaaattttttgctgaaagctagacatgatgtatcaggcaatagaaactgagctgaata

SEQ ID NO: 810150 - DNA, 639 bp, Homo sapiens
acctgtaaggattccattagtttacagtgttattcttttaaaaatcaaaaaatgtatgcatgcgtcctttaaatttcctacctgttagcaataaagcaaaawtaatttaagtaggttgatgcaaaagtaattgtggttttgtcactacttttaatggcaaaaactgcaattacttttgcaccaacacaacacattaaactcactaccatcttatagaaatttagctcattcacacagacatattatcagaacatatttgtgaggcactttaaatgtataaaatgccacttttgttttaatgatgtcaaccacctaagaaggcagtttgaagaagtattgctaattgtatttaatattagagtcagcagaatcacaaataatgttttgaattttaaaaagtagtaaagaatcaaaattggaaaaaacttttacttcaaaattgtccttttgtgagcaaaatagatttaattttaattaattaaagaaatctttatgttacctcctcctttcttttttcttctatctttgagcatctggttacttatttaactcagagttttagttcagggtatcaaggagtgtcatggaaacttctaaccctaatttctaatgataaccatgtgtgaagaaaggaagaca

SEQ ID NO: 810151 - DNA, 555 bp, Homo sapiens
agacctcctgccaattatctgtctttatcttctactaatctactgatcacaaatgcaggagaatatcttagaactcttgttctagatatccattttgcttggaacactttttccaaagatatrtgcttagctagtccctcacctccttcaggtttttttctcatatctgactttctcacagggatctacctaaaccaccaaatttagtgctatagcaggtactccagtgacaccatcatgctgctgatctttccttattacactctattttttccattttcagtagcttgcgcatttaaacgtgccacataatgtaattatttgtaggtgtactggttattgtgcatctcctccactagaacatatgctccccaaggcaagaaatctttatttggttcagcaacgatctcaagtagctagactaggtggcactcaataaatatttgtgaaatgaatacatcaatacataattgataaaagagaaagttttcatattttagctcatacttgttttgggaaatttctcatggagcacaaaagtcggcagagtaagtg

SEQ ID NO: 810152 - DNA, 632 bp, Homo sapiens
ttgcttctttcatatttttctcttgccaccaccatgtaagaagtgcctttcacctcccaccatgattttgaggcctccccaggcaagcaaaactgtaaggacaattaaaactcttttkgtttccagtttcaggtatgtctttatcagcagcatgaaaatgaactaatacagttaattggtaccaggagtggtgtgatgctgaaaagacacctgaaaatgtgcaagaggctttggaactgggtaacaggcaaaggttctaacagtttggagggctcagaagaagacaggaaaatgtgggaaagtttggaacctcctagagacttgttgaatgcctttgaccaaaatactgatggtgatatgaacaataaggtccaggctaaggtggtctcatatggagatgaggaacttgttaggaactggagcaaagatgactcttgttatgtttttagcaaagagactggcagcattttgatcctgccccagagatttgtggaactttaaatttgagagagatgatttagggtatctggtggaagaaatttctaagcagcaaagcattcaagaggtgacttgcgtgctgttgaaggtattcagttttaaaagggaaaaagagcataaaagttcagaaaatt

SEQ ID NO: 810153 - DNA, 632 bp, Homo sapiens
ttgcttctttcatatttttctcttgccaccaccatgtaagaagtgcctttcacctcccaccatgattttgaggcctccccaggcaagcaaaactgtaaggacaattaaaactcttttggtttccagtttcaggtatgtctttatcagcagcatgaaaatgaactaatacagttaattggtaccaggagtggtgtgatgctgaaaagacacctgaaaatgtgcaagaggctttggaactgggtaacaggcaaaggttctaacagtttggagggctcagaagaagacaggaaaatgtgggaaagtttggaacctcctagagacttgttgaatgcctttgaccaaaatactgatggtgatatgaacaataaggtccaggctaaggtggtctcatatggagatgaggaacttgttaggaactggagcaaagatgactcttgttatgtttttagcaaagagactggcagcattttgatcctgccccagagatttgtggaactttaaayttgagagagatgatttagggtatctggtggaagaaatttctaagcagcaaagcattcaagaggtgacttgcgtgctgttgaaggtattcagttttaaaagggaaaaagagcataaaagttcagaaaatt

SEQ ID NO: 810154 - DNA, 591 bp, Homo sapiens
gatgtgtgctttgtgtcctccatgtcctatttttcctcttcttccctacccagccgtttatccaatcccattcacagatccttgcttcatagtcaggtgtaagtggccaacagcataaaatattaytactctcagtgggatttgcattttccaagcgactaaaatcctaaattgaaaggaggaaactctagtggggcaaatccagccctgatttagagcagagtttctcagtctcagcactgtggacattttgggctggatagttaatttgggggacttgtgcattgtaggatgtttagcaccacctctggcctcaacttactaaatgccagtagtgcaacaatgctttccccagttaagacaaaaatgtctaagcactgctaaatatcccctggggagagaaatcacgcataattatgatccattggtttagaggattctgcagggaagtggggccttccaggatatcttaaatgacacaggggttataagtgcaaatgccttcagggaccaggcagaaatggaaatgcagaaagcagaagagtataatatgataaggagtggtggggcttgtggcaaaatggagggtgt

SEQ ID NO: 810155 - DNA, 625 bp, Homo sapiens
ccactattctcatttatatttaaatgcataccattaaaatcagtgcaactttatcatgactattttaatatcagcccctgtgcatcatcmaatgaatatatactaagcaacattcttctgaggcagtgtaacctgaattaaaaatgtatacacaaactatattgtcatttacaatttcaaaatttttgctgagattcataaaaaagaacccaggccagcattaaactgtgattgtcagacatagagacagagttctaatacttatcaggcaaactttaagtgatcgagaaaagtaaactgctaaaaaaaaaaaagtagtttattctactacaacttctgaaaacagaattgtgaaattttcccttagcacagccatatatttgagtataatcccaatattatgattgggaaagttgaccaaataattattaacaatgtaaaaatttattttaaaatacaagctttgacatttaaaatgtaatagataaattttatcatatgtctaattatatttcaaagaagctgtgaagaatgttaatgacagaatatagatagtgtgttgtttcaggcagaattctaagatgctccacccagtgatccccattcttgtataaccccctgtact

SEQ ID NO: 810156 - DNA, 620 bp, Homo sapiens
aaacattaactttggtagatttcagtgtagttcataacaagcatatttgcccttattcccccagagctgctcaactaccaagaatttttaaaatatttttaactgagattttattatgttgacatttgtttctcattccacatcatcttcagccaagctgtgagtacttacaattctctgactaattgttgggatcttagtcagaagcatctggaacactggtggtggaagagtttgctgtaagacctgcagtaactgctgtggctgtccacacacagcaattgcatttgtcagatggtctacacccttctcatattcaccttgagctagtaactcttcaccaagctgtatttcttcaaagaagaacttctgaacagcttcagcatctttaaggtcaggtaacttggaaagcccagctctctccttggcaagcttctgtttctttcttcattctcgaagcctgttcttgaagttggggtcacttcatcttttgtggtcaaagtagatgcagtacgcaataaaaagggtcccgcatgcaccrgcggcgatggcactgttccgacccaccatcttctctacagcgctaagcgtggacagtggcagcaggaaccatgaaggag

SEQ ID NO: 810157 - DNA, 642 bp, Homo sapiens
atgtggttgatattagaataagtgctatgtggtgctgagaagaatgtatattccattgatttggggtggagaattctgtagatgtctattaggtcccattggtccagagctgagttcaagtcctgaatatccttgttaattttctgtctcattgatctgtctaatattgacagtgggatgttaaagtcttccactattactgtgtgggagtccaaatctctttctaggtctctaagaagatgctttatgaatctggatgctcctgtattaggtgcatatatgtttagaatagttagctcttcttgttgctttgatgcctttaccattatgtaatggccttctttgtctttttaaatctttgttggtttgcagtatgttttaacagagactacgtttgcaacctttcctttttttttttgtctcccatttgcttggtaaatatacatatacctccatccctttattttgagcctatgtgtgtctttgcatttgagatgagtctccttaaatcagcataccaatgggtcttgactatgcaatttgccagcctgtgtcttttaattggggcattgaacccacttacatttaaggttaatatttttatgtrtgaatttgatcttgtcatcatgatgctagatgatt

SEQ ID NO: 810158 - DNA, 577 bp, Homo sapiens
tgagttatgtcccttctatgtctagttggttgaatgtgtttttcataaaagaawgctggatattatcaaatgctttttctgcatccattgagataatcatatagtttttgtttataattccatttatgtaatttatcatatttattgacttgcatatgttaaaccatccctgcatgcctgggaggaaatccacttgattgtggtgtatcgtgtattatctttttgatgtgctattggattcagtttgctagtgttttgttgaggatttttgcatctatggtcatcagggatattgagctgtagtttcctttttttgtcatttttttccagtcttggtatcagagtgatattgctttatagactgaattatgaattatttcctctttcttaatcttttgaaatagttttagaagaattcttctaaattcttctttgaatgtctggtggaattcagctgtggatctatctggccctggaatttttttgttggcaatttttttattactgatttaattgcactgattgttattggtatactcaagttttctttttcttcctggtttaatctaggagggtt

SEQ ID NO: 810159 - DNA, 592 bp, Homo sapiens
cactgcgcctggctaaattttttttgtatttttagtagagatggggtttcaccatgttggcccggctggtctcgaattcctgacctcgtgatccacccaccttggcctcccaaagwgctgggattacaggcgtgagccaccgcgccaatttaatttaattttttaaagttccaggatacaggtgccggatgtgtaggtttgttacataggtaaacgtgtgccatggtggtttgctgcacctatcaacccgtcacctaggtattaagctcagcatgcgttagctatttatcctgatgtgctccatcccccgacccctttgacatattccagtgtgtgttgttcccctccctgtctccatgtgttctcatcgctcaactctcacttataagtgagaacatttggtgtttggttttctgtttctgtgttagttttctgaggataatggcttccagctccatccatatccctgcaaaggacgtgatctcattctttttatggctgcatagtattccatggtgtatatgtaccacattttctttatcactgatgggcatttgggttgattccatttctttgctattgtgaatagtgc

SEQ ID NO: 810160 - DNA, 381 bp, Homo sapiens
cactcttgtttttgttttctttttttttttttgtaaacttattgcatgccctaaattttatgtatgaagtwttaaataataaatccactccctactcttcttcaaaaatcaccaaggcttcagggtctttcactttttgtttctgtacctctggtgttctttcaccagttaccaccatggcttgactcctcacttcctttaggtgtttgctcgaatgtactgtataggaataaggctttccctgagcacctaatagaaaaatagcaatcctccttccacaatccatccattatattcccctactccttttttttccacagtgctaagtaccatctgatatttatgattttatttatttgtttattgactatctcccaccac

SEQ ID NO: 810161 - DNA, 381 bp, Homo sapiens
cactcttgtttttgttttctttttttttttttgtaaacttattgcatgccctaaattttatgtatgaagttttaaataataaatccactccctactcttcttcaaaaatcaccaaggcttcaggktctttcactttttgtttctgtacctctggtgttctttcaccagttaccaccatggcttgactcctcacttcctttaggtgtttgctcgaatgtactgtataggaataaggctttccctgagcacctaatagaaaaatagcaatcctccttccacaatccatccattatattcccctactccttttttttccacagtgctaagtaccatctgatatttatgattttatttatttgtttattgactatctcccaccac

SEQ ID NO: 810162 - DNA, 381 bp, Homo sapiens
cactcttgtttttgttttctttttttttttttgtaaacttattgcatgccctaaattttatgtatgaagttttaaataataaatccactccctactcttcttcaaaaatcaccaaggcttcagggtctttcactttttgtttctgtacctctggtgttctttcaccagttaccaccatggcttgactcctcacttcctttaggtgtttgctcgaatgtactgtataggaataaggctttccctgagcacctaatagaaaaatagcaatcctccttccacaatccatccattayattcccctactccttttttttccacagtgctaagtaccatctgatatttatgattttatttatttgtttattgactatctcccaccac

SEQ ID NO: 810163 - DNA, 523 bp, Homo sapiens
ctgaatgaaaaagcatctatatctacagctacatggctgaggcccttttggctcctactaaaaccatttgctttctttttgagacagactctagctctgtcacccaggctggagtgcagtggcatgatcttggctgcaacctccacctccctgattgaagcaattctccccgcctcagcctcccgagtagctgggattacaggtgcccactaccatgcctgcctaatttttgcatttttaatagagacagggtttcaccatgttggccaggctggtcttgaatgcctgagctcaggtgatctgcccgcctcggcctcccaaagtgctgggattaccgccgtgagccaccatgcctggccttctccattttagagccagcaagccaatcayatttcaaggcctctggtccccttttgtgaaagaaatctctaggtagggcaagttttccaccctcctccagctcctgcagttccagagcagtttctaacctgctgtcacagagtgaggatttccatgtccttag

SEQ ID NO: 810164 - DNA, 355 bp, Homo sapiens
taggattaggggcgcttctgacctccccaagacccaggtgaggccgagggtccccggcgcgccagcctgcgccgtggctgtggctgcggtggcgactcgggccgggcctcgctctcgccggcttcaggttcccgcctccctcgcgcaggcagcgggcgcgtgtggcccgggctgggcaagccgaggaacagcgagcccccggacgctgactgcaggacgtcccagtttgtgcccgggtctccgtccctccccgtacggggctcgtacccccggrcctgggtctgacccacagggcgctgaggcctttgtagctgaagtcggaaggcctcgttgcgagcgcggcacaggttgctgg

SEQ ID NO: 810165 - DNA, 482 bp, Homo sapiens
cggttctgaaaccagatcttgacctggcgctcagacaaacagagcgtgtgggcgatctcgatgcggcgccgccgggtcaggtakcgattgaagtggaactccttctccagctccaagacctgctgccgggtgtaggcggttcgagagcgcttaggctcccctccgttataactggggttaactgaaaacccagaaccccgaaatagaaggccaaggaggagggagcggaagagagggaaaggaggaggagagagaaggtggggtggggaagagcaattggacatcatcattatataataacctgacaccaagttcacgcaagatacataaaacggcaaagaaaatgtttcacaggctattgacaacgggaaacacccgagagccataaagaatggtgctgggcattggggctgaagaaaagcttcaaagacacatggcctgaagcctctgccagggcaattaaatttatgggggctataatt

SEQ ID NO: 810166 - DNA, 620 bp, Homo sapiens
tcattatgtgaaattgctaaaacatgaaaagtgactattaattgagaagatatttcttttttattacattattggtgtctgtaccacttaactggacatagtataaagtgagtttactgtctctcagaattctaacaattctattgcaacctcagcagttgttgccagtgcaagaccattttaggcaaaagtctctttagaggcaagttttaagtaactggaaatgaatacaatgtggaagagaaaagaaggaaagaatgataccttgtaaacgaaaagtctgcgtaagaaaaaaagcagagtgaacaaaattctcgtcccattacactgtatttgcaaattttcactaataaataccacatagcaatgatgtaggtcactggtgctagctaatgaagtctgaattggtgtctgataagatgcatatttagccatgacagtctatcacctcataatttgttacctagctcccatcacttattccaaatckataaaaactctaagacagattttaaaaaccaggaattctggcttctagccccgtgagatggcaggcaagtcattaaatcttctgctctaaataattgtgttggtttacttagttttcaaacccagtcatt

SEQ ID NO: 810167 - DNA, 535 bp, Homo sapiens
catttgtgttcttatgatatatattggttttcatccagggttcctggtttataactcccacagcccttattacagtcttttgttacaatgttgggtgtgtgaggcytcaggggcaggcctcaggaaatagaatctctctcctgccctcctttcagctgccccaaggcagaactctaatcttctcccacctttctgatgtgagtcttaagaccctccccagggaaggtcccaccctgtactctgtgggaagaaatgttgacatcatgaagcttccataaaaacccaagaggattgggtttgaggagcttctggagagctgaacacatggaggttcctggagggtggcatgcccagggtgggcatggaagcttctcgccccttcccccataccttgccctgcacatctcttcatctgtgtccttgatagtaaacctgtaaacataaggtttccctgagttctgtgaattgtttcagcaaattaatcatacccacagaggagatcacaggaaccccaacttgaagccagtcggtcaga

SEQ ID NO: 810168 - DNA, 616 bp, Homo sapiens
cctggacatatacaccctcccaatactaaaccaggaagaagtcgaatctctgaatagaccaataacaaattttgaaattgaggcagtaattaatagcctactaaccaaaaaaaagcrcaggaccagatggatttacagccgaattctaccggaggtacaaacaggagctggtaccattctttctgaaactatttcaaacaacagaaaaagagggactccttcctaactcattttatgaggacagcatcatcttgataccaaacgtggcagagacacacacacacacacaagaaaatttcaggccagtatctctgatgaacatggatgtgaaaatcctcaataaaatactgacaaactgaatctagcagcgcatcaaaaagcttatccgccatgatcaagtcagcttcatacctgggatgcaaggctggttcaacatacacaaatcactaaacgtaatccatcacataaacagaaccaatgacaaaaaccacatgattatcttaatagatgcagaaaaggccttcgataaaattcaacactgcttcatgctaaaaactctcaaaaaactaggtactgataaaacgtatctcaaaataacaagagctatttatgacaa

SEQ ID NO: 810169 - DNA, 599 bp, Homo sapiens
tcctccacagacagcatactctccagttttggaaattctgtttggaactcaaaaatgctccctttaaggaatgtcttataatgattttttttttataaccaagccagrgataaagaagcagtgggttcagccatttatatcacaccctttgcacacatctttcccaccttagcttgcatgtacatatgtaaataatgtgagtcaagaaactgagaaaaatgtgcacatcttctactgaattccccaaatgggcaactcaggccattattggctcttcagttacctagcaaatatgctttctgctagaaagagtggaaaggcagaagctcctgaaattgctcagctatctgggtaaactcaagagccatgggactgggaatttcaatctggattctctaaaatctctttgtgagtattgaggttgcttgctggcttagaaaactgtcagtgctcacaagaaactcttcacaactattaacagatgactcagtttgcctctgtatgttctcccaatagcagaattgttggctggcacctgctccgctttttaagcaatcccagaaaatggatgttaaaaccttctggtgattcagcagcgt

SEQ ID NO: 810170 - DNA, 335 bp, Homo sapiens
cagcaataaaaatctgaaattattttacaatactaccatttataatagtatcaaaaacacaaaatattttgtaaatatagcaaaatatgtacaagattgaatactgaaaactttaaaacattgagcaggaaatcaaaggggattgaaatgaatggagatatttactataatcaggtttagaaatattgagtttggaatactcagtattgttaaaatgtcaattctccacatgttgatctatattcaggtttttttgtagaagtttacaagtaaatattaaaatgtrtgtggaaaagcaaaggaattagaatagccaaaaatctttgaaaaagaag

SEQ ID NO: 810171 - DNA, 618 bp, Homo sapiens
ccatcttgcttcgtccagtggttctcagccttggcagaagcttagraaaaacaggatgcttttaaagatcagctttaaaaaacaggatgccaaggccccatcactcagggtctctggagatgtggctggtgccaggatacttcaaggtgatccagtgcttcccatgcgctcagcttcccctgagccaactggagctggagctcattcatctgtcacacccctacactctgcaaggaggaagggtgtggtcctccccattcctcatcgactcttccagggtttatctctgccctcaaaacccacgaaggtggggtgcggtgactcatgcctgttatcccagctctttgggaggtggaggcaggcagattgttggagatcaggagtttgaaaccagcctggccaacatggcaaaacctcttctctactaaaaatacaaaaattaactgatgtggtggagggtgcctgtaatcccagctactcaggaggctgaggcaggagaattgcttgaacccaggaggtggaagttgcagtgagcttagattgcgccactgcactccagcctggaccgcagaacaagactctgtctcaaaaacaaaacaaaacaaatgcaaagggcct

SEQ ID NO: 810172 - DNA, 632 bp, Homo sapiens
gaaatgccaaaaaaaaattgcaaactctcaggaccacccccctccccagcaaccactacatcagactctatgtctacatattactttattatgtattttatttttgagacrgagtctcactctgtcgcccacactggagtgcaggggagtgatctcagctcattgcaacctctgcctcccggattcaaatgattcttgtgcttcagcttctgagtagctgggattacaggtgcctgccaccatgtccagctactttttatatttttagtagagatggggtttcaccattttggccaggctggtcttcaacttctggcctccagtaatccactcaccttggcctcccaaagtgctgggattacaggcgtgagccaccgcgcctggcctacattttttttttttaatagacaagatctctgtcgtcaggctgagtgcagcagcatgatgatagctcactgcaaacttgaacttctgggctcaactgatcctcctgcctcagcttcccaaagtgctgagactacaggcataagctaccacgcccagccttactctacattttaacaaaacctccaggtggtacgcacattaaagtttaagaagagctgctacaaagcccaaagagaattaagagg

SEQ ID NO: 810173 - DNA, 657 bp, Homo sapiens
tgggcctccccaagtactgggattacaggcrtgagccactgcgcccagcctcccttatgcttttctacatcttctaaattttcaaaaattcctctaacattttaatttttttaaattttaagcattttgtaatgttttaaataaattataatcaatagttttattacgctaatcagtaattagattatattaaatcttaaaacttctgtaacagttccattcttttttaattttttaaaatttatatataacatgtaatatgtattcatgtgtatataaaatttatatatgtgtgtatacacacaagcatacacacactctctctctctctcttatatataaagatgaggtcttgttgtgttgcccaggctggtctcctgagctcaagcaatcctcccatctcggcctcccagagtgctgggattacaggcatgagccaccttgtccggcccagttttcaaggtactgctactcaataaaagtggcttaatggacatagaataggtttactaaaaacctaaaaatgtgcaaaataaatagaatagtgctcaagttcactacttgatcatagaacaactaagttaagcaaaaaattcattcaaagtcattaatatttttagaacgatgatcaaagcaacatattttcaattaactcca

SEQ ID NO: 810174 - DNA, 618 bp, Homo sapiens
cttacaccctgcatggggcaccaggatcccttctttgtgtgctcacatctctgagagggtttgsctaaacaatcagtccactgagatgctggcctggggacaaacctgctgtccactgccaggccatgtggaggagctcgcctgcctctgaccacagagccatgcaggacccatctggcttcctcttctcctgcagggttttttctctcgaggttcctcagtggcttggtgaatgcagctatggttatggtcctgttctccagacaagtggatgaatcgggagtggatgtagctaaaggttgagcagcgatctccactgtgaaggaacaagtgagttctgtatgcttgaacatcaggaagcctgattcatgtgcgttccagaacacaccagccagtgatcttaggcaagtcactcactttgctgagcctcagtttccacttaaaatggccataagggcatgttttctatttatttcacagtttgtatgaagcgcaaatgagcacacatgtgtgaaagaacataatttattttgcacacagtcttcatatagggtgttacaaaaacacaaaacatacaaaaggagcctatctctaaattttcagattggagattctccc

SEQ ID NO: 810175 - DNA, 559 bp, Homo sapiens
aattacagtatgtagtcaaaaatcctaatgaacatactaataatcaagaaggcatgtaccataccgaaaagcagtgataattattagaaatatatccagatatggcctaaatattaggattatcacatcaaatttaactataacttaaaaataattttgcggaaaagatggaaagaattaatgaatgaagagatggggcttttagctgagacatgggaactatacagaagaacaaatagaaatgctagatattaaaaatcagatatatataatttatttcatgagcttcagatgggactgtataaggaagaggaatatatccttgaagagaaagtttacaaacaaaaatataaatagaaaaggaaaagagtaaacagagaatccaagatatgtaaaaacgtatcaatctaacctatgtgcaattaaatcccaaaagaagaaaagcaagacagtaaakaagaagaaatatttaaaagacaatggcaaaaaaacttaacaaaattgatgaaaatatatcaacccaaagatctaagaagtttactgaatgctccaagcagga

SEQ ID NO: 810176 - DNA, 630 bp, Homo sapiens
tgtctctgtcgaacctgctgcacacacacacacactcacagaaagagagagaaagagagggagagagagagaatcctgtaatagttttaatcctaaagtaayacattgaaaaaagagtctcactccttgactttcttcctactgtggtcccatatatacactcctcttccaaatggaacgctatgaagtggctttctatacacactctgtactttttcagtaaccattctcacttgaactcattccaaataggttttagacccatccaggccacagaaactgttcttatcaaggtcttaaagaaattgtatcttgccaaaaccaataatcaatttcagactgcatccaacacttaactctcagaagcatttgatatagtcaaccattcctttttggaaacaatttcttcacttggcatccagaacattacattcagctggttttattattactttactaacagtgcctctttctatcaaagtcagaggttattttcttattttatgccatagtgctttcaggaaatctaatgaaatttatgaatttctttagaatatttttaaatgcgtaggtttatcaaggaaaaatttatatcaatactagtttccaaagatgtactttcaaaccttt

SEQ ID NO: 810177 - DNA, 529 bp, Homo sapiens
agagaccaattttgcagaaatacaggagacctgatgctgaaaagtctaagtgtcttatgtatgctttgaaacatgtaaggcagtagttcccagtggaggttttcccttgctcaggtgcaacagagtttgaagagtttgtgctgcttgttgaagcatcacaaatggcatgctttgacagctggggtacctgttgaataatttctctgtcaaatattcaaaataaaatggcacagatgttaaggtgcatgaatatgcagcaaaaatatcctcctgaaggacaacaaaaagctctttaaaagtttgaaaagatagaatgctctgttacttctctatagtcattttaattgttaccctttgtttttaaatttctattaaaattgaaagttctggtgatgttttaatttccaatgaaaaaaagtggaagctttgctatatctttatttctacctcaaattcaacaaayaccttcctttgatcagctttcaaagtgctgtttatgtgaatgtagcaaacctgcatatgtaccccc

SEQ ID NO: 810178 - DNA, 524 bp, Homo sapiens
tacttgtttaataaaaaatactgagatcttaaaatcaaactctaagacatyaagtcagaaaacataaactactcatttttaattgtagcagtaattttaaaataattttaaaatttaaacaaatgtaaataaaatttaataaaaactctatggcattttaaaaaacaaacacttagaaatacatttcataaaactcatgtaaaacctctacacagaaaactataaaaacttgctcagaaaacaatgatttataatgaagacctttatcatgtttatgaattgggagacttggtatttcaatgtaaattgtttcctagttgttttatgaatttaacaccatgcaaattatagtcacagaaggcttatcttttaatagaaatcgacaaatttaaagtgacttatgaatatgtataataatgcaagagaccaaagagtgccaaagtaattttgaaaaagaagaccaacatgggagccttacattacttgagtttaagaatcactacaaataaacaataataaagata

SEQ ID NO: 810179 - DNA, 573 bp, Homo sapiens
agaaagtagatagaccttgagaagaggaattagaaactggaaacccattaaatcagtcagccaacatgtctgattctcagtctctctcttatttcccttatcgtcacttcttttggtaggcttacatccttctctctcattctgtaaaccatctatctcaactttgatatctatgaaatacgatatggctgtctcacaattttaggtattattgttaccattccagcaactcttagagatttacttatagctacagtcccaattttaaatatctgagagagacacctacttggtctagtttgctgtctactcattatcagtcaccctgaaggatagagatgggagtggagtctcacagtataagtatcattcctggagacctcatcatacataaaggtggcgtgtggggggtggtgctggtccaagagaaggaagcaayagtgcgttggctggcaggcacctccctcaacacaaggtgtccattcaatgggatttttagtggcaacattttttaaatgattgacttattgtgtatagttctgtgaattttaatagatatatagatttgtgtaa

SEQ ID NO: 810180 - DNA, 596 bp, Homo sapiens
aaggtcaatattttaaaaaccatgtaaggaagaaggaattgagggagagtcactaactggggtcccaatggcattagctttttggcactagacaagttcctaaaccataaagtgkctgagtaggaagtggtttatcccacgtacatacagttgtgcacctttagaattattaaccggttaacattccggagtgacccccattctggcaagactaggactaaagaaactctgtttgccttttggctgatgacagggctcagcatgacagggctcagcaatacctccccttacaacagaagtatgaagcagatcttgaggaatctgagaaagattagaatctctctccctttttgttttatagcacagtatatcataatggcactgggctatagttgattcagttagctgttaattgaacatctattatgctcaaaacactttggggtctataggccaatcaacatggggactattctctaagaagctgttatgcaaactccacttgaacagagtgcaatggttgtttagaagataagctctgacaaatgatttgggaacaaaaaaaggctccatgtagtcaggaaaaagagatgtca

SEQ ID NO: 810181 - DNA, 596 bp, Homo sapiens
aaggtcaatattttaaaaaccatgtaaggaagaaggaattgagggagagtcactaactggggtcccaatggcattagctttttggcactagacaagttcctaaaccataaagtggctgagtaggaagtggtttatcccacgtacatacagttgtgcacctttagaattattaaccggttaacattccggagtgacccccattctggcaagactaggactaaagaaactctgtttgccttttggctgatgacagggctcagcatgacagggctcagcaatacctccccttacaacagaagtatgaagcagatcttgaggaatctgagaaagattagaatctctctccctttttgttttatagcacagtatatcataatggcactgggctatagttgattcagttagctgttaattgaacatctattatgctcaaaacactttggggtctataggccaatcaacatggggactattctctaagaagctgttatgcaaactccacttgaacagagtgcartggttgtttagaagataagctctgacaaatgatttgggaacaaaaaaaggctccatgtagtcaggaaaaagagatgtca

SEQ ID NO: 810182 - DNA, 604 bp, Homo sapiens
cctggcactggatttttaaaaattgctccctggtgagtctcctgcgcagccagagttggcagccagcactggctttgcgtagcaaacagcagggtctatgataaagcccrcctgactgtgccatccccggcttagaaaccaagactgcttctgggtgccttcagcgtggagtgcaaggtccctagtgacctgacactagctggcctctggagccccattgctcctcttccttctcatgctttgtatagtccagcagaatggctgcttgtctttcttgaggacagcctgcttgttcacacctcatgcctttgcacactgctgctttgcacctgcaatgccctttctccctgaaaccgcacgcaagtggtgtttaatttttcaaaacctgctttagattttgcttcttctaagtccctcctgagttccatctctcctctgtgctcttatagttttgttgcatatcggccacaggttattgtaattgactcaaatttgtacgagttttcttgttaaaccttgaacgccttgaaagccagggctacatcttattgatccctatgaccccagcactaaacactgtgctaggtacacagcaaaggctcta

SEQ ID NO: 810183 - DNA, 681 bp, Homo sapiens
tagctctacgagatgggttaacaacagtcactcccagacaacaagccttgctaaaaactctaacaagaggacatttatcaaagaatyattttacttcttaaactttcagcatactttgggcacttctcagcattggggccttgtttgtcctttgcatactcaacaatgctaagtaaatgcacttgcagaacgacgagtagataatctgcatttatctcaaaacacactggcacagaactcttccaccgtcacttcctgtctctcccacctcctttactacccaatgagcaaagaatatgtagctcaaagagataaaagtttaacagttccattctaaagacagtcattcctgttaattgacataaacttacttaaagtgtgttattttgtgaagactacatgtttcaaacgtctactgtataatgatagcattgattaaattgtgtgcatataacaaaggctataatctgaaagtatcttctaaatatgaatattatagccaagtacacttcaccttctcacttccttcttatcattatcagcccaaaggacaatatcagcgttccaaaagttgttttcagaagatagtcttacctatgaagttttcgggcatacaagaaaagtatataatatgttttagttcatcatctcttcttttgtcaaacattagcaacctcttta

SEQ ID NO: 810184 - DNA, 500 bp, Homo sapiens
cttactgtacgtttgtacctttagcctacttctccttagcctcccttcatccccagtcaccctccccagtctctgttgtctacttttccactctctacctccatgtgttcaaattttttacctcctacatatacgtgagaacatctgatttttgtatttttgtgtttggcttatttcatgtaagataatgatctccacttccatccatgtagctgcaaatgacataatttcattgtttttatggatgaattgtattccattgtgtagaagcaggcagaattgactctgatagtagtctagctggaagagaggctatagctacaaagaatcttgacttaccaaaacactagtaacatgtctgtgaaactgctgtagtctaactcatttactactatgttaatttggagcgtgaagttcatcagtggaatgggtactataatttgcraagttcaagtgacaattctggtagataaagttttaaggagcagatggtcacaact

SEQ ID NO: 810185 - DNA, 583 bp, Homo sapiens
attaatatcctgctgtatagaagtactttggcaaagttaaggttgtagttccaattcctcatttccaattttttctccagatggaaagatgaacagtttttggtattgaatttttttttaggaagcaagttatttatcattagatatctattcagtaaatgcaatgatacagaaaaatgaagtttttttccctcagatttgaaattaggttttaaaatatggagggagaacaatttgtaagtaatgttcaggaacaaaaataaaacctaatgaaactttagaaactttgatggacatctgtcatcctacatacaattgcattaaagaatagaatttattattattttatctggtttattatgctgtaaaatgaatttttctctttttgtatgtagttttatgaaatttcatacatgtatagattcatggaaccactgtaaaaatcaggatgtagaacatttgcatcacccccaaaaamtccttcatgcagtcccttactggtcaccctttctttttagtaaccctggtaactaccaatgtgttctccatccctgtagttttatcttttcaagaatgtcatata

SEQ ID NO: 810186 - DNA, 584 bp, Homo sapiens
atcaaagtaaacttacatggccttagccaagtcataggatattttttcttttctctcttttcttttgtagtgcaacygtggtcactctggtcaaatgtggaagacgctggtgctaacgcttgttctgcagtcagtcatctgtaaaatggtaactatttcacttgccctacacctctctcccatttctatatatctcagatggacataaaacatgctctggaagtgaaaagtagtctatatgatgatcacaattattcactttgacgaactcttagcaagcttttaaaagaggttaaaacatagtatcatctctgtaatccacattacagatagtcatcatgttactgaatcagggctatttgagaaataattagaatctgggaaaactctgaatcctgaaatcaatcaaattaatagaagccccttaatatctgtttaccaaaggcataaggaaagcaaatgaaaagatcatactgtaatcgccaatgaaaaccataaggctctgcataaatgaccctgtgatcaaattactctttcagctgacaaaattaaccttcttaagtacacatgtataaacagggtgt

SEQ ID NO: 810187 - DNA, 648 bp, Homo sapiens
cgaacgtctgcagatttttatatccagaaatgggggatgtcctggaaccaattccccccccatggacaggggaatgactgtgtcatttccagcttaaataaacatcaaggagccacaatttggagtttaagacggtgtaccctgccttccttagcccaagcatgactactgtgatgccgcactacattctgtgactttcactggagaaagtgatgcagctgtcttccgataggaacagcctcacagagtcttcatgggaagaaataagtcattttcagtaacttaaaagctggaagtaacatagagtaggaagaagaatggactctgaaatgatacagattcaaatcacagacttgtcagtttcagtcaagtttcatcttctcaaagccctaatttcttcacctgtaaaactgaaaattatacatctagaatataatctagcttctagagatggcctctgcacttcttggctcgtggtcctatctcaaagccagcaggtagcatctgccactctcttcttctgtctacttctgttgtcacatcactttctcccactcttcccctcctacyttccccttataaggactcatcatgtgattacatggggttaccaggattaaattagaatgaatgtaaagcatatagcac

SEQ ID NO: 810188 - DNA, 589 bp, Homo sapiens
aatgcagaaaagagttaaaataaagcagtcctacatggaccaatctagcattacagaattccactgacaaagaaattcctcagtcaaagccatcaagagattggttttataaatagcacgggaaaatccaaaataaagggcagctggcattatcactagatggaagctacactaagatctctttctttcaaatttgttaggaagcacatatcataaataaaatataatgcatttacacaaggtttttgaaaccaagtattattcaactttttaaagcagtatgctctggaaagtgctgtattttgaatggcaggcctggcttttctcagagttaacctaaacctctatatgcaacttttctttcttaaatggcatatttaagacactacaagtgatctcttaggagtcctattcaaaatcctcatcttcttctaggccgggtgtggtggctcacacctgtaatcccactactttgggaggccgaggcaggtggatcacctgaggtcrggagtttgacaccagcctggccaacatggtgaaaacccacttctactaaaaatacaaaaattagctgggcgtggtggcaggc

SEQ ID NO: 810189 - DNA, 596 bp, Homo sapiens
tgattcctgtactatatccacaagtatataaagaatgatgratgtgtataaaaactatatgttccttgctcagctatggaattaaaagacatgtgaatgtagccacaagtctcttgatttatcatctaattcacaacttgaaagatagtttggccaaatgcggtagcttacacctgtaaatcccagcactttgggaggctgaggcaggcggattgcttgagctcaggagtttgagaccagcctgggcaacatggcaaaacgctgtttcttcaacaacaacaacaaaaaaaacccgaaaccaaaaattaacttgagtgtgatggcacatgcctgtagacccagctgcttgagaggctgaggcaagaggatcacttgagcctgggggttcgaggctgcagtgagccaagatcacaccactgcactccagcctgagtgacagagtaagaccctgtttccaaaaaaaaaaaaaaaaagaatgaattgactttatttatttatttcagagacaggctcttgctctgtttcccaggcagtcttgaactcctggtctcaagtgatttttccacctaaatctcctgagtagctgggattatagg

SEQ ID NO: 810190 - DNA, 608 bp, Homo sapiens
tgctgtttctttatgtcctctgccattaaagaagaggtgacactgattagtcagagtgtaaatgtctctaatgaaacatggtacataattcagatttgtgttgttaccattccattataccattatgctcttaatattactgagcattaacaacattatttttatggttcctcatttagaactactggaaggttgcagactgtttggctgggttttgtatttagaacctatccagaatattggctgatgccaccaagaccttttcctcacccacacaaagatttttgccttgaatcatggaatttgtttaataaatttggtttgcatggttcattatagagacctgggacacaatggagggataattgtattgcagccataccagaaggctttcagaatgtatttcaaatgtatactgcaagtgaagcagtatccaaggaaaaataaggaagttccgtgatccctaattggtacttactcatattttatkgaaataagcagaaatgtttggttcagaaagagagagagagaagactcatatcttagaactgtcttgtctcatgtatgttgtgagatctcaatgcacatgcttagtgtagttccttctt

SEQ ID NO: 810191 - DNA, 525 bp, Homo sapiens
aaacaagctttcctttaccagaatgctttaaacctttccagtaaagttttggctatttaatccctataaatacctttgtatagattatctttggtactacaaaagttgtgagacaaaggaaagagaggtgctgctttagatttaggattctgccgaggctctttaaaaaaagggaatcttgggccgggtgcagtggctcacacctgtaatcccagcactttgggaggccaaggcaggtgggtcacttcagtccaggagttcgagaccagcctgaccaacatggtgaaaccctacctctactaaaaataaaaaaactagccaggcgttgtgatgcacacgtttaatcccaactactcgggaggctgaggcacaagaatcgcttgaacctgagaagcagttgttgtagtgagccaagatggtgccactgtactccagcctgggyggcagagggagattctgtttcaaaaaaaaaaaaaaggaattttatattttaggtgtgtcacccttttcaaatttaatgataca

SEQ ID NO: 810192 - DNA, 544 bp, Homo sapiens
cattcagaactacaagcaataggaagaagcctctaaggagggcatccttccttcaattaaaaaaaaaastaaactaactggaagaatgatctctgcccattcatcctttcttcttctccatgtgtggaacatggatgtaagacatggagcagtagcagccatcttatgccacgaggataaaagccccaggttaagggtggcagaaaggaaacccaggaagactctgagccccagatgcacccttgagctgctaaggtaccaatactcatcagtatatgcctggctgcctgttgcgtgaaacaaattttacttgcttaagcctctgttagtgagtttactgttacttttgcagccaaaaacaatcctaattgatctacctggattctggtcctagattctctatgacttttgacaagtccctgatgctctgtttatcagtttcttcaccttctaattagaaggatggaatagagcatgtttttaaaaatctttttttaggcaataaaccctaacaaccccacccccaatgaatttgtgtcccatg

SEQ ID NO: 810193 - DNA, 532 bp, Homo sapiens
tctttgtcacttggcttcctgctgggtttgtccagtgggaggcaatggcattacaggagaaggcagaaggaaggaaagaccaaggaatttcttcccctccctctctgcctctggaaggtttgttgactsttccaagtttccagcttctactgggtgacactggccccaaggctctaggaatcctaccttctcccttcatccccccccagccttgggtagtaaccactttctgctgttgctagtctctggctggcctcaccctcccttatagcctcagctccctccttacccatgtaaccaatcccctgcattaaattctctctgtcgtaaatacttgaaacagtttcggatttcttgatttgattttgaccgagacaccagctaagttgactgcttcttttagccttgatttccctatccgtaaaatggagataataatagtaccttctacctaaggtatttgtgaggatcaaatgagttaattttagttaaacccttggctcagtttctggcatataataaaaagttttcc

SEQ ID NO: 810194 - DNA, 552 bp, Homo sapiens
ccacactttttaaaattaaaatttttttaccctacttgcaagctaaaatatcacactctacmccataaatatgtacaattatgatatctaaattaaacataataaaagcaaaaaactctatagaatactattgtttggatacactaatcacctattcaaagacatctaggttgttcccagtatctagctcttacacttcttcagtgaataaccctgcatctacatcattttgtgcaagtccaaacatttctttaggataaattcccagaagaggaattgctgtgtcaaaaaatatatgcattcataattttgatagatattgtcaaattacactgcataggaacactcctaccagtaatgtctgagaatacacagttccccacagccttgccagcaaaaagtattattaacctttccaatttttgcccacctgatggggaaaatactatttcagtgtagttttactttgcatttctcttatttgagtgagactgagcatcttttcaaatgcgtacgagccatgtgtgttttcttttctatgaactctctatt

SEQ ID NO: 810195 - DNA, 619 bp, Homo sapiens
gcaaagccttcctgagccatgtacagcctttgaggcaggcacagttatttcaaaggcacaaagccactggttggtcaggtgaatctaagtgaacttagggtgaaaagcatgaagttcaagactagcaggccagctcccttgctacttactcgacacatgcattgatgtatcagacaactccaactgcttgcctttacctgagttgggagtcaggttctgcagattcagctgtggctgcagccacaatgtaggtcactgacaggaaattatcttgctgctgtttcagacagaaatggaacttaatagcttatgtcttttttcctctgctgtgtggtgccaggggcattttagtcgttcagggaaggtaggggatatgtctaaaagccttgccttttagggtcctatttcatccatcagatgtgactacattctggattttcttccctggccagtctttggtcctcattgccatcaattctccttgctttggaaccagcctgtgcctcccagctstgacacttacagctgctgtgggcttcacctgaaacttctcatgtttaactgctacaatccagctgagcagttgatgatgtgaaaataggactgctttagttccccc

SEQ ID NO: 810196 - DNA, 601 bp, Homo sapiens
gggggcttgaaaagtgctcgtgcatcagggctttacctctcttgttgctcttggaaaggtgccaccatatgaatcagcctggrctagcctgctggaggatgagaggcacatggcacagtcttccctgccagctgacattcagtcaacttccagatatgcaagtgaggccatccaggaccagccagccaccagccaattccccagcctactgcagatgtatgagagagcccagctgagatcattcagtagcttctacagaatcaagggctaaattaatggtggttgttttaagtcactgagttttggggatgtactatgcagcaatagatcactggtatgccatggctctatacattttcagttttttaactgaattataaagggatggctgggtgcagtggctcacgcctgtaatcctagtgctttgggaggctgacgtgggaggattgcttgagcccagaagtttgcgacaccgtctctgccaaaataaaaagtaaaaaaattaactaggcatggtggcacacacatgtagtcccagctactagggaggctgaagtgggaggatggcttgagcccaggagttcgggggtgcagtgaacta

SEQ ID NO: 810197 - DNA, 563 bp, Homo sapiens
gtctgaagatatgactgaattgctacaatctcatgacaaagcttgaatgaggagttgcttcttatggattagcaaagcaagtggtttcttgagatagaatctactcctggtgaaggcactgtgtgcattgttgaaatgacaataaaagatatagaatattccatattcttagatgataaggcagtggcagggtttgagaggattgactccagttgtgaaagaagttctactgtgggtaaaatgctatcaaacagcatcacaggctacagagaaatattttgtgaaaggaagagtcaatcaatatggcaaagttcattgttgtcttattttaagaaattatcacagccatctctaccttcagcaaccaccatcctgatcagtcagcagccatcaatgtggaggcaagaccttccaccagcaaaaatattataactcgctggaggctcagatgattgcatttttagcaataaagtattttatattaaggtatgtacttatttttagacataatgcyattgtacacttaatagactatagtatagtatgaatgtaacttttatatg

SEQ ID NO: 810198 - DNA, 624 bp, Homo sapiens
caagggagagggcagagaagaaaaacttgaaaggaaatgtaattgtgtaagtattgattttycaagtggaaatggtatttcagaaaaataaataacatgcagtagcaagaggtgttaggagttatggtaggttcaagggatgatatggtttcttgtcgctagaatcagagggggatttgtaggagataaagcatcaaacgtaatttagagtcaagttttaataggccacgaaggcaatgtcaccaagttttaattttatcccatagacgtcgtggtgccattgaaagcttttaagctgggaagttacagaattcaatctatatttcagaaacatcagtctgccagcagtgttgataatgcattaaagggatatgagattatgttttggtggtcacttgagaagatactgacacagacttgttaaaggaaaggttgcttttaaaaggtttagaagttgggttttataaaaattggtagagaaaattcctacaataaaatatgttatatgttcttatgcatactacattttcagacattttaatatttcccaaatgaatacaactttgaaagtaggcattgcactttaataatctgtttattctgcacattataagggcattggca

SEQ ID NO: 810199 - DNA, 631 bp, Homo sapiens
agaatgttgaaccaggttactgtgacaatgtccaaaattggtaaaaggaaaaggaaagaaaacagtatcatcagtaatgatgcaggagttagagtatttaggmagatagtgaggctaagtcactccttggtaaggtttcccttttaatgaaaagcaatccccaaagcattttcttttctaataaagagcagcctgtaaaatcgagctgcagacatagacaagtgagctggaagcttgcacgaatgaatgccagcagttgtgccaataggaaaacgctacctgggactaggcgtaacccaaatggtggctccatcttcccttctctttgccagccacaggtacagtaaggaacagacaagatggtgctggacaagtggaaagcccgtttgcataacaagattagggtggggtgaccagccttccccatgcactgtggaaaggtcacacctggtcgaaccaatctgtgggtcccatggaaatcagacactgcctcctcaagcctgcctataaaatctgctgtggtcctccacatgccagcttttcccttttggacacccctctctctcacaagagagaaagagctgctgtcctttctctttcttttgcccactgaacctctgctcctgaactt

SEQ ID NO: 810200 - DNA, 608 bp, Homo sapiens
tggtggcctctggagctgtgcaacagggtggccacaggactggacaatgcacttgttcaaatgtgcaaaaggaactgcctgggccccagcacagctggctgggcccagtggaattctggctggcttccagctgccacttgctcccttcgtgcaggacacaaacagcatcactgtacacagggcccagctacactcccctagactaagtttaggtcataaacatgtaggcctcccacattgccactaaccttacaaatcagaaggcagcctctctacagacggaagatgtccatagaaagaagggaatgagcaaggccagctcagtctcatcttccaaatttaccaaccaattgccaattgagtagaaaagggaaggagagaaagggcagagaaaggccataactacctcttaatggaaggtcctccatttgggaataggagggggagaactgtgagctcttaacaaagatactatcaacaaaaggcattatctagaattttataaagcaggacatcaataaaacatggaaactgaaagggcraaagaaatttcaaacaaaaggtattgatgagaaaagcattccaggctttactgatggcctgaaaac

SEQ ID NO: 810201 - DNA, 531 bp, Homo sapiens
ggatcccatattatgtttagtcatcatatctccttgggtacctctagactgtgaagggatttcraactttccttgtttttgatggttttgacaattttgagaagtgctagctagttattctgtggaatatccctcaatttgccttgggctgttttgctcatgattacatgaaggatcatgggtttgggggaagaagtccaccaaggtaaaatgtccttctcaacacatcaaatcaaggacatgctatcaacatgactcaccactgatgacgttagccttgatcgcctgtctgaagtcgtgtttgccaggtctcgcccctgtagagttacttttttttccccctttccctattgtattctttggaaggtagtcattatgcacagcccacacttaaggagtaggaaattaggcttcacttccttgagggggctgtgtttacataaattatttgggattcttctgtactggaaatgtgcctattctcccccataggcttatttatttattcatttatttacatcagtatggact

SEQ ID NO: 810202 - DNA, 573 bp, Homo sapiens
atacacctttcttcccccactccaggtaacactcacatagaaggcacagcacaaaatgaatgcccactggttggttagtagaaagttgtaaagtaggcagagaatagcaaaggcaccatcatactgttaccaagcaaaggaggctcgctgcccgaggcactagaagtcaatactataacactgggtttttgataaaataaaaacttttattgcatgtcaaccaacaaagaaataggaagtccagctcaaatctgtctccctgtgctggctttaggacaattattttattagaaatggttttgagtgtggattctgggattagcaggtgcttggtggaaggaaagaggaagtctggaaagtccttgcgcatgtgctcttatttcttcatgctacctaagggttccacgtgcaaattcagtgaggagttagtatgaaacatggcagtagaaattcagctgtaaggtcagcaagctggatctgtgcagactctagttggccttatatgttccartggatttcagccagttttattaacctacaagcccaggcatttcagcatttcagcaatttgtt

SEQ ID NO: 810203 - DNA, 626 bp, Homo sapiens
atatttgttaaaggtttataggggtagcagtgccttttaccatgattactgtatatgtaaaatggaatcactctaatctcacagggttgctatgaacagcataacccttaggcccaggaactttagaaggccccacactttagagggccagttctggccttcctctggctgtggccctttctgtggagcaagaggatatgttcgtctggagcccatgctcctctgtctccctcccctgaccatgatcttgaaccacagaattccctgaccaaatggctttaaacccaatcctaggcccttcttagggtctcttccttatgtccatcttcccaagggttggcagtgctgccaagctggtatatacctcatggccaaaggagtgaccaaaacatgactgcatgcctgtttgctagaagtgaggtggtgggtaaatggggcgggtaaagaagaaagcagtcagggtgctgaggccaggggccagcggctggctctccctgaaccaccctgtcccagtgcagaactcgaagtagtccaagaartccaaatttaaacctggtcttccaggttgttccagagatattttgtcaaagcaggtgaaaggaacatattttatttaacatttattt

SEQ ID NO: 810204 - DNA, 576 bp, Homo sapiens
taaagcacaatggtgtggctagagtcagctgattggactgaaacagcaatagcataaccttaaaaagaaaaatgtcaaagcattgagacaacaatggtagtctcaaaagggggtcaaagatttgatatagtcaatttgccaggaatagacagaggtaatgtcctgtgcaatgtggcctactttaccacagaacaaacaggccaaaattcggcaggagtcacaagtctggtatacagtggaagcttctgcatcagaaacacatggtcctttacagtgtctagtctgcaatggtggatctgttgccatttctgatgaggtgaggacaccaggcagcaataggagcaatctgggcattgcacactcaatcaacagctcaattctcattgttcccatcagacaacaggcccttacaatgccatcaacacaagggacccagactatctacttgggagacacaatttgtttatacagttcatggcygcagagaggaatatctttatctgcccgtgttagtcttccaagtggcagaccacatggctaggccattggtaacagcctaagagtcagaaatagtcc

SEQ ID NO: 810205 - DNA, 539 bp, Homo sapiens
atagatcagaaggggaaaataaaaataaataagttagttmatgatctgaacattaacatagatctgacacacacacacaaaaaaatgctaaaggagtaggaggcaaaagggaaaaactgcacatccattctagggcaagtggagaaatcttcacagaggaagtaacatctgaatcacgactcgaaggatgaataggagttcatcacaaagtttccaatgaaaatcaaaccctgaaaacaaaaaagaagaggccaagtttatgaatacctccagtaggccaagatttcccaattgtttacagatcttacctataaaaagggattccacgactggcgcagtggctcacgcctgtgatctcagcactttgggaggccaaggtaggcaaatcacctgaggtcaggagttcaagaccagcctggccaacatggcaaaaccctgtctctactaaaaatacaaaaattagccaggtgtggtagtgggcacctctaatcccagctactcgggaggctgaggctggagaatcacttgaacccgggagg

SEQ ID NO: 810206 - DNA, 515 bp, Homo sapiens
taaagagagcttaagaagctactttgctaatgtaatccataactttgctacctgagttaacaaacgttcrtaacactattacatttattctttctgaaagggatatttctgacattttcaaagtctggaaaacatttataactaatgttgagatcagacagaattccatgtgaggagataattgtgatcttttaataaagagatctgttaattttgtttgctgtttcccgacagagacgtggccttttctacttcagaaaatgttaaatctttttctgcttctcaggtttgtctcagatgcatactaataaaaatgcaaattcatggaacacttattttgtgccaggtatggaatacaactagaaagttttaagtccatgtgcagcttttaaaaacgattgttccatcttttggggcatcgaaagactacaaagtacctgatttcagcttgctgaatgatctgcttcaaattgtaaacactatgagaacatttttttttttttgagacggaatct

SEQ ID NO: 810207 - DNA, 476 bp, Homo sapiens
acaaagtacctgatttcagcttgctgaatgatctgcttcaaattgtaaacactatgagaacatttttttttttttgagacggaatctcactgtgtcgcccaggctggagtacagtggcaccatcttggctcactgtaacctccgcctcccaggttcaagcgattctcctgcctcagcctcccgagtagctgggactacaggcgcgtgccaccacacctggctaatttttttttttttttttttttttttggattttttagtagagacggggtttcactgtgttagccaggctggtctaaatctcctgacctcatgatccacctgccttggcctcccaaagtgctgggattacaggcgtgagccactgygcctggcctgagaacattttaatagtaattttataggagaactaatttgaatgcttctcatattctcaaaaagagtggcctggaaaggatttctgcaaacaatattta

SEQ ID NO: 810208 - DNA, 587 bp, Homo sapiens
ctggcagtaatttaagcctctccagtttattttgggccaccaccagcaacaaaactgccaaaggacagcattcttcaagaaaatactgccttactaagtaatctaaaagattcgtccttgaggccacacacagaccaaattttaaacatgaaataaattaaaataaaaatacgaagatcactcttgggccattcaatttactgccacctacaggttagattccagaaaatctaatcaacattagcaaactaaaacaaaatactgtttttaaatgaattaaataaactacctgtcatctgagttctgtgataattttcctgtgacaatgtgctaaatttactcattgagaaaaacatctttttagtatttgcattttagtaaataaatatttgttaaattattgacgaatggaaacgtcatcataagcatatgggacgtaacaaacctataaaaaataaatgctataatgtagtctcagctgaaaatttggcctgtatcacctaaatgtgcaatggaaaattgtctttttattctgtaacatacayagaatatcttaatatacaaacatttattcaactgtaactgac

SEQ ID NO: 810209 - DNA, 638 bp, Homo sapiens
tggcacaggaaggcagagcaaggatgctggcttyttggaaccatgcacctgtgccatgcctttggcacttctgaccagtcatattggatagaaaccgaatgatctgcgtctgtatccagaaatagcccaacacccatgatgctgatgcctaggaatagaggaaagtagatgatctactcaccagggcctcagggatgtctcaactccaccttggatggcttttgctgctggacacaattgctgtggttcatagagccaacaatggggatggggccagtgagtggcttgagctaggaagtaagtggaaggtgaatggctaccatctgccactgtcatttctcctatgggtcctctgtggctattaacctggcatctttggttaatcaatattaaaccagagcccttgtcatatgttcactttaagaacttgcattggtgaaggaagaagggaagatgctattccatttcttaatgcttcctaacacagtgcctggcacatggtaggtgctcaataaagtggcacgacctcagccttcctaaaaatgtcttttaaacaaggacagtgccaaagtaggaggaattgacgtgttttcagcaactgttatgtgcccagcatgatctgggtatttggacatcca

SEQ ID NO: 810210 - DNA, 612 bp, Homo sapiens
ttttgtaatgtgtactggagatgtggaaaaagtagagaaaccttrtaatggctaatctcccccaacccttagtaatttctgaagctggctagtaactcagacagtcaacaatagatgcaccatgagggcagggatcactgtctgttttacttactgctctatccccagcacctagaatagtgtctgtcccacagtagacacttaataattgtgtttttttctttttttgtagagatgatttcaccatgttgcccaggctggtcttgaactcctgagctcaggcagtcctcctgtcttggcttcccaaagtgctgggattacaggggtgaagcaccatgcccagccaataattgttattgagtgaatgaaggaatgaatttgagaactagtcatgccaaggaatcgctaagtcacatcgtgttggaaactgctctttgtggtccaagtccacccatgtttctcttgtttttttctctccatcagatctcagtctcaggaggaggtttgcccccagtcagcaccttgacgaatatccacagcctctcccaccataatccccagcaatctcaaaacctcatcatgacacccctctctggagtcatggcaattgca

SEQ ID NO: 810211 - DNA, 632 bp, Homo sapiens
aaaatttgtggaaatttgtcttctctcttgttatgtaagtacctacctamcaaactcaattttgcctctttgcctgctaagcaaagagtacttactatgccagcctgatgtacttactattttgtcctttacaaaaacgtttgccaactccttagatagatggtcacaggacagcaatttaaaaaccaaatgtgctttatgtgctaacaaacaaaagaaaaataacaaaaattcacctcagaagagcagcacctggagcaagagaagatacagagtcatttcctacgctgccatttctatctgggctccccgtctggttagggaagcagccctcacctttttggtctcgggatcccttcatactcttaaaaattactgacatcccaaagagtttttgttcatgtgggttatatacctattgatattttaccatgtcaggaattaaaactgagaaatttttaaaaagttaatccattaaaataagaataaacccatttcataacattttaaaggtaaaatgtactgtttttaaattaatgagatggtgacactgcttttttatttttttgcaactctctttaatatctacttgaaataaaaacagctagattctcataagttcctgcattcaa

SEQ ID NO: 810212 - DNA, 619 bp, Homo sapiens
agaacaaaatgtgtgaagtattttttcatttcctttattccattttaattatgatttctggatcaaatataaacgacttgggaaattttcctcatgaaaattttgaggtgccaaagttgacatstgcttttaattcatcctcaaaaattatgaaaaattccaaataggaatttttcttcgcaggcatcttggcttaaatagacttagttaaatactaaataaaatacttaaatacaattttgtctaatgttataaatactatgttaaaaaatttaacagactaaaatcataatttattttaatatcaattattttgccttttataatttaaattttataagtatgtgttgattgaaaaaaggatatgttcctctaaagttatttatccaacactttgtaaatattcctcaaaactataaatccatttccctgttcagttccttgaaaatgccaaataattggttttatagaaaaaaattagctgctttaataataatcattaattatagcagcactttatttggcaataatatacatttttatttatttccaaaggatattataaactttagatcagagagccaaaagcctgtatcacacagtttccattgctttatgt

SEQ ID NO: 810213 - DNA, 645 bp, Homo sapiens
taccccacatttccttctccttctcagatcccttcaacttaggagaattgctgggactcagcgaacggcagggaggctcttggtggagagttctgggcccagagacttyctttcaggtaaagctctagctgcacacgaagctgccagccccaggggaggccctggatttctactgccaagtccctcagggttgcctttaactgtacccaaaccagaagtggcagaattgggcctgaggctgctgagtttctttaggcagcaatgttttgcaaaggcggcttcccttttctcatggcagcagatggagtttgtgcaaggtcagcgggctgaggtgctctggtcaaggctttgggaacagtgtctcctgacttgtcaagtcatccttcctcaggcaggcagcttgggcctctagagcagatccaggacaggcaattcatcccaatccctgctgtggtcgcagggcccttggtgggaggctgcgctgcccctccagagggcgagcttggagaggaacccagtctgaggggtggctgaggctcacggagcttctgggagctgcagatccccccagctggcagtggcttcctttttcttgtgatgcaggagttgtaagcctcctttgggactgccatgagacttcgggct

SEQ ID NO: 810214 - DNA, 645 bp, Homo sapiens
taccccacatttccttctccttctcagatcccttcaacttaggagaattgctgggactcagcgaacggcagggaggctcttggtggagagttctgggcccagagacttccttkcaggtaaagctctagctgcacacgaagctgccagccccaggggaggccctggatttctactgccaagtccctcagggttgcctttaactgtacccaaaccagaagtggcagaattgggcctgaggctgctgagtttctttaggcagcaatgttttgcaaaggcggcttcccttttctcatggcagcagatggagtttgtgcaaggtcagcgggctgaggtgctctggtcaaggctttgggaacagtgtctcctgacttgtcaagtcatccttcctcaggcaggcagcttgggcctctagagcagatccaggacaggcaattcatcccaatccctgctgtggtcgcagggcccttggtgggaggctgcgctgcccctccagagggcgagcttggagaggaacccagtctgaggggtggctgaggctcacggagcttctgggagctgcagatccccccagctggcagtggcttcctttttcttgtgatgcaggagttgtaagcctcctttgggactgccatgagacttcgggct

SEQ ID NO: 810215 - DNA, 628 bp, Homo sapiens
aacgtaataagcactttgaaggatgggttaggggagagggataggtctctcattttttcttgtatccttagtacctaacaaatgctgatgagcggataaatgattkaattaactgaacaaaagaggaatgaaatattagttagatgcagacttttgccccagttctgccatgtattggcctgtagagacataagctttgacctacatcctctgtgggtctataaaattatgtcgatgaatagatggtccctaccaagttttattatactctcttaggagatgtcttcataatctatctgagggttgtatttagaaattattctgtagtttaaggaaaaattcttccctttggaaaatactgactgcgtccttactttcatataactgaaaaagaaaaattgaaggagtaattttatatctaattgttagatttatttatcttctggctataattattataaagttaatattttcctgttaggaaaaaaattatacaactcaacaaatatttgctatgcatttattttcttggtgtatgactctgctaagggacatgggtcatttaaatatatttgtattttgtccacatcttcaataaactaacattagttaacaattaaaggctggg

SEQ ID NO: 810216 - DNA, 370 bp, Homo sapiens
ttattcaagttatgaaactgtattcaagtcatgagtcttttgtatagtgctcttttggttagcattgtaggagtatctcagcaactgtaagtataatatgctttacaaaaacaaattccaaaaataaataagtttgaaccagtagttgtcaatgtgcatggtgtaagtatacaattatagtatttgtcatctcagaattaaagattgatatattaagatgccaaatttgacaatgtcatcttaaatatttattttgtgattacatttttcattaattgatgccataatacttcatttgctgtcaggactgcaaatgtatacgtcagatttctattakataatttctgtcttaatcataaggaggtaaaat

SEQ ID NO: 810217 - DNA, 526 bp, Homo sapiens
ctaagtggtaaataattatttactcaatttttatctgatgtctctgctgaatctaccctactttaaaaaataaaatacataaaattatatagaaaatcctactctttgctacaacattgccattcaaaagaacaaagaacattggttcaactctgacggttttttctaaaaaagtattttttactaagatatccaagtgtattgtaatacatacacagacacatatactaacagatagcagacaaatcagagtatctgatgccaagtttttatagtccaaaataaaatggtgattactacacaccaacactgaaggaaaacatattgcttgaaattttctaaaaggttataatgacttttatctttacaacaaattgaataaagagtctcaacccaattayaggaaacaaactcctaccaatagttttagacgatcctaattgtaagtgagagaccttagatttaacataatatccaacctaattatatttcaaacacattagaagacataacattctacaggaag

SEQ ID NO: 810218 - DNA, 452 bp, Homo sapiens
acatctatttatcaatcccagagtcagtatgaacatttaattaaatcagataattgatgcccaacactgagtctggctaacagtaagtaataaatacttggtagttctcttctgcstttacatatatcatctcagttccctctcacaatgaaagagggagatgtggtattaaattggggtgaccccaaacaggccgcgatgggttagattggggcctaggtccctctgtggaggagactgtgcttctagggagccctaccctcactgtctacagaggtcagctgagcacaggcttccaggatggatggttgaagtatggcctgattttttacctgagacttcacagcttataaagaacacctacacacacacttgttacctaacaacagcccacagtggtagggaaggtagttgttattcctattttgcaggctagtgagaggtgaagccag

SEQ ID NO: 810219 - DNA, 452 bp, Homo sapiens
acatctatttatcaatcccagagtcagtatgaacatttaattaaatcagataattgatgcccaacactgagtctggctaacagtaagtaataaatacttggtagttctcttctgcctttacatatatcatctcagttccctctcacaatgaaagagggagatgtggtattaaattggggtgaccccaaacaggccgcgatgggttagattggggcctaggtccctctgtggaggagactgtgcttctagggagccctaccctcactgtctacagaggtcagctgagcacaggcttccaggatggatggttgaagtatggcctgattttttacctgagmcttcacagcttataaagaacacctacacacacacttgttacctaacaacagcccacagtggtagggaaggtagttgttattcctattttgcaggctagtgagaggtgaagccag

SEQ ID NO: 810220 - DNA, 617 bp, Homo sapiens
tctgtgtatactccatgtctaacagagtgcttatgagatatctagtaattgatgaacagaataaagggaggtatctagaataccttccaggtttctactggggataactggggtgatatggcacccttcagaaaaatgggacacaggagagagagcagatttggaaagacagaagatgagttaaggggacatctggagttttatgttcctataggatatccaagtggaggagcccagtaggcagctgggtatgtgaatctggagttcagagtggtctgggctagggcgatatggatgcgggaactgtcagcactgaagccatgattacggcagaagttactcaggaaaggacctagaaagaatagagaagacccaaggaaagagttgtgagcattacttataagcagtgagtagaggcagaggaacccgcccaagaaggaaacttgagaaaagggctgctggcgggactgaaggagaacctggagggacagacgtcaaggatgccaaggagaatgtgtttcaaagaggagacatgggcaaccacatcaaataaacacagcaatgcagtgaagggcagacasagtctctgctctcatgaaacatatacattccggtag

SEQ ID NO: 810221 - DNA, 479 bp, Homo sapiens
gagacagtgtccagggacccagggatccacactcaggcctcatccccgagggctcagccgtgcggttgctgccsgcagccaggcctcgacccacccccgcccagatcccaacctcaaaaagtggccgcttctgtccagctccccgctccaggagccccctaccttcaagactggcgtgccctctgggggaggaggggtccgtggggacaaactcccaatggccacagcccctggcctcgcaggaggggtctgacctggcgccggcagctgacaggaaaacgtccggcccactgtcagaccgcagcccggggtggggaggggacatttctgcaacacttccccagcagccgaggccgccgcctcccctgcccgcccgcagaggacaggatgtaaccgggagggaacagcctggacagagaccaggaggtgggatctgaaagtcaatagccccagggctgacagccgggtgggggcagtgg

SEQ ID NO: 810222 - DNA, 655 bp, Homo sapiens
cgtggggggcctgccgagccttcaagggcaggctactccacagcctcagccggaggccgcccctgagcccagcgaggggagaaaagccgtgtgtgtgtcccccgggctgccagaggggacctggacagaaccctctcctcccagcccaccttcagggaaatgctcgaggccgggtgcggtggctcacgcctgtcatcccagcactttgggaggccgaggcaggaggatcacctgaggtcaggagttcgagacctgcctgaccaacatggtgaaaccctgtctctactgaaaatacaagtatgagccaggcgtggcggcgggtgcctgtaattcccactactcgggaggctgagctctcatacctacgtgctcctcagtgacggggacggtggggagggcctggattttctctttatctgccggtggggggcctgtgttttcaaactgattgaggagctgaaagacaagaggcgagagtgccgggagctcctcgggggcccggcccggggctctgaaacgcgaggctgcaggacctgcaaaagcaccgaggccgcgtttgtcctgggccctgggccccttggagcccgcccsgggtcggagatcactgtggagcccacgcggcccccccgctcctgggtcccctgacggtggaatg

SEQ ID NO: 810223 - DNA, 655 bp, Homo sapiens
cgtggggggcctgccgagccttcaagggcaggctactccacagcctcagccggaggccgcccctgagcccagcgaggggagaaaagccgtgtgtgtgtcccccgggctgccagaggggacctggacagaaccctctcctcccagcccaccttcagggaaatgctcgaggccgggtgcggtggctcacgcctgtcatcccagcactttgggaggccgaggcaggaggatcacctgaggtcaggagttcgagacctgcctgaccaacatggtgaaaccctgtctctactgaaaatacaagtatgagccaggcgtggcggcgggtgcctgtaattcccactactcgggaggctgagctctcatacctacgtgctcctcagtgacggggacggtggggagggcctggattttctctttatctgccggtggggggcctgtgttttcaaactgattgaggagctgaaagacaagaggcgagagtgccgggagctcctcgggggcccggcccggggctctgaaacgcgaggctgcaggacctgcaaaagcaccgaggccgcgtttgtcctgggccctgggccccttggagcccgcccggggtcggagatcactgtggagcccacgcrgcccccccgctcctgggtcccctgacggtggaatg

SEQ ID NO: 810224 - DNA, 613 bp, Homo sapiens
ctgttctctacaaatggaataacaaaacctacatgacagcatatctgctttcagcatggtttactgaatattttaagccgacttttgagacctactgctcaraaaaaaagattcctttcaaaatattcccaagttttatctcatgataaaacttgagtggataaggagttgcttcttatgaataaacaaagagagtggtttcttaacatggaatctactccatcttgagatggagtctgctgtgaacattgttgacattgacaacaaaggttttagaataatatataaattttgttaacaaagcagcaacaggatttgagaggattgagtccaattttgaaagacatcgtactgtagggaaaatgttgtcaaacagcacacatgctacaaagaaatctttcatgaaaagaagagtcaattgacacagcagacttcattgttgtgtcattttaagaaactgccacagtccagtcacaagaattgcttgaaccctgggtgtggaggttgcagggagccgagatcgtgccactgcactccagcctgggagatggagcaagactctgtctaaaaaaaaaaaaaaaaaagaaaagaaaagaaaaaaggaactgccaca

SEQ ID NO: 810225 - DNA, 613 bp, Homo sapiens
ctgttctctacaaatggaataacaaaacctacatgacagcatatctgctttcagcatggtttactgaatattttaagccgacttttgagacctactgctcagaaaaaaagattcctttcaaaatattcccaagttttatctcatgataaaacttgagtggataaggagttgcttcttatgaataaacaaagagagtggtttcttaacatggaatctactccatcttgagatggagtctgctgtgaacattgttgacattgacaacaaaggttttagaataatatataaattttgttaacaaagcagcaacaggatttgagaggattgagtccaattttgaaagacatcgtactgtagggaaaatgttgtcaaacagcacacatgctacaaagaaatctttcatgaaaagaagagtcaattgacacagcagacttcattgttgtgtcattttaagaaactgccacagtccagtcacaagaattgcttgaaccctgggtgyggaggttgcagggagccgagatcgtgccactgcactccagcctgggagatggagcaagactctgtctaaaaaaaaaaaaaaaaaagaaaagaaaagaaaaaaggaactgccaca

SEQ ID NO: 810226 - DNA, 623 bp, Homo sapiens
atatagtttcttgattaatgtctataaactataggatctatatctagtttttctctcagttgaataacctatgctcacaaagctggctggaacataataaatattgtcaaataagaaagagaaagtcatctgacttcgtaaaataatggcaatgttctggatctttagatagccaagaaaccttagaaatcattaaattatatataattgttttatagattagaaagcaacaggccgggtgcggtggctcacgcctgtaatcccagcactttgggaggctgaggcgggcggatcatgaggtcaggagatctagaccatcctggctaacacggtgaaaccccgtctctactaaaaatacaaaaaaattagccgggtgtggtggcaggcgcctgtagtcccaactactcgggaggctgaggcaggagagtggcttgaacccgggaggcgcagcttgcagtgagtggagttcgcgccactgcactccagcctgggcgacagagcaagactccgtctcaaaaamaaaaaacaaaagaaagcaacatttttgctgttgctgtcatttgtattaacttcgttaaattatgcttgtcttattgtacatcatctatcagtaattaggatag

SEQ ID NO: 810227 - DNA, 623 bp, Homo sapiens
atatagtttcttgattaatgtctataaactataggatctatatctagtttttctctcagttgaataacctatgctcacaaagctggctggaacataataaatattgtcaaataagaaagagaaagtcatctgacttcgtaaaataatggcaatgttctggatctttagatagccaagaaaccttagaaatcattaaattatatataattgttttatagattagaaagcaacaggccgggtgcggtggctcacgcctgtaatcccagcactttgggaggctgaggcgggcggatcatgaggtcaggagatctagaccatcctggctaacacggtgaaaccccgtctctactaaaaatacaaaaaaattagccgggtgtggtggcaggcgcctgtagtcccaactactcgggaggctgaggcaggagagtggcttgaacccgggaggcgcagcttgcagtgagtggagttcgcgccactgcactccagcctgggcgacagagcaagactccgtctcaaaaacaaaaaacaaaagaaagcaacatktttgctgttgctgtcatttgtattaacttcgttaaattatgcttgtcttattgtacatcatctatcagtaattaggatag

SEQ ID NO: 810228 - DNA, 623 bp, Homo sapiens
atatagtttcttgattaatgtctataaactataggatctatatctagtttttctctcagttgaataacctatgctcacaaagctggctggaacataataaatattgtcaaataagaaagagaaagtcatctgacttcgtaaaataatggcaatgttctggatctttagatagccaagaaaccttagaaatcattaaattatatataattgttttatagattagaaagcaacaggccgggtgcggtggctcacgcctgtaatcccagcactttgggaggctgaggcgggcggatcatgaggtcaggagatctagaccatcctggctaacacggtgaaaccccgtctctactaaaaatacaaaaaaattagccgggtgtggtggcaggcgcctgtagtcccaactactcgggaggctgaggcaggagagtggcttgaacccgggaggcgcagcttgcagtgagtggagttcgcgccactgcactccagcctgggcgacagagcaagactccgtctcaaaaacaaaaaacaaaagaaagcaacatttttgctgttgctgtcatttgtattaacttcrttaaattatgcttgtcttattgtacatcatctatcagtaattaggatag

SEQ ID NO: 810229 - DNA, 615 bp, Homo sapiens
acaatcaaaaaattttattacaccatcatccacaaacagttatcacatgctggtgctcactttacacatatgccattttggctgatgcactcaccccatggaacctattgtttrccaacagggcctaagaatccgtatctttttttgaggattaactctataaagcagatcttgtcccttcttaccatgtgtacatgggaattatcaaccttaaacctgtatctttttctgagaccctattgggaataagatagctccttctgtttcagtttacagagagaaacctgacattggcagtcattcttcagaaacaatagctttatcctgatatctggttttttcctaaggacaaataagcaggtacaggcttaccttaaagggcaaaatggagaaaacaaataaaaaccaaagaagaaaaatctatcgtcttcagttatctatggatatttgacttatccagttgttaacaattggcttttaggttcctaatacagctcctagaattacagttttagtctgtgctttttatttgcactgaagtgaatttatctgtgtcatattgagttgaaaactctgaagacacaagaaattggttctcaaacctactagtttact

SEQ ID NO: 810230 - DNA, 638 bp, Homo sapiens
atactttcatgtagattaattacaaatgatctcagtaaaaagtagttggaaatagactggttagatattgtcattatatgcacaaaataatcattttagtattagaatagttmtcttgaaacatttttctaacaatattttgtagtgagacacgttgaagctatgtatagtaagtgacaacaaaatcatatcattggtatgaagaaaaacaccaaatattctttcctcagagtaaaagaacaggaacccaaatcttccaggagcagctgtgagtcattaacatacaagtttaagagaaatgggttataacgtacctttgttttataccactggcaattgttaacttgtcttcaggtgaccatttatatagactttgatcttagcatattaaaatgtgggctcagtttgagcaagtataatcaggggaatatatcttttatagtattttgatttcagttggatacagtaaaattcaaaaatgcttaacaccacatttaatattgtcaaggaaacttacaaatttgaaaggtcagaaggtttgtaaattagtaagggaggttcttataaattgatagtaaaaacagtaataagagtaatattaatataataagaatacattttaacattcaatattaatt

SEQ ID NO: 810231 - DNA, 638 bp, Homo sapiens
atactttcatgtagattaattacaaatgatctcagtaaaaagtagttggaaatagactggttagatattgtcattatatgcacaaaataatcattttagtattagaatagttctcttgaamcatttttctaacaatattttgtagtgagacacgttgaagctatgtatagtaagtgacaacaaaatcatatcattggtatgaagaaaaacaccaaatattctttcctcagagtaaaagaacaggaacccaaatcttccaggagcagctgtgagtcattaacatacaagtttaagagaaatgggttataacgtacctttgttttataccactggcaattgttaacttgtcttcaggtgaccatttatatagactttgatcttagcatattaaaatgtgggctcagtttgagcaagtataatcaggggaatatatcttttatagtattttgatttcagttggatacagtaaaattcaaaaatgcttaacaccacatttaatattgtcaaggaaacttacaaatttgaaaggtcagaaggtttgtaaattagtaagggaggttcttataaattgatagtaaaaacagtaataagagtaatattaatataataagaatacattttaacattcaatattaatt

SEQ ID NO: 810232 - DNA, 468 bp, Homo sapiens
atattcagtttttcactgtaggcctcaaaggactcagaaatatcccttcgtgaattctacaaaaaaagggtttccaatctggtgaataaaaataacagtgtgacttggtgaggtaaatgcacacatcaaaaagtatttttgcagatagcttgttcccacttttcatcacaggatatttggattttcctgtaggcctcattgcgctcagaaatgtccctttatagagtgtacaataaaagtgtttccagcctgatgaatcaaaacacaggttccattcagtgacatgaatctacacatcagaaagtattttcaccaataatttgtttctagttttcattgcaaaatattctgtttttcagtactggcaycaatggtctcaaaaatgtcccttcattgatcctacaaaaaaagtgtttccaatctggtgaatcaaaaccatggtttaactcttttagataaatccatgca

SEQ ID NO: 810233 - DNA, 612 bp, Homo sapiens
ctgatggacatttcattaagggcttctggtaaattttgaaaagaaatagacactttgactccatggatattatataaagaacaaatgttgtagttaaaattaattttaatgtttatrtttattggaatgtttacttctaaacaactgtagcattagggtggttattttacaattattacttgataaatttcccaaagcaccttagtgaaagtggaagacaatataattagggtgaagtactagaatgaacacgagggagaggctcttagaatacctactcagaagagaggccaacagatgactagaaaagactctctggagataagagaaaagatgacaaagaggcaaagagaaccaaccaaaaaaaattattttttccttgagttaattggtaaatattagtaatgtgaagccaagggtagagagactgggctaagtattaataattattgtaaaagtgacatttattagatgcttactacatgccaggactctgctgacatttacatgcattaactcattgaaacatcagaaaaacctcatgatatttattatattcttattattttacaaataaggaaacatcacatcttcccttcatagaccctcatt

SEQ ID NO: 810234 - DNA, 515 bp, Homo sapiens
ttctgtgggtcaggaacctgggcatatcttaactgagccctttgctttagggtctctcaccaggctgcaatcaaggtgtcagccayggctggggtctcatctgaaatcttgactgaggaaggatctgcttccaagctggcatagttgttggcagtactcagttcctacaggacttgttgaggtaagggtctgagttcctagctagctgttggctggaggatgccctcagttccttgcatgtgccaatatggcaacatgtttcatcaaagtcaccaaagggaagagtatggtaagcaaaagggcaggtcattatcttatttagcctaatcacagaagtgatatcccatcatgttttccatattcaattggttagaaaaaaaaacctaggctggcccaatttcaatgtacaagggcatgaacaacaggaggcaggattattagggcatcttagaatttgtctgccacagtagatttttttttttttttgagacagagttttgctcttgtcaaccagg

SEQ ID NO: 810235 - DNA, 606 bp, Homo sapiens
attgctaagcttaattttccatgcatatatgatggaagatgataatgctgtacaggtaactgcaagaattaaatcagattacatatgttaaactttgcatcacagaataggagctaaatgttttagctgttttgatagaagaggaagagcaatcttcagttttaatttattcattttttaaaaaattgccacatataaactgctttaagaggaaagtatatgagaaatttataaaaatgtatttttatatgagaaaaattaatttctcatataaatttataatttcaaattttaatttattaaaaagtcactcagacttttataaattaaattttaaaatgtagctttatttattttttcaaatatcagaatattatcattcaccatttttatgcatttccaaaatttataatgaggactttttcttcttttggatttgaatctctcatttacttcagtaccattcagacttcaacttctgttcaagactgaaaaaaactgtaatgcaattatgagtaggccatttcttccttctttctcctctactccaacttaastacctagaatcctcacataatctccaatctttctcacatctattttact

SEQ ID NO: 810236 - DNA, 606 bp, Homo sapiens
catgagtgtggctggccatgggcactgggctcgccttgcacgcccaccaggagggccaggggcatacgcagtcctgacgtggactttgtgtcttggcgtaccctctccacgtgcccgtccccctcgtcatcagaggtaaaggcatgagaaaatcgcgctgtgaaacgttttttaccttttattattattttttggacagatgcttttgtcaccaagacatgaaaagctgccattcttcttaacctgttttttaggaatgtctttttactgtgtgtcacacttagatcaaggagttttcagaggttccttattttattaattaattatttgtgctgcttttgacaggtagcagagggttttaatacttcactaacagtacaccctcctcccccttgggctagcatccccagcccttaatccacgtcggagccggcaggtgcttctcacaccaggagcctctgggggcaggggctggctcctcgccgctgtacaggacgtttactgctgcttggggccagggcagtcctttgaaagggaagcaagttccggaatttgttcsctcatggaactataacaccttagagcaagaggcaggaattccagggc

SEQ ID NO: 810237 - DNA, 587 bp, Homo sapiens
cagaggggagtattgttcctgccctgagccccagcagatgaaaattcttagagcaaaatgaacacatgctgagtgagggcttctcattgctaagagaattgttctgttactcaagagatgcccaatcttttccctgttctcaagtctgaggtcagagcgagccatcaacgtggtatcgaagcttgtagctctgctgggcagttcatgaacctgctgatattcacagcagccaacgcgaaggctgcacctctgttcactcaatattagggctctcctcacacccactgccagcaatttctactatttctttaatatggatcaatgcaaacactgctttacttaaggctgggggactgtgagggtttttctttttcttgtcatatgtgatcatctttattgccctgaagatgtattacaaattaaagatacattctgatccattctttaagcccctgttcgaacattcctcctccaggaagtcytccctgattgcccacccaaaggtgtcttctctgccctactaagtttctaaaaggcaatcctgggctcagatcaatttctcaccatgctgggaagcagaagaagtg

SEQ ID NO: 810238 - DNA, 637 bp, Homo sapiens
ccaccaccacctcgctcagctcccacagcacagccaagtgggcacggtcccttgagggggcaccaaggagagggcgatgacggggtccagcatcccggcccccagccccgggaggctcctcctcagccagcccaggggttccgggtcccacttgctccaagtgggcactcacctccaggtgggtcgagcagaccccagccccacagaccaggcgactggcacccatatatcttaccttgctctcctttgtgtaggcgaggaccttgtcctcctccttagggtggaaaatcagagtttccacgaagaagggaatgggctgcttctgaaaggtggcgccttcgtctgcgctgaggaataggctctggtcccggtcactgagtgaggagctgacaaggatgacctgaaacacaaagcgggttgtgaggcctgggccaggtgcccctctcccccgacaccagaaaggtgttgtgaggcctgggccaggtgcgcctctctccctcacaccagaaagggggttgtgaggcctgggccgggtgtgcctctcccctkcacctcctgataccagggaggagtgcccagaaatggcgggcccgcccccagcccggccagctcagcctaactatagccatccattcat

SEQ ID NO: 810239 - DNA, 587 bp, Homo sapiens
cacccaagaatgatcaataaatactaaaaaaacaaacaaacaaacaaaaaacaaagctatgttaaacttttttttttttttttttttttttgagagagtcttgctttgtcgcccaggctagagtgcagtggygtgatctcagctcgctgcaacctgtggctccttagctaaagcaatcctcccacctcagcctcctgagtagctgggactacgggcatgcagcaccatacccagctaaacatatgaggttaaaatgtagagagtataataatgaccctgcttttttgaatagctcactatctagtgaaaaacaaccttaaaagagttctacaaatgtttaagttgcactactactgtttgaataaagatattgcttgataacttaaaaaaaaaaatgaggtttaatttggggagtttaaaaaaagatacaactaaaatcctaggcaaaacagcatctaaatcaaagctggttttttggagttaaaatatcctaagggaggcctttgcattatttaagaggaagataaagatacttattcactccaaacttcattaagcagtctattaaaacttctaggataaaacta

SEQ ID NO: 810240 - DNA, 587 bp, Homo sapiens
cacccaagaatgatcaataaatactaaaaaaacaaacaaacaaacaaaaaacaaagctatgttaaacttttttttttttttttttttttttgagagagtcttgctttgtcgcccaggctagagtgcagtggtgtgatctcagctcgctgcaacctgtggctccttagctaaagcaatcctcccacctcagcctcctgagtagctgggactacgggcatgcagcaccatacccagctaaacatatgaggttaaaatgtagagagtataataatgaccctgcttttttgaatagctcactatctagtgaaaaacaaccttaaaagagttctacaaatgtttaagttgcactactactgtttgaataaagatattgcttgataacttaaaaaaaaaaatgaggtttaatttggggagtttaaaaaaagatacaactaaaatcctaggcaaaacagcatctaaatcaaarctggttttttggagttaaaatatcctaagggaggcctttgcattatttaagaggaagataaagatacttattcactccaaacttcattaagcagtctattaaaacttctaggataaaacta

SEQ ID NO: 810241 - DNA, 591 bp, Homo sapiens
tttcttttggtgtttttacagattcaggtcttacgtttgtctttaatmcactctgagctggattttgtagagggtgtaagaatctaattgcattcttctgcatgtggatattcagtttcccaacaatatttatgggagatattctcttttctccattgtgtcttcttgacagctttattgaaaatcaattgaccgtacatgtatggatttatttctgggctctattctgttccatgggtctgtgtctgtttttatgccagtactgtgctatttggattactgtaactttgtaacgcattgtgaagtcagggagtgtgacgcttccagcttttttctttttgctcaaaatggctttggctatttcaggccttttgtagttccatacaaattttaggatttttttttctatttctgtgaaaaacatcattgaaattttgatagaccttgcattaaatctgtagatcactttaggtagtatggacatcttaataatataaattcttctaatccaggaacacagggtatctttccgtcgatttgtgtcttcttcaaattcttgtactggtgttttatggtttttagtgcacaagc

SEQ ID NO: 810242 - DNA, 585 bp, Homo sapiens
aactgttggtgtagtaagaggaaagttttaagtattttatgctgaagtaggggaaaacacttcatgttgcctgtgtgccagctaacaatgacaagaattgctgtaatcttagcttttcctttctcccagttgccatcttgcttgggcttcaaatagtctgaaaactttctataacaatggcagaattatgcagacttccatgttatggaaagtgtctttaggatgtcattttttacataaccaggctgtaaaagtagaatattttcagggaagcatctacaaaataagtcattggcattattcatattcaatgtagtgtaaaatctaaacacttttacattgcaagtggtgatgaaattttttataacctctggggagggcaatttggcagtatctatctgaattacaataacgatatctcttgacctaacatttccatgtctggaagtttgtcctacaaatagacttgcacatatatagaatgacgtgtacacaagattatacactgcaacatatgattggaaataacatagatgtccaatgataggagactgatmtatcaaatataatacatgaacaaagtgg

SEQ ID NO: 810243 - DNA, 562 bp, Homo sapiens
tgtaaatcttttgttatttctttcatctgtgcttgaagtttttagcatacaactcctaaacattttttttagatttacagccagatatttccatattttgagagattataaattaaattgtgttttaattttggttttcacatattcatagtttattaaaaatatttaattttttgtgttaatcttgtatcctgtcactttactgaactcatgtattagctataggaatttttatgtggaatccagggagttttctacatagataatgacatctgaaaataagtacatttgtatttattacttttcaatatatgtgccatttatttctttttcttgcctactacaagtggtgagagcagacatccacgctttattcctaatcttagaaggaaagcatttacctggaagatttttatggatgatctttattgagttgacacaatttctctctattcctagcttgctgagagtttttatcataaaygggtgttggattttatcaaatttgttttttgcctcaattaatacgatcatataatttttcttctctattctatttata

SEQ ID NO: 810244 - DNA, 578 bp, Homo sapiens
tcctctcttattctctttttttctgtaaaagtttatatgacatataaagtacaacacacayacagaaaagtggataaatcctgagtctcaataaattttcacaaaatgacatatctgtataaccaacacacccacatgaagaaacagcttcatccatattacttaatatagctgtagttcattttgactccttcacaatgtttcattttgttgatggacatttatatagttgtcagtttttgataaaaaatattgctgctatgaacatttttatatattttggtatgtgcaccttctattggctatatacctaggaatggaatttctggcttattcatatatgcgtatgtttagcttgaggatactgccagattgttttccaaaatcactatgctgattaaactccctggaggagtatatgagtgctcagggtgctctacatccttgttgacacttggtgttttccatcacttttttattttaactgttctagttattgtgcagtggcactgcattgtggttttgttgctgggggctcaggaaggtctccagatgcaggtgagaacccagccccaggg

SEQ ID NO: 810245 - DNA, 575 bp, Homo sapiens
agcagcgtgagaacggactaatacaacatgtgatagctgatgatcccagaaacaaagtctagagaaattgggtgaggatgccagtcttgtgtgtttttggtcattgacaargtaaaataaaatttcttaaaacgttttcctacttttgctatagaagcttgatttgtgaaatagtgtttggagagttgtagtataaatatcaatgcagagtgaattaaaaaacagaagaaatggataaaccagatttacaatcattaagtaaatcaaaattggtagttaaaaaaatttagcatgaccaggcccagatgatttaacaggcaaattgaacaattgaaaaataggcagcaggtagatttttctggatttacagagtgtatccaccccagcatatccacttctctgagccttctcacctctgtctttcgtggggagttgtcactttttccatacttacaggagcttaccttgaatctgatttgaactatcttctggaatccctgttaggctgttaaatcctgtatcctgtgaggatcctcctgcattgataataaacctctctcatctaaccttaggtt

SEQ ID NO: 810246 - DNA, 495 bp, Homo sapiens
atgtgtgatgtgctctctttggtcccatcgcttcctattgtgattcctccaccctgggcacttgctstcatcctgttctgccggctgctgcctcactcaacaaaacctgtcgacttcgactaaggtcaagattcatgggtcgaccttagtaccacctgccattggccccacgaccatgccctgtgccaccacccaggccccagagcccagggcacagcaggttcaccctgaggacatctgaacaggtcttttttcacaagaggacagaagaaaggatagcgacactgagctccaatgccgtgaagaggagcatcacagacaggatcctctgaaatgcaggatgcacgaggtctgtgctggactggccaacccttctgccttcctgagatgaccagatgggtttagacagtgtcatctgctggctcctcttccctcgtacctgactcaacctgctcatgatctgggagacagtgtcatatcctagtatcctgggcc

SEQ ID NO: 810247 - DNA, 639 bp, Homo sapiens
gaagaggagcatcacagacaggatcctctgaaatgcaggatgcacgaggtctgtgctggactggccaacccttctgccttcctgagatgaccagatgggtttagacagtgtcatctgctggctcctcttccctcgtacctgactcaacctgctcatgatctgggagacagtgtcatatcctagtatcctgggccactccagggacagcagtacaggtggcaggtgacacccaaggttgagctgagcctcctgactcttcattcatctggcctccagggagagtctccgcctgtctgggtttcaatttcatcttctgtaagatggggacttcccactcaccccttagggcggtttgcaggtccacagaggtggtgaggcagaaggccttcctttgtaaactgagcgccagcacctgctacccacctatgctccctggggtgggcctgcttggcttggctgggaggcagcaaggggcaccttgaccaatcaaagtgatgtgctggcacagttgctaattctcacgccagtccycaggagctatctgcctgaggaggagaacaattctgcttccctgggtcaccttccatggaacaatgacttccaagtagaacaggtaaggccacaggtgggcagaatcta

SEQ ID NO: 810248 - DNA, 647 bp, Homo sapiens
aggttcctatgtctccctgagctcttggcctttcttgagcaattcgctaccctgaccctagagttcttgcttggaaaaacccatcccttgagactatgacagttaaatcagtttgtttattaagktgctcaaattgaaaccaagttgttggttatgtctttttgcaactacagtcttgcttgatattgtacttgaacaactcttttggcacagtccagtcaaatgcctgctattctcccatgtgtgggttcctgtgttctgcctctttccgcatggtccacatcagaaggaagcagtgaacaagaagcagaaaatctcaaagacttcactagtctggaagattctacctaaaaatactcaccagtaagctggagctggccacaaagcagctggtggtctcattcttcgaaaagtagtggctgtcttggggcactgatgggcaggcaccaccagttggcactgtctggcagctgggaacaccccggctaggtgatagggaaggacaatgaggcccactgtggcagccatggggcttaggaggctgctgatcaggctgttccaggcctgcaggggatctggtcagggtctgctcctgagcagttcatgctcctggggcaccacgatcccaccaggccagcagcaggttc

SEQ ID NO: 810249 - DNA, 521 bp, Homo sapiens
actcacaaactggggaatggagggatcaggctgacaatacctgaatcttccatcaaatctaccatcactaatagtgggatgagatcatatacctctaaatgtgataccataggtacacagcactgcttttgaagtattctccttaaaaaattgaacccagccgggagcggtggcttacgcctgcaatcccagcactttgggaggccgaaacgggcgagtcacctgaggtcaggagtttgagaccagcctggtccaacattgtgaaaccccgtttctactaaaaatacaaaaattagcctggcatagcggcgggcacctgtaatcttagctactcaggagactgaggcaggagaatcacttgaacccaggaggcagaggttgcagtgacccgagatygcgccactgcactccagcctggatgacagcgagactccatctcaaaaacaaacaaacaaaaaccccaaatctgataaagccttttaagtaaataaaaataaaagctaaggaatgattatcacaga

SEQ ID NO: 810250 - DNA, 521 bp, Homo sapiens
actcacaaactggggaatggagggatcaggctgacaatacctgaatcttccatcaaatctaccatcactaatagtgggatgagatcatatacctctaaatgtgataccataggtacacagcactgcttttgaagtattctccttaaaaaattgaacccagccgggagcggtggcttacgcctgcaatcccagcactttgggaggccgaaacgggcgagtcacctgaggtcaggagtttgagaccagcctggtccaacattgtgaaaccccgtttctactaaaaatacaaaaattagcctggcatagcggcgggcacctgtaatcttagctactcaggagactgaggcaggagaatcacttgaacccaggaggcagaggttgcagtgacccgagatcgcrccactgcactccagcctggatgacagcgagactccatctcaaaaacaaacaaacaaaaaccccaaatctgataaagccttttaagtaaataaaaataaaagctaaggaatgattatcacaga

SEQ ID NO: 810251 - DNA, 652 bp, Homo sapiens
gtagaaactagagaacattacctaatccctggtttccataacaaccattgagcaccaccagcactgggggtgacactgacaggtcctcacaggacaagtactgttgccccaagtaagggcctgcagtggaagggatgcagagctttagcagcaggaacctgaaacctgaaacctcaccaccaggcacagcatataatctgccacttcatgagaagtttaacttaatcattgatccacaattgtgacacacttttaaccaaagcctaaagggaaatgaaggcctcattacaggttcaacacagtttacaaacatcagccacaaagacccagacttatcttagggattgcttttggcctggcgggattgaagatggggatgcattggagctctgcagagaacaatatgaccctctgtcaccctgaaggaaacagaagttccataccaggcatcatagaatctgattttgcccacacatactgcaggctcctgaaggagaaagttctcaccggtacaaaccctaaaagtyagttttcaggaacaaatagctctgtttactacagtgaaatttttgaatcaaaaagcaaatttataatgtctaataacaacataagtgggtagtaggatctttggaagttttggaatactgtagca

SEQ ID NO: 810252 - DNA, 652 bp, Homo sapiens
gtagaaactagagaacattacctaatccctggtttccataacaaccattgagcaccaccagcactgggggtgacactgacaggtcctcacaggacaagtactgttgccccaagtaagggcctgcagtggaagggatgcagagctttagcagcaggaacctgaaacctgaaacctcaccaccaggcacagcatataatctgccacttcatgagaagtttaacttaatcattgatccacaattgtgacacacttttaaccaaagcctaaagggaaatgaaggcctcattacaggttcaacacagtttacaaacatcagccacaaagacccagacttatcttagggattgcttttggcctggcgggattgaagatggggatgcattggagctctgcagagaacaatatgaccctctgtcaccctgaaggaaacagaagttccataccaggcatcatagaatctgattttgcccacacatactgcaggctcctgaaggagaaagttctcaccggtacaaaccctaaaagttagttttcaggaacaaatagctctgtttactacwgtgaaatttttgaatcaaaaagcaaatttataatgtctaataacaacataagtgggtagtaggatctttggaagttttggaatactgtagca

SEQ ID NO: 810253 - DNA, 611 bp, Homo sapiens
aatttcacttctgggtatttatagcccatatacttcccatgttctttgcagcactattcacaataaccaagatttaaaaaaccctaaatgttcactgatggatgaataaagaaaatgtggtatatacatacaatgcaatattattcagccttaaaaagaaggaaattctgccattggtaacaacatggatggaccttgagaacattatgctaagtgaatatgccagatacatactgtgcgacctcacttatatgtggaatctaaaacagtcaaacttacataaacagagtagaatggtggttgccagggactggtggggacggggaatggagggttgatggtcaaagttacaaagtttcagttatgcaagataaagaagttctagagacctactatatagcataatgcctatagctaaaaacactgtattgtatacttcaaatttactaaaagaatagatctttggctaagtgttcttatcacacacacaaamtaataacaataaagagggtgtgtggaaagtttggaaagtgatagacgtgtttttgctgtgatgatggtttcagaggtgtatactcatctacaaactcattaattggtatacattaaat

SEQ ID NO: 810254 - DNA, 629 bp, Homo sapiens
tttcttgcacgagatccaagaaccctctcttggggtctggattgggacctctttcctgtaacaggaccaccttccacaaatggacccaggttcagtgtccactctgattcactgtcccatgctgccttccctaaagcaggcactttgccactggtttcacacgtctggggtgaagaactcttcttggtttgtccggaacctttctggttttgcgtggaaagtcctgtgtcctgggaaactccacagtcccaggcatcctataccatgcttcatttgccaaaaactgtgacccaaaaaaattgtgaacaatgattttactgcaaaatgttggaaactctgtagaaagtagttgtatggtatgctgggaaaatagggaattttttttgggtatttgattttgtaacacttttctgattataaaagcattaaatacacatttggaggtacttggagagacaaaggaaagcttaaagcaatgcttttcaagctttgttatgtgtaagaatatcttgcttgaaatgtagagtcccaggctgcaacgcaagagtgtgcatcaggaagagtggagtgttgcccagaaatctggaaggtaaragaaaaggctagccactaatagtagtttaaatgag

SEQ ID NO: 810255 - DNA, 455 bp, Homo sapiens
taagatcatgtctctccccccgactcctgatcctcattcctttctttttctttttctttctttcttctttttttttttttttgagatgcagttttgctcttgttgcccaggctggagtgcaatggcgcatcggctcaccacaacctccgcctcccgggttcaagcgattctcctgcctcagcctcactgagtagctgggattacagacatgcaccaccatacccagctaattttgtatttttagtagagacagggtttctccatgttggtcaggctggtctcgaactcccgacctcaggtggttcgcctgcctcggcctcccaaagtgctgggattacaggtatgagccaccgtgcccggcaacctcattcctttctggtgctgttgtttmgccctctcattcccttcttctaacttggtaggctttgttcttgcctaattcctcttcagtgttc

SEQ ID NO: 810256 - DNA, 455 bp, Homo sapiens
taagatcatgtctctccccccgactcctgatcctcattcctttctttttctttttctttctttcttctttttttttttttttgagatgcagttttgctcttgttgcccaggctggagtgcaatggcgcatcggctcaccacaacctccgcctcccgggttcaagcgattctcctgcctcagcctcactgagtagctgggattacagacatgcaccaccatacccagctaattttgtatttttagtagagacagggtttctccatgttggtcaggctggtctcgaactcccgacctcaggtggttcgcctgcctcggcctcccaaagtgctgggattacaggtatgagccaccgtgcccggcaacctcattcctttctggtgctgttgtttcrccctctcattcccttcttctaacttggtaggctttgttcttgcctaattcctcttcagtgttc

SEQ ID NO: 810257 - DNA, 516 bp, Homo sapiens
tctggtggaaggtgtttcctttggaccctcttgtggagcatggtactggtgggccttcaccatgcccacttccctcagccttgttattccatcctgtgcaagttccagggcaactaagtyatgtctaccttgttgagagttgggcatcattttttctagtctatatggattcaccccagcagtgggtttggcccccccccttatcaaagtcctggggtgtttgataaacccatgccttgagaaagtgcctccaagccaaaggatttttattcttccagcttgaaattctggttccttgatcaaacaccctcaaattccaatcccagaagtgctcctcggcctcctatggggacgtgccagctagttcctgcaaagctcttcagtgggattcctgctgtatcatgggggtgagacttctgtagcatcttccagcataggaagtgggaaccattactagagaagggtgagcctcctatgcatgcccagaggatcctggagggcacccatcggataacc

SEQ ID NO: 810258 - DNA, 516 bp, Homo sapiens
tctggtggaaggtgtttcctttggaccctcttgtggagcatggtactggtgggccttcaccatgcccacttccctcagccttgttattccatcctgtgcaagttccagggcaactaagttaygtctaccttgttgagagttgggcatcattttttctagtctatatggattcaccccagcagtgggtttggcccccccccttatcaaagtcctggggtgtttgataaacccatgccttgagaaagtgcctccaagccaaaggatttttattcttccagcttgaaattctggttccttgatcaaacaccctcaaattccaatcccagaagtgctcctcggcctcctatggggacgtgccagctagttcctgcaaagctcttcagtgggattcctgctgtatcatgggggtgagacttctgtagcatcttccagcataggaagtgggaaccattactagagaagggtgagcctcctatgcatgcccagaggatcctggagggcacccatcggataacc

SEQ ID NO: 810259 - DNA, 469 bp, Homo sapiens
gagaagggggagagtggaaggaaccaggggggagagaaaaacgagaagggccctgttagaagttgtgtgtgcatgtgtgtgtgtgtgtgtagatcaggagggggtttctagggacctggggaaaggagagctaagggcaggtgctaaggggcccagccctgttaattccaaggtccggaattaattccaggatactgcacttcctacagtaccactttatggccatatccaagtccagccctgagcagcctatggtcacagaaaatcgtgagaataatcagagaaaaatgacacgttacatacatgagaacaattatgagaatgaccagtccatgtgttcataatttgtcatcagaaactatggtggtcagaagacaatgaaatggcatttttttgagtgctgtaagaaaacaacctaactcagaattrcacatccagtaaaaatattttcagggaagaaaaatgaaaa

SEQ ID NO: 810260 - DNA, 632 bp, Homo sapiens
gtggcttctcttgtgatatcaaatgattctcaagagatgagctgacccaagcatgggcataatttccaacagcctttatctccacrtggaaatcctccagtgcagcggcgcatggtggctcatatctgtaatcccagcactttgggagaccaaagtgggaggatcgcttgagtccatgagttcaagaccaatgtgggcaacatagtgaaatcatgtctctatttaaaaaaaaatttttttttttaattagctggatgtggtgatgtgcacctgtggtcccagctacttgggaggctgaggcagggggatagcctgagccaggagttcgaggctgtagtgagctatgattacactgctgcactccagtctgggagacagagcaaggtcccgtctctaagaataaatcaatagtcctccagtgcagcttgtctcaaactgcaaatgcacctatgaatcccctagagatctcgtggataaaatgcagattctgatccagtggggcttgggtgggatccgagactctgcatttccaacagttacagaccaggctgaggctgctgatgcacaggccacaccttaagtgttactctccatttgccccccatctccaccccagatccattatttgccct

SEQ ID NO: 810261 - DNA, 468 bp, Homo sapiens
tcacttgaggccaggagtttgagaccagcctggccaacatggtgaaacctgtctctactaaaattacaaaaattagccaggtgtagtggcacacgcctgtaatcccagctactcaggcrctgaggcaggaaaatcgcttgaatccgggaggcggagcctgcagtgatccaagatagtgccactgcactgcagcctgagtgacagagcaagatacagtcccaaaaaaaaaaaaaaaaaagaacgatgtggtcttttatttattatgattctcaattcagctttccctccggtattttgtagatccaaacacctctgacagatttgatgcaaattttagtttccccaaatgagcactcctaatattaattgtactctatgctgtcactggccaatcaagactgaggactgctcccagtcactatagggaactcaccagagaatataaaattaaatcatgaccctgaaaag

SEQ ID NO: 810262 - DNA, 591 bp, Homo sapiens
caacatggagaaaccccgtctctactaaaaatacaaaaataagctgggtgtggtaactccctgttgtcccagctactcgggaggctgaggcaggagaatcgctttaacatgggaggtggcggttgcagtgagccaagatcgcgccattgtactccagcctgggtgacagagtgagactctgtctcaaggaaaaaaaaaaaaaagtaacgtggatttaaacaatatacaactttccagtttttcctactgattgtgccttaccaggtgggtctgcctattttgtgcaaagtccttttaggaaaaatttacaacctgtagattccttgtgtggaacaaaagtttatttttttcatgtggctaaatctatctcccctttccttttttatttttttaatttttgagacaggaacttgctctgtggtgcctagactagagtgtgctgtggcatgatcatagctcaytacatcctcctggactcaagtgatcctctgtcctcagcctctcacatagctgggactacaggtgcgtgccaccatgcccagctaattattatcattattattattattattttattttttatttttttga

SEQ ID NO: 810263 - DNA, 529 bp, Homo sapiens
aagctaacttggtttaacttttcttacctttattctccctttgttctgattctttagcttacttgtttatatttactttaatatatttacatattttggtaagcactttttatatccaggtatggaataaataatttgtaagcaataggaacaaaggttttttgaatattcacaataacaacaacagcaataggatgctactaacattactatttttcagagcaccagacactaggcagagcccttttttatatattatctcatttaatccttttacaaatctataagttatctatcaagacagacatacaaaggtcatacaacttgcccaaagttacacaggacactaagcaagctgacagaacaggcactcttattttctttggcaggcaatatactctaaggttacarttatgatggttgacattttctaggagcatccattctgatgagagagatatttaaataaacaattacactgcaatatagaataattgtaattatactcagcataatgagtgcttacagg

SEQ ID NO: 810264 - DNA, 584 bp, Homo sapiens
tgggccttgtgggaggtgtttgggtcatgggagcttggttccctcatgaatggcttggtgccctccctgtggtaatgagttgctgcaggatctgattctttttttgagatggagtctcactctgtcgcccaggctggagtgtagtgccgccatctcagctcactgcaacctctgcctcctgggttcaagtgattctcctgcctcagcctccagagtagctgggattaaaggtgcacgccaccatgcctggctaaattttgtatttttagtagagatgggggtttcaccatgttggccgggctggtctcaaactcctgaccctgtgatctgcccgcctcggcctcccaaagtgctggaattgtagatgtgagccacacctggccgagatacagaaaacttttatttcatcactctttcttgcctggtgccaggcccatgcaatgccacaatcttggytcactgcaaccttcaactcccaggttcaagcgattctcctgcctcagcctcctgagtagctgggactacaggcactatgccccgctaatttttgtatttttagtagagacggggtttcagcatgttgg

SEQ ID NO: 810265 - DNA, 571 bp, Homo sapiens
acatgaaaggtaggggatgaagctatagaggttcaaagattttgcatgctattgaaactaagttggtattaattagaattagattgttaaatattattatttaaattttttgttgtagttgcagtttttgagaccaggtcttgctctgttgcttgggctggagtgcagtgttgcgattatggctcactgcagccatgaactcctggactcaagtgatcatcccacctcagcctctgagtagctgggactacaggtgcacatcaccacatctggctaatttggtgggggggtggctagatacggggtctttctttattacccaggctggtctcaaacttctgacctcaagcaatcctcctacctcagcctcccaaagtggtagggcttgagtcaccatgcccagccaaattgttcaatatccaagacaaccactaagaaaataactaaaagaaaagaaaagaagggaatcaaaagaaaaaaagagaatcaaaatggggcactagaaaatatttaacacaatagaaggcaataatgaaggarttgaggaacaaaaaaacaaaaatatataatg

SEQ ID NO: 810266 - DNA, 605 bp, Homo sapiens
tggcagcccatcgaggtacgactaagaggatggtgttgacctaggaagtgtttgtcctgggsgaatggcagaccatcgaggtacaactaaggagatggtgttgacctaggaagtgtttggcctgggcgaatggcagccatcgaggtacgactaaggggttggtgttgacctaggaagtgtttggcctgagcagggagcagggaaggaagcctagagagctgacattcagccaggcaggtccacatctcctgctacacagatacctctcctaggtaccctgaattgttctggctggaatgtatgtggaatggcctcacctgtaaatacagacacagctcctcattagaatggtagatgtctccctcctacccttaggccaggaagggcattttctggcttgttttttcccagggtagagggaaatcttgttccagttcagcaggaaggcaagatttcaggggctcaagcttggtcgccaaccgactagctcatgttgagaaaaccttatttggagaatcatcatcctgtacactgggaggagcctcaacgtggcttggtccaatctgcttcaccagtggataagaaattgaaggtcagcgagagga

SEQ ID NO: 810267 - DNA, 620 bp, Homo sapiens
tatattaatttgaaaatttaaaaatccacctataatttgcctttttagggtttatgaaatatagtaactataaccatctttgctgttaygctaataattaaagatctagactaagtatgtgtatggaaaatatgttttataaatcacatggaaaacacattctattcaccttgatttaatctttgtaggagattggtcagagtggtgggagaaactatagggaaaggatgcaaaccttctgaaagttcagaaggctctgcatagcttcaggggagaataagctgaaggcagctgttctctgatcctgaggcagagggcaaggagtaggtacaaggaggtgtaggggaatttatcgtaaacaggcttgtttacttaggttgtccagaaaccgacctttgataatctgtgcacatgactgctccctgaaaaggggaacaataatgttaattacccgcagattgtgtttgctccaggctttcggcattatgtctgtactgaataaaagcaagcagcttcagctgttcgcagctgctctcttctttggccctaagtgccggcagacccctagctgctcttacactgcacgcctgtgttgtcagtactcccttcatccgacgctc

SEQ ID NO: 810268 - DNA, 620 bp, Homo sapiens
tatattaatttgaaaatttaaaaatccacctataatttgcctttttagggtttatgaaatatagtaactataaccatctttgctgttacgctaataattaaagatctagactaagtatgtgtatggaaaatatgttttataaatcacatggaaaacacattctattcaccttgatttaatctttgtaggagattggtcagagtggtgggagaaactatagggaaaggatgcaaaccttctgaaagttcagaaggctctgcatagcttcaggggagaataagctgaaggcagctgttctctgatcctgaggcagagggcaaggagtaggtacaaggaggtgtaggggaatttatcgtaaacaggcttgtttacttaggttgtccagaaaccgacctttgataatctgtgcacatgactgctccctgaaaaggggaacaataatgttaattacccgcagattgtgtttgctccaggctttcggcattatgtctgtactgaataaaagcaagcagcttcagctgttcgcagctgctctcttctttggccctaagtgccggcagacccctagctgctcttacactgcaygcctgtgttgtcagtactcccttcatccgacgctc

SEQ ID NO: 810269 - DNA, 540 bp, Homo sapiens
tcaaaataacacaaaacacgaatktactatcttactgttctctatttcagaaatctgacttgggactcagtgtactaaaatcaaagtgttggaggtcctgggggggatttgttttattgccaaacttttccagctttcagaggctgctcacattcctgggcttgtccaccatttccatcttcaccatcagccatctcgtcacccttaactctgccttcatcacatctccttcgccaacactgactgaatcttctacttccctcttccacctttttttttttttttttgagacggagtcttgctctgtcacccaggctggagtgcagtgacgcgatcttggctcactgcaacctccacctcccaggttcaagccattctcctgcctcagcctccggagtagctgggattacaggtgtgcaggcatgcaggcatgcaggcatgtgccaccatgcccagctaatttttgtggggttttttgtttgtttgtttgttcgttcgtttagtagagacagggtttcaccatgttggtcaggctggtct

SEQ ID NO: 810270 - DNA, 630 bp, Homo sapiens
tgttcacagctctcctctctgctccttcccaagtgggaccaagcagtgtagctccaacctgragtcagggcatcccctgctcctcacttaagcatgctgggatgcccaaggaaattctttttcttctcgttgagtttcaattccttttgactctcttttagttcctcattccagggacattaacaatttctctacaaatatttatgcctccaataccacacaaaccaacagtttcactgaaaggagatctcttttcaacatagttaagcaatgttctccctcaccaagaaactataagtcatttacaaattaaggtgatcataattattacgtagcttctagtcataatatttaaaagtcattaagagtataattcatttattctagccatgattattcacaatgctatactctaaatgctatacttttctacagcttttaatcaataaatacttttcagatttttggtgtttacatatcacctgaagtattttgttggttatttccctatggtaacaacattggttttccgaatgactataggcctactttcattcccatgtgtgactcattcccatctcatctattctattacaacatctacgtgtcaccatctctctgaagagagtt

SEQ ID NO: 810271 - DNA, 565 bp, Homo sapiens
aatcccagctactcaggaggctgaggcaggagaatcacttgaatccgggaggcagagtgcagggaccagccccacagggtckgtgggtctctccccgtgtgcggcgatgagagagtgtagaaataaagacacaagacaaagagataaaagaaaagacagctgggcccgggggacgactaccaccaatgtgcggagaccggtagcggccccgaatgtctggctgcactgttatttactggatgcaagcaaaaggggcagggtaaagagtgtgagtcatctccaatgataggtaacgtcacgtgggtcatgtgtccactggacagggggcccttccctgcctggcagccgaggcagagagagagaggagacaaagagaaagacagcttacaccattatttctgcatatcagagactttcagtactttcactaattttctactgctatctagaaggcagagccaggtgtacaggatggaacatgaaggcagactaggagcatgaccactgaagcacagcatcacagggagacggttaggtctccggataactgtgggcaagcctgact

SEQ ID NO: 810272 - DNA, 509 bp, Homo sapiens
cttgtttttgcctaattagcattttagtgagctctctctactayctgattggtcgggtgtgagctaagttgcaagccccatgtttaaaggtggaagcggtcaccttcccatctaggcttagggattcttagttggcctaggaaatccagctagtcctatctctcaaaacgagcctcaataaatttaagaaaattgaaattatatcaagcattctctcagaccacagtggaataaaactggaaatcaactccaaagggaaacttcaaaaccatgcaaatacatggaaattaaataacctgctcctgaatgagcactgggtcaaaaacaaaatcaagatggaaattaaaacattcttgaactgaatgacagtaatggcacaacctatcaaaacctctgggatacagcaaaggcggtgctaagaggaaagttcacagccctaaacgcctacatcaaaaagtatgaaagagcacaaacagacaatctaaggtcacacctcaaggaactagaga

SEQ ID NO: 810273 - DNA, 509 bp, Homo sapiens
cttgtttttgcctaattagcattttagtgagctctctctactatctgattggtcgggtgtgagctaagttgcaagycccatgtttaaaggtggaagcggtcaccttcccatctaggcttagggattcttagttggcctaggaaatccagctagtcctatctctcaaaacgagcctcaataaatttaagaaaattgaaattatatcaagcattctctcagaccacagtggaataaaactggaaatcaactccaaagggaaacttcaaaaccatgcaaatacatggaaattaaataacctgctcctgaatgagcactgggtcaaaaacaaaatcaagatggaaattaaaacattcttgaactgaatgacagtaatggcacaacctatcaaaacctctgggatacagcaaaggcggtgctaagaggaaagttcacagccctaaacgcctacatcaaaaagtatgaaagagcacaaacagacaatctaaggtcacacctcaaggaactagaga

SEQ ID NO: 810274 - DNA, 509 bp, Homo sapiens
cttgtttttgcctaattagcattttagtgagctctctctactatctgattggtcgggtgtgagctaagttgcaagccccatgtttaaaggtggaagcggtcaccttcccatctaggcttagggattcttagttggcctaggaaatccagctagtcctatctctcaaaacgagcctcaataaatttaagaaaattgaaattatatcaagcattctctcagaccacagtggaataaaactggaaatcaactccaaagggaaacttcaaaaccatgcaaatacatggaaattaaataacctgctcctgaatgagcactgggtcaaaaacaaaatcaagatggaaattaaaacattcttgaactgaatgacagtaatggcacaacctatcaaaacctctgggatacagcaaaggcggtgctaagaggaaagttcacagccctaaacgcctacatcaaaaagtrtgaaagagcacaaacagacaatctaaggtcacacctcaaggaactagaga

SEQ ID NO: 810275 - DNA, 467 bp, Homo sapiens
ctatggcattatgtttgaagtgagttttttgtagacagtwtacagtttatggttattcatatattctggaaatctctgtcttttaattggtatgtttagacagaggtcagcaagctacagctataagccatatccagcccattacctctttttgtaaataaggttttattggatcacagctgcactcatccacttatgcattatagccaatggctgcttttgtgctacagtggcagagttgaatggttgtaaaagcctgtatactcacaaagcctaatttactctttagccttttacagaagaaatttgccaagcctttgtttagaccatttacatttaatgtaactatagatacattttggtttagggctagcatttaatttatttactgttcattccctctgtttttgagtctttcttctcttctgccttctcttgggttgtttgaacattttataatattccat

SEQ ID NO: 810276 - DNA, 582 bp, Homo sapiens
tcttggcaggaatagaacaaaacaaaacaaaacaaaacaaaaaaaagccccgatgcttcagtcaggaggtacgtgatgtcaactcactgcactgccagcgaggttaactttgatcacctgctcaagctgttgtctgccaggtttttctaccaaaaagttaccatatttctctttgtaactaacatattctggggaaatattccagtactacatcaatatctgcttcttcaaatcttcacctgcaagtctcagcatcggttgacaactccagcctgaatcgaccaccactatgatggctgcctaatgttgatttttcttatttccaccattccttctgcatttattagttggcaatctgttgcaagaaaaagctttcccttctctctccatttacttactcgttaatttaattatttcaacatggactcatggattcctattttattcaatgggttttattcattacwatcattatttatattgattctcaaattgcccaggtttggccaatggaagtcctttccatttgacccctatatcctttccataagtcctcatccatccaagcactccctcactttc

SEQ ID NO: 810277 - DNA, 610 bp, Homo sapiens
gaaccactacactccagcctgggcctcagagccagatcctgcctccctccaccaaaaaataaaagaytaaaaaaaaggaaaattggaatctttggaatgagtactactaaaaattgatttcttcccttttaaatgactaaggaaaaaaattttaattgaatttaaatcattttactacatgtttagttgctactgtgaaacaatgaaaacatcttaagaattaagtctgaaaaaaatctgtaatttccaatagaaaagtagagcttagaaatcagaaatcaaattatacagtatataagtattttaacctgtttataagaattttaaaatctttgaaaatgtcattgtcactttaagtttaaaaataaggagctttaacatgtttccttgatcactaggagtatgaattaagcttaggacattttctgaatgcaaaatggtttgaaaattaaacaattcatatttgagtttcatggtttctatctaaacattttttttacaggccaagttacaacatccatggaaatgcttttagttataagtatggtattaacaggatcaagaacagctgacaaataattacaattaataaatttgttcaagctgacaa

SEQ ID NO: 810278 - DNA, 513 bp, Homo sapiens
tttttacactgtaattagagttcaaacttccatagcgcctagcctaaaattaaacccagaattatgccaatttatgcctgctatatatgcacacacaaaagacttataatgcaatatactaaaaraactaaaggtaggtgggtttttccttgaaggaatcatagctacattattttcaagtttaatctgttacattcacctgcctatcaaataaatgtagcacttaaacgcataaaacaaaatttgatttagtgacaaaaagccattagcttctaatttaacttcaaaacgcttttcaaaaaatctaccccatctaattctaagtgaaccagaccacacttgatagaaaactgttgttctaaaaaccatacgtacttaacacaaacagtaaacatatgagaacatttagtcttctattaatgtcttacaaaatatttcaatgtggctggttataatttttttttttttaagggacagggtctgtcaccgcggctggagtgcagtggtgtgata

SEQ ID NO: 810279 - DNA, 522 bp, Homo sapiens
tttactgatttaccaataaccaattcaygcctgctctagtgctgtggtctgaatgtgtcccccaaaattcatgttgaaagcctaacctccaaggtgatagtattaagaggtggggcctttgggaagctttgccatcattaatggaattaatgcctctataaaagaggccctatagagccccgtctactcttctactacatgaggtaatggtgaaaagacagctagctatctatgaacaagggaagagggccctcactaagatgtcaaatttgttggtaccttgatcttggacttctcagcccccagaaccgtgagaaataaacttctgttgtttataagccatgctgtctgtggtgttttgtaatagcagccagaacagactaagacatctagtaacacattctctggtaaacactaggaattcctggccttaaaaagttcatagctaatgagaaaagaaataaacaacataaaggataacatgctgtagtccactacatacaaggtgcttccagaccattc

SEQ ID NO: 810280 - DNA, 520 bp, Homo sapiens
actctccaccctcaagcaggcttcggtgtctgaagtttccttgtttgtgtccatgggtacccaatgtttagctcctacttataagtgagaacatgcggtatttgattttctgttcctgcattaattcacttaggataatggcctccagctccatccatattcctgcaaaggacatgatcttgttattttattttattttatttttttgagatggagtctcgctctgtggccaggctgaagtgcaatggagccatcttggctcactgcaaactccacctcccaggttcaagcgattcttgtgcctcagcctcccaagtagctgggattacaggcacccaccaccacgcccagctaacttttgtatttttagtagagacggggtttcaccatgttggccaggatggtctcaatctcttgaccttgtgatctgctcgcctcggcctcccaaagtgctgggattccaggygtgagccaccgcacccggccgatctccttattctttatggctgcatcatgtaca

SEQ ID NO: 810281 - DNA, 397 bp, Homo sapiens
atgtttgagcacttatgtgtcattgggactttatcaagacttttaaatcctagcactctgatggaaccaagagtcttttarttttgcagatgagtaaaaggaaacttagaggttcactaacttgccgaaggtcacatagcagtggcatttgacagttaaagccagatacagcttgtttcctttgccttaatgcactgccatactgttaaatctaggggtcatgcatttaacatactgctcaacttcactttttattcctcatgagaattcacatcagttgcaaaggtaagactatttaggcagtggccctgtgaagacttatttgctctttgcctctaagcactgagacccccaaaagccaccctactaagcttggtatgtgggaggtcaacaccca

SEQ ID NO: 810282 - DNA, 397 bp, Homo sapiens
atgtttgagcacttatgtgtcattgggactttatcaagacttttaaatcctagcactctgatggaaccaagagtcttttaattttgcagatgagtaaaaggaaacttagaggttcactaacttgccgaaggtcacatagcagtggcatttgacagttaaagccagatacagcttgtttcctttgccttaatgcactgccatactgttaaatctaggggtcatgcatttaacatactgctcaacttcactttttattcctcatgagaattcacatcagttgcaaaggtaagactatttagrcagtggccctgtgaagacttatttgctctttgcctctaagcactgagacccccaaaagccaccctactaagcttggtatgtgggaggtcaacaccca

SEQ ID NO: 810283 - DNA, 588 bp, Homo sapiens
taaattcaaaagatatactatacagcacagtaactatagttaatgatgytagattgtattgaaatatgctaacagtggagaaatattctcatcacaaagtgataactatgtgaggtaactcatgtgttaattagctagatttaacaatgccacaatttatatatgttttaaaacatcatgctgttcatagtaaacacaaaaaatgaaattgtatcattttcagccacatggatgaatctggatattctcacttatgttggagcttaaaaagtttgtctcatggaggtagagagtacagtgaaagttaccagaggcttgaaagggctagggggcagtttaactgtcaattaaaattaaaaaataaatacatttaaatattctaacaaaagattaatttcaagttggagtagggataaaccaatttgccctagctggcagaacaagcttatattagagagtgatagaatattttaaaaagtcctactgttccctataaaaacattattatctttgtagattaaatggataaatttagctctggtaatattaattagaaggattcatactgaacaaaatttaaaaccatta

SEQ ID NO: 810284 - DNA, 491 bp, Homo sapiens
attgtgtcccagtttttataaagcaatctctatttccaataataaatcatctactgaggtaagcttttctactcattgtcaaaacatgtcatgtgcacacctaccttcaaatttctacttatgttatattcacagccagacctgaatttctcttattcatcttctctccatttgtctacatcgtcaatcaaaaggaagaagctgaaaaaaattaatataagtagaaagtttatttgggccaagcttgaggattgtaacctagaagcatagattcatgttgccctgaatatacacttcaattaacaacagttacaagtggatttttaaagccagaaaaaaggggggcagggagtgagctgagacaaagctgctcrtcagaaattctttttggtttatagaaataatattgattagtgattggttatatattgttaagctataggatatatgttatagtgtctggtgtgacattattaggttaatttatagct

SEQ ID NO: 810285 - DNA, 613 bp, Homo sapiens
gtgacagtctgacttcctctttackgatttggttgccctttatttctgttgtctgattgctctggctagaactttcagtactatattgaacagaagagttaaaagtggacattcttgcctttttccagttctcagaggtaatgctttaaacgtttccccattcagtatgatgctggctgtgggtttgttgtagatggcttttattaccttaacgtatgtctcttctatgccaattttgctgagggttttaatcataaaagatactgaattttgtcatatgttttttctgcatctattgagataataatttgattttttttcaattctgcttatgtggtgtatcacatttatttacttgtgtatgttaaaccatccctgcaaccctggtataaaatctacttgatcatggtgggttatctttttgatatgctgttggatttagttcgctagtattttgttgaagatatttgcatctacattcatcaggaatattggtctgtagttttcttttttcttatatccttccctggttttggtattagggtgatactggcttcatagaatgatttagggaggattcccttttttttgtcttttggaatagtgtcaatag

SEQ ID NO: 810286 - DNA, 612 bp, Homo sapiens
ttagatcatcaatcatgttctttcaaactttttcatgtaagcatctaaggctatgaacttttctcttagcacwgcctttgccatatcccagaggttttgatagattgtgtcactattattgttcagtttagataatttttaaatttccatcttgatttcattgttgactcaacgatcattcaggagtaaattattcaatttccatttatttgcacacttttgaaggttccctttggaattcatttcgaattttattccactgtggtcagagagagtacttcatataatatcaattttcttaagtttattgagacttgtttagtcatctatcataaggtctgtcttaaaaagtattctacgcactgatgaatagaatgtatattctgcagttgttgggtaggatgttccgtaaacatctgttaagtccatttgttctaggttatagcttatgtccattatttcttggttaaattttatctttataacctgtctagttctgtcagtggagtattgaagtcccccactattattgtgttgctgtttatcccatttcttaggtttagtagtaattgttttataaatttgacagctccagtgttaggtgcatatata

SEQ ID NO: 810287 - DNA, 446 bp, Homo sapiens
cccaggcttattagggggaggaaattcccacctaataaactttggtcagaccagttgttctcaaaaycctgtttcctgataagatgttataaatgacaatggtgacaaaacttcataagcaattttaatttaacttcggtcctgtggtcctgtgatctcgccctgtctccacttgccttgtgatattctattacactgttaaatacttgatatctgtcacccagacctattcatatactccctccccttttgaaactccctaataaaaacttactggttttgtggtttgtggggcatcacggatcctaccaaagtgtgatgtctcccccggacacccagctttaaaatttctctcttttgtactctgtccttttatttctcaagccagtcgacgcttaggaaaacagaaaagaacctacgtgattatcagggcaggccccgcgata

SEQ ID NO: 810288 - DNA, 446 bp, Homo sapiens
cccaggcttattagggggaggaaattcccacctaataaactttggtcagaccagttgttctcaaaaccctgtttcctgataagatgttataaatgacaatggtgacaaaacttcataagcaattttaatttmacttcggtcctgtggtcctgtgatctcgccctgtctccacttgccttgtgatattctattacactgttaaatacttgatatctgtcacccagacctattcatatactccctccccttttgaaactccctaataaaaacttactggttttgtggtttgtggggcatcacggatcctaccaaagtgtgatgtctcccccggacacccagctttaaaatttctctcttttgtactctgtccttttatttctcaagccagtcgacgcttaggaaaacagaaaagaacctacgtgattatcagggcaggccccgcgata

SEQ ID NO: 810289 - DNA, 486 bp, Homo sapiens
taaattaacctaataatgtcacaccagacactataacatatatcctatagcttaacaatatataaccaatcactaatcaatattatttctataaaccaaaaagaatttctgaygagcagctttgtctcagctcactccctgccccccttttttctggctttaaaaatccacttgtaactgttgttaattgaagtgtatattcagggcaacatgaatctatgcttctaggttacaatcctcaagcttggcccaaataaactttctacttatattaatttttttcagcttcttccttttgattgacgatgtagacaaatggagagaagatgaataagagaaattcaggtctggctgtgaatataacataagtagaaatttgaaggtaggtgtgcacatgacatgttttgacaatgagtagaaaagcttacctcagtagatgatttattattggaaatagagattgctttataaaaactgggacacaat

SEQ ID NO: 810290 - DNA, 620 bp, Homo sapiens
ccaatacctattgacactattccaaaagacaaaaaaaagggaatcctccctaaatcattctatgaagccagtatcaccctaataccaaaaccagggaaggatataagaaaaaagaaaactacagaccaatattcctgatgaatgtagatgcaaatatcttcaacaaaatactagcgaactaaatccaacagcatatcaaaaagataacccaccatgatcaagtagattttataccagggttgcagggatggtttaacatacacaagtaaataaatgtgatacaccacataagcagaattgaaaaaaaatcaaattattatctcaatagatgcagaaaaaacatatgacaaaattcagtatcttttatgattaaaaccctcagcaaaattggcatagaagagacatacgttaaggtaataaaagccatctacaacaaacccacagccagcatcatactgaatggggaaacgtttaaagcattacctctgagaactggaaaaaggcaagaatgtccacttttaactcttctgttcaatatagtactgaaagttctagccagagcaatcagacaacagaaataaagggcaaccaaatcmgtaaagaggaagtcagactgtcac

SEQ ID NO: 810291 - DNA, 593 bp, Homo sapiens
taatggttttaaattttgttcagtatgaatccttctaattaatattaccagagctaaatttatccatttaatctacaaagataataatgtttttatagggaacagtaggactttttaaaatattctatcactctctaatataagcttgttctgccagctagggcaaattggtttatccctactccaacttgaaattaatcttttgttagaatatttaaatgtatttattttttaattttaattgacagttaaactgccccctagccctttcaagcctctggtaactttcactgtactctctacctccatgagacaaactttttaagctccaacataagtgagaatatccagattcatccatgtggctgaaaatgatacaatttcattttttgtgtttactatgaacagcatgatgttttaaaacatatataaattgtggcattgttaaatctagctaattaacacatgagttacctcacatagttatcactttgtgatgagaatatttctccactgttagcatatttcaatacaatctarcatcattaactatagttactgtgctgtatagtatatcttttgaatttattcct

SEQ ID NO: 810292 - DNA, 585 bp, Homo sapiens
aacaaaaacagccaatatatcaaagattttgtttaaaatcctgtaagcttaggttattgtctttaacttaacctaaaggactcccartattttttagcatgccccaaatacaacaggaatcatgtatttaaactcattcttattaaactggcccacttctgcccttaagcagtttgcatgtgatcagttacagaagggtccagtatttaaccattttacacattcagcttatgtgcacagactgagactagtatccttaggaagacctgctgccaaggttggccttttactagattgtttgtgcaaataaaagtgggtcatgttgaatacctgctttccttctgggaatgtggaattttggtacatgcaaagcagaaagtgcctacaggaccaacctacaatagaaactttgggtgccaagtctctaatgggctcctcgagcagaaacatggcacacgtgttgccaaatttttattgctacaagaatgcgctctgtatgaccactcatgagagggagagagcataaggagacctgcacgctggttcctccagactctaccttctctttttcccttatgctaacct

SEQ ID NO: 810293 - DNA, 557 bp, Homo sapiens
tagaattaaaataaactaccaaatggaacagaattcttatcttctttggttccaaatacttttttcttttcttttctttttttccctttctttttttttttttttttttgkgaaatggagtctcactcaggctggagtggcacgatcttagcccactgcaatctccgcctccgaggttccagcctccccagtagttgggattacaagtggcactaccacgcccagctaatttttgtatttttagtagtgacagggtttcaccatgttggccaggctggtctcaaactcctgacctcaagtgattcacccacctcagcctccaagtgctgggattacaggccagctggccccaaatacccacctacctacctaccttccttcctttctttttttttttttttgacagagtctctctctgtctcccaggctggagtgcagtggtgtaatctcggctcactgcaacctccacctcccaggttcaagcgattctcctgcctcagcctcctgagtagctgggactacaggcccgcaccaccccgactggctaatttttgtac

SEQ ID NO: 810294 - DNA, 631 bp, Homo sapiens
cttcccagggggtccattccagmgagagcagagttctgtttgtaaaaccctggctggagtgctgaaaatcccatagggtggccccacctggtgaggagagatggattagggtctcacttaaataagaagtctggttacaatctgctacagcagctgtgctgcactgtggggaattactcctggtccagacctcccagactccccaaagctggcacaccagaacggctgactcaagccacaaagatggcagctgcccctctccctgggaactcagtcatcgcaggcagtctccagtctgctaccgctggccagctgatattccaagagagtgggtcttaacttatggggtgccatgtgaacggggcctgcaaaacaacgctgcttggcttcctggcttcagcccccttcctaggggaatgcacagagagatctgcctcaccagaattcccagggctggagtaagcaaaaactcctgggtctccgtgcctgcccaagcggctacagagtccacacagctctgtgcttcagacccaaggcactggtggcatgcgctcatgagggggatcttctgatctgtgggtggcaaagatctgtgtgaaaaccgtggtttcttaagtggggttgcacaatc

SEQ ID NO: 810295 - DNA, 585 bp, Homo sapiens
tttttttttttttttttttaaacaaggtcttgctctgtcgcccaggctggagtgcagaggcacaatcatagctcacttcaacctctgcctcctggggtcaagcgatcctcccacctcagcctcctgagtagctggaactacaggcgtgatccaccatgcccagctaatttttgtatttttagtagagacggggtcttgctatgttgcccaggctggtttcaaactcctgagctcaagcaatccacctgcctcagtctcccaaagtgttgggattataggcgtgagccatgcacctggcctcgacctgcaaagactctctccaaatacagtcacattcatagatggcggggttaggacatggctatgtgtttccaggggacacaggcaacccacagcagacattctgccaagtccatcatcactggcccttactgaggtcccccagcctcctctgggtctgccsaggaggtgctgtgacgtacttcaccccatgatccagcacatgggagtacctaggtcaccgtgcagccggggtctcagcagaggccggagtctgccctgagtcaccagaggctgtgggttttg

SEQ ID NO: 810296 - DNA, 536 bp, Homo sapiens
cgcgactcaggtgcacatggaggcggaaagtgaccgcagccccaagccgtttccctccagcgtccccagacctcctcccactttcctcaggtccccttttggctctccccagaccccaccctcctcgggctgctggaggaaagggatgaggcctgggacccctgccatgttgccgcctgcccagcacccctcctttcagagacggaggaattcttccaccctcagccttgcccctctcagcatccccagaccccactccccacttccctgcccctttccttcctctgtcccagtgagagacacagagcagatgggctgggacaagaaacatttaattaggggtctggggaatcagcaaggccccagacccatcatgcagcctcatgtacagtgggcattgggcccgcccctgggatattgctgggggggggggcctcatggcagcaaacagggcagtgtggcttgagaccccgctttgtgggggagaagtggggcaggggcctttgggtaygagggtctgtgtttctcccactgca

SEQ ID NO: 810297 - DNA, 642 bp, Homo sapiens
attgctcagagtctacagcaggcgctccctcagtgctggcctggggctcctaggcccaggagcagggcggagtctgggcgagctatcaatggagcccaccagcagccaggcgccaggggtggcgggggragggtgcccttgtccccaggaaccctgccccaggtcgcaggccgaaccctgggttccccagggttctccggggaacccagaaggttccccacagcccagagcttggcctggctcttaggggtaaagggagctgctggggggtctccaacaaagtcagacctgggtctaggaagcggggctagcccagggggagacctttttgtgttgccgtccctgggtgaggaggtgggaggtctggagcaggcagggcctcgggcgaaggggcgcagcgcaggcgaggggctctgtgggtacagcccgtggcccccagcgcctgcccgggtcgggctctgccctgcccttggggtgcctactgttgtcatcgtgtgggatgtggagtttaatgaggacaacagagtgggggctgccactctgcagggggtgcctgggccggtcccaagggtggtgggcagtgggatgaggccgggagctggtgggcttggctctgactgccccgtgccccccaggatcccc

SEQ ID NO: 810298 - DNA, 564 bp, Homo sapiens
agaattatttagcttgaggaaaggctatttgaaaatacacagtcagaggagacaaaagaaaaaagaacaaagaagaatgaagcatgtctacwtaatttaggaaatagccttaaagaggaggtagatatagagatagaggtagaaattttacccattttattcaaatggataaaaacagaaaactttcacaacctagagaaatatatcaccattcaagtacaagaaggttgtagaacatgaagcagatttaacccaagtaagactacctccaggtatttaataatcaaactcccaaaacacaaggataaagaaaggatcctaaagcagcaagagcaaataaacaagtaacatacaaaatatctccaatatgtctgacagcagacttctcagtggaaaccttacaggctaggaaagagtggcatggcatatttaaaatgttaaaggaaaaaatcttttaccctagattagtatatccagtgaaaatatccaacacacatgaagaagaaatacttttccagacaaacaaaagctaaaggattttatcaacaccagatctatcctatg

SEQ ID NO: 810299 - DNA, 480 bp, Homo sapiens
gttgtaattatcactggatgtttttctttaaagtcaatgtttctcttttctaacaaccaatatccactgttcattatgaattttgcatgtgaaagacaggaattgagttttttttaatgttaagtaaatttgagaggtatatagcatactctgattctacatcaaacctgtaatttttaatggacttacacaggtattttatataaagtacttcaaattcttttagggaatatgtaatttttaaattaatatataaaaaaacggtggcctgaaaaccaagtgaacctaatgttaattgaaagttaaagttgccctctctgagatgagagagagcctggagtgaaagatgaacaccaaaactttttccgcaacaaatggcccagtccctgctgagtgccaaccatccaataaaggcrtcagccctacagctctggccatgaaacagaatctagatatatgttattaatacactaacaagag

SEQ ID NO: 810300 - DNA, 585 bp, Homo sapiens
catggccgatccgacagccgtcagtcctactcacaaaggccaggttcaccaggtgatggattgaccagctgcagctgctgtcctaggatagtcacagtggcagggaagctccagaaccagtcttcattcttgtcatgatatattgcattttccattcctttctgaatccatgtgactgcctaaatttttttattaagttgcctgattttaacaaacatagttttcaatgagaatgcaagaagaatttctgagttgccttactttttatttatcaactatcctgtcgccttcacacctactgaagagaatctcatacaattggaaacagaaattgagttacagtttctttaattaaattcagtttcacaggtgggtcctggtttccactgatggccaacacggagccttgcccagggagtgagtcaggcttctctaaggcactgctgggggcacagcacggaggttcttagtctcttggcagacctttgtccctgggagccctagcccccagccacctattctttctggatctgaggatccastattatccaccttgaagaaatgtagacgttgtatgatttgtat

SEQ ID NO: 810301 - DNA, 420 bp, Homo sapiens
aggagaggaagttggaagagacggctctgggtgtaaacccggcttgcctaaggcatgacacttacttctccctacctcggggtcctgccctctcctgccttgaggaggtcttgtgaaaattgcctcgttgttgttagtttgctttttgcctttcttgcctaataaggatgaatttattttattatatatatatttatttatctattgagacagagtctcactctgttgcccaggctggtgtgcactggcgtgatctcagctcactgcaacttccacctcccagattcaagtgattctcctgcctcagcctcccgagtaactgggattacagrcacacgccaccacacctgactaatttttttgtgtttgtagtagagacgaagtttcactatgttggccaggctggtctcgaactcctga

SEQ ID NO: 810302 - DNA, 640 bp, Homo sapiens
tattgataaatgatacataattcacaatatgagcatggtgtaactttaattctgaaataaattgccrtggtacagtggtcttttacaacaagcttcctgccatcacagatcttatagtttagcttaggagacactgtgatttgtgctaataaaggcatataaagcatgctgtggacatatagaaagagtaacatctaaattgaccgggaggccgaactatgactgaaataacttttattcaaaataagaggcttggtgcagtgtctcacatctgtaatcccaggactttggaaggccagggtggaggatcgcttgagcccaggagtttgagacaagccaaggcaacatatgaaacctcctctctccaaaaaaatacaaaaatcagccagacatggtggcatgtgcctttggtcccagatactcaggaagctgaggtgggtggatcacataagccctggagttcgaagctgcagtgagatgtggtcacaccactgcactctagcctgagcaacagagtgagaccttaggtcaaaaataaataaatacgtaaaaataaaaatatatgaatatgtcattactggtcaagagacagaaaaatgtaacaatggagaccatggatccagccaatatcacacattcc

SEQ ID NO: 810303 - DNA, 609 bp, Homo sapiens
tatttactattttattagaacaaggcacttctaggtacatgcctgtgtattttatgctttttgttgatgagataaatgagatgtttactttttgaagattgtaattttttttttggtagttgttagaaaagcaatttctctttggagatgtagccttaatcttgttactcaaattccatgtcagttctaatagtattttaaaattatttcttggatttgcaaataatgaatgactgcctccattttcttaaggttctataaatgtggtattgatttcctctatggcaaaatacttatttacaatagtcaacaatctttccaagtagtaatgtgtttacatgtctgtgtctaaaattttattaataatttctaacatttctgcattgtggtccagtgatgtggtttgtcaaatatattgatatatttgagcatgttccatttacaaggaagatgtacttcctgtttagtaggtacaagtttgatatgtactattaatttttccttactrgttaaatatcagaagaccaatttcattcactcattcattcacctgctttatctgtcaaagacaaaataaattatggtaaaatctccccaggttagttgcta

SEQ ID NO: 810304 - DNA, 382 bp, Homo sapiens
gcaggagagaggtaatatggtaagtaattttattgtttcatccataattttctgcacttttcaaaatttactactaaaaacatatcctgtcataattagaaaaccacaataaaatgttaaataggtctgattatatcaaaaacataattaaaaaagtaagttaaatggaaacatctgatccttttatgttaattttatgactagtttttcattgttttcatatgttttattaatttattggattttttttactaattttatakattgtattagtcaaaggcgccatacaactgagattagaaactataatcttctgagactttgcttcctctgtgtattttcctgagccaattcatcaattttttttattaattctaaagcc

SEQ ID NO: 810305 - DNA, 382 bp, Homo sapiens
gcaggagagaggtaatatggtaagtaattttattgtttcatccataattttctgcacttttcaaaatttactactaaaaacatatcctgtcataattagaaaaccacaataaaatgttaaataggtctgattatatcaaaaacataattaaaaaagtaagttaaatggaaacatctgatccttttatgttaattttatgactagtttttcattgttttcatatgttttattaatttattggattttttttactaattttatatattgtattagtcaaaggckccatacaactgagattagaaactataatcttctgagactttgcttcctctgtgtattttcctgagccaattcatcaattttttttattaattctaaagcc

SEQ ID NO: 810306 - DNA, 618 bp, Homo sapiens
ctctaaggtatatattatcatgatccttattttacagttaagacattaaggcacagagaggttaggtgacttgcccaggtcatgcagttgataaaggctgakgttagtacttgaaatcagggaactctgaagcctgtgttctgaatcactgcttttactttgggagtagtgcttgaagagctcaccttctaataaaggcgaatgggtacatacaattttaatatagtaggataaatataatcaaacaactatatgcaacgtgcaggaatcctatagaaaaggaactattaatattatttgtgggaataatcttggtatgggaagaaaggcagcttacagagtcagtgacaccttggtaaagcactgaggataaagagagcccttccaggtgggcaaagtggggatggtcattcacagctgagggaagagtctagcaaatataagagatttgctactacaacatgaattcatagagctgcagatactagttatgataaatttttaaatggggtgggagtgggtgaagtgttcaagagatgagaatagagactgacaacaacaaagacagttgggtcttttcagccagagtacgatgttttggccattaaagggtaaagt

SEQ ID NO: 810307 - DNA, 645 bp, Homo sapiens
gaaaatgaaaggtgatataaaaatgcagtgttatagggtagcttctgtgtaattttrgctcactggaatgccagttggggaatggcaaaggctaatactcaacagatggcaaagtcctaaaacctataataatggttgcagttattttcattactgtcatttgaaggcacatgcaataatgtgaaaaggcttgaactgggtaatcacagtaaatatactcaaagggaccagatgcatttcaaacaatcaaaacggtgatggatattcaggctgagtgccacttctgcacatattctaggtacatttattgctagggattagaagcaacattacttgtcacagagaggagctccatttccccttttagtaataacaagcaacaaaaattgacatctgttataacacagacagaatatttcacatcctttatgattgtgtgtcattatcatgcatataaatttagtttgcagatgttcaacgtcagagatcaaaataccaattttgcctacaaaagagttgcaatggataccgaaaatctaagcacttttgaaaatagataagttaaatcttttagagtggggacaataaaaatcaaataagattaggaagaaaaagcatcaaaaggcatcagaaggggctgtgtgg

SEQ ID NO: 810308 - DNA, 530 bp, Homo sapiens
caacaattcttagatctataagaaaatgaggtcacagggagaaccactgcctctcaagttggagaaaccaacaggtaaaacagaaaatcacaacttactggaggagaaactcatgagctgaaacttccatgggaaccggcaccatggtagaaaaatctaaactttaattggcaaattgctggaggcttagtgtggacatatctgagagataaagactccagagggattcaatcatcagagggcacttgaacttttgtaagttttatctcttggagctctattaagttttcataatgaatagtaaagaaaaatccatttatgtttctggcaagagcaggggacaataaaccactgtggaataagtcattgtgttctgttctcaataagacctatctggccagtcgcagtggctcacatctataattccagcactttggaaggccaaggtgggaggattgcttgagcctaggagatcaaraccagcttgggcaatagagaaagatctcatctctacaaaaaataaaaaatta

SEQ ID NO: 810309 - DNA, 485 bp, Homo sapiens
cattccttggcttgcagctgcatccctctaatctctgcctttgttaacacatgggactctcccagagtatctctgtgtcttcttacaaaaacaccagtttatattggattaaggacccaccctactctgtatgaaatcaactaattacaactttaatttccaaataaggtcacaattggaggctggtattgtttggctatgtccccacccaaatctcattgtgaattgtagttcccataatccccacatgttgtggtagggacctggtgggaggtaaccgaatcatgagggaggttacccccaggctgctgttctcatgataatgagtgataatgagtaagttctcatgagatcttatggtttcataaggggcttttcccctttgctcagcacttctcctttctgctgccasgtgaaggacatgtttgcttccccttctgtcatgattgtaagtttcctaaggcctctccagccatgctgaactg

SEQ ID NO: 810310 - DNA, 588 bp, Homo sapiens
accttgaaactagttctttagcaaaattaaaatatcagtacctcctttgaagagttctaacagaataacattttgaaaagcactgccacatattatatttcgttaatactgtttcttcattattcagaagacattgtctaagtcatagaagaaatttggacaaatgaatgacacaaccagagcttttccttattgacaaattacctaaaagatttggtgtgatttggttttcccttacttggtatttctgaaatgccaaactcaatttcctattcctctatatgtcaaccacgtacatgatgtcaacattagcctcttctttatacatatgccacaagatggagtatccaaacctaaacattcaaaatagaaacctgaaaaagttatgaggtcatggagccagacagccttggttggatgctgccttttccatgcaatagttatgtgaccttgtaatgccattgaacatctctgtgcctagtggttgatgctataagaattarataagataatgtatgtcaagtacttaacacagacttgacacatagtaaatgcttcatatatattagctattatgttcccattgaa

SEQ ID NO: 810311 - DNA, 613 bp, Homo sapiens
aagcagccgcctcagggaggcagattgtaatcaggacccataggagyagcagggagcccatgtgtttctgtgcagtttgctgaagccagtcagaacatcctgagtctgacttatcacccttctctggcctgctggggttcctgaaccaagtagtttaacttgccaagccttagtttctgcagttataaaatggtggtatgaatgaatgaaacaaggtatccgcaacactgaaatggaacataatagggcctgaacagaggacagttatgaatatttccatacaaaatgcaatttcatgcccttcatcaatggtcattttctctcattttacttttgaggactagatttgccaaagtccctctggggccaacccagtacaccactgagaagccctttgaaaaagccagctttatcatcgttttgtttttatttcttgatatttggaaagttttcttccttctgcttctatgtgtcctctgcctaactagtcatggtgactccttggatagtattctccatggtttcttgtaaaatattgatgcttaccttgcaatcttgcagcttttagcatgaattattttgctgattataatcaggcctctaggaataaaca

SEQ ID NO: 810312 - DNA, 613 bp, Homo sapiens
aagcagccgcctcagggaggcagattgtaatcaggacccataggagtagcakggagcccatgtgtttctgtgcagtttgctgaagccagtcagaacatcctgagtctgacttatcacccttctctggcctgctggggttcctgaaccaagtagtttaacttgccaagccttagtttctgcagttataaaatggtggtatgaatgaatgaaacaaggtatccgcaacactgaaatggaacataatagggcctgaacagaggacagttatgaatatttccatacaaaatgcaatttcatgcccttcatcaatggtcattttctctcattttacttttgaggactagatttgccaaagtccctctggggccaacccagtacaccactgagaagccctttgaaaaagccagctttatcatcgttttgtttttatttcttgatatttggaaagttttcttccttctgcttctatgtgtcctctgcctaactagtcatggtgactccttggatagtattctccatggtttcttgtaaaatattgatgcttaccttgcaatcttgcagcttttagcatgaattattttgctgattataatcaggcctctaggaataaaca

SEQ ID NO: 810313 - DNA, 486 bp, Homo sapiens
acatggttttgccatgttgctcaggttggtctggaactcctgagctcaagtgatcctcccacctcggcctcccaaagtgctgggatyataggcaggagccactgtggcaggccagtttgcatgttttacagcttactataaatggactcatacagcatatactctttttaaaaatcttactttttccactcagcataataattttgggattcacttatgttgcatgtatcaatagtttattcttttaaattgttgaatagtatcttaagataaacaaatgcaatttgtttatccatttttctgttgatgaatgtttgggctgtttccagtttttgactatacaagtgaaattgctaatggacatttccgtacaagtttgtgtatggacatccacttgaaattctcttgggtaaacttctaagagaggagtggttggatcatatggtaggtgtatgtctagcttcttaagatcactacatactgttt

SEQ ID NO: 810314 - DNA, 646 bp, Homo sapiens
ccaggaatggtggtacgtgaatctcaacagcctaatggaccaggctttgaccccacagtgtggcagtggggaagacctatatatcctcacaggcacagtgccctcagactacaaagttaaagacaaagtggcygggcatgagatgtccttcctggctgcagacacttcatccatttctctgggtggctacttggtgtggaggaaagtcttactctgtcactcagtttaggcagtttctgtgcctgttaggatttttggctttagttagaagaatattgtctttaaaagaacttctaaagtttataagtagaattagattttttaaaaaaaatcattaaatgcaagttcatagtcctttatctgcaattctgaaacgttaaagctctgatagtcagaaattttagtaacttacatgatcaccaaaacgataaagtacttaagtagagttgagcagtcttgaaagcacagcaaagatttatttggtggatattttaggggcttgttatttcttcatctgctattcatgaagaactaaaaagctgtaggcttccttttttctacttttttgagacgagttacttggtgtaattctgagagatgaaatcgaggtgaattgccttaagcactattattatttttcataagt

SEQ ID NO: 810315 - DNA, 376 bp, Homo sapiens
ttgcacacacgggtcctcattgtcawgccttcactgctcagccctggtgcaggccaccactcgtaactttcggcttctatgagagattttatttttctgtctagggaaaacatatggcaaccaatgtaacttcaagccaatactcaagtgcaaagttgatgcctgctccatgccaggccatgtggtcaagagaaataaaacctactccttgccttcaacaagtcttcagagcgtggaaagatgaacaaggtggcaactatgagtgtggataccactatgttcagcgtgtgtaacaggacagttattacaaacaactacaaaagcaaagccaaatggcactttgagaacaacaaataaactctgcttccatttgaaa

SEQ ID NO: 810316 - DNA, 376 bp, Homo sapiens
ttgcacacacgggtcctcattgtcatgccttcactgctcagccctggtgcaggccaccactcgtaactttcggcttctatgagagattttatttttctgtctagggaaaacawatggcaaccaatgtaacttcaagccaatactcaagtgcaaagttgatgcctgctccatgccaggccatgtggtcaagagaaataaaacctactccttgccttcaacaagtcttcagagcgtggaaagatgaacaaggtggcaactatgagtgtggataccactatgttcagcgtgtgtaacaggacagttattacaaacaactacaaaagcaaagccaaatggcactttgagaacaacaaataaactctgcttccatttgaaa

SEQ ID NO: 810317 - DNA, 478 bp, Homo sapiens
tcagcagttcctagacttcttcattctaagacaccttaatacacttaaaattattgaagaccccaaagagcttttatttatgtgggttatatctgtcaatatttactgtatcagaaattaaaactgagaaatttggccagacatagtggttcacgtctgtaaccccagcactttgggaggccaaggtggtcggaacacttgaggtcaggagttcaagaccagcctggccaacatgatgaaaccctgtatctaccaaaaaatacaaaaatcagccgggcgtggtggcacgctcctgtagtcccagctactcgggaggctgaagtgggagaaccacttgaacctcggaggtggatggtcctttgcagtgagccgagactgcgccattgtactccagcctgggcatcasagcgaaaccctgtctcaaaaaaaacacttgagaattttttgaacacaagaatctgaagcacctgctcaaagg

SEQ ID NO: 810318 - DNA, 549 bp, Homo sapiens
tcttgctggcctggcacagtggctcatgcctgtaatcccagcactttgtgaagctgagatgggcggatcacctgaggtcaggagttcgagagcagccaagccaacatggtgaaaccccgtttctactaaaaatacaaaaattagctgggcgtggtggcgtaggcctgtgtcccagctactagggagtcaaaaaaaaaattgagacaaggtctggctatgttgcccaggctggtctcgaactcctggggtcaagcagtccttccacttcagccacccacagtgctgagattacaggtgtgagccattgcgcctgcccgttttttgcctttttatttttagagacaaggtctcactatattgcccagactggtctcaatctcctgggctcaagtgatcctccagccacaggctcccgaatagctggaagtccagacgctcaccagcatgcctggcttcagctggcattttaataggagttatattgaatctgtagattagttttyggagcaatgccatctcaacaatatttaactcttccaagccatgaac

SEQ ID NO: 810319 - DNA, 526 bp, Homo sapiens
aatcggccgaccttggacgggccggggaagaaaggagcgccggggattagcgcggtaccgcggccgggcaggcagagatagcatcggcgccgctgcggggctgaarccgcggagggctcggccgcgctcggagaaaggacggcttagctcctggagccggggattctgaagccattaggtggggattaacacccaagttaatctgctttggtcgctcaattgtcagcagcgaacgcgcgggactgaggaagcctggctcccagcgaccacagggccttgccacccagcagtccagagctacgagctggtatcagtttccccagctgtcacccggccaaggcgggccttggagccaaaagggagatgcacaccttggtgggctggccaacgggtctggatgagtggaccccctgccccgccagccttcctgggtaatcagggaactcagagaaggatgttcctgccccatcctgacccagaccacttgtggaccctgacagccagtgcagccctgggtgccacccac

SEQ ID NO: 810320 - DNA, 548 bp, Homo sapiens
tgcccgcagcgcagggctgtgcttcccctgggtcccgggagtgagtcacggcggagacgctgaggaggtgctggcgcagcaccccacccccaccgggcgaggggctgagcgcaggcctcgccccccagattccagcgctgaaggaggtgtgactctcccttccaggcagccggggccgccttgagagtgagccaggggcatcgtgtgataatagggaagaaatgtgccattctgacgccagagatctgggtttgaatcttagtcgaaaggtgtgggatcttgagtaaggatgctgatggctctgagactcgatttcctagtttcaagtggggcttttctctgtgccccacttagtgcttaaagcactctacagatgttaattatcgccttagaccctactgtatatatggcaaagcctggcaggagagcttcctgtaaggacgcagagggaggaatgggatggccttggctgagtctcggtttctcctgcaagtgtgattatgggcacawtttgctctgtgcctccacttcttcatctgtaatgtgaa

SEQ ID NO: 810321 - DNA, 542 bp, Homo sapiens
cactttaaatgggaaaatggcaaaatggaattttcaggaaaaatgcaaccagactgtcaaggtgattttagatattgtcatacatggaaaacttggagtaactcatgatttgactccctccccctcaaaaatgttttatcagttatccaaatttccatgaatgacaccactattcacccaaatgtcaaaaagcctaagagtctttcaggatctctttcctttcttcacctctctgaattaaatacaaatactattaccaattgtaatattaatgctaatgcaattattgctaatagtagctaaaattcaccaagtatttatgttctgtcagactctatcctaggagcttcacattctctcaatctccataacaattttaccttccatctttgatgaatttgagacttagagctattaatgtagttgcacatagtcataaaaatggtaaagtcaggatttacacccaagtttgtyagatttcacaacctgactcaagtcccgtcatgtctgtctctaaaaatgtcttatctctgaccacttct

SEQ ID NO: 810322 - DNA, 642 bp, Homo sapiens
attgttttttctatttctgtgaaaaatggaatgggaattttgatagggactatgttatgtatattgctttgggtggtacagacattttagcaatattaattctttcaatcaatgaacgtgggrtacctttccacttatttgtgtcttcttcaatttctttcatcaatattttacagttttcagtgtaaagatttttcatctccttggttaagtttattcctcagtatttttttatgctatggtaaattggattcttttgttaatttcttttggataatttgttatgatgtaaagattttgctgctgatttttgtatgttgatttttataacctataactttgctgaattcatttattagttctaacagatttttatggtgtttttagagttttctatatataagatcatgttgtctgaaaacagagacaattttacttctgcctgtctgatttggatgtcttttatttctttttctcatttaatttatctggctacaacttctagtgctatgttgaatagaagtggtgagagtgggtatccttaccttatgctgcattttaggggaaaaacttttagtttttcctcatggattatgatgttagctgagggcttttcataaatggtctttattgtattgacat

SEQ ID NO: 810323 - DNA, 570 bp, Homo sapiens
ggcagaggcctgaagccaccatcagctttacttcaaaaatgatttcaatcacttatatattttgggttcagtctagttttttgaaattcctggcattaggtaaatccragaaacaattaggcccagaaatgaatagctggcaggtttctcatccctgaaagatggttagttctccaaagaacacccagtctttttcttttttgagacagagtctcactctgtcacccaggctggagtgcagtggcacaatctcagctcactgcaacctccgactcctgggttcaaccgattctcctgcctcagcctcctgagtagctgggattacagatgtgtaccaccatgcctggctaatttttgtatttttagtagagatgggatttcaccatgttgcccaggctggtcttgaacacctgacctcaagtgatctgcccatctcagtctcccaaagtactgggattacaggtgtcagccaccgcagccggccgagcacccagtcctgacagttaccacatgatgccacactgagtaatcataaaatcggatactggaatcagggagaaaactcacctc

SEQ ID NO: 810324 - DNA, 506 bp, Homo sapiens
agtgccagctactcgggaggctgaggcaggagaattgcttgaacccgggaggcggaggttgcagtgagccgagatcgcgccactgcactccagcctggtgacagagcgagactccatctcaaaaaaaaaaaaaaaaaaaaaaaaaaaaaaaaatatatatatatatatatatatatatatatatatatatatataaaatttgtcttagaaaaataaatagcatttctttttgaaaagtttaatctatttatttgcttatttagagaccaggttatgagactgcctaatttttgtattttcggtagagaagggtttttgccatgttgccaatgctggtcttgaacccctgggctcaagcgatccacctgcctygacctcccaaagtgctgggattactggcatgagatctggccaaaaaataaaacagcactgactattatccacctgatccttctgctatgagccgaaagggtcagcatagcttctaactgatctctacctactgc

SEQ ID NO: 810325 - DNA, 605 bp, Homo sapiens
atcatagttcattctgtctaagcagagccactatatgtgattgtgttgggctctcagggccttggggtacctggctgaggctgagtgaggttgagtcatctcacagcctgtcctctgcaggctgaacccatccaaaggtgccatatgccaccaaggcatgcacctgtaggcttggccacccaggtagagcctgggtaacctaaggtgtaccctctcctctttcctgcttacgtcacatggtaaatgtgtctgttgttactaacaagaaaaaggaatcaggaacagggattgtctccaggaatgagccaagtgatggagtttcttatagaaaatactattcagttttaatttgtgtagttgattttcagatagtcataagtaaatattaaatgtttataaaaatgcaaataattcctcatggtttaaaaattgaacttcaaacctctcacaaattaaatataaacaattaatagagtggtatcttggggtaaggataaagcagaatcttttgkttttttttaaataaaaaatagaatgtaaaattttaaaaaggggcaacagtaatgacaagggaaaatacatggtgatactgaaaaacagtgctt

SEQ ID NO: 810326 - DNA, 622 bp, Homo sapiens
aatacttggttttgggggctctaattttaatctttacgatggatatgtagaggcatgtgtggtctaatttgatttaccttattgctaatggggttgagactttttcacgtctctactgaccatttggatatcttctttagagaagtatctgttcatatctcctgtgtatattttcactaagctgtttgtctttttcttattgagctttagtgttctttacctattctggatataaagcatttgttggttacagatgttacaaaagtcacagctttcactggcttgatttttcactctcttaatcacatactgtatcttaatgaaaagaagttcttaatttcagtgtaatcaaaattattaatctattccttataattagtactgctcttttggttctgattaagaaatatttgtctctccaatatcatgaagctgttcttctatgttactttatagttgttttattgcttcatcttttatacataaatatgtctgcagtatacttgtaattgtttcttgtgtacaatctgaaattattttttcccacaccgatatttaactmtcccagcactattccctgaaaaggccatccgtttccactgatcttggcaacacttttttg

SEQ ID NO: 810327 - DNA, 653 bp, Homo sapiens
tactcctccggaccactctaagaggtaggtgcttattattaagcccattttacagctgaggaaactgaggcccagaccacctcaataacttgcctaagctcacatgctagtaagcagcagagtgatactgaagcctggcagcatggctcagagtcacgagggctgcactgtgtatgagatctcccctctgcagcactttgcactggccactgtgccttctgggcagaggcacatttcctgattttcctttttgactgcaagctcctccagggcatagacccagagtgtctggctctcactgagtccccagagaagtcagttcttgacttgtagtacggtcttgcaaggcagaggtactgtctggttcgaacttctgggcactgattctgctttatcctctcagaggaggaaggatccttgccgacgctgagtttacacaagaatcagaaagagtaacatttgtaatagtcactgaaatgaaagcaaatagactgctagtgtgagttatttgcagtgaggcyacaagggcagagacatggcaaggaaaaaggtctctagatcagttcagaccgtggcaaacagagtgttccattactgactctggggccagaggatgctctactgagacctgctgcttctgctccccactgcat

SEQ ID NO: 810328 - DNA, 633 bp, Homo sapiens
catatcctcctgtttgaacaaatgcaggtggcctaaaggatttctcagggatgctttttttcttttttggtgtacatttctatgaattttaacacatgtatagattcatgtgaacactgccataatcaggataaagaacagctctaccacctcagtaaagcacctcatgctgtattttgtggtcatcaccttccccacctataatccctggcaacctctgacctgtcttccagtgctttttttgagaccatcaaataaatagaataatacaatctgtaaatttttgagactagcttccttttactaagcatagtgttatccaggctgtcatgtgtatcaatagcttgttcctttttactgctgagtacaatttcattgtatgtatctaccacggcctatttattcatccattagttgaagaacatttggatggtggaagagaatatctttgtcttattctgaattaaggggcattcagtctttcagcatggagtaggatgttagctgtagggtttttgtagacaccctttacagagttgrggaagttctcttttattcttagtttgctgaaagtttttaccatgaatacatgttctagtttgccaaatgctttttctgcttcaattaatatga

SEQ ID NO: 810329 - DNA, 563 bp, Homo sapiens
ccagcaatccaattattggatatacactctcaggaaaatgaatcattctaccaaaaggacacatgaacccgtatgttcactgcaatgctactcacaatagcaaaaacatggaatcaacccaggtgcccatcaacagtggccttggtatttaaaatggaataccatggaatactatgtagccatatataccatggtacatatataccatggaatactatgtagccataaagaagaatgaaatcacatcttacgccgcaatatggatgcagctggaggccattttcctaagtaaactaatccacaaacagaaaaccaaataccatgtgttctcacttataagtgagagctaaacattgggtacacatgtacataatgatgggaacaatagacaagggggactactatagaaaggtggggcaaagactgaaagactacctattgggtaccatgctcactatgttgattatgggctcaatcataccccaaaccttagcatcacgcaatrtaccttcgtaacaaacctgcacatgtaccctctaatcctaaaataaaagttgaaaaag

SEQ ID NO: 810330 - DNA, 544 bp, Homo sapiens
tttgattctgtaagtggaactcctaaaggccgggccagagcacctgagcctttctgttactctgactcccttatttgggtaaaaccaaaagaaggccccgatgccctggctgtgctcacggagcacatcaggcactctccctgtgtgctgtcttccggccctggacgtggcttctacaccaagaacaagctgctttcatcagtgtccttttgggtaatatatttttaaaatgtttaccaagtaactggaaggtaaaaaattagagaataattgagaaaatatccgtccatgtccatttgttcttggaaatcatgaccagcattacagccacaaagagcaaggttggcgttccaagtaccagtatataatgagggacaggaagcacctacctcgctggccactgcatgttgctctgtacattgtgcttgccaaaaccaggtctgtcatcattatcctgttagatactgtggtaagggtcttgcccmtaaaagctgtagtctcaccatttcatcgccttaaaatcatcttatcgacatatacttta

SEQ ID NO: 810331 - DNA, 588 bp, Homo sapiens
gacttgaatagtcatttctctgaagaagacatacaactagccaataagcacacgaaaagacgcttaacatcattagctataagggaaatgcaaattaaaaccacaatgagataccatttcacactcactaggatagctataatttttaaaaacagaaaataacaggtgttggcaagaatgtaaagaaaccggaacccttgtacactgctggtggaaatgtgcaatggtgtgaccacagtggagaagtttggttattcctcaaaaagttaaacacagggccgggcgtggtggctcatgcctgtaatcccagcactttgggagtctgagatgggtggatcacctgaggtcaggagttggagaccagcctggccaacatggagaaaccccatctctactaaaaatacaaaattagccgggcatggtggtgcatgcctgtaatcccagctactcggaaggctgaggcaggagaattgcttgaacccgggaggcagaggttgcagtgagccgagatcgcgccatttgcactccagcctgggcgacaagagtgaaactccrtctcaaaaaaaaaagttaaacgtagaattgcta

SEQ ID NO: 810332 - DNA, 481 bp, Homo sapiens
ggagactcagataagctagtagatgagccattataatgcagtgggctaagtgctgaaatcgggtacattaagaattttgtgggaactgacagaagaggtcttgctcatgtttgggtgggcatggggaaagaggcgtcagggaacacttcatttctactctgagactgaaaagacaagtatgagttacagagatgatggggaggatatagacacgtgtttcaggtatttgtaaatgctgaggagaaagagggtgattcattcaacaattcaggcttaagtatgagataaagacatagaaagaaaattaatgagtgctgaggaaataggaagggaccagaagagtcatattcgaattgcattttgagagtaatggaagaagagtggaggcagaccagytcacttcttgtaacaattaaagaaggcttatctatttaaaaaaattcatgcttggcagaagcagaggacctcggcagaagaaggg

SEQ ID NO: 810333 - DNA, 636 bp, Homo sapiens
gttaagacgacaaaaatgaccaacttgttaagatgagaaaaatgaacgtgttcaattaactgaatcctctttttaagackactgagtgtgttgcagctgagtgaatctttgggactcgggaaaaataatccacacagacattgcaaatccctgtgttagcccaggcccaaactcctcacccaaatccaaagcctttcccgagggcagattttaccaggaacattcaccggggctggtaacctctcccatttctgtgtcagatgttcatagctgagtaacagataagcaaggaaaaagagcagggtccgagctaatctttatccacacatacgcccagagggccagtggctcatgtgggatgtgggtaccaagcttgagggctcagggtcacttctggaaacaaagctgacaggctgatggttcttactgacctgtcatagcttcctcagcagtctttcatcctaactgaaatatgacccactatggcaggggttcacgcccttggctgcaccctggaccttcttggggagctatagagaaatcctgatagcaggcctaccctggagattctgaggtaggcaagggtgagagacctgggcactaggaattttccaagctatgtaaatgattcttgtg

SEQ ID NO: 810334 - DNA, 670 bp, Homo sapiens
agggacgactgtatttaagagcactttactttgctaattatgtttttgttaggactctgtacacctcagcttttgttaagaggtagagccacatatttttgataacaatatatctttgagtgtgctttacacttttagatttatggcatttaataagctgggcaagatcttctttggctgctgcagtcctcctcttgccactgaggtccaggagattcgccatgaggagatgacacagaaccctcaggcagcctcacgtcacctcccagggctcatcccacgagctgttcttcctgctcccacagtagagctgacggcctgcccagttcaagaattagttctgttttcctgccccaaagtagaggaggaacacagtcctctgaaatgtcatctttctttctcctttaaattttactagaaatagtcagtggctgtctgtcttaaagccttgtgagttctgtccgatctttatttctccttttctctgaaccgttgcgttacctatacacattcacgccttcctttattgccgcctcctttactgtgcgttcttgacgtccctttttatgagtgagtggagtgtagatccgtggaaaaaggtgcttctctgccttgcatgagcgctctatgtggaaggtctggggaawacatcgggtggctttgtcaggtg

SEQ ID NO: 810335 - DNA, 530 bp, Homo sapiens
ctaaatttatttcagctctagatactgttaaatccttcccctctgatctggatttttgggtkccccagtgaggatgtgtgtttggagatgctttcccctcttacatttcgggtgctcacagttttttggctgtctcacagtgtttgcagtgacaagccactttgttcaaagggtctgtgaattcttttggttttcctggtatgttcctgtggtggttcttggagaaaaagctcacaatgtgagtctccacatgctgttctatccatccaagtggaaactgcacattagtcctgcttcttacccaccattttccctctgaaaaaaaaaaaatagccagcttcttccttttaggttgacattcttacttttggaaatcagtgctaatgaaacccaagtgttccttatggaaatgtagtttgaagagtgaggctcccttggacctcccagccttgtctagcttctgtgtgactgtgacgcatgggtgagcccaggtgagacacacagaggaacaacacagacttcccacagaa

SEQ ID NO: 810336 - DNA, 603 bp, Homo sapiens
gttccataattcgggaaatggggtagtgcttgttttatgggccccagtacttcagttctctagctatgccctttgccggctaacttacttgtatcttcctactctgactgtaggcttgactgtgccaygttgtctactgggatgttagcaagtgtgatgcaaacaaaaacttgaaaaatgcttacctgaatggacttgttcaggcttttaccctcagccattgatgtaagaagaaaatgcctaggttagcctgctccacaattacacaggtgtgatatgggaccaagttgtcctagccatcatagttgaggctgtcctagatcagccaaccgatagtcaatcccctaaacatgtcagtgagtccagtccagacaagcagaggctgtaatccctcatggaagctgatcatacgtttattgaagaggaccaactgagatcagcccagctctagcccaggtcatctgtactccacagactggtgagctaaaaaaatgttaaagtttatggcactgagatttggaggttttggttatggagcactgtcctgtcaatagataactgacacggatgagaatatttacttcatagaagttgctttgaaaa

SEQ ID NO: 810337 - DNA, 523 bp, Homo sapiens
caagaaaatgaaaacatatggccacacaaaaacttgtacacaaatgtccatagcagcattttcataatagctgaaaagtggaaacaacccaaatatccatcaattggaaaaaggaaatctagcatttgcatataatagagtattaatcagccataagaagaaacaaagcaccgatccatgttatatcatgctttatacttggaagcatggtactaagtgaaagacgccagacacaaaaagcaaaatattgtatgattccatttatataaagtgtctagaataggcaaatccatagaggcagaaaacagattagtggttgccagtggctgggaatagggaaaaaactcagcgctaaagggtagggagttttgttttggagtaatgacgatgttctggaattagacgtggaacgattrcacacatggtgcaaatatccttaaaatcacggaattgtcactctaaaaggtgaattttatggtaggtgaattgtacctcaatttgtaaaaagaagaattagataaat

SEQ ID NO: 810338 - DNA, 619 bp, Homo sapiens
tgcctgtaatcccagctatacaagaggctgaggcaggagaatcacttgatctgggasgtggaggttgcagcaagccaagatcgtgccactgcactccagcctgggtgacagagtgagactctgtctcaaaaaaaaaaaaaaagaattcaggcagagagaggataggatcagcttatttctgctctatgatgtctggagccacagctggggtgccttgaaaggatgaagatggctgggacggctcacacagggacatatgtctggagctttagttctggctatgggctggttcctatggtccttcctcatacggcatctattagctgaaatgcccatgatgtcttctttaatcacaggtctggttcctggactgggatggctggaatatttgggaactggctgggtacctctctcttgcctcatggcttcttcatgtgactagcttgggctctctcacagcatggcaatctcagggtagaacttctgatattgtgtctagcctttctcagagctagtgttgcaagagacaaggcagaagctccgagtcttcttaaaaggcttcttgaaagtcctgtgtcatcccttctactacatactgttggttatataggaccagccc

SEQ ID NO: 810339 - DNA, 620 bp, Homo sapiens
aaagtgccaatatgttgctttgaaaaagaataaattccttacatccaggtatctggactagacttcagtgcatttagtgattatagcaaatccaaacagtagcttttgatatcagagaatgggtaaagtgtttttgacaatttctaagaacttagagttcttcggtgatacgttccatgcaactgaagctctgctctccaaatttaggtgggtacatacccaagtccatcacctggggcttctatttcctttgctcagatgctcacctcctaggtgggcacctgacataagatagactaataaaaataagtcctgtaacttttgatactcctattaaaaaagagttgcaaaccaataggaggtacacttgagaatcagcacaaatgaaagtagaacctggaaatccaggaagcagatacccaatcatgtcatttaaacatttagatccagctgtgcctgaagctgaactttagcattacataagccaataaatcactcttccccaacttacgccagttgaaattgaatacatactcagtgactttgagagaattccagggaattggtcagtccctgtttcacttgtaaatacayagcaatcaagcctaccaaatctatga

SEQ ID NO: 810340 - DNA, 581 bp, Homo sapiens
tacaagttcaagaccagtctggacaacatggcaaaaccccatctctacaaaatatacaaaaattagctaggtatggtggtgcccgcctgcagtcccagtgactcgggaggctgaggtgggtggatcgcttgaacctaggaggtggaggttgcagtgagctgagatcatgccactgcactccagcctgggcaacagaaccagatgtggtctggcggggtgggggggaaagtaaagctttaaagtatttcgaaaaatattctgtggaaaatgggctggtgtagggtaaatttacacagggaagataagatataacactaacatggtagcccaactgaaagtaatggtggcttggattaagggaatggatgaaaatatcaagatttgtttcagagtaaaatggacagaatatggtaatgaattggttcccctgggaagtgtcaagtatgatgccagggttctaggatgagaaaacagatgrgttatgatggcaaataatgaaatggtaaaaactgtcaaaagaacatagttgaggagcaatatcagaagttaactttttttttttttgagacggagtctcactc

SEQ ID NO: 810341 - DNA, 605 bp, Homo sapiens
ttcaggctgaaacaaaatggttcaagatggaaagtggtgtctatgtgaaggaaggaaggaagctgatagtggtaaatgtataaaaaagtatcgatattatttttagtataattaactgaggcaaaatgattacaatgtattttggtgtttaaaatatatgtagaattaaactgataataggaaatgtgaaagtaagatgcataatagcaaaaaggaaggaaaaagaggagtatactgttttaaggagcttacattatatataaagtggtataaataatttgtaaggaggctgtaataagttaaaaatacatactgtaaatgctagacaatccattaaaaatataaagcaagaattatagctaataagcaagtaaagaagacactggaatagtaaaaagtgtactcagtccaacagaagccagagaaaaagacacaaaggaattaagaagagatggaacaaatagaaaacaaattcagtatggccaaaattatattatgtttaagtggactaaggacattggttaaaagagagattgtcagrctaaagaaaacgaaaaatctcacagtattcaaagagctttaaaaatacattggttaaaataaaa

SEQ ID NO: 810342 - DNA, 407 bp, Homo sapiens
aaggttctatttttttctcctctgagctgaagttcctgtgtagagtgagacctcatagtagagtggaagttggaaacatttgtggagatacaggcacttaagcaaaaatcagagaagagctgcaacttctactggctctgacctgaggccagctgtacacatcacaaaaccccagggtaatgtcctctagctccaaccatgttgttgcatatgacaggacctcattctttttatggctgaataatattcctctgcatatgtaccacattttctttattcrtttacccactgagggacatttgggttgattccatatcctggctattgtgagtagtgcttcaataaacatgagattgcagatatctcttcaatatactgatttcctatcttttggaattatttccagc

SEQ ID NO: 810343 - DNA, 551 bp, Homo sapiens
tggtgggagaagaaaaggagccagtaaaagcccacagaaagggcacctacccaggctgaaggcatcaaggaaggcctcccagagaaagtgtggtctaaattaaaatctcatggacacatggaagccagacagcaagaataaaggtctgtgttcacaggtttggaggtggaaaaaaagcatgctaggttcagagaactgaaaatattttagtaaattggctataaaaatgtatgttttccagtcttgaacttgatttcttgcctttccttggccttcacagacaatggtgtgcttctggaagacatgaaggaccttctacatcttttgtgtttaccctgtatttgcttgactatgcaatatccacagctgacactttaataaatgcttagtgggtgtggaacttactagaaaaggagacctctccgaagcttccttggagctcatttcatacattccctgggcctgggcagcactgtatagaatcccttctggccagaaaggggctaacagaatccacctactggcccttaaracatgtatctacaggaagc

SEQ ID NO: 810344 - DNA, 632 bp, Homo sapiens
aactgaaataaagactccattctcaaatttttgttgagctaggtgtgaaagtaactaagttctggctactgagatataagcagaaatagtacctgcagattctacaaagggttttttaaagggaggttgtgaatcccctcgcttccttttttctccttcctgtgattgggatgtgtttcaatggctagaaatttgagcaggcatttggacaggagatcgccttaaaaatggaagatatatatagtggaataacaaggtagaaagagcctgtgtctttgacaccatggagggtcttaatagttctagacagggaacttccagactattatgagaaacagtacacaaacagtaatgtgcataaaatgaaaatgtacagttcgatgatttatcaaaaaggaaagctctatgtaactaccacttggtcagtgttttgtaaatattccatgtgcatcttttacatttttggtatgcaatgtagaaaatgtgtccattctgtcagtttgctaatcacgttgtttatattttctatatctctactggatttttgtttatttgttctgtcagttgttgaaatagttgtgtaacaatktcccactatgattgcacatttctgtttctgttagtgttggaaa

SEQ ID NO: 810345 - DNA, 532 bp, Homo sapiens
taaggtgggaagtctgggggcggtggctcactctctcagcactttgggaggccaaggtgagtgggtcacgtgaggtcaggacttcaagatcagcctggccaacatggtgaaaccttgtctctactgaaaatacaaaaattaaccaggcaaggtggcacgcccctgtaatcccagctactcaagaggctgaggcacaggaatggcttgaacttgggaggcggaggctgcagtgagcagagatcgtgccactgcaccccagcctgggcgacaaagtgaggatctgtctcaaacaaaaaaaaaaaaaaaaagaaataagatgagaattttaggcatcaacttcggagaggaaagaaaaattatttggaggtgcaaattcctttggtattagtaaaaattgactcacatgggccrtagtctccaccatgtccagtaaatgtcatcttcctctgttgctaatccttctgcttatatatatttgcttaatttttgccctgaccaccaggaaaagatttcccaagttccttttttctca

SEQ ID NO: 810346 - DNA, 602 bp, Homo sapiens
gcctcagttgaaggtgtgatcctctaaaacaggatttgtgtttgtataaccaggttaaactaaacacttggcttggggttttcctgggccacataggtaaagtgaattctggtccccaataagtgtgagratcagcttacagttacaaattctcatgaaagaagttttgcttatatttgggccatggccaagacaagcaagattccttactatcaccctttgtggaaatttttttctggctctctatttcgctaaagatgtcacttttcagaaatcctgatttctcctctagtctctgataaatccactgatctctctctgttcctatccttgacctattaaaactaaagcctccaggccactagaaatctgcagattagcccagggcagctgctggcttcagtgctgaccaaacgtgaggatttatacttatcattttgaactcagaatttccttttcatccttgccaacccagctatgcacctaaaaatatgtatgtgtgtgtatgagagtggtgcatttataaagctttggggtatttatgaactatctagtctacaacattgctggaaatggaagctcccctcactatatttttatat

SEQ ID NO: 810347 - DNA, 545 bp, Homo sapiens
tgactgcctctgcagtgtcatgcgggttgtcagggaagtgggggaaaagctggcagtcacaggcctcacccaacccagctcccaagcaacccaaagggccagtctcactcccaccatgcccacccccacaacagcaccaagtctgtttccaggtagtgggcaaacaggaagttaccccaggctacccacctcccagctgcaaaagtaagtagggcattccttcttcccctgcctgtggagtctgtacgccagattcaccccctccccagagttctggccaggagacttctcgattggttcaaattgttacaaagttcagctggaggtttccttctccctgtggccttttcccagtgcctctggcagccctcctcaaggacacctgtgaggcgaggcagaaagggccttctaggggatccagcaagcccgcagggattttcytgctgcttcctgtacccctgtatttctctcagttctctaaactgacccagctccaagtaaggtaagaatcttctcctgtcatctagaccttcagggttccccag

SEQ ID NO: 810348 - DNA, 582 bp, Homo sapiens
tgcttatttgtcactttaaaatgaaatcagattcagtgagctttgtgtctttaggggaattctcagtgaagtctggaaaccctyccccctcaggttttccgaccgctgcttggagtttctggtatgaagtgctggtgttctccgccaagcagcaggtgcatctgtaaattactgtgggatgttaatggctatatactttcttattcattacagctccagtccccaaaaggcaaaaatgtgaccactggactccctgcccatctgacacctatgcctacaggttactcagcggaggtggcagaagcaagtacgccaaaatctgctttgaggataacctgtaagtaccagcgtttagaaggaaaataaagcgatcctactgattcttgccccttccctgaggctgaccaagcagcagttctgcccacaggagagaaccatatgtcgttggtctcaggcaaaaggctgagagcatccaagtggaaatgagaaagctccgctgtattcaccagggaaggagctgattgtctctaatggctgtatgtgtcttgtgtttaatggttttacggtttcgtttgactgcag

SEQ ID NO: 810349 - DNA, 597 bp, Homo sapiens
ttttccccttcttaaaaaattttttttttgatttaaggggtacatgtgcaggtttgttacatggatatattgcataatggtgggatttgggcttctagtgcaccgttcacccaagtagtgaccattctaatcaataggcaattttttttaaatcttcatcctcctcccaaccttccccattttggagtccccagtgtctattgttttcatctttatgtcctttgtgcccattgtttagctcccacttataagtggaatcatagtatttgattttctgtttgagttatttcacttaggataatggccttcagctccatccatgttgttgcaaaggacatgattttgttcttttgttatggctgcgtagtatttcatgctgtatatatacaacattttctttatttaatcacctgtcgatggacacatagcatgattccatgactttgctgttgtgaatggtacttgaataaacatatgagttcagatgatttttaatataatrctttctttttggggtgatagatacccagtactggaatttctgggtcaaatgctaattctacttttagttctgtgagaaatttcaacactgttgtc

SEQ ID NO: 810350 - DNA, 602 bp, Homo sapiens
tacatatttatggggtacatatgaaattttgatacaagcatacaatgtgtgatgatgaaatgaaggtaactgggatatccactacctcaggcmtttatcatatatttgtgttaggaatatttcaaattcactcttcaagttattttgaaatatacgataaattattgatgagtatagtcaccttattatgctaccaaacactgtatcttattttttctatataactgtatttttataaccattaactaaccactcttaatcacccactcttacttacctttctcagattctggtaaccatcattctactccttacctctatgagatcagtttttttttagctctcacatataagtgagaacacgcaatatttgtctttgtgtgcctggtatttcacttaaactaatgacctccagttccattcatgtttttgcaaatgatatgattctattcttcgtatggctaaataacattccattgtatgtaggtaccacattttcttattcattcatctgttgatgtacactggggttaattccacatattggctattgtaaatagtgctgctgtaaacatgggagtgaagacacctctctgatatgc

SEQ ID NO: 810351 - DNA, 626 bp, Homo sapiens
ctacagttcagatcaatggcttaatgggagttgttgtttcaataggttcctgctaagaatggcctcttttaggaattgattttcaacctccacttatataggacttgagtggtcaaattaagtgagaaagttcattcttggcatttgtgggaaggttagttatgactgttggtaggaattctttctatagggagtgtgactatgagaagaataacgggaggccaatgagattccctgtagagaatgacacatggaggaatctgccttgatatttcttagcaggaaaaaaggaatgagattaagtggtattgctgcatctttactatgccctgcatactgtgcttgacacattacaagcacatatcattttatttttcaaaccacccatggtgtaattaaacaatattatacacattattaataaacagtttgtaggcactgttgtccaggcactattatcagaaataatgcattcaatactgacaatatctctatgtgatcatctaatttagagacaaagaaaagacgacacagcgttaagaagctttaccaaagagatagaggttataagtgtggaaccagagtttgagcccaagaaakttgcttacagaatatgtgctcatcac

SEQ ID NO: 810352 - DNA, 603 bp, Homo sapiens
tgagcaaatgcagaaaggaaatggacttatgcagaggcccatacagcccccagtcaaccctgcctttgccatgtcagctgtgggggattttgtgctggtctcagcctctgagygctctctgcctcagtttccctttgcagggtggagccagcacccacagccatgttttggcacgtggcaaactaactccttttgtgtactgtgcagtcttaggagtaatgaggcagcaatattattgttagttctctgttctaatgatcagctgtgaggacctaagcaaatgagagttgctatagtgttatgaagaaaagaccctgacttgttagagtggccatttgtttccccacagctattcatccccctggtgccctcatcaccagggcatatctaaaagatgccatgctagatacccatccagggtatggtacagacatcacaaggtaagtattccaaggccagagaagtgaaaatgttcacagcagctctggaagagaggaactcagaaacctctgggcaccttctggatggagcccattgcctccacatccaaacatggaccatgtattgctacaaaggaagcaatagtgtgctccacggaaggcc

SEQ ID NO: 810353 - DNA, 509 bp, Homo sapiens
ggataagggcatatctttgagcaccaggttccatgggcacatatctggttcattattctttgctttgcttgtgcaaaattattttcaaaggcaaagacacggggacaaagttgggctctytgaggctgttccttgagcaaagaggtgtatgcctctggctgcccacttggcagtggatatcttcatgcttcttttttccacccaaatattatggccactggagtatttgtaggaaacagtctaaaaaaagacaacactcacttccccttgcttcaggctcttcacagtcaactccactggcatgtttcaggcacctgctgtgtgccaggcattttttttcagaatggaacaatattgcccttgtctttaatgccttaactgtctagcaggaaagacattattatgagtacctggggcagaaacagtgtgagaaacattttggagacccaaaggaaggggccattgtaaagaagttccaccagagtagaggtaagaacggggagagggca

SEQ ID NO: 810354 - DNA, 451 bp, Homo sapiens
ttctgaagagcaacaaacaaaccagtttagccccaattcccattttgcataagaatgcgccccacaaaaacaacacccgaagaacattagttgatcaccactggttgatcgttaccagttgcaaacactaaagtttgagccaagacagaattttaaaagtcccctggaaggaactttgggtaaagtggttttgtggaaactggtgttaaagtgtcattagactgaactcaaacgttccatggggagcaccagatgtttcaagcaacagatcttggtaaacttggtttcagaaagaagttaagccagagaagggtttggacccataaaccaaagggaacttgttagtcactaagtgactgccaaggtacctgttttckttatgctaataagaggttacacaaattccaggaaggaggattgctaggtgcaggggatggttaggtcacagggg

SEQ ID NO: 810355 - DNA, 657 bp, Homo sapiens
ctgaattcaccttgctcagtgacgtgaattgttatctgggcacaggrcttgaaaaacactgaccagtaaagttgattgatgagtagacatagttacaccatttcaaagccatcaagtctaaaacaaccacaacaaaaactcttaaaaaatccttaggtgttgtttctgtcttcttaatgccaatgagaggctttcctgtattgcacgaaggacatccatctattttatttatttatttatttatttatttatttatttatttatgagatggagtcttgctctgtcgctcaggctggagtgcagtgacacgatctcggctcactgcagcctctgcctcccgggttcaagcgattctcgtgcctcagcctcccgagtagctgggattacaggtgcccaccactaagcctggttaatttttgtatttttagtagagacagggttttgccatgttggccaggctggtcttgaactcctgacctcaggtgatccacccgcctccgcctcccaaagtgcccggggttacaggcgtgagtcaccactcccagcctagatccatctatcttgaactaaaagttaatcttctggtttaatctaggattttatgaaaataaatttgtctgttagaaaagtcttacctgcgctacgaaaacattttaa

SEQ ID NO: 810356 - DNA, 657 bp, Homo sapiens
ctgaattcaccttgctcagtgacgtgaattgttatctgggcacagggcttgaaaaacactgaccagtaaagttgattgatgagtagacatagttacaccatttcaaagccatcaagtctaaaacaaccacaacaaaaactcttaaaaaatccttaggtgttgtttctgtcttcttaatgccaatgagaggctttcctgtattgcacgaaggacatccatctattttatttatttatttatttatttatttatttatttatttatgagatggagtcttgctctgtcgctcaggctggagtgcagtgacacgatctcggctcactgcagcctctgcctcccgggttcaagcgattctcgtgcctcagcctcccgagtagctgggattacaggtgcccaccactaagcctggttaatttttgtatttttagtagagacagggttttgccatgttggccaggctggtcttgaactcctgacctcaggtgatccacccgcctccgcctcccaaagtgcccggggttacaggcgtgagtcaccactcccagyctagatccatctatcttgaactaaaagttaatcttctggtttaatctaggattttatgaaaataaatttgtctgttagaaaagtcttacctgcgctacgaaaacattttaa

SEQ ID NO: 810357 - DNA, 657 bp, Homo sapiens
ctgaattcaccttgctcagtgacgtgaattgttatctgggcacagggcttgaaaaacactgaccagtaaagttgattgatgagtagacatagttacaccatttcaaagccatcaagtctaaaacaaccacaacaaaaactcttaaaaaatccttaggtgttgtttctgtcttcttaatgccaatgagaggctttcctgtattgcacgaaggacatccatctattttatttatttatttatttatttatttatttatttatttatgagatggagtcttgctctgtcgctcaggctggagtgcagtgacacgatctcggctcactgcagcctctgcctcccgggttcaagcgattctcgtgcctcagcctcccgagtagctgggattacaggtgcccaccactaagcctggttaatttttgtatttttagtagagacagggttttgccatgttggccaggctggtcttgaactcctgacctcaggtgatccacccgcctccgcctcccaaagtgcccggggttacaggcgtgagtcaccactcccagcctagatccatctatcttgaactaaaagttaatcttctggtttaatctaggattttatgaaaataaatttrtctgttagaaaagtcttacctgcgctacgaaaacattttaa

SEQ ID NO: 810358 - DNA, 555 bp, Homo sapiens
gcaaagttttcataggcctggtctaacactgtgagcagctctatcgcgttagctgtggccctctctgttgctggcaacttcagctccaaattcctctgaaagcttctgtaaggggagcaacatttgaatagttggatggtgttcacctgacagaatctagctaaaaataaaaaagaggttttaatgagatgccactggtggcataatattagctgattgacacgttctggttatttcggtgaaaagaaacatttaaagcatagctggccctgttgtccaacgtggcagtaaattctggtcactcattagtacagttcgagctagaacagggggttatgcaaggaaataacaccgatggcagcttctaccctgaatacaaaggaaagtgatatacagtgattacgtgaaatcgagacatgcttagcacaggagaattggatcaatgctgcatcaaggctgatgctctctctcatacacaggagaggttagtatgagagtcaggccaacattcagctggaaaaacacccragctatgtttgggctgagatccctaat

SEQ ID NO: 810359 - DNA, 616 bp, Homo sapiens
ttgaaatgactgttctttcccgactgaattgtcttgacactcytatcaaaaataaattggccataaatttaagaatttgcttcccagctttcaattctattccactgattgaatttatgtttatgtatattgttcttctttttcaatattttttatctactttgggtcttttgtaattctgtttgaattttaggatctgtttgtctatttcttcaaaaaaggaaactggaatttttataaggattgcaatgaatttttttatcaatttgagagcaccaccatgttaacaacattaaatcttctaatccataagcatggaatatatattatttatgttttctttaatttctttcaacaatgtcttgaagttttctgtgtagaagcctggcacttccttgattacatttatttctaagtattttgttcttctttatgctattgtaaattgaattgttttctcattctcctttttgtattgtttattgctagtgtatagaaatagaattgattttaatatactcatcttgtatactgtgatgtggctgaactaatttattaattatagtaagctgttgtgggttccttaggattttctctacacaagattatgtcattt

SEQ ID NO: 810360 - DNA, 538 bp, Homo sapiens
attaaaaaatgctcaacatcactaatcatccaggaaatgcaagtcaaaaccatggtaagatatcatctcactgctgctaacatgtrtaattctttttatacattgttggattcgatttgatattttgttgaggattttgcatctaggtttgtgagcaatattaatctgtataattttttgtttcttaatttcttcttttttttcttctttctcttttctttgatttcttgtaatgtctctgtctgtatgtggcattagggtaccgctggcctcataaaatgagttacggaatattccccctgcttctgtctttcaaaagacacagaagaaaattggtataatttcttccttaaatgtttggtaggattcatcagtgagccaactggggtcttggctttctgttttggaaggttattaatgattgtttaatagatataggcctatttggattatctactagcactttccttttcttcctttctttccccttctcatatcttttggatagatggaaggtgaatgatggtatataaatgtg

SEQ ID NO: 810361 - DNA, 529 bp, Homo sapiens
ctctgtgtccccacccaaatctcaccttgaattgtaatatgaattgtaatccccacgtgttgggggaaggacctcatgggaggtgattagattacgggagcagttcccccatgctgttttcgtgacagtgagtgagttctcctgagatctgatggttttataaagggctttccccccctttccttggcgtgtctccttcctgacgtcatgtgaaaaaggatgtctttgcttccctttccgccatgataatatgtttcctgaagcctccccagccctgcagaactgtgagtcaaacctctttcctttataaattacccagtcttgggcatgtccttagagcagcatgagaacaaactaatactattgtaaattaaagaaaagttattagaggtggcacatgcctgtagccccagctactgggaaggctgaggcaggaggatcacttgagcccaggaggttaaggctgcagtgggctgtgttcatgccactgawctccagcctgggcaacagagaaagatcctgtctcaaa

SEQ ID NO: 810362 - DNA, 611 bp, Homo sapiens
atgacacatttctcagaatgtatcctcgtcattaagcaatgtatgactgtttccatatgaccaagaaatttcacacctagttatatagtgaaaagaattgaccagatgcagtagctcatgcctgtaatcccagcatactgggaggccaaggcgggagggttgcttgagcccaggagtttgagactagcctgggtaacatggcaagacctcatctctacaaaaattaaaatgaaaacattttctgggcatggtggtatgtacctgtggccccagctactcaggaggctaaggtgggaggatcacatgagcccaagagtttgaggctacagtgagctgttttcacaccattgcagtccagcctgggtgacagagtgtgaccctgtctcaaaaaaaaaaaaaaaaaagaaaagaaaaaagaaagaaaaaggaaagaaaacaattgcggatatatgtccagaaagaaatgtacaaaccattgtagacaaatattcacagcaacrttattcataataccaaaaaactggaaacaagcaaaatttctatcgactggtgaatggataaagaaatgtagtatatccatgcagtagaatgttatttagccatataaggga

SEQ ID NO: 810363 - DNA, 628 bp, Homo sapiens
ggggatctgctgaggagcaattttggatcttccttcctataaacatccatgttgtaaaaaaaagccagtaaattggcttttttatgtttattttttagacaaagtctcactctatygcccaggctggagtgcagtggcccgatcttggctcactgcaacctctacctcccaggttcaagcgattctcctgcctcagcttcccaagtagctgggaatacaggtggccgccaccacgcctggctaatttttgtatttttagtagagacagggttttgccatgtggactaggctggtctcgaactcctggccacaggtgatccacccacctcagcctctcaaagtgctggaattacaggcatgagccactgcacccagccatcaataaattggcttcttactgaataataaatccaaagttaacccacaaagttaaccactgctgaatacttaagataaggttagcccaataatgaggctccttactccatcacaaagcccagattagcccactcgggagcatgctaggaaatccaggcctgaccaaacagagacaacctgacctcctaatttgggccaggatggagaaggaacctctttggggagcagagtgagtttatccagaaagagt

SEQ ID NO: 810364 - DNA, 644 bp, Homo sapiens
ctcccaaagtgctaggattataggcgtgagccgccgggcccagcctcttctccccatttgtttctcctgtgccagacccgcaggttcaaggatcatacttgcctgtgtttgaacatggctatgaggagacctgtgctgtcagtgtgggggacccccccagctttctcaggctgatcaagcagaagttggccatgccggccaacagttggtggcattcttcccatctcgtgggcccactcatgacagagcagctgttactgtcatggttattttatttttattcctccctctgggagcccagaatcaaagggaaacatcagcactgctgcctcattacagagagcagagaaaatggggatggggattggacattatctctttttttcttttttctttctttgagacggaatttcgctcttgttgcccaggcgggactgcagtgtcatggtctctgctcactgcaacctccacctcccaggttcaagcgattctcctgcctcagcctcccaagtagctgggattacaggcgcccaccaccacacccagctaattttgtatttttagtagaaacgaggtttcaccatgttggtcaggctggtctcaaactcccratgtcaggggatccacctgcctcggcctcccaa

SEQ ID NO: 810365 - DNA, 537 bp, Homo sapiens
cttctggtcatcctgagtcgacactaccaggacgtctcctgccttcagttcacaggggacagcagccacttcatctcagggggcaaggactgcctggtgctggtttggagcctctgcaggtagcgccttgcgcactcaggcctgcacctggaactgcacccgggctcaggcggggagaggaggcgccaaggcccctggcgggaaggggcttctctcttgggggctggagtgcagaggacggagtgatcatcccaggggtcctggctgcccacactggggtctggtttgttctgggggccgtgggggcccagccttgagtttactcaggtgaggcaggccaggctgctgagtggaggcaggtgtgtgcgtgaggtgggtgctggaggcgtggactgccctgttccctccgctccccgcctgctgagcacctgccccaccccgctcagcgtgctgcaggccgacccctccaggattccggcgcccaggcacgtctggtctcaccacrcgctccccatcacggacctgcactgcggcttt

SEQ ID NO: 810366 - DNA, 575 bp, Homo sapiens
ttgtttcggcatgaaattatagcactattacccatgttagtgggttcaatgttaagtgaatcaatggtatatattaaataatatgcctttaaacaraaacacatggccagtgtgatggctaagtcctgtaatcccagtattttgggaggctgaggcagggggatcacttgaggccaggagtttgagaccagctggggaacatagcaagacccccatctctacaaaaaatttaaaaattggctgggcatggaggtgtgcacctgaaatcccagctacttggaaggctgaggcaggatgatcatttgagcccaggagtttgaggctgcagcgagctatggtcacaccagtacactccagcctgagcaacagagtgagacctggtcacaaaaaagaaaccaaacaaaaacaaagaaacacacataaaacaaagttatggactgacaagttgatgaaaatatgaccagaggcttgcacaaacctaaccctttgtttaccccagggtcaatggttcagtatccgctcatttgatgtttaaagcaactttatagaaacaacaacggtgcataatgagaagc

SEQ ID NO: 810367 - DNA, 509 bp, Homo sapiens
agggacaaaataactaagaagatgytgctccatctatccactcatccattcattcatttattcaacaagtatttattgggcactttttttttttgtttgacacagagttttctctcctgttgcccaggctagagtgcagtggcacgatctcggctcactgcagcctccgccttccgagttcaagcgattctcctgcctcagcctcctgagtagccgggactacaggggcacacccccacacccggctaatttttgtatttttagtagagatgggattcaccatatcggtcaggctggtctcgaactcgtaacctcaggcgatccacccaccaaagtgctgggattacagacataagccaccgcacccggcctattgagcacttcttacataccagccactgtgctggttgcttgggatatattggtgaatgagaaactcctcccctcaaggcacccacaaacaatataatttgttcatagagacaaacaatataatttttgttgttgtt

SEQ ID NO: 810368 - DNA, 610 bp, Homo sapiens
tcactatatatttgtgctgtcaagaggaaagaaacccatcttcgatttctcatggatttactgacagtgaaagtgggatgccctgaggaggagtagggtggagctgtgagcttcccatgggaccctccagggagtgagtttctggcatcagaagtttgagttgccgaaggtctccattggctctgatcattgtaattatctgccaaaacagccagcttagagtagtctcttcccatcttctgcttgcaacaatctctataccatacatctggacaagcaccaccaattaccttaaccattttagcctttcttagacacacactagcaacacaggcactatagcctgaaccaccattccctgccctctctccacttgaaactcattggtcccaaactcttcgcttaatccaacagcaggagtacaaccctgggattatgtgcttgcacctgactacagagtgagacatcctgaatgcaaaccccaactcggccacttttagctgttatttaacttctccatgacttggtttccatatgcctcaaataragcaacaatatctaattcaagatacctatttgaaaagtaaaatatgctagttcataaatcatg

SEQ ID NO: 810369 - DNA, 637 bp, Homo sapiens
ttattttaagccactgtatgctggagtattttattgtgtagcaacaaataaacaaaacaaaacacacagttatctcacgcaatggggaagaatccagggcagkctctgtatttgtaactttctactgcctctcagtttagattgtacatggacattggaaaaccggatggactcaaggttaaaaattgcacaataatgagaggagattcctctctcctctgatcttatgcacatgtttgctatacgcttacttttctgccagggttcaacgatctcatgtcttaattgtaactcctaaatgcacactcaccagaatggatatttccagcttctataagcctgatctttttctccttttcacatgtctcttccaaaccagtccttatccttcctttcagaaatttccattactttcctctgagctctttgtcaataaaaaccccaaatgagaactatctagctattgcaaacttagacatatagaggaaaatttctgttattattcttgattttgctgttgattgagtctaaatggagaaactattttaggcaagagagatattcagcctaatagtgatttttgaaaaatatcttattttaatagctatcctaagtgaggaatgccaacattataaat

SEQ ID NO: 810370 - DNA, 614 bp, Homo sapiens
tccacctgcctcagcctcccaaaatgctgagattacaggcatgagccacctcatgcagccccagttgtcttatttttaagttgacaaataacaattatatacatttataatgtactacacattttgaaatatgcatgtattgtggaatggctcaatcaagctaataaacgtatgtattatttcacgtatttatttttagtgagaatacttaaggtttactttcttagcaattttccaagtgtagagtgcattgttactagctatcatgcaatagctcccttggacttatttctcctcattaaaattttgtattttttgaccagcatctcttcaatctctccaacccttagcccctggtaaccgcccttctattctctacttctatgagtttgaatttttaaaagcccatgcataaatgaagtgaaatcaatctaagtacccattcatggataaatggataaagaaaatgtggtatatacacacaatggaatattattcaaactgaaaaaagaaagaaatgtcatttgcamcaacatggattaacctggagagcattctgttatgtgaaataatccccttctgtactaacttcaaagccaatctaaaagcagtct

SEQ ID NO: 810371 - DNA, 615 bp, Homo sapiens
taatgaacccattatgatgaatcttaaggctccctaccattctggaacattaggttaagttcggagagttaagttagacatattagacatcactaactatttaaracataatgggaccactgtctacactcaccatttactctctgaggattcttagcctatgtggagaaatggcaacacattaagaaaatatgactcagatttcattaccaggaaaagaaaactatactgtctgtaacatcagttcactattataggtctttacaattttaatttttgacaaatatattttttaaaaaaaggtcttttatgtacacacatgaggcaaaagattatattttaaaaattgccaatttatactgtaaaatatgaattctgggaagggttattagtgaatttgtttcttataaaatggcatttatacttatggttgctcttgaaaattttcaaaaataaaatcaatatgttgtgttttcactttcttgaagtaaaaaactcaaagtagtcctaatgtaaagctgtggagtacatgtcttttgtgtacttatatttctattagaatcttagaaaatacaagtttgagaccatctataaaataaatatatttatttatct

SEQ ID NO: 810372 - DNA, 615 bp, Homo sapiens
taatgaacccattatgatgaatcttaaggctccctaccattctggaacattaggttaagttcggagagttaagttagacatattagacatcactaactatttaaaacataatgggaccactgtctacactcaccatttactctctgaggattcttagcctatgtggagaaatggcaacacattaagaaaatatgactcagatttcattaccaggaaaagaaaactatactgtctgtaacatcagttcactattataggtctttacaattttaatttttgacaaatatattttttaaaaaaaggtcttttatgtacacacatgaggcaaaagattatattttaaaaattgccaatttatactgtaaaatatgaattctgggaagggttattagtgaatttgtttcttataaaatggcatttatacttatggttgctcttgaaaattttcaaaaataaaatcaatatgttgtgttttcactttcttgaagtaaaaaactcaaagtagtcctaatgtaaagctgtggagtacatgycttttgtgtacttatatttctattagaatcttagaaaatacaagtttgagaccatctataaaataaatatatttatttatct

SEQ ID NO: 810373 - DNA, 631 bp, Homo sapiens
cattttgatggagagatttattagaataacaaatttcaggatttttaaattgaagagaaagatctttatcaattatcatttttacccttcttttggtaaacaaagttaaggaaaatagcatgatatttcaaagtataatttcacaaaacacatcaaagcaatacctattttataaaacatgaggaaaaatgacagtctttcctttcatctaattttagtttgtcatattcttttttcaggttttcttttttctttttttaaagatattaaaataatttatttctgtcacaaaaggtctttctcagacacatcctccactaatggtgacatggggactgtctgttcccagtgtttctggatgcatgagaatggtagggtaagagagagaacaaagcctcttagtccctttctttctgctacaaacaccttagggatgcgagtccggggtgagaggagagagggaaaaccgcggctggccttgcatgtgcctgactcagtgtgcatgccccttgctgcccaagtcccttgttgtccwtgtgccttgctgtctgccttctgtccccgcagagctgtgcaaggagacatcgtgacttctttctgtgttgctgactaggagtcagccactaggtcc

SEQ ID NO: 810374 - DNA, 577 bp, Homo sapiens
tgagtgagttctcatgagatctgatgattttataaagcagttttcctgctcttgttaactcgctcgctctctcctgctggcatgtaatatgtgcctgcttccccttccaccatgattgtgcatttcctgaggcatccccagccatgtgaaactgtgagtcaattaaacctctttcctttataaatttcccagtctcaggtatttctttatagcagtgtgagaatggactaatacaaaatgccttgctctacttggaacctctccacagggaatcatgcagagttcctcatcacatacccaactttttgtgtctataaattgtttggcttaacaattggtctacagctctgcaggcctgtaggtataggtcccacttatcatgatagtactcttaccctcatggcaccattctcttaattccaacaaggcactaccgtggagcattcagggtctgctggtgaactgtgtaggctttgatacaraaggctctagaaatgagtgagaatggtatgttatctaaattaattccaagattttgcttagaggtcactttatttctcctctcacattatattga

SEQ ID NO: 810375 - DNA, 494 bp, Homo sapiens
ttgccttctaagcaaaatctgtcaactgctgttcactcaaccccgcaaagcagcccagaaacagtggctaagactccttagtttcaggaactggacatttcttacccctttgcactagttcacatctcattattggttaggttggggttgtgaagcgaagggatggctcattagctgcttccctctaggttcagatgtgtgagctactattagacagatgccacagtaataattgttgcaggcaaattccaccattgaatgctaaaatcagtggtgaaggtttgaggagaaacaggatatttgcatagcttcaaagtatctttcccaagatatgtattaattacaaaacaaaaacactaccattacaatggtgaaacccaacagatagccccttaaccaagtgatcaaggttaacttcactagtaaccasatggtgtcccccagacccccggccccttccccagacacgatgcactgagaagggcacacgtcat

SEQ ID NO: 810376 - DNA, 513 bp, Homo sapiens
gtttactgaatcacccatttggaaatgtccagtttcttctttgagattgtaaataaactcagtaaaagtttaactttcattttttttccacccttgacaatcagaaaattgctaggttcaaaaaagctcccagagattaaacaaaatggtttttttttcttccttcacaatagttttcccttattgctgtactatgtgataaggttaatataacagctgccatacagatcattaatacagggagataagcaaagttgcatgctggaaacatttgcagggtatcatttgccttcttctgctgataaagaagccttaggtaacaaatacagatcacaggcactgaatatttaactttttagacagaaatcccaattgatctttcctaatatgttattattcataaatrctctttaaagttgggtactgactgctctcaaaatatgattttttaaaaaaaatttgtatgttacctaccttttcaagtttacagtcaaacgtaatttactttttaat

SEQ ID NO: 810377 - DNA, 554 bp, Homo sapiens
atcagtcttagaaatatgatcattaagtacttttacaaaaatattttgaggctttaaaagttcggttttcgaatgtttgtatacattttgatacctcattttgaaaagttttaaaaaactgtgctaagaccatttaagcttttctctgcaaatagtcttgaatatttccattacaatgattcctgctgggtgggaattaacccacatttagattattgaagagtgcacttttcattagttgtattatctcttgattcttctgcttaaacggaattggattttgcaccttttctttacagcttcagtgagaacagtaaattacctcttcaagatgtttcagtgagggccaaatgttccattatatcccaggggattaataagaaactctgcattcacagctgtctgtattataagtcattggatctaataaatattgctgtactgtatatccattawaaaggtgatttttcagctaagctgtcataatattataatatgattatcctatattcaatgatcaaattatcagtttgatttttttgaaattacaaatt

SEQ ID NO: 810378 - DNA, 595 bp, Homo sapiens
aatctacaccactgactttctctaatcttattcatagttaagtggcttgactttgcttatgagtcagcaaacatttgatacccttttttttcactttctccctgagtccattcgtaataaaactcktgattcgaaaaaagcaatacataatgagatttgttttcctatcactgacttctactttcccaaatctaatggataattcacacctaacttatgtggcttcttagctaatcatttctactttcccaaagcctttcttcatgttcttctgattttccaatgactatattggctgctccttctcacacttcttcatcaaagcctcttcatcctccccaacctccccactgggatcatacctaattagtcttcttttcactaacttttgtcagttcagtcctatctatgcaattcaaatttaatagctccaggattcacctcttctctgaactcctgaaccatgttccaatcactgctcagcttttccctttggcatcttaggcggagtcttgctctgtcactcaggctggactgcagtggcgtgatctcagatcactgcaacctccgcctcctaggttcaagtgattctcat

SEQ ID NO: 810379 - DNA, 595 bp, Homo sapiens
aatctacaccactgactttctctaatcttattcatagttaagtggcttgactttgcttatgagtcagcaaacatttgatacccttttttttcactttctccctgagtccattcgtaataaaactcttgattcgaaaaaagcaatacataatgagatttgttttcctatcactgacttctactttcccaaatctaatggataattcacacctaacttatgtggcttcttagctaatcatttctactttcccaaagcctttcttcatgttcttctgattttccaatgactatattggctgctccttctcacacttcttcatcaaagcctcttcatcctccccaacctccccactgggatcatacctaattagtcttcttttcactaacttttgtcagttcagtcctatctatgcaattcaaatttaatagctccaggattcacctcttctctgaactcctgaaccatgttccaatcactgctcagcttttccctttggcatcttaggcggagtcttgctctgtcactcaggctggactgcagtggcrtgatctcagatcactgcaacctccgcctcctaggttcaagtgattctcat

SEQ ID NO: 810380 - DNA, 563 bp, Homo sapiens
ttttcccagggctccaaaggactgaaatcgcaatatgcctatgccatctgttcttcataatacatattgactacttttstgtgtcgccacatgttgcccactcttggactttctgttactagtcacagctcacctgcaaaggtatccaaatctcactatattctgaataagttggctacctcaccagaccactgcaaatcacagattccactcttctgtttgtttgctttgaattttgttccaccattgaggtcagggaatatatgttttctgtgtttctttactttcccatattgcctatataatgctatgtacatttttgtaaaaatatgttttactttgatttatataattttgtctgattgtagaaaaatgacaattacaatcctaatctcccactgaactcctccatgggtcaaactcaatgacctcttctacctcatgtaagattgaaatataattttgccagtaaaacacaaaataagtactatataagagtatattcactttatttacttaataaataattacaaaagttaaatattagtttttttatctgtaaa

SEQ ID NO: 810381 - DNA, 624 bp, Homo sapiens
gaattttgcttttattctgtaaaatttttttcaatggtaaaaaagtgaaaacatacatcaaagmctcataaaagttcaataaaggaacaaatgtatttgtattttacatatcagtataaaattgggaagaaatgcacaacgatctcttaaattttcccctcaaagtatttgttcataccttaaacatttgattttaaaacatttttctccttaacttaagtagtctaaaacttgaaatggatctataacaataatggtggcatctggaagacatttttagcaacagacaaagccaaaagtcaatggaatgcaacatgtggataaaatattataactttagctatgtggttaggtatttaaatgccctttggcagttgatgcctttcttttgatatgcaaccttagaaagctaatgctattactgcactgatatatccaaaatatttacatcttgacatctatcatcggatgtcattactttccaagacttcaactagatggtattgtatgtgatgagagtagttctttcatttacttaaattttattatatttgtgaattaaaccccttgaatgtccacaaattatatggtatttgttaaaaaactttgggtaaataattcagg

SEQ ID NO: 810382 - DNA, 562 bp, Homo sapiens
ttttcttaggcctgtgcagttgcatacaagatttaacacttgtatgtctttgtagtattataagatgattctacrgagaataaaaaataacttatactctctacagagccagacaataggtgctggttcttaaagaagcaaaaagattaagcctgacagattttctgtttcctggagtaacagtgtgcttttactgaaatacccacaaaggttgcagcaagaaataatagtgtagcaaaaagaaataatttgggagcataaaaaacatgtgggttttgggttttggagaaaatattaaacactgcactctatcaatatcccttaggggtacaattcttagccttaacaaaaaacaatttataagatatctaacgatgaaatttaccctcatcatccagttcctttactttgctgttaaatcaagaatgaccccaaatggaaacatttctgaatattcttttggaataaattctcaaatttcaatagtttacttttttcaaaagtttgtaacactgactacctgagttctctctcccaatatttctgggaatactgaaaagaa

SEQ ID NO: 810383 - DNA, 579 bp, Homo sapiens
ggttatctttctttgtactgcatcctaagcctcytaccacttgatgtactgctggaggcttctgagctgccagtttttttttttaagttctccaggtgcaatcttaacatggtcatcttgaaagtcataataatcctctcaccatgacacagtgccccaaatagcatcagaatcctttgacactataaggaagcaatttttatcttatttcaccttacattcacttggcagtcataccgtgtggcatgagttcataagtacaggaccgcatggatgacttagcttgacataatcattctctggataaaaaaaattggaatgtagttgaaaatgaataatataccactcatttctccacatcaatgatacaattcagcagtctgaaagccattacatagtcagtcatcgttaatactgatttaatttttgtactttgattttatttaatccttacaataacactgtgacatattgtaaatatagaaactcagtttcagaattgaagttgcttaggctcttgcagctacttactgatatcttccatacatgcaatgtactttatattacaacatagtgcct

SEQ ID NO: 810384 - DNA, 588 bp, Homo sapiens
gtggccattaccttagtgagtttattttacaaatgtttcctctcttctctactagatccagtaggagaaaccraattaaggaatatgtgcaaaatgtaatagaaacacagacatcatactataccatttgtccttttatacaattaatttaacttcctatttatatgggtttcatgaaacaattatgcaaggacaactgtttaaaatacaggcaaagctctccaaatatgcataagtttagatgagaattaaatgaagctttatatggactgtaatatctgcactgatagacaaggctttttgtcaccttattaaaaagcccctttatacttgaagatcaaatttacataatcaaatgcatctccttaatagaacaagggaagagctagaaaagggaattcatgcaatttctaaaactggcattattgagtggagagtgtatttagtatctgtgtttttcctcagtataatacataaaaatccatatttatagggtattcaatattttatgaaatactattttaagcactgtgtttttgaatagacagactacaaaatgttgttgaaaataggtgtacccatgaattg

SEQ ID NO: 810385 - DNA, 588 bp, Homo sapiens
gtggccattaccttagtgagtttattttacaaatgtttcctctcttctctactagatccagtaggagaaaccgaattaaggaatatgtgcaaaatgtaatagaaacacagacatcatactataccatttgtccttttatacaattaatttaacttcctatttatatgggtttcatgaaacaattatgcaaggacaactgtttaaaatacaggcaaagctctccaaatatgcataagtttagatgagaattaaatgaagctttatatggactgtaatatctgcactgatagacaaggctttttgtcaccttattaaaaagcccctttatacttgaagatcaaatttacataatcaaatgcatctccttaatagaacaagggaagagctagaaaagggaattcatgcaatttctaaaactggcattattgagtggagagtgtatttagtatctgtgtttttcctcagtataatacataaaaatccatatttatagggtattcaatattttatgaaatactattttaagcactgtgtttttgaatagacagactacaaaatkttgttgaaaataggtgtacccatgaattg

SEQ ID NO: 810386 - DNA, 620 bp, Homo sapiens
cttctactgtgtgactgaagaggaacattctagtttctgtgaaagggaagtcctttttaaataatgttgacaagaaatactaatatatccccctctgcactggtgatgtggtgtagatgctcttgggatggtctaggactctgggtttgtctcccatgtggctccttggaaacttgcaatggggggttgtgacttcaatagagaacagatagttcctcattgctgaattcagtcatgtctacatggttctttttctctgttacaccaagacctgcatacctgtatctctgtttttccccttagtcatctgaatttttatttcttgggaatgtgcaggaggagggagtctgtcactactgctttttattccagtcgatgtttatggcataaacttttttcctagagattttagagcttagacattttgagctcacctagtatagctcttgcaaatcaggaacattgactttaaagtctatatttagaaaataaaaataccaagaaaagttctacttggtttcagattctgctggggcatctatttcstgagatagaaccatcagagtagcccagctagctgagctgcaggtaggaccactggatactaaaaaaggacaatt

SEQ ID NO: 810387 - DNA, 539 bp, Homo sapiens
tctgtaaacgttgagtaacatgttgatttacacttcacccagtgggaaaaaaaaatggggaaaaatctgtgatgtaggttatggtgtctctaagacaaagaaaaactgctctctgtggttgatgttamcctccagtttcatagaaaggaatctaagaaggaggagaaactaggctaaatattaggggtgtctctttatctggtgaatctctttatgatgccccaaatgatggatgtttggggaagatttagagtccaatgtttatataaagtaaaattcatctatctggataatctgtttagagtatttttgtttttgtaaacaatccaaataattgcctggactattgacttatgtataattttttaatatgatggtttatcatgacagtttctatggaaaacagaaatttggattttgtgtgtgtgtgttctatattttagaggtcagaaagtgggtactccaatgacatgaggttaggatgctaaattaattaatcaagtttctcacatttaataaatgaaataaaacagttgtac

SEQ ID NO: 810388 - DNA, 631 bp, Homo sapiens
tggaagtagaaaacatatgataggcttatattttaccttcttaccaacagtgtatgagaatttcagttgttctacttcctcactgacacttggtataatcattcttttaaatttaggcattttaatagatgtatagtagtaccacatatggttttaattgcatttttctaatgaatggtgtagagcatgtttttatatatttatatactgtgtgtaaagtatctattcaaattgccagttttctattgccctgtgagtttttgcattcataatttttgacaatgatttatatgttgttaatacaaattcattactgggtgtgatttgtgaatatattccctcagtatgaaatttctcttttattaccataatagtgtcttttgaagagtgaaaattctgaattttgataaagttcaacttatttatttttaaatgaaacatgcttttggtgttggtctaagaaataattgcctaacccaagatcataaaggctttcttccatgtttttcttctggaagttttatagttttaagtttcacatcttttcctataatccatcttatattaatttctctatacaatgcaagttaccaawcaaggtttttttttttgtttgcttaaattttttggt

SEQ ID NO: 810389 - DNA, 594 bp, Homo sapiens
cagtttttcatcttcataactctgactgtaaagataatatgactgttctagatacaacagtggttgtccatgaacyaatgctccaaaaagcacttccctatagatatgaatcacaagccaattgcttcaaatatgaggagtgtggtaaaacaaatgcataaactctgcatttctgatgctatttttaaaagtaatttatcacttgtgttttgttacctgaaacttagtttatataccatgccaccatgggtttattgatttggtctttttctcacattaaatggaatatgtgatattcaagatacacacacacatacacacacaaacacacacacacacacttttcttcaatgaacagcttagaactagaggaacaaaattagttaattaaagaataccatatgtaaaaatcaactcgttagattaaaggcttaaatgtaaaacctgaaactatcaaaaccctggaagataacctaggaaataccactgtggacataggccctggcaaagatttcacgacaaagatgccaaaagcaattgcaacagaaacaaaaattgacaaataggacctaattaaactaaagagcttctgca

SEQ ID NO: 810390 - DNA, 535 bp, Homo sapiens
acgctttaaatgtccattatgataaacatggactcactgacatttccacattaagttaaaatgattttgcagagtatagcctgtacacatcaaaatycttagaggctctaaaactgtatcaagttgagcagcaagtattagctttaaggacattgcttgttagcatcagccaattagatattctggacacaaatagggaacacacttgggcaatcaatataaaaagcatctcttttgtgaaattaattggaaaattagattttgtgcctaagtataaattctaaacgattcactaaaatggatcaaaacagctttcaaactaaccacttctgttgactaagtcagcttccttcaccacttgcatcttaattttaaaacaaattaaaagacaccagagaatgaaggcaaatatcctgatatttcaggtctgcttcctgaggaagtccttttatattttagttaccaagttatctgctttaatgtccctcattgctttagcatgccttttttcaccttgacggatggtctctattat

SEQ ID NO: 810391 - DNA, 454 bp, Homo sapiens
ttatgctacatattttctaaatttttaaaaaagaaaaatagcaagacgaagaggtggccaagaaagtcctctcttaaaaggtagcattttaacaaggactcaaatcaaatgagtgagcaaaacacgaatattcagggagaaagtacaagaggctgagacaacactgtgcaaaggccctgtggcaggcaaggttcaaaatgatagatgtaagatagatgacacatcaagtcccctttcttgctccaacatcgaaatgggacttaggaatcaggagatctgaaggtaaaaatatttagaacagaaatatattttgtctccattggggattctggcttttccaataagtwgagtttttataactatttttttatttcaacttgtgtgtaagatctttttatttcaaatctagaaaactgtcataatgataattaaaatttcctcagaaattatataa

SEQ ID NO: 810392 - DNA, 600 bp, Homo sapiens
cagcaccttgggaggctgaggcaggaggatcactagaggtcaggagttcaagaccagcctggccaatatggcaaaaacccacctctactaaaaatacaaaaattagctgggtggtrttgatgcgcacctgtattcccagctacttgggaggcagaggtcagagaatctcttgaacctgaaaggtggaggttgcagtgagctgagatcacaccactgcactccagcctgagtgatagagtgagactttctctcaaaaaaaaaaaaaaaattgagatcatattgcttatgcagttttgaaactggattttctcgtgtaacaagataattgtggttagtgcctacaaagcagtccattgcttgaaatggtcattatttatttattggtgattgactttaggtttatttgcagacacatggatccacgattccttgacctacaaactaagtaagattaatctggtaaatactgaaaggaaaaaacagtggtataatggtaaagtggggcagggaaggtcctgatatgtagcatttgccaatgtcactggtgtaaatactcccaccatggctgatttcaaggtaacagtttagcaaacagcttgc

SEQ ID NO: 810393 - DNA, 594 bp, Homo sapiens
tatagtcttttcctccctgatctaggatccaatccatgatcatacattgcatttagttgtcatgtgtttagtttccctttatctggaacaactttatagcctttcttaaccttgacatttttgaaaaatatgggccagttatttaatataatactaattttggtttaatatttcatcacgatgaaacttaggttatgaattttgccaggaatactatagaatttaaatatccttctcaatactggtgatctttcattatttggttaaggtattgtccaccaggttttactgatataaaattaatattttccctttgtaattaataagtaatttgtagggagatactttgagaccatgtaaatatcttgttctttatcagactttcacctggtattttagtatctattaatgatcttctaactccataattccttctatattgattagaatttttctgtaagagctatcttttctttctccccaatttgtttatttattcattgatwtttatcattgtagactcatggattcccgttttagtcaatggattacagtctatttttataatcattttgatactcagattgtatcaga

SEQ ID NO: 810394 - DNA, 594 bp, Homo sapiens
aaaaatgatttaaaaaaacatatatttaaaaactatcattcttggacagtcctggtttactatatgtgagctatytacaatgttttctttttatgcatctttagtgtttttctgtggccttccagttcttttaagaagttttaaaaaagcactattttgtactttatcattttataaatattgtgggtattctggtatttaaagggatgaaaataccagtttttaacagctaacaaatgaattgaaagattttgtattactaaaactcagcagtcatttgtctccctctagcgatcacataactgtgccacattgcccatttacttagcatgttttgattgaaaaccagaaaaaagaagtttaataccttttaaattatgttgcacattttatggaatttggtttacatttatttaagattgtcctgattacaattttaatagaaaatcagtagttcctgcaaagattttgggaagcctttaatatcttgcttcattgagcctgagaagctatggttatacatcattactgccaggaaaaaaataatccaagtaaactaagacataccgttgattgtaagatgcatctccattt

SEQ ID NO: 810395 - DNA, 628 bp, Homo sapiens
caggaactgggcaggcaaaaggcttctcttcccctccattcatgcacatggagctgaggatggcttcggagctgatggcactctctgtggtccaggactcatcgctgtccgactcctcatagtccacctcctcctcgtcatactcgctgcctgcaggacaagagaagtgcaaggactgtcaggagcgctcatctccccacaggttcacccggccacttccaggacaggagatgtggccgtggcagagcagcgctgacggcccagggagagggcactcccggcaccaggggactgcaaacacggctattcccttacaaccctggaagcaggagccctgcgttcccacctaagagaccagggcaagggcttcccaacaattcacagctaggagttggcggagcaagaacattaactcggttctatggcaacccagcctgtggctgcaaaggcacagggaagacttgctctggggccaaaaccaaaaataagcaacgatgacaggctcctcacactccccatgctagtgcctgacactcccaaatgagcagaacmctgtccccttagttttatgctttactggcctagtaaatgcagaagtctccaaggtcgggggttacgttttggactt

SEQ ID NO: 810396 - DNA, 531 bp, Homo sapiens
gtttacattaaggttcactcttgtgtcctacagttctatggattttgccaaacataacatgtcatgtatccaccattacagcaccatgcagaatagttttgagataggaggtggggcttgactcagggccagattgaagactggctggcatgagcaccagcaccatgaacagtttactcattccctggcaatgacccagttaccacccttcttctagaaatttctgaataacctgcccttaatttgcacgtatttaaaagtgggtatgaatgtgactatagaagtgccctgagctgctgctctccaggcactgcctatggggtggccctgctctgcagggacagtcacagaactgtaaccctgctgcctcaataaacctttttcttcctcctctagctcacccttgaattccttcctggacgaagccaagagccttcccggacggtgtcccagttttggggctcccctgccctgcaasagtttcactaccttaaaatcccctatgcctcacctgttcatccctctctgagt

SEQ ID NO: 810397 - DNA, 643 bp, Homo sapiens
tgaataaaataaaaatacaactcactgctttaacaatagactaggtcaaggagaagaaagaatttctaaacttgaagacagttcttttgaaataatccagccagacaaaaggagagaaaaataaataaaaatgagtgaagaaagcctatgtgccatattggtaatcataaagtaaccaaatatttaaatttggaaagatctaggagaagagatgggcaaaggcatagaaaatctatttaatgaagtaatagctgaaaacgtcccatgtcttacaagagatttagacacccagatacaggaagctcaaagattctcaaatagattcaaccccaaaatgtcttctgcaggcatattatagtcaaactgtcaaaagtcaaagacaaacatataattctgaaaatagcaagacaaaagtataaagtcacatataagggaattctcctcagactaatagcagatttctgagcagaaaacttacaggtcagaagagaataggatgatatgctcaaagtgctaaaaaaaaaccctttcagacaagaatacgatacccagcaaagctatccttcaaaaatgaaggagaaacaaagtctytcccagacaagcaaaaacagagggaattcatcaccactagactagttctaca

SEQ ID NO: 810398 - DNA, 251 bp, Homo sapiens
ccattttgtgggttgtcttttccatgctaatagtgatgcaggacaggcaagcccccaaactggggcttagcccgggagggttcttggcttcgcccagtgtatttgtctgttttcacgctgctgataaaggcatacccaagactgggcaatttacaaaggaaagaggtttaatggagcrttcacagttccacatggctggggaagcctcacaatcatgatggaaggcaaggaggagcaagtcacatcttacg

SEQ ID NO: 810399 - DNA, 608 bp, Homo sapiens
cgggtctagtttcctcatctgtaaaagggagatcataaatagcacctatccttctaaggctaytgtaagaatcaattgaaatctacatgtgaagtgcttagaacagtatgtagaatacatcatatgctcaataagcagtaattattgctattattaacgttatcttccagaaaaagaaaaacaagacacagagaggaagctacaattgagtcttgtccttcactttcataaggctggcctctaaaataaatgccttcttcatgaaaagtgactgcaaaaggttgtccactggcagagaggggcttcaaggaagcttgctgctagggctctgggtgggggaaaaaagaaaatcccctgtgagaaactgggaccccgatcctgtgctagatgtggatgtgaagtccaaatttacagtatctgcatggtgaggaaatcccagactgttaaattaatgcataatctagcctgggaattagtgaaactcttggagtccaggtagaaatgaagtgaaaacttggtcccaagggtaatatttctccaacccagggcacaaggaacttccacaggaaaagcaaagacaacaaaatctccacaaaccccaaagatga

SEQ ID NO: 810400 - DNA, 567 bp, Homo sapiens
cctctgatgaagggattagcatggatccaaggaagctaggtgctattcatcaagacataggtgaaaacctgaatccattttggagatttttggggcggcccctcccaacacaggcccagggctctaagagggcagagtggtccctgcattccagtgtagtgctacttagccatcccagctgtggctcaagtggccccaggttcagctcatgctgccactccagaaggagcaagcaataagccttagtggcattcacatggtgctaattctgaggtgcgcagagtttgagaaccatggaggcatggctgcctccatctatatttcaaaggatgtatcagacagcctgggggcccagccagagacttgtcataggggcagagccatggcagggaaccccctctaggacaatgcctagtggagctgcagggtcagagccaccccagagttctgactagacctagtgaaacccctgagatcccrgaactgtggagccaccaacatgcaacaccaaccatccagaaagaacggcaggcatgagactccaacccatgagagctgctgcttggg

SEQ ID NO: 810401 - DNA, 622 bp, Homo sapiens
tgagggttgttggggccctgcagtccctggggttcacctcaagtctcgagtgtcaaagccgtgaaggggagcaccagggccaagggacccagagttcacgggtccaatcacscagcaggccctctgggatgtggaagggctggccgcgccttcggcaaaccctctgttcccatggccccaccggaaagggctgagtgcttgcctgctgagcactgaccgccgggctttgtcgtgcgtgaaccccacgacatgggggaatttccatggcatgaaaattctcaggcttttccatgagtggacccccaagttaggagaccaaggcagacccccacattttgctaaaagtggagtccagccttgggtcaccttcagactgtgatgtgagtcaccactgccgcctctcggccatttccgtctccacagccacaaccgattctgtgccatcgctgggagatgggctcactggggacagcacccaagacccaaggggagactcaggaaatactccggaaatacaaatgctccaggcaaggcggctccccaggcccctcgctcctgctccaggcattgtgggaggggctagcacaggatccggtcgtgctgccagcaatgcgcaggcacg

SEQ ID NO: 810402 - DNA, 508 bp, Homo sapiens
agattaaatcagaaataatctcattcttccagcatgggctacatagtgakatcccatctctacaaaaatatttttaaaaaatgagtctagtaggcatggtggcttatacctagagtaccagctattcagaaaactgaggcaggatgatcgcttgatcccaggagtttgaggttgcagtgagccatgattgcaccattgcactgtagcctggctgacagagcaagactgtgtctcaaggaaaaaaaaaaaaaaagaaacatccttattcttgagaagtacatttaatctaaaaagggaggtggcagaggcataaatgtcaaatatcaaaatgctacagaggggctacctaacttaacttagaacaatcaaggaaggcttcctagaggaaatggcacttgaattaaaactggaaagaggattaataagagtaaagtggccagaagttgtgactcatgcctgtaatcccggtgctttggagggattacaggcatgagctgaaggtgaggat

SEQ ID NO: 810403 - DNA, 589 bp, Homo sapiens
acaaggtctgttctcccaccaaactcaattgtgtaccccatctacacactctatttaccaccccacccctgagccaggactttgttcatgctgcccccacctccccttacttctctcctccaggaggtctcttctgatgccgcatctctcccccaacagaaaagctttaacaaccactcaaatactatttcatcaagaagcccccaactcgatggaatagcattttctttaagaccctggtccttggtgaatggctcccctgtctccacaacttgctctgtttataatggagaagagcagtgttccttctccatctgaatctgtcacagtagcagatgccagtaagggttgcctggaatgtccggacatgtgatgctgccatggtaacagcagaccaaggttcggaatgctttatccctgatgagctgccccggcagtgccatgccaggctgcttgtggaatcttcctcaaagaactccccccccacaaaaaaaattcaccaaaacccatgcaacaacaacacaacccattratggacaagcaactgctgagcactggtgccaaggttcagctcctataaacatacttt

SEQ ID NO: 810404 - DNA, 624 bp, Homo sapiens
gtattaggccagagtgaaaggatgagtggcaaggaaatgggttttctgcaatgctggctattgatcagagactcctagacactgaatctrtatttttccccactggataaagatgtagacttgctgaccattagtttgcttcaaaaagtggaagagctttttgtataagaaatgtttgtgaacattctcttaaaggaaaacatagcagcactaagttcttcaagaatgatgagacaagccttgagtgaaaaaggcctgtgatgcagcaagaaggggctgattcctggatgcaacagaactctattctgcatggatggtgttacctgcagctgcaagttccactagggagctaggggctagtgaaggcggagttgagataccccgtatctactgtgtgctgcctggactcctcactctcaaaacgtgtctgtatccttgagtgagtaagtcgggaagttgatgtaatcttacatgcgtgtgtgttacaggtatgagtgtgtgtttgtggcctctttctaccaatccacagattctcactgcatttcctccagcttccttcaagaattttctctttaagcttgtaagccggtacgcattcatgtgagctccacagatggcctgcac

SEQ ID NO: 810405 - DNA, 624 bp, Homo sapiens
gtattaggccagagtgaaaggatgagtggcaaggaaatgggttttctgcaatgctggctattgatcagagactcctagacactgaatctgtatttttccccactggataaagatgtagacttgctgaccattagtttgcttcaaaaagtggaagagctttttgtataagaaatgtttgtgaacattctcttaaaggaaaacatagcagcactaagttcttcaagaatgatgagacaagccttgagtgaaaaaggcctgtgatgcagcaagaaggggctgattcctggatgcaacagaactctattctgcatggatggtgttacctgcagctgcaagttccactagggagctaggggctagtgaaggcggagttgagataccccgtatctactgtgtgctgcctggactcctcactctcaaaacgtgtctgtatccttgagtgagtaagtcgggaagttgatgtaatcttacatgcgtgtgtgttacaggtatgagtgtgtgtttgtggcctctttctaccaatccacagattctcactgcatttcctccagcttccttcaagaattttctctttaagcttgtaagccggkacgcattcatgtgagctccacagatggcctgcac

SEQ ID NO: 810406 - DNA, 561 bp, Homo sapiens
gctgaccagccctgccgtgtggatccagctggagtcagctgggctctactccacacagcgcacggstgtcgcctgctcacttcaagtggaggatctggcacttattttaggtccttataaataatacattttgtcatcttgattcttcaaggccttcttttaagctattttttcctctttgggaaaaccgcttttactctacaagacagagttgttcataaatcaagaggagttcctggtggccaaagcctaagttcctgactccagaagaagtgggcagccacccaacctgattagtcaaagcctcataccagaagagaatcttattttaaggatgaaaagaaatgtccaacatctgattccttcacctccaacccagaaagtcctagtgcctgagctttaaatacgacattcaacccctgcttccccgagagtccctacaggctcatcaaggtcaggaaaatactgagggttcttaccatccgtaaaatgggaacaaggcttcctgtgtataattgtccaagtgtctggcataaagtcagggttcagcctgtgagctcc

SEQ ID NO: 810407 - DNA, 350 bp, Homo sapiens
aggtgcaccaaggaggaacagagkattccagaggcaagaggcagcagggacagcagtcataggacaggtgatacagaggggcactagcataagctgaggcctgtggatgcggagaggcaatactgtgagtctgagttttgcagatacgatggtgctgcccaggctcaggaagctagtgcctgtctaaggaaggacagagcaggctcatgggctggactgcctggccattgtcaaagctgcccaatgtcacatgtggttgtcccctagttgctatgctatggtagataagacaaaaggatgggggctggtctctgcccctacaaacaagtaccatcagtaatgctagctct

SEQ ID NO: 810408 - DNA, 495 bp, Homo sapiens
tgatatgtataaagatgaccaggaagctttgttttccttattatcatgatgaccaatccattggcttttagggtgtgatgtytccactgttatgtttttgatgatcagggaatccttttgagtgaacccagtaatctttgaaagctcccttcctttatgacacaagttgatccaggctcttcctgtatatttcctgcctgagacacaaagccagacagtgttctaaagagtttctcttccctttatcattaaataatacttagaatgcactctgggtgctagatgaaattcttttttttttttgagatggggtctcactttgtcactcaggctggagtgcagttgtgtgatcttggctcattgtaacctccaccttccaggctcaagcaatcctctcaactcagtctcccgagtagctgggaccacaggcatgcaccgccacgtctggctaatttttgtatttttggtagaggtgggtttcgccatgttgcccag

SEQ ID NO: 810409 - DNA, 495 bp, Homo sapiens
tgatatgtataaagatgaccaggaagctttgttttccttattatcatgatgaccaatccattggcttttagggtgtgatgtttccactgttatrtttttgatgatcagggaatccttttgagtgaacccagtaatctttgaaagctcccttcctttatgacacaagttgatccaggctcttcctgtatatttcctgcctgagacacaaagccagacagtgttctaaagagtttctcttccctttatcattaaataatacttagaatgcactctgggtgctagatgaaattcttttttttttttgagatggggtctcactttgtcactcaggctggagtgcagttgtgtgatcttggctcattgtaacctccaccttccaggctcaagcaatcctctcaactcagtctcccgagtagctgggaccacaggcatgcaccgccacgtctggctaatttttgtatttttggtagaggtgggtttcgccatgttgcccag

SEQ ID NO: 810410 - DNA, 432 bp, Homo sapiens
tttcgccatgttgcccaggtttgtctcaaacacctgagctcaagtgatcctcccacctcagcctcccaaagtgctaggattacagacgtgagccaccrtgcccagtcagaattctttattaagagtagagtaatactacttatcatggctcatttcacctgtgtacatgatggactggatctccaatttcattttaattctaggtgggaatgatggttagatgctgccgagcgtatgaagaagtgtgcgaaggtgatgttggcaaagtcatcaagctggacagagatggattgcatgatctcaatgtgcagtgtgactggcagcagaaagggggcacctactgggttaggtacattcatgtggaacttataggtgagcacattctttgttcagtgcttttgttttttcttagagacaaaattcccttaaatg

SEQ ID NO: 810411 - DNA, 432 bp, Homo sapiens
tttcgccatgttgcccaggtttgtctcaaacacctgagctcaagtgatcctcccacctcagcctcccaaagtgctaggattacagacgtgagccaccatgcccagtcagaattmtttattaagagtagagtaatactacttatcatggctcatttcacctgtgtacatgatggactggatctccaatttcattttaattctaggtgggaatgatggttagatgctgccgagcgtatgaagaagtgtgcgaaggtgatgttggcaaagtcatcaagctggacagagatggattgcatgatctcaatgtgcagtgtgactggcagcagaaagggggcacctactgggttaggtacattcatgtggaacttataggtgagcacattctttgttcagtgcttttgttttttcttagagacaaaattcccttaaatg

SEQ ID NO: 810412 - DNA, 578 bp, Homo sapiens
gtgccaccacacctggctaatctttgtattttcagtagagaaggggtctcatcatgttggccaggctggttttgaactcctgacctcagatgatccacctgctctggcctcccaaagtgctgggattacaggcctgagccaccacgcccggccgttatttttctttcttagaggcaggatctcactctgtcgcccaggctggagtgcagtggcacgatctaagctcactgtagcattgatctcccaggctcaggcgattctcctgtctcagcctcccgagcagctgggatcacaggtgtgtgccaccacacctggctaattgttaaatttttttatttttattttttagagatggggtcttgctatgttgcccagtctggcaacatgggatcctccaactcctggcttcgagggatcctcccgcttcggcctcccaaagcgctgagaattacatacgtgagccaccacgcccggcctatattgttttatagttcttcaattttgttttgtggtcgcyggaggtgtttccttcttcgattccctgcacagtgcttccacagctgctccatggaatctgc

SEQ ID NO: 810413 - DNA, 677 bp, Homo sapiens
tgggtctaggtgctgggtgattacccttctctttgtctcctgctaaatcatggaggtttggggagttcctttaagggaggagaccacccctcatactgtcttatgcccaatttctgcctccaaagaaagaaaaagtaaaaactaaaaggcagaaatgaaatccacaggcagacagcccagagccgtgccccgggtctggttaaagattgacccccgacctaaccggttatgttatctatagattccagacattgtatggaaaagcactgtgaaaaatccctgtcctgttctgttccattatgattaccagtgcatgcagcccccagtcatgtacctcctgcttgctcaatcacgaccctctcatgtggacccccttagtgttgtaagcccttaaaagggacaagaattgctcactcagggtactcggtttttggagatgtgagtcttgccgaagctcctggccaaataaagcccttccttctttaactcggtgtctgaggggttttgtgtgtggcttgttctgctacatttcttggttccctgaccgggaagcgaggtgattaacggacagttgaggcagtcccttaggtagcttaggcctgccctgtggagcatccctgcgggggactccagccagcktgagtgacatggatcctgagagcagtccctggtaggca

SEQ ID NO: 810414 - DNA, 659 bp, Homo sapiens
agagtccgtcagtgactggtcactgtgcatctgttattcagttcacatacagagcagagcatgcagttgtggtgcctccttgtctctcacttataaacctgcatgacattttacaacacgtataatcgaagtagggaattggcccacaaagataaaggcacagcaaagaaacaaaagtggtaatgctgaaagtgccatccaaactgagtttaaggagagtctgtagaagaaatagctcactgtaggaatgttgacactgccagtgaggtgaacttattgacataaatgaggaaagtggttgtggcaaaaaggatgaaaatgtccccaaagtgacaccagcaaaaacaaagattttacaaagtaaaaaacaaattctttgagctatttcacgacattagaagttcaaaggataaaatgtagaaagcagtttcaaacttagaaaagagtataacagttgcacaaagcatagagaagatgcttgctctgtattgtaagttacagggcaagaacacaagcactgttcaaactccccctgataagtttcttacaaagaaataaaacgtgtagaaggaaagagaaaaagaaagttagttcttagtgttcctaatgtaattacagtgtactcataartacaatatatttattttactattttttaa

SEQ ID NO: 810415 - DNA, 635 bp, Homo sapiens
tttaatacattcacaatgttgtgcaaccaccacctctatttcggtccagaacatttttatagccccaaaaggaaactctatacctattaagcagtcactcccatctccctctcctccaggccctggcaaccactaatctgtattctgtctttatggctttacctattctggatagttgatataaatggagtcacacactatgcagccttttgtgtctggcttttttcacttagtataatgacttcaggttcctccatgctggagctcatttcagcagctcattcctttctaaggcagaataacattccattgcacggataaaccgtatgtccaggggcctttcctgccaggatcaaagatggtattgggctggggcttgggagaggtcagctggtgactttacctctttttctttttctcctccatgcctcttggggtttgtcactttagaatatgctgctgaggcttggggacccagggagacagcctgtctcaccatgtcccctagtctttgcaacctgatcctgaatcctgcctggcggtggcgacaacatcagacagagctggagctggtgtgaccccatcccaggaggatgctcctatttcggggatccsagctgtctctggtcagggtg

SEQ ID NO: 810416 - DNA, 526 bp, Homo sapiens
ctcaacaccatttattgaagagactgtctgtctcagcccattttacgtggctataaagggatacttgaagyggggtaatttattagctcacagctctgcaggctgtgcaagaagcaaggcaccagcatctgctcagcttctggtgagggcttttgtgctgcatcaaaatatgaaggagaagatcaaagggcaagtgggctcatgtgaagagagactgatccccggggtagtgagtaggggtcctggctttataacaacccattctaatgagaactgatccgttctccccaagaaccaatccaatcttgcaagagctcactaccatgagaatggcacaaagccgttgatgagacatttgctcctatgacccacacagctcctactaggccctgcctcccaacaccaccacactggggatcaagtttcttctttttttttttcatacccttagggtgatgtcaggtatcagatttcaatgtgagatttggtagggacaaataaaccaatccaaaccatagcactgtct

SEQ ID NO: 810417 - DNA, 541 bp, Homo sapiens
attgtgacattctaggggtccctcggtacgtggcacacagccctgttgggtacctgtcactctgttcttgtctacagtgaccccagatcagccagcacagtgcccagcctagtcagtgttggrtaggtagataagtgagatgacatatgaagtaaaagaagatcaagtttttgtttatgaagtgttttctaggtgggaggacgtgtgtgagaacaacctagtcctaaaaaacagacctgagggctttattcctgttatgtagctaatgatctagtatagacttaggaagcaggaggtgttagcttgtgtgctgtggatgatacttcgtgaaaacctgcatccattcttgcctgtgaatgtctttgaatgtgaccactgctttttcagagttctatctctggggtgactgccgcatataaccgagaacagctgtggctggccaatgaaggcctgatcaccaggctgcaggctcgctgccgtggatacttagttcgacaggaattccgatccaggatgaatttcctgaagaaacaaatccctg

SEQ ID NO: 810418 - DNA, 499 bp, Homo sapiens
caccctaagggtggaggtccccccttgggaccccgggttcaggtttttgagaaccagtcttccaatctgatctcctatgccaggagattttctgtctcctcctcctctattcctctaatcaactgtaacaagaatcaagcgccagggtgcttgattttaaagcattaaataaatgtgtaacataaaagtgatcacacctggtggatgaatcccagtttgtcttatcaatgtcttttaaaaagccatctacagaaatcatcccacaaaaacctcttatgaaaagggaaactgaggcccagatggaggaaggaatttggttgacgtcccacaggccaggtcagtgtggcattttacaggccaccacgcagaggctcctggctacctgactggcaggtcaggcttcakctggactcggcaggtttgtgccaggccttctgacaaaggcatttttatgtcaccagcaccagacatttggaatatcacagactggaaaatatct

SEQ ID NO: 810419 - DNA, 521 bp, Homo sapiens
ccccagcactggaacacctccaagaggtggccccctccgcagggacatctcccaccgccagcactccctgccacgaaacaaaagccygcacaggccagcatcctgtctgtgacccccacaggcgatcctgtccccgccccagacaacactcagattacggccgcagtaatttccctccaggtgcacacctgctttcctcctcttcaacatgacatattcctcagggccgctgcaccatgtgatgtaaggtgactgcagccctgtgcagcacacagcacaaggggccacgagcaggactctcacagtcttcagctgcggctctcccttgtgtggcctctaggggtgacactcagcccctccccgtgaggtgacaggctcctcttgctggctttccccatcttcaggcgcctgccagtgaccaccccccggtgacatttctcctgaccagggatccaccctctcaggaatccctttccaatcagccagtcaccacccccaactcagattttttttttttaata

SEQ ID NO: 810420 - DNA, 576 bp, Homo sapiens
tctcacactgctcagttaccaaatttcacttagggacaaagttagccaccccacaggctacaagatataaagggcttaccttccacgttccagttcccagctagatggggctagaaactggacaaggacagtagcagcatctctgctgggaagacaccgcacccaggccacaaaggcagcccagggctgagcagcactcagcagccctcagggaggaggtcacaaaagaaagtctcaaacatgagggcacaggctctttgtttactctgagtgtgggcaaaatcatcctctaggaggcagagcatcgtgtacagaacccaaattgaataaaggccttctcgggaggtggctggctggggttctgtatgccgggttggaatgaccatgcataaggcattcactccctccaccattcctgcatccactgagtaggtcatgcaagcaatgtctrtgcagcccctgtcacgtgcctgatgtcactagtcactgaagctaccagctgagcaggattatggcagacctaattcctgatcccagaaagtttaaattttaatgggcatgtttcgagttaataat

SEQ ID NO: 810421 - DNA, 619 bp, Homo sapiens
gcagggctcctgtggcctggcccwtgtgacccccagccagtcctaaatcttggggcgtgggaaggaataatcacgaggcaaggaggagacggaacaccctccacactgagaagcctttgttagaaccttccagccatgaggtcagaggaagaagctgagtgatctcttaaaaaaatatgtatatatatattagttgggggttttctttttctcttgtctttcttttcaatctaggtttgtgttttatagactgtgtgatacaggcaatgggacaactgggcagttagttggaactgaccttgcagacagccaagacggcaagctgggtgactcaagttcagaatgggttttttataaaaacaaacaaacagccatgattgatgtctcccttctcatcttttatatatccttttttatgggcagttgtggagaattggactggtttactgacatcatttctctctttgcaggctgatttcatcttagtcctttacacaggtataccttctgtaaggacagaatctatcaatgcaacttgcagtatgcaaaaaccattatctagaaactgattcagtttaatgctattaaatgcaatcagaagttaccaagcctcttactg

SEQ ID NO: 810422 - DNA, 296 bp, Homo sapiens
tagggctgttttgagaatgaaaaggtagtatacgtataagtttcttaaaatagtgtataatatttaaaaagtacaaaatagatatcagacattattgtaatattattggtgtctctgaaacttggttttctcatctgcaaagtaggattttccaggttggcatgggaattaagttagagaayatatggtcaagtcttggagaaaatgtcaagtaccattaaaagtactgcactatattttgaggacaagtcaagagaacactttaactttgtacctgagtgttttcccacatgtaa

SEQ ID NO: 810423 - DNA, 616 bp, Homo sapiens
aatacttgaaaatatcgtgcatttaacctagcaatatacctttgggaatttttcttaagaaaacatttggatatgggttaaacatatatagtataagattaattattgaagcactatctatgatagcaaaaaatggaggaaaaatgcctacatttctaaataatggataattggattaattatggcacatccatatattgaaatataattatttcattataaattagaatatttaaattatattttaaaagcttacagttcgttaaaacaatcaaattatgaatcagaatgtataatacatctatagagttagagaaataaattataattatatttacaaactagtatttcagttatttctggttggcatatttataggaaattttcattttggtctttatttttcaaatttctcttctcatagtatgatatatatgaagtcctttagttacaatatatgttgttttttaaaaatattagttatagggcagagggtgatatttatatcagagaacctctataccaaccttaattctctttacttttattttaaattgctcttggtatttctttctcttgaattctggaattawatacagcagtgatttcagtttgg

SEQ ID NO: 810424 - DNA, 627 bp, Homo sapiens
aatgttttaatgtttctattcacagaaaaaaaaagaaatattggaagtaaatacaccaaaaaattcagaatagacytgtttaaattatgagatacaaataatttttcttttttgttttatatatgttctaaatgttgtaaactaatcatgtatttcttttataaaggaataaatgtccttgtacattttaattctattttctatttcattcctcagtgccaaatctatgattttaatgtgtacctataaaatttttctcaggttaaaaactattatattttgtttatcatacctgtttgtgaaactaagacatgttataaaatattttcaactggcacagtacttgtgcatgtttctaaaaagtaatctacttttctcctttatgtttttatccttttgtaggcatttgcctggtggcctgatttattggctgaacatgcagagaaattttgggctttatttacagtggatatggacactgcactagaggctcaaccgcaagactcctgggatagttttcctcttttccaactgcttaataatttcctccgaaatgacagtgagcatttgcgttttctttcatatgtgaaatggggaggggtgggagaatgttgaatgtgaatgtat

SEQ ID NO: 810425 - DNA, 534 bp, Homo sapiens
cacagggcttgtatggttatggggggaaaagccgttggtgtgaactgaaagaatgctttgttaactcaaacatttctcagcccaagaaacctttgctatgagtgtcacaaaggggaataccttctttgtggggtcctgaaattgctgggtaagtggtgatggtggttgttgggaaaggagcttatgatgctggtggaattttgggtcttaaagagggcatattaatctttaaagaattggaaatatttcagttacatgtaatggtctatatcttgcaacaattcattaccagcatattaggtaatgcatacacacacacacacatatatatatatatagagagagagagagagaagcaagaatgcaaacaattagcagtgccacacccaacgggtgcatagtcaaagcraatataaaataaagacagagatttacctgacctaaccacactgatatcctcctttaatccttctccaataagtaagatatcacgtatggaaaggtttttaaactattaagcactagaccaatgta

SEQ ID NO: 810426 - DNA, 601 bp, Homo sapiens
gtgaccaattactatattagagcgacagtttaacaactgcctgaccacctgatattcttggttgcggggttagggggtgctytctgtcctgctcacatctgactacctactgtaacatttcctcccttaagagtccaagaccccagttctttgaggaaaatggatggtcagtcttctgtaactgcttcttgctgacagggatgatggtggttgttctgtaggtcttggcctcttgctggctgtcagggcagggtggctctgtgggttgatgaaagctgaattcagccaggtccaagggagacaggggcaggattttgcctctgtcatgtcccactgatgggcagtctaggagtcccctatagaagggtgactcttggatattgagaggatggtattctttactgaggatcatctggagctggatggcctgaaggtgagaggagacaaatcagattattagatttagaagacagaggccaaaaacgacaagtagagatgttaagacaaaataaggggatgaggacagattaaagaattctgagaattctgagactcccaacatgccaggcaggtggctgcagtcatgccagctgtagtcatg

SEQ ID NO: 810427 - DNA, 508 bp, Homo sapiens
ttagggctttattagccctcctgtaatctctttccttggtgtttagcagcctaagaacaccrgaaagtggatgataagaattaccatcaggtgtggcagaagttcagcgagacacaagggattaccacggatgctaagcgaagccagaggagggttggattgagagtgtgtccacataactagggaacaaagtgaggatgaagattgagttcaaaaataaacggagtgaaagggacaggaagttaaatatcgtggttggagaagagatagtgccaagcctgacttcttggaggaagagcagttctagttgaagacagagtttgagctgggttgtgtctgtaggagacatctgaatgtagaactgattttttttccaaacctgcttcctctccggggttcccctatttctgttaatgggatcatcatcactcaaattagaatacttatagatttatttgatctttatcaattaattatcttaaaagtttatagttctaaggttcaagtc

SEQ ID NO: 810428 - DNA, 484 bp, Homo sapiens
gagtccaagagttagaggctacagtaagccatgattgtgccgctgtactctagcctgggcaagagagcaagactccatttattaaamataaaaatttgggacagtaatatttagcccatagggatgtgaaacaatatatggaaaacatccagtaaagtgccttaccacatagtagatataaaacaatagttgctcttgttgtcagggtgaaggagatagagaggaatcaagaatgacttccaaattttctatttgaatggtgaaaaagagctatattaggaaagtgggctaagctatctggttcttagattgcttgtgaggattcaggtggaagtgttcactggcagttgatagtaagagtatgacacttctgagtggaaggcacagatctgtgagttaatcagcttacacatagcagtaaaagttatgaaagtagatgaggtcccccaagaagagagttagaatgagaagtcagaaccctgga

SEQ ID NO: 810429 - DNA, 540 bp, Homo sapiens
agtgttacaataaaacgatgttgaatgaaacagcgttatttgaggatctactgtacctaaagtaaacctaatccctcttcatgaataggcctgaaatatttgaagactgttacagtaccctttccaaaatcatccaccatccttaaaaccattctcgtctcttgccatcctggcccatcttttcttccagttgttgctgtccttcttaaaaaacattctggatttggcttgactaacagagaacaaagcaaccctactgctatactaatttgttgaagactttgcattcatcactatggaaatgtattactgatattatatttgactccgtgttgcaacttgcccaattacatggtaccctgattttgtttccaccccagccttcacagtcctgagaaacacttcctacttttcttttggttatgttgttcacattcacatgatctgtcaggagttggccaaagatttggcaggacttaacaagaaggcttcttggcatattccakacacattatctgagaagacagcacacctacaagt

SEQ ID NO: 810430 - DNA, 477 bp, Homo sapiens
gtcctcctacctggacaaaggatcctctgcccaggccctgcatcttagagtttcatcgcccagtacagaagcagcagccacacgtggctgagctcttttttgtttgcttgttttacttttttttttttgagacagtcttgctctgtcgcccaggctggagtgaaatggtgtgatctcggctcacagcaacctctgcccctcgggttcaagcaattctcccacctcagcctcccaagtagctgggattataggcacctaccatcatgccgggctaatttttgtatttttgtagagacgaggtttcaccatgttggccaggctggtcttgaactcccaacctcaggtgatccacccgtctcagcctcccaaagtgttgggattacaggcatgagccactgtgcctggcctgattgttttagatatgaggtcttgctctgtcgctcargctggagtgtagtgacgtgatcatagctcact

SEQ ID NO: 810431 - DNA, 523 bp, Homo sapiens
atttactgatttaccaataaccaattcaygcctgctctagtgctgtggtctgaatgtgtcccccaaaattcatgttgaaagcctaacctccaaggtgatagtattaagaggtggggcctttgggaagctttgccatcattaatggaattaatgcctctataaaagaggccctatagagccccgtctactcttctactacatgaggtaatggtgaaaagacagctagctatctatgaacaagggaagagggccctcactaagatgtcaaatttgttggtaccttgatcttggacttctcagcccccagaaccgtgagaaataaacttctgttgtttataagccatgctgtctgtggtgttttgtaatagcagccagaacagactaagacatctagtaacacattctctggtaaacactaggaattcctggccttaaaaagttcatagctaatgagaaaagaaataaacaacataaaggataacatgctgtagtccactacatacaaggtgcttccagaccattc

SEQ ID NO: 810432 - DNA, 609 bp, Homo sapiens
gaaccactacactccagcctgggcctcagagccagatcctgcctccctccaccaaaaaataaaagaytaaaaaaaaggaaaattggaatctttggaatgagtactactaaaaattgatttcttcccttttaaatgactaaggaaaaaaattttaattgaatttaaatcattttactacatgtttagttgctactgtgaaacaatgaaaacatcttaagaattaagtctgaaaaaaatctgtaatttccaatagaaaagtagagcttagaaatcagaaatcaaattatacagtatataagtattttaacctgtttataagaattttaaaatctttgaaaatgtcattgtcactttaagtttaaaaataaggagctttaacatgtttccttgatcactaggagtatgaattaagcttaggacattttctgaatgcaaaatggtttgaaaattaaacaattcatatttgagtttcatggtttctatctaaacattttttttacaggccaagttacaacatccatggaaatgcttttagttataagtatggtattaacaggatcaagaacagctgacaaataattacaattaataaatttgttcaagctgaca

SEQ ID NO: 810433 - DNA, 512 bp, Homo sapiens
tttttacactgtaattagagttcaaacttccatagcgcctagcctaaaattaaacccagaattatgccaatttatgcctgctatatatgcacacacaaaagacttataatgcaatatactaaaaraactaaaggtaggtgggtttttccttgaaggaatcatagctacattattttcaagtttaatctgttacattcacctgcctatcaaataaatgtagcacttaaacgcataaaacaaaatttgatttagtgacaaaaagccattagcttctaatttaacttcaaaacgcttttcaaaaaatctaccccatctaattctaagtgaaccagaccacacttgatagaaaactgttgttctaaaaaccatacgtacttaacacaaacagtaaacatatgagaacatttagtcttctattaatgtcttacaaaatatttcaatgtggctggttataatttttttttttttaagggacagggtctgtcaccgcggctggagtgcagtggtgtgat

SEQ ID NO: 810434 - DNA, 519 bp, Homo sapiens
cattacagtagataattttaagatctcttcaacctacttgtcgtgcctgccaagtgagtcggcctgccactaggtggcagggtttgctatcgatctcccaaagttagacacaaatgtgcctctgagacggggcagtgcctgaatcctcaaaacagaggtggtagcggtggcagaaaccaggctggaggcttcccctggggagttcaggacttgactaaccattgttcattctgccagaagcaaaatgcaaactatgcaaagcatttcagagctgtgctcccacccatacgcccttcctgcctggctctgcagctcactccccttgcctgcctacagtgcctggaaggtcagagtccaccctcacctccccactgccccactagctgcacctcaaatccctaagctcatcctctaacctgtaccctccatttacacatagtctgccattctggaatgaccccaaggtaccagtgcaatggtgagccctggctctaggrgtcaaaacaaggtaactatgga

SEQ ID NO: 810435 - DNA, 524 bp, Homo sapiens
ggcacctgtagccccagctactcaagaggctgaggcaggagaatctcttgaacctgggaggcagaggttgcagtgagyggagatcacgcgactacactccagcctgggtgacagaacaagactccatggaaagcaaaaaggaaagaaaaaaggaaaggaaagggagaaaagagaagagaagagaaaagaaacgaaacttctcacgtccaacctttaggctgactccaagcagcacagtgaacagggtaagaacttgggctcttagaatcagcctgaggtccaaggtggactctgcctcttgcccactgggtaaccctgggtaaattactcaacctcctcatgcttgtttcctcatatttaaaatggaactatgggtaaaagtagcatttaccttataaggccatgtgaggatgaaatgagacatacactgcttagagcacagcctggcatttgtaaggctcaaaagatgtcagttgatgttactgaaggagcagtcacttgagcaacctagggaggttggctga

SEQ ID NO: 810436 - DNA, 524 bp, Homo sapiens
ggcacctgtagccccagctactcaagaggctgaggcaggagaatctcttgaacctgggaggcagaggttgcagtgagcggagatcacgcgactacactccagcctgggtgacagarcaagactccatggaaagcaaaaaggaaagaaaaaaggaaaggaaagggagaaaagagaagagaagagaaaagaaacgaaacttctcacgtccaacctttaggctgactccaagcagcacagtgaacagggtaagaacttgggctcttagaatcagcctgaggtccaaggtggactctgcctcttgcccactgggtaaccctgggtaaattactcaacctcctcatgcttgtttcctcatatttaaaatggaactatgggtaaaagtagcatttaccttataaggccatgtgaggatgaaatgagacatacactgcttagagcacagcctggcatttgtaaggctcaaaagatgtcagttgatgttactgaaggagcagtcacttgagcaacctagggaggttggctga

SEQ ID NO: 810437 - DNA, 336 bp, Homo sapiens
taatcccatcatagagacccccaccctgacaacctcatctaaccctaatcacctccaaaaagctccatctctaaatacccttctgctatggttagactttgtgtttccacccaaatgtcagcttgaattgtaatcccataatgcccacgtggtgtggaaggaactggtgggaggtaaatgaatcatgggggatggtttccccttcatgctattctcatgatagtgagtgagttctcatgagatctgatggctgggcgcaatggctcacgcctatactctcagcactttgggaggcygaagcggtcagatcacctgaggtcaagaatttgagaccag

SEQ ID NO: 810438 - DNA, 521 bp, Homo sapiens
acatttttttacttgctgatgtaggtcaacattatgtgtatgtatgtatttgtatgtgtatgtatatgtatatatgtgtgtgtgtatatatataactggctctataacctactagacttgtgaccatggacaagttacttaagtgctttaagcctcagttttctaatctgtgaaaaagggatgatggcagtatctactcatggggtgaagattctaagagacagtgcaaatgaagtgtttggtgttgtttctgctcatgtgaaatacctagtgaatgctggctgtcagtatcattgacattgtcatatgtgtggcgtgtcactactaagctgtgggatattgaggtcagcagattttgctactctgactgtttcaacctcctgggacgacagtgttcagcactttggatwgcccagacccggggtctgtcaattctgaacgaggcattttttcttttttttggaggcatgatcttctcttattaaatgtcatttccaattttccccttgaatacacaattt

SEQ ID NO: 810439 - DNA, 378 bp, Homo sapiens
atcgttccatgttacattcttcatgttggatgattttgctttttcatgtttaaattttaatccacatacaactcattttttgcattttgaaagaaagttgcctaattttctacttttgtmcgtgggtagttgattgtgccagtaccagtagttgaatagtccataatttctcccatcaatttgcagcatgactctgtcatataacaggttcccacatgtgtatgagactattctaagttttgcatgtctagctttatgctaatattacgtggttgtaattattttagttttctaatgagtcttgacatctagtgaggtatgaagaaaagatcatcctccttattaattctttctaaaaattaccttggctcttcttta

SEQ ID NO: 810440 - DNA, 504 bp, Homo sapiens
cttaagctcatatgtcctagaaaaattgtagtttgacatgttgttgtttatctccgcttagtaatgtctgttcacttatagtgtaggtcccccttatttgaataaagaatggactctggttgtggaacacattaagagttaatttataaatcgaatatttattgaattgctaagtgatcggcctttgtaaacataaatttaaagactggcttcccagatctcagttaagacttgacatccgataacaacctccgattatcaattatttgaccccaaatgcattttctactaagttttctctttgagaaagtagtactagggactattgtagtaaactttatgagagacaataggctttgtttgagagcagtagagagcactcagcctgtcttctctttttcactatttaaaactgggctcatatcttcttgatctcaaaagcctcttcctttacctgttttccagtcaatgctcacaaaccaaasaagcttagttggaatcctg

SEQ ID NO: 810441 - DNA, 470 bp, Homo sapiens
taagaggggtaagagcctgattttgatgtgaagacttgttctgacaacttgggaaaagcttttsacagtatgaagttgtcaacttcttaccctggttttcagtttgagtgtctgtagttatggtgtcaaacatattggtgagctccgagtgactcattcttcaggcacgagggttttcctgtgaaatttacattgagctttccacctccaacttataggacttcagtaacagagcagattttgttcttactgattcaataagaaaaaactggatgggaggaactagaagaattcagggtctagtccagtctaccggtgaataataaaaactcgaaaacaatgaacagagctgcaatttcatagcaggtatactacactttttattttcaacattatttttctctctataggcatatctatttttaccaaagaaaatcccagtaggacaaatttgtttacaaagtaggttt

SEQ ID NO: 810442 - DNA, 628 bp, Homo sapiens
taaatttcaagatatcctgaaccaactgatgacagcctatttagctacaggaatactctggaaggaaatggtagcttctggagttttaactggagtgttaatcttgccaccatgacctaatggaatatcacataacctccctggtgtgaccattaagcttagcaggatctcagagaatagacagaggaatatgcaagctggttatcagagaaggctctggagcctgtcagtcagtttgaaccttggttctgcaactttggcaatatatatattttttatcactctgagccctttctgtacaataggataaaactaatacctatttcatgtggttgtttggaagattaaatagtttgatatgtaatcctggcaggtggtaactacttaatgaatgttagctcctattgttcattatattagatacctaaagtttgttttatgattaaatgcgagagaatggcagtgatgttcgcatgtaatgtgagtacaagctgttaacatataaaatagggcaatacaaatattttttactccraaatggattgattttcctcccatttaaaataaataacagaaatattctgttttatgttttgtggccagaagctagcatgggaagaggcatttg

SEQ ID NO: 810443 - DNA, 533 bp, Homo sapiens
catcctacatttccacctggatccatcatrgattgcatgtcagctgacattttgaagaaaaaacaaatacaagagattaaggttattttcttctttatttattcttagtagttaaattcagtctaatggcagtgcttccatttacacgctaaaggcaaagccaatctcccactcaacatcatttgttgaattttagtttttggcaaatctcgtttctgtttgttcttgagggaaacattatagctcacattttttggttatttttatgaattcagaaaataagtgttgaatttatagaatggggacattcaagctgacccagaacgatcattaactcctaggcagtaactgtaaatttcacatggacacatctctcatagctccctgtttcacaatcaaagaaatctaaaatcaccaactgttacatatcaactataaccagtataggatattctagctacaaatatgtgaaactgacttagatgtatgttaaagaatgttttagaatcttcttgctagataagataaatgat

SEQ ID NO: 810444 - DNA, 314 bp, Homo sapiens
taataatggctaatatttgtcgaacacataagggtgggccatttactgtgctaggcatttctatctattccctcacttaagcatcatgactctgtgaggaaggtgctctcatgccggtgttacaagaggagactgatgcttagaaacatgaagtaacctccctgaagtagcacagctcttaagtgataaaycagggagtcaaaacccatctctagactccagaaactgactttttaaactgttactcctctgtgttattctattttcaaattgcattgaaaacacttctacccaaaattggcacatttaatgta

SEQ ID NO: 810445 - DNA, 563 bp, Homo sapiens
ttgaattggtagataactctgggctgtatgaacattttaacaatattatttcttcacrttcatgaacatgggatagcttgctatttaatgtgtttaatttatttcatcaatactttatagttttcagtgcacagatcttttaccttcttagctgaattattttaaagtattttattttttggtagctattataaaagggatttttttttagttctttttttggaaagtttgttgttagtgtatagaaatgctactgataatcgtatattgattttgtatcctgcaactttactgaattgatttattagttctaagaggtttttttttctttttcttttttttttttttttgaaggagtctttgggtttttctatttgttaagaccatgtcatctacaaacagggacaatttagcatttaatttccaatttggagaccttctagttccctttagttctttcttttgtctatttttttctggctaggacttctagtactacactgaaaaatgtgggaagagtgggcctccttgccttgttcttgatcatagataaaagctttcaa

SEQ ID NO: 810446 - DNA, 563 bp, Homo sapiens
ttgaattggtagataactctgggctgtatgaacattttaacaatattatttcttcacattcatgaacatgggatagcttgctatttaatgtgtttaatttatttcatcaayactttatagttttcagtgcacagatcttttaccttcttagctgaattattttaaagtattttattttttggtagctattataaaagggatttttttttagttctttttttggaaagtttgttgttagtgtatagaaatgctactgataatcgtatattgattttgtatcctgcaactttactgaattgatttattagttctaagaggtttttttttctttttcttttttttttttttttgaaggagtctttgggtttttctatttgttaagaccatgtcatctacaaacagggacaatttagcatttaatttccaatttggagaccttctagttccctttagttctttcttttgtctatttttttctggctaggacttctagtactacactgaaaaatgtgggaagagtgggcctccttgccttgttcttgatcatagataaaagctttcaa

SEQ ID NO: 810447 - DNA, 637 bp, Homo sapiens
tgccataagaacaactataaaatttaacaaattatataaagcagctgtttttagtcattggmcaacaagccagaagaccgtgattacagttgtgaactgagcttcaaaattgcctccatctgctactgggagctctttcttgccacagagggaggtgaagacaagaatagtgtcaggtgtagctgagcaaaggagtcagaaatctaagtgctgggctaggaattggctggaaattttaggacaaggtacagagaaggggaatctacactggagggaaaggacagagtccaagagtctcagtgtggatacaccatgaatccttggccagagtttggctgaatacatgtggggtgataccctggagtctagcagaggtcctgtggtgtgagtttgagaactgaaaggtgatagtataggtagcacagtgctgagtgatgctgagctccagccctgtgagagtgaagaatacttgttgagcacctcaggtctcagaaagactatggtcccagaaggtccacactgtcacagtgcagttcaaacttaaaaagagctagctctaatgcaaataaaatcaaacctgaaaagatcagtaggatctgccaataattaaactgtttgacagaacaaaacttaacac

SEQ ID NO: 810448 - DNA, 619 bp, Homo sapiens
tacaagttggcccactccacctccttcatccttttcttaaagcaaaaaatgtgtgttactgtaacatctgttacattccattccctgaggcacagacaggcagaactaaacactcttcacttgtgtgtgtgcacgcacatgcacacacaccaaccctttcttcttctaatatacggaacgtgggttgactggaaggcagaagcagatcagaacaaattatgttcacaattatgttagtaaaccatctaatcataaccaacagagcctctgtctctcaaggtaaccctcagagaagaaatgcgtcttcagtgggggctggggacttacctggggctatcagctctcacttctggggaaagaattgaagggaaggagcaggttccaatttatatggatgccagtagaaacagaatccaattgggaagtccttaaaagcctgtatgaagataaatgggttatgtatcagggatggcgttaaataatcaaattgattctaagatcaaaatcgtcatagccatygctctgaaattctacagtgaactatagaggttgtagatagagaggaataagatgaccctcctaatgcagggatgtgggctttattcattcatttctgcat

SEQ ID NO: 810449 - DNA, 577 bp, Homo sapiens
tggacttctgacctagtgtctcagtgtcttaaagaatgtgttctaagctacaggatgtagcaactgccaggcttttaggtcctgggcttggaaactarcacaacatgacttctgttgtattaaaatgagcagagcgagcagagcagtcactgagccaacccagattccaggtggagaacatagatccagctctcaatgggaggaatgcccgaatctgtggccatctctaatttgccgtagtttccattacccacagttattgtgtactatgtttgccttttgattcacattgaaaccctcaaagtcactgcttcatttatttctcttcttaacaattgtaatggcttcaaactgacttctccatttctatgttctcatctgcctagtttcctaggtacactattgtgataatggtcttattaatattaataagatcttctaacattaatgtactatggtagcttgttgcctgaaaataaagacctcacaccttagtgtagtttgccttccatatcttaacctactctgtaagctcttcccaatacttccctttaaacttcctagatcgagtacagca

SEQ ID NO: 810450 - DNA, 586 bp, Homo sapiens
caataagaaaaaaaagccaacttaaaaaggacaaaaaacccaaacagacacttcaccgaaaaagatacacagatggcaaataagcatttgaaaaaatgctcaacatatgtcaytggggaacttcaaattaaaacaataatgatacatcactacctgcctcttagaatggctaaaattgacaaactgaccatatcaaatgctgacaaggatgtagagcaataggaactctcactaattgctggtgggaatgcaaaatggtacagtcattttggatgacagtttgatcatttcttacaaagctaaacatagtttttccataatatccagcaatcatgctcctatgtatttttccaactgagttgaaaacatgtccacataaaaccccaaacatgaatatttatggcagtattatttataatcaccaaaaactacaagcaagatatctttcgataggtgaatgaaaatgaataaacaaactgtgttacatctatataatggaatattactcgatgatgaaaagaaatgagctattaggtaaaaacaacagcaacaccaccaccaccaccaaggaagaatcttacgaaag

SEQ ID NO: 810451 - DNA, 646 bp, Homo sapiens
atcttcttgctaattaaatgtaggtaagctaagtcttttgctgttttatcaaacaaacctataatttcataccaattgtatatctctttaagaaatctactggctattctttcaggttcatgttcttgtaagaaattttactacagagtcagattgggaacatttttttgtccaattagaagtaactaaagaagtagataatcccaattcataatcaaccaaaaagtggctaaattttaagatttatagatgagtctggtacaatcttttccctgttctaggcccttctggtgtctgtttttgatttcaggagtaaagtcaaagatgaaggaataaaggaaataaaaaagaggagaaaacaagaacttttagtatctacagttgtacttaatgtagattaaaaactaatctttcaagaatgaattaccttgccaaaataaaaacatgaaaaactgaaatatcaaaacatgtagtatataaatcaaagacctaaacataaaactcttagaagaaaacaaagggtaaaggcatcatgyatcatgacactgatttggcaatggtttcttggatataacacaaaaggcacagtcaacaaaggaaaaaaaaataaactggactacatacaaatttaaccttttgtgcatca

SEQ ID NO: 810452 - DNA, 690 bp, Homo sapiens
gaaaaaataaaaggcataagaattagaaaggaagaaatagaactgcctttagctgcagattacatgtctatatagaaaatctgagattattattattattaggattcagtgagtttggtaagactgttggacactggaacaacattaaaaaatcaattttatttctatttgacaaaaaataatcaaagtctgggcacagtggctcgtaagtgtaatcccaacactttggaaagccaaggcaggagaatcacttgagcctaggagttcaagaccagcttgggcaaaattagtagaccccgtctctacaaaaacattaaaaaattagctgggtccatgtggtgtgcacttgtagtcccttctaccttggaggaggtcgaggctatagtcagctgtgattgcaccactgcactccagcctgggcaacagagcaagaaaccatctcttaaaagagagaataattaacaactgaaaatttagaagctactatttataatagcatcaaacatactgcttaaaaataaatcttacataaaaagtatgaaactcttaaaccaaaacaataaaacagagcaatagaaaatctaagtggagaaatatactacattcatagatcagaagactaaatttcaagatgttactcwccttcaaaatgatatatagattcaagaaaatcacaatgaaaattgcaat

SEQ ID NO: 810453 - DNA, 587 bp, Homo sapiens
tctgcagctgaagataccaatgaaagctgacaaacagttctccaaagcagaactctttctgccctgaggttaaaaacaacaatcctttattttatttatttatttgagacacagtcttgctctgttgcccaggctggagtgcggtggtgcgatctcagctcactgcaacctctgcctcccagggtcaagtgattcttgtgcatcaacctcctgagtagctgggattacaggaattacaggtgtgtaccacaatgcctggctaatttttatatttttagtacagacagggtttcaccatgttggccaggctggtcttgaattcctgagctcaagtaatctgcctgccttggcttcccaaagtgctgagattacaggcatgagccaccatgccaagccaacaatcctttatttggcatagcacacagtgatacactttggtacaaatctgtttgagacaggagagaagggagacactctgagttgtaagcagccctaatgctgccacaatctccattwactaagaaaaagtaaaggataaaacaattcacatacaaggctaactcctgctaccgtggaatactgctgca

SEQ ID NO: 810454 - DNA, 507 bp, Homo sapiens
aaggggaaaaaaacccatatggaaataggtggcttgagaatkatcagtattctacagaacccagtaccttccctaggtaaggaacaaatggaaaaatttaggctaatgaaaaacttgacagaaacaatgataacacatcccatgctttaatgactagaaaaacaattcttcggatgcttcaacaatataaataaactatcaagtaaagatttttaaaaattcctcccagccctctgtactggactgtcttctgcctgtggtcactctgtgatatggtttggctgtgtccccacccaaatctcaacttgaattgtgctcccataattaccacatgttgtgggagggacctggtgggagataattgaatcacaggggtggtttcccccatactgttctcatggtagtgaataagtctcatgagatctgatggttttataatgggaaacccctttcacttggttctcattctttcttgtctgccaccatgtaagaaatgcctttcacctt

SEQ ID NO: 810455 - DNA, 615 bp, Homo sapiens
aggggaaaaaaacccatatggaaataggtggcttgagaattatcagtattctacagaacccagtaccttccctaggtaaggaacaaatggaaaaatttaggctaatgaaaaacttgacagaaacaatgataayacatcccatgctttaatgactagaaaaacaattcttcggatgcttcaacaatataaataaactatcaagtaaagatttttaaaaattcctcccagccctctgtactggactgtcttctgcctgtggtcactctgtgatatggtttggctgtgtccccacccaaatctcaacttgaattgtgctcccataattaccacatgttgtgggagggacctggtgggagataattgaatcacaggggtggtttcccccatactgttctcatggtagtgaataagtctcatgagatctgatggttttataatgggaaacccctttcacttggttctcattctttcttgtctgccaccatgtaagaaatgcctttcaccttctgccatgattatgaggcctccccagccacatggaactgtgagtccattcaacctctttcctttctaaattacccagtctcagatgtgtctttatcaccagcgtgagaa

SEQ ID NO: 810456 - DNA, 615 bp, Homo sapiens
aggggaaaaaaacccatatggaaataggtggcttgagaattatcagtattctacagaacccagtaccttccctaggtaaggaacaaatggaaaaatttaggctaatgaaaaacttgacagaaacaatgataacacatcccatgctttaatgactagaaaaacaattcttcggatgcttcaacaatataaataaactatcaagtaaagatttttaaaaattcctcccagccctctgtactggactgtcttctgcctgtggtcactctgtgatatggtttggctgtgtccccacccaaatctcaacttgaattgtgctcccataattaccacatgttgtgggagggacctggtgggagataattgaatcacaggggtggtttcccccatactgttctcatggtagtgaataagtctcatgagatctgatggttttataatgggaaacccctttcacttggttctcattctttcttgtctgccaccatgtaagamatgcctttcaccttctgccatgattatgaggcctccccagccacatggaactgtgagtccattcaacctctttcctttctaaattacccagtctcagatgtgtctttatcaccagcgtgagaa

SEQ ID NO: 810457 - DNA, 615 bp, Homo sapiens
aggggaaaaaaacccatatggaaataggtggcttgagaattatcagtattctacagaacccagtaccttccctaggtaaggaacaaatggaaaaatttaggctaatgaaaaacttgacagaaacaatgataacacatcccatgctttaatgactagaaaaacaattcttcggatgcttcaacaatataaataaactatcaagtaaagatttttaaaaattcctcccagccctctgtactggactgtcttctgcctgtggtcactctgtgatatggtttggctgtgtccccacccaaatctcaacttgaattgtgctcccataattaccacatgttgtgggagggacctggtgggagataattgaatcacaggggtggtttcccccatactgttctcatggtagtgaataagtctcatgagatctgatggttttataatgggaaacccctttcacttggttctcattctttcttgtctgccaccatgtaagaaatgcctttcaccttctgccatgattatgaggcctccccagccacatggaactgtgagtccattmaacctctttcctttctaaattacccagtctcagatgtgtctttatcaccagcgtgagaa

SEQ ID NO: 810458 - DNA, 610 bp, Homo sapiens
agaagagaccttcagaagcaaatggtgctgaatgatgcatggtaggtgtagacaaatgtgtaagccatgacaggctgtcagctggccagcgcgcctcctgatgccttctctgtgaagtcacagcctctcctctctctgcagagcctttaaatgtgagggcctggaggccctcttcagccctctgcaatttcctgttcgctctgctcttaagagttttcacctgcttttcatggcttcagtgaagatctccacagcacactcacaaatcttgcttccagtcctgaatcccctcccacaaattttagtcctgcatttgccaaattttttggatatctatagtcatctcaaattcaacatgttcagagccaaactcatcatcatttattgatttaaatttgttcattcattcattcgtttattagcactggccacaaatgaggataaggacctccctgacctcaagaagctcagagtctgatcctaaattggagagtcagmatttgtagatcaaaaaggatcaatgtgacttaactgcaataccctgtttgtgtacaaggcaactgaagccaaggaagatcaaatggcttgtttaagcttatattgctattgg

SEQ ID NO: 810459 - DNA, 528 bp, Homo sapiens
agtatgtttaagattagcacaactgatggctcttccctgcctcagcccagctcagccacctgcttgcatgcaccaatcaataatcccttcttgaccttttccatatctctgggcttgacctattttcacttttggtcctcatcttgatctaacccattatatttggagatccctttgctcacttgagccctagatagtcctctgacataacagaagtctcagccttggcacacatctccaaccttctttccctacatgaacccttgacttcaagaaactagtctactcatagagccttgggtgaaccatgccatgcacatcgacaatttcattctccaaaaggcctgtcctgtgagactcaggcccaggttcttctctcaagaagccttctccaacttctttgcctatgaaaatcacctcagcctctgaactagaataccttactgtcttctccagtgactcacatagccggycccagaaaactgtgtcccagaggatgtctccaagggaaaagctccctcttggaga

SEQ ID NO: 810460 - DNA, 666 bp, Homo sapiens
cttaaaaatgcttgtaccaactatacttaagaagagctgctcaatatgagagaatctaagtccatttgagaacagtgatcaggagggaaaattcagtaacttcaaaaatagaaaactgactacttaaaagaaaccacatccctaaacagcaattaaaacaaaacaaaacaaaacaaaacaaaacaaaacaaaacaaaagaaacacacacacacacatacacacacacacacacccctgacatgtctggatagtggccacataaaaagaagacaaaaattgtactaaaaatttaaaaattttaaatattaggaatatctttattcagtatagcaatttaagcccctgactttattcaggatgcaccaattaccttgattcttagtatataagtgagttttcaagaagacacaaacctataaactatatttgatttgatctctgcaatgtcacagcaggtgcattactctgacatcatatagaaaaaataaatatcgaaataccatgaatgttttgttgatttatgttgctaaagttttaaagcatcattacttgyatcttattttttagcaaacatttctgctccattcactgttgtatgaaccagtcattcaggaaatcaacaaccctttatacattttaaatgttctttaggctcaataactttg

SEQ ID NO: 810461 - DNA, 522 bp, Homo sapiens
atcaaattcatgatacggttgcctatgggcagagagaaaggacataggactggcaaggagaatctatggaactccatagacattaacattaatatatratttctttaagtaaaggatctgaggtaaataaatgtggggaaagattaacatgtgttaatttttgtatcaagtatatctcttgatttttttctgtattaaaatgttcatatacatagtgtctgacctccagaattaaatacttctatggtagaacagacagaaaatagactaaaatgtagagaagctgagtgatggctgacttttatcatgcaaccttggccagttctcttaaccaagagaatctcggttatctgatctgctgaatgaggacactgcaaaccttaaggggagtgggtatgtgttgagaacacagcacgtgctaggcatgaatcacattaacacaagagttgagctgtgagctaaaaactaaatagtatattgtaaattcatcttaggaaacaaagctactattttgtaaaaccc

SEQ ID NO: 810462 - DNA, 643 bp, Homo sapiens
ttgctgttttaactcccattgatcttgtagccaaataaacccccatatgacatttttgcatayattttagttagaatattgtacttctataactgagttttatacccaaatgcattcttggtaaactgcatctcagtagtaaccttccattactctaatctgtacagatttttaaaaaattgtttatccatctgtgtttaactccttagtctcccacttagctgggtgtagtggcatatggacagacacatttcataaaacatgaagagataatcctcctttcttattcctgtattgtctctagctttctggtccaacaaatctacttataaatattgcattacttactgatgccattcaactcacagccatggacataatgaaaactcctagctcatttcccatgcatggttagttcacaggcaattatttgcagatgcaattctgcatgttggcttaattgacactttcccttgtttatcaagggtaatttctctgggaaattaacaacggtttacacctgcagctgctcaggcatgcagctagcaatccaactgtgactttataacccgatccttagactatctaagggttaaaaatcagcattacttaaggtcatgtgttcaggaatgtggcacttcag

SEQ ID NO: 810463 - DNA, 554 bp, Homo sapiens
ccaaatataaaggaaaaataaagtgaagatgaagtcattgatttggaaagaaacagagaatcctagtgtgactgtaaccccttgtttatgtatctgggctgtggctagaaggaagaacaagtggttttggcagaaggctgctagcaagacgctgtgtcttttaaaatcttcctgagatatctgggaagcaacaacaacaacaaacaacaacagcaaaagaaaagagggaagacagttaagggtgaaataattccactggtggcactgtgaggcgataaccaaggcaaagcactatcctgattgcaaacaaaacatggaaggatgagtattcctcaggatgaggaagctgaattctcatggcttttcctgcagaactcaagataaggcgctgttagtgatatcacatccacatccaccatraatgaagcctggattcggattacaaagctgaataaaccagatatcatctttggcataagtgtggctatttattggtatctaaaggatctgagtctgaaggaaagataaacctaagtatcaataagttgtgaaat

SEQ ID NO: 810464 - DNA, 558 bp, Homo sapiens
agatataattcacacatcatacaattcacacatttaaagtgtacaaatcaatgttttttgtatattcacaaatatatgcaaccatcactacagtcaatttgagaacgtttttatcacytcaaaaagaaacctcatgccctttagctgtcacccactatcctgcaccctccagccctaagcaaccactaatctacctcagatctatatagatttgcctactttaaccatttcatataaatggaatcatgtaatgtggtctttcgtgaccgggttctttcataatgttttcaaggttcataatggatgaaccttattttcaaggtttataatggtgtcattatggctgaaccttgaaatcattatgacaagtgaaagaagctagtcacaaaagaccgtggtagcaaggttcattcatgctaccatgttgtagcatctatcagtgcttcattttttttcattcctttttatggtcaaatagtattccattgtatagatataacacatttcatttatctttggctactatgaatgatactgttataaacattcatgtacaag

SEQ ID NO: 810465 - DNA, 249 bp, Homo sapiens
gggagccaccacccagaggatccttccctccaccctgcactcagccctctaggggcagcaggcgtctcttcaccctgctgggactgatcatctagccygccccagcagaccccgtcagtattcccaccagatttcttcactgggtaatatttgcaaggctgaggagtagagggcaaagtgctgaactgtggaacaaacagtagctgtggatttttatgaacctcttgtttcctcattcagcttataaac

SEQ ID NO: 810466 - DNA, 681 bp, Homo sapiens
atagagcagttctggactttcttcaggtttctgaatgcatttggttaataaggcagtggtctagcacagcctgctgtttctgggtaggttctttccactgaaacacaggaggaggagagagggagggatccctgcgtatttagtcaggacacccagccaacaaccctttacaaagcacatgttctccatccttttctcaaaggcttccaaactgcagatcaaataaacaatcaaagatactgaagagatttctgatttccataccctctcacccattattcccacagctaagtaaaaccaaatggtgttatgtaaattttattcaaataaaagcacccagacatgtccaatactttaactcttctgttatttaacattctatacaaatctttactcttttcttgcattttacttctagtgctgtgctcagttgaagacagtgcacatctaataaaacactgatattttcctgataatagacacaagttaaaaagaaaaagaaaaatacatacaccaaaaacattagtggggatttgttttatacttttttgcatgttggggtaatttttgcaataagaatgtattgctggtattattaraacaatcaatatagctatgtcttacatatcaataggcaggttatcaacaaaagacacaattagctttaacagaagaaaagga

SEQ ID NO: 810467 - DNA, 625 bp, Homo sapiens
tgtgatgttgtggaggatgtccagaaaaattgagacttctttgtgatgtattctgacagggggctggagggataatacagttctggggtaaaactctaagtccatattgtttatttcatgtgaacacaaagtgtttatgatctttctaattgaaatagaaaagaacatatttgctcctagattgtagctgagaggatctggagctgataatcacggcctcttcaaaaacttctgtgggacagaggctagaaaacctgtcccattggcacaaatggatgtgtctcccagaagttcactgtttgtcaagattgctctcaggctgtagccaagagggtggaagctgagcttcagggccccttagggatctgctgtggaatggaggttggcatgcctcttatggtggcacagataggtgagtccatcagttctctggatgggagagattactcgcagcacagagcaggtgagtctgataccaggcccttcaggatctgctgtgagacagaggcggggaagcctgcctggggactcagttgggcaaatctggcagatctctataccttcctgatagttcccagactgcagcaacagggacyggatccaagacagggccatttcaggatgt

SEQ ID NO: 810468 - DNA, 481 bp, Homo sapiens
ttccacagatggcccgagagtaggagatcctcctcttcctcttctggggattctgccctgcctggaaccttctgacttgactcaaagctctgggtttgctttggaagcaaggcaagctctgaggacagggcaagggcccttctcagggaaggagcaaaggctttctcatctgcttgggaaatcctgtgtctcaccaagctcaccccatgggcctcacacagtttctttgttcacttgagtttgggaaaaacctgatggctgtccacagaccccccttttctgaatctcagcatcccacttgtgaatatttatagagcaccgactactgccacatatgagtctacgtattgaggacgtagtaatgaacccaatagataaaagtgcagccctgtgttctcattgtttaactctgacttatgagygagaaaatgtggtgtttggttttctgttcctgtgttgtttgccgagaatgatggacaca

SEQ ID NO: 810469 - DNA, 558 bp, Homo sapiens
ctaagccaaaagaaatgcctaatgattctgtcagatccaagacaacttaataagtatttatgttctaacaacttagtagccatttgaaaaaataatacaattaaactgaaagaaawatttgtacttttttattcttattaaatacatttactttctttctttctttttttttttttggagacagaatctcgctctgtcaccaaggctggagtgcaatggcatgatctcagctcactgcaacctctgcctcccaggttcaagcaattctcctgtctcagcctcccgagtagctgggattactggctcatgctgccatgcccagctaattttttgtattttagtagagacggggtttcaccgtgttgaccaggctggtcttgaactcctgagctcaggtaatccacccgcctcggcctcccaaagtgctaggattacagacatgagccaccacacccggcctaatacatttactttctaatggtatatgtgcatctgctgggaggagtggatgaataattgaaaggatagcaaatcaaacaaactattgggtattttttt

SEQ ID NO: 810470 - DNA, 596 bp, Homo sapiens
ataaagactcaaagaatcaaaaggaaatgctagaaacaaaaaaaactaagaaaagtgaagaatgcctttgatggattcatcgattagatacagtcaaaggaaagaatcaatgagcttgaaaaaaaatgtcagkagcaacttcccaaactgaaactcagagagaaaagaatgaacaagatggaacagaatatccaagaactgtgggacaattagaaaggcataaatatgcataatgggaatccagaagatgatgacaggcagaaatgagcagaaaaagtatctgaaacaataatgaactgagaattttccaaaactgatgacagatgccaaacacagttctggggagctcacagaataccaggtaggataaatagcaaaaaacaaaaacagaacaaaactacatgtaagcatacaataaactacagaaaatcaaagacaaagagaaaatcttgagagaagccacagggaaataaattcctttcctataaaggagtaaggataagaattacatcacacttctttgagaaattattcaagggaaaacagtagagggaatatttatagtgttgtaaggaaaaaaaaaaaaccctattaac

SEQ ID NO: 810471 - DNA, 596 bp, Homo sapiens
ataaagactcaaagaatcaaaaggaaatgctagaaacaaaaaaaactaagaaaagtgaagaatgcctttgatggattcatcgattagatacagtcaaaggaaagaatcaatgagcttgaaaaaaaatgtcagtagcaacttcccaaactgaaactcagagagaaaagaatgaacaagatggaacagaatatccaagaactgtgggacaattagaaaggcataaatatgcataatgggaatccagaagatgatgacaggcagaaatgagcagaaaaagtatctgaaacaataatgaactgagaattttccaaaactgatgacagatgccaaacacagttctggggagctcacagaataccaggtaggataaatagcaaaaaacaaaaacagaacaaaactacatgtaagcatacaataaactacagaaaatcaaagacaaagagaaaatcttgagagaagccacagggaaataaattcctttcctataaaggagtaaggataagaattacatcasacttctttgagaaattattcaagggaaaacagtagagggaatatttatagtgttgtaaggaaaaaaaaaaaaccctattaac

SEQ ID NO: 810472 - DNA, 390 bp, Homo sapiens
ctcataatagccctataatgtaggttctattttggtcttcggttgacagggaagagaactgaggtcgagagaggttgagtaactatcccaaggttgcacagcaagctgaaragccaaggtctgaagccaggcagtcccactgcaaagcccgctgctgtagctgcacacagtcctcttccagaacccgcagggcctccttccacttccctaacccctggctgccagctctatcctaacttgcaggtcttggaggcactttcccttcatccgcctacgtcttagcctccttccctatttgttgggagcagataatgggtttgttgcatataaatgaagcccaggattgcgtgtggccaggcacgtctgacctctatcactctggaaaccagg

SEQ ID NO: 810473 - DNA, 642 bp, Homo sapiens
agctattttgatccaaggaatgttttgatccaagagctcttggagtctccttttctattagcatttttgccacaaattaaggagttggtttccagggaaaatatgtaagaagactgtcttagtcagtctggcctgccatagtgaaatacgagagacaagatagcttacaaacagcagaaatgtatttctcacattctgggagctggaagtctaagatcagggtgccttcacggttgggttctagtgaggactctctcctgggttgcagacagccaactcctgtgtcttcacacagcggaaagagggcaaagagtctcggagtccccttttataagggcattgatttcattcaagaaggttctcatccttatgacctaatcatctcccaaagtcctcagtaacactgtgacatgggggttagaatctcaaaatatgatttgttggaggacacaaacattcagtctataacaaagaccataaaaagcagagagggccggatacccgcaggtggtaggcctggaccccacagaataacagcggcttctgccctttcttccctamtgagtgactccctcttctaagtacttagccccccagtgagcagtcagcttacagaaatactggggtgactccccacaataa

SEQ ID NO: 810474 - DNA, 608 bp, Homo sapiens
atcctcatctgcatctgaatagaaactacaggttgtgtaatcttgggccactgaggtagcctctctgagcctcagtttctccctctgtaaagagggattggccagtcatgtagggctgggacagggggaggcaagggaggctgagctgtgcagggccagatcccacctttagtttaaatttttggtaatattttcatcctgtatttttttgctttgatttagatgaaaaaatattgcattaaaatattcttcggcacaacaatgtgaatgtacttagtcctactgaacgtttaaaaatggttaagatggtaattttatataatatatattttattataaaaatgtgtacgttgtttatcataattagtaagttatttcagcacccccttaaatgttgcaccgaggtgacagcctcacatccctcacccattcctggccctgcagtcatgcacataaattgcttggcatagggtctgaccaatcagaaacggatggctgctggctcwagaccactgtctctgctgaggcagccatcgtgcaattgtaatgaaagtctgtcttgggagctgttgggaacgataaggggagactcaggggctgagcactgg

SEQ ID NO: 810475 - DNA, 508 bp, Homo sapiens
gattaataattggattgttgcmtgagcaacatagtgagaccccatctctacaaaaaattaaaaaaacttaacagggcgtggtggtttgtacctgtagtcccagctactcagaaccggggtgagtttgagttcagccttggcaacataatgagaccctcatctccacaaaaaatcaaaaaattagccagtcctggtggtgcatgcctatagtcccagctacccaggaggatcacttgagcctaggaggttaaggctgcagtgagccatggtcacgccactgcactccagcctgggcaacagagcaagaccttgtctctgaaaaaacagaaggaaaagaaatgatagtggaatatgtagaaaaagacattgtagtgttctacgaaattaaattttctgttcattccgttattacatgtacttgagattttaaggggccatcatgtctttttgtttgaagaactagttacaaaataacattccagagaccctatagtttatactcaacaga

SEQ ID NO: 810476 - DNA, 618 bp, Homo sapiens
aacaaccctgtttccaaataaagtcacattctgaggtacaagggtactgtgatagctggacttcaacatatctttttgaaggacacaatccaatctgtaacacggccacatttcctatctcacatcttcccakagagtggtgaagtccacatcccctccccttgagcccaagcaaagctcgctgactgcttcaaccaaaagtgggtaccaaaagttattactgagcttaactcttggaatctggctaccatgctttcaagaagcccaaactagcccacgcagagaccacatggagagtacaggcattctcactaacagtccagctgaggttccagcctcaaccaccaggcacaaatgtgaacatacccccaactgattctaggccctaagtgaagagtcagccccagactctaagtcttcccagctgagaccaaagacgtgaagcagagacaagtcctcttcataatcctctgtctaaattcctgacccacagaatctaagcacatactaaaatgattatttgaagccattaagtttcatggtggtttgttacaccgctacagtaactggaacaatatcacattatcccacaaaacaaaattaaaatatttaacagtg

SEQ ID NO: 810477 - DNA, 309 bp, Homo sapiens
cacggctggagtgccctcctccaggccccaatctctgcctggtcaactcctctgcacccgtcacctctcagtttgggcatcactcyctctgagaagccctccttcaagccctgggtgcaccaggttgcagtctgagttttccctgtacctcactgcatgtcactggcctggcagtgagcacagggtatatgtgcttgtgtgattatctgactgaggcttgtccttcccagtaggtgctgagttccatcgaatcagggcccattcctagatttgcagccctggcacagcatccagcatccagcaggtgtt

SEQ ID NO: 810478 - DNA, 606 bp, Homo sapiens
aacagctgtgttttaaaaatgcaaaccaatatcttgttaataaaggaattcaagctatggggcagccacactcccctcctcccaggctggcataggtggccctgggctggcggcttaggaagcatggagcacacttagggtagtgcctgcctgggcaagagacacctgccgagcaaaaggaacgagaatctggggctcagagcctcgcagttgtgccaggattttcctatacatgttcaggacctctgggtagaggtttcacagtttgtgaccccataaccaccctcacccgacgtgggttctagctcagtgtgcctaatactgcatggtaacctgggcttgaccctgaagcccctgcctggcaggccacaggacctctcctgcccacttggtgctatctcttccagtgaccacccagcacgggtgagcactggccagcctggagcctgcaatccaggtggaacagactgtcctccatgtcagttccttctggcttcaggccctcaattmtttccctttgagcttttttagaccctagatctcctaggcccaggctctctcttgaccccagagaagccactgtcaggaaaggaagtgaaccctact

SEQ ID NO: 810479 - DNA, 606 bp, Homo sapiens
aacagctgtgttttaaaaatgcaaaccaatatcttgttaataaaggaattcaagctatggggcagccacactcccctcctcccaggctggcataggtggccctgggctggcggcttaggaagcatggagcacacttagggtagtgcctgcctgggcaagagacacctgccgagcaaaaggaacgagaatctggggctcagagcctcgcagttgtgccaggattttcctatacatgttcaggacctctgggtagaggtttcacagtttgtgaccccataaccaccctcacccgacgtgggttctagctcagtgtgcctaatactgcatggtaacctgggcttgaccctgaagcccctgcctggcaggccacaggacctctcctgcccacttggtgctatctcttccagtgaccacccagcacgggtgagcactggccagcctggagcctgcaatccaggtggaacagactgtcctccatgtcagttccttctggcttcaggccctcaattatttccctttgagcttttttagacccyagatctcctaggcccaggctctctcttgaccccagagaagccactgtcaggaaaggaagtgaaccctact

SEQ ID NO: 810480 - DNA, 646 bp, Homo sapiens
gtttcccgaggcctccccagccatgtggatctgtgagtcagctaaacctcttgtctttacattacccagtctcaggtagtactttacagcagtgtggaagcggactaacacacagaatgtctgccagatgactagaacaaccagggtttgatgcattagcctgtgagttcccttaagacgagcactgtgcttttgtatccctcacgcctacaaaacactggaatcaaagaatatatggtgtgacaattaattctaatgcacaggattacaaaattgtagttgtaaatgagattatctagattcaaaccaaatctgtttaagtttgtagcctttacttttatactgttatagttgactcttaaaaacagaaaaaaaaaaaaaaaaaaaaaatcccagcctgtcctgaaaagcccagcctgcctataacacatctgtgtagagcacacaggggcagagccagatttcacaccagcaaccaacacaatacggaggttgtaaaattctggaggtgaaaagaagaaaacaatgctgagagaaaggccatcttgtgacaactgctgtgactaaacagattgtattaatgctttccagggttctatcggagtttacattaaatctcgtgcrggggcctgacaatcacagtggg

SEQ ID NO: 810481 - DNA, 611 bp, Homo sapiens
tgctgacaaattctgcctcttcaacctaaggataaaagctgaaaaagctttttcagatgtcatttgcctacacaaaacaacattctgatgagtagcaaagyatctattaattagaaacatatgggaactgacttccctcaaattaaatgtagttgtgaaacttgagaataaggagaggtatttggcaaaacattcttgagttatgctgaatgtacaaaacttattaagagagatatatttatttaagtttaaaatatggctacattttcttcttctagcaagtaagccaactcagcaaaaagtcttcatcagtaagagtatcatttttatttatacatatgaatttattatttgactcatagattcttttttaaaaaatcaggaaagaatggaaggaaaaggattagggagaaggctttcgctatacctgcaacattttatttcttaaaaaaagatttgagacagggatggcaaaataacatccatcaaatctggctggtatgtgtgtctacttaattatattctatatgtttgaaaaaaatcacacgtttttgataaaagtatgcaagcaatatgtcagggtagataagaacacgggaatttgtttgaga

SEQ ID NO: 810482 - DNA, 443 bp, Homo sapiens
aagcacatattacatccaattagccctacaggcatggattaataacaaaagataattatcattgattgtagctggattacatctttatttccagatttctcataagcagtgatataaatagasaagaaaggtgccatggcataaagaaagaaggctctgaaccagtccactagtgtgcagtggtttccaatggcttttaaacaataatgtaattcacttcacagtactgattgagtagacttgagtttatttcattatgataacactgttgttaggcattgtcatccagcttggtgacttcatacagctcaaggccaaacacatggtgtgcctgttcttgtaattcattcacacaattagtataaactaccatagatttagctttctaaagactacccatctactcctcttcccacctccactaccactgggaaaagctagag

SEQ ID NO: 810483 - DNA, 638 bp, Homo sapiens
tcaccctagactgtcagacaggagataatcttactccctgatttagggcagaggggttgcgacacttctccagcctcaatcttgtayaaagaaggaggtagacgagttagataaatctctttgtcaaccgaaactttgacatcttggaacattgaacttgatttctggctgcctaatctgtggggtatctctaagggaatgagagcaatcccttatttgaaaaaaaaaaaaaaaaccaacacaactactgtattctgtacagataattccggccatcccatccagaaaaatattgctgaccttttggacatcagcaccgcaaaaaacagaacccagagcattttttgctcacaacgttttatctaagacaaacacagaaacagctatgtgtaattcaggtagcacacgcttagagaatataaacaaattgagccaaattatctgcaaaataagaagcttttaattattctatataacttgattctgaaccccactccatagccccttgggaagacacttggtaaaatatgtgttaatactttgctccagaagcaggtctgggaaaccccaaaagtggtccaacatttgagattctaatcacaaatgctgtggaaaatacccatttaaagagtaacttg

SEQ ID NO: 810484 - DNA, 621 bp, Homo sapiens
gaaatacctaatgtagatgacgggttgatgggtgcagcaaaccaccaaggcacatgcatacctatgtaacaaacctgcactttctgcacatgtatctgagaacttaaaatataatttaaataaaagataactgaattttcaaaaaaatttatatatatatatatatatagagagagagagagagagagaggaaaaacccttggctttgagaggtgataaggactctacattttttttggttttttttagacagagtttcgctctgtcccaggctagagtgcagtggcgctatcttggctcactgcaagctccgcctcccgggttcatgccattctcctgccttagcctccagagtagctgggactacaggcgcccgccaccatgcctggctaattttttgtattttcagtagagacgaggtttcaccgtgttagccaggatggtctcgatctcctgaccttgtgatccaccagcctcggcctcccaaagtgccaggattacaggcgtgggccactgcgctcagccaggactctacatttcttaycggaatatctgaaagaaatcatagtaatgacaagtgtaagagccatgttcatctcttatcaagaaatacgatattca

SEQ ID NO: 810485 - DNA, 587 bp, Homo sapiens
acaaaataacagaatttccttcttttaaagagctgtacacagacagacagacagayacacacacatgcacacacacagttattgggttataaaagtttcttatgtattctgaagattaacccattatcagatatatgatttgcaaatattttctctggtttaaaggttgccatttcaacttgctgattttctcttttgcagtgtagaagctttttattttatgcagtctcactgatctatttttgcttctcttgcctttgcttttggtgtcgtagctatgaaataattgctaagatcaatggcatgaagctttcttcctgtgttttcttctaagagttttatagttttgggtcttatgtttaaatttttaatccattttgaattgatttgtgtgtgtggtactagggtataatttcatttttttttttgcatttagaaatcaagttttcccagttccatttgtagaaaaagctagctttttcttcctattgtgtataactagcacccttgtcaaagatcagctgaccatatgtatgcattgatttgtttctgggctttctgttctattccgttgattcatgtgtcca

SEQ ID NO: 810486 - DNA, 523 bp, Homo sapiens
aaaaaaaaattagccgggcatggtggcrggcgcctgtagtcccggctactagggaggctgaggcaggagaatggcgtgaacccgggaggtggagcttgtcgtgagccgagatcgcgccactgcactccagcctcggtgacagagtgagactctgtcccaaaaaaaaaaaaaaaaaaaaattagctgggcgtggtggcacacacctgtaattccagttactcgagaggctgagccaggagaatcgcttgaacctgggaggcagaggctgcagtgagccaagatcacaccactgcaccccatcctgggcgaaagagggagattctgtcttatgagataagagaagataagataagatgatgggataagccaagcctcaggaggaaataaagaagagacctttggattgaattgtgaccaggacagaagggggcatgtcaacccctctgtctcactgggctctccttgcccttcaagtgctggccccaagtccccttctctgcaagccctgcccaccagcccctct

SEQ ID NO: 810487 - DNA, 523 bp, Homo sapiens
aaaaaaaaattagccgggcatggtggcgggcgcctgtagtcccggctactagggaggctgaggcaggagaatggcgtgaacccgggaggtggagcttgtcgtgagccgagatcgcgycactgcactccagcctcggtgacagagtgagactctgtcccaaaaaaaaaaaaaaaaaaaaattagctgggcgtggtggcacacacctgtaattccagttactcgagaggctgagccaggagaatcgcttgaacctgggaggcagaggctgcagtgagccaagatcacaccactgcaccccatcctgggcgaaagagggagattctgtcttatgagataagagaagataagataagatgatgggataagccaagcctcaggaggaaataaagaagagacctttggattgaattgtgaccaggacagaagggggcatgtcaacccctctgtctcactgggctctccttgcccttcaagtgctggccccaagtccccttctctgcaagccctgcccaccagcccctct

SEQ ID NO: 810488 - DNA, 514 bp, Homo sapiens
cagctacttaggaggttgaggcaggaaaatcacttgaacctggaagactgaggttgcwgtgagccaagatcacggcactgcactccagcctgggcaacagagcgagactccatctcaaaaagaaaaaaaaaagtgcctctggaacccctcattgcacaggaacgttctagaaatctccaccaagccagggcctctgagctggtgtcagacagggtctacgttctctgaggtccccctccccaggcccagctccccagcaggaagcatccggaagcattacttgagcagtgcgaggaaggcagcgggttccacgtcgggcagctcaatctccgtggatgttgtggccattcccccgttgaacatggcatcaaagacggcgctgcccacggccagcacgaacctggtacgggagagagaaggccctggttaagcccgtggccgccaccccacggccgggagggccagcccggtatcctgggtgaccaccccactagggctccctgccagcctccag

SEQ ID NO: 810489 - DNA, 367 bp, Homo sapiens
ccatctctgtttaaatcacccatctattcctgaaaggtgtctccttttaaaatcataatccttaaccagagttgttttaaatttccagtctgataatttcaacatccttacmacatctgtgtctggttccaatccttgctctgtctttcaaactgcatttttttttttttgccatagtctgtcttgtatttttttgaaaaccacacatgatgtactgggtaaaagggacttgagtgggcaggcattcagtgacacggtggtgagtgtggggagggaagggttctgtggttctggatgaggtctgtgtcctgggctgtgaatgtcacaagtgcccctcaggtttttctttccattaggtgggatatga

SEQ ID NO: 810490 - DNA, 524 bp, Homo sapiens
agatctggacatcaggatgtttggaatctccccaggctcatttaacgtgcaaccaagactgaagcccactgtcctcagcaatgtgsccagcccagccttcctgacatccccccatgggtacaggatgacagtttctcactctgaccctttcctttattcaatacagcacagcacaatccaacagggtgagcactgttatgacagagaacctggagtcggatctgattaaatgtcttcaacaaaaccagtgccaagccttggccattcagctatcaattactattttcaacccaggttctaaaggctcttcattagaaacttctcgggttgataatgattgggcaaatgtgccctttggatttgattgctaccatgattattaattaactgaattgtagagatatcgagtacctttctgcctcttgtttttaagaacccatgagagacaaggccaattgcagacaatgaggacgtcctcatgatagtgagatgaactgcctagctatcttccgatatcgttactt

SEQ ID NO: 810491 - DNA, 431 bp, Homo sapiens
tttgtccctgcctgaatttttagctattctaacaggtgaatagtgatatatcatcatggttttttgttttgttttgttttgagatagagtcttactctgttgcccaggctggagtgcagtggcgccatctcagctcactgcaacctccacctcctgggttcaagcgattctccagcctcagcctcccaagtagctgggactacaggcgtgcaccaccacacctgtctattttttgtatttttagtagagacagcgtttcgccatattggccagactggtctcgaactcctgacctcaggtgatccacccaccttggcctcccaaagtgctgggattataggcatgagccacygcgcctggtctcatcatggttttaattggcatttctttagtgcctggtgatgatggacatgttttcatgtgcttgtttg

SEQ ID NO: 810492 - DNA, 626 bp, Homo sapiens
ggagagatgaaagacagcttgagcgctggcagaaagcaggcatgacctctgcccttagggctgaagacragcgaagggagcctgcccaggggccccaccccaaaaccaggtagggtggtctttcccttgcagcacactttctgatatcctttagtacattccactagatcctccagataatcctacgcaataataagatgcagggttgcaatcccagcaccttgggaggccaaggtgggaggatcactgaggctgggagtttgagaccagcctggacaacatagcaagaccctatctctacaaaaaaatttaagaaaattagccaggcatggtggtatgcacctgtagtcccagctaattaggaagctgaggtgggaggatggctcaagcctgggaggttgaggctgcagtgagctgcaatcttgccactgtactccagcctgggtaacagagtgagaacctgtctctaaaaaaataaaaaagatagagggaatagctttctgcatcatactggaacactgtggcatctcttgcctcccagcctgccctgtccactgccctcccagggtgtcctctaagacccacggaagcagagggcagtgcccagcccacctgcctgctttctg

SEQ ID NO: 810493 - DNA, 513 bp, Homo sapiens
taggaagaatattttggtgtataagtttcactggaatttggtcaggcagtcaacactacagttagtaaacatatttgaaaacaagtatcaagagtatcacaagccatttacagtctgaaataatgcctgtacatatcaccatagcttttcgggttctgttttttcagacatcacaaattgtcaaagaacaaggatctgcactttttaagtataatttctgcccttaattattattgtagcttctaatttaccagcaacagtcaaagttctcagtaggctgctgcaataagggaggagggggaagagggagtgattttttttttaaaggctttctgtccaaagatgaacttttatcgattctttcaattattgccacaattgaaaaggtgtatktccaatcatttttcatggttctgtttttgcttactgtcataggatttcatcccatctcatttgagttgcaatttcaaaaagcaaagccttgctcttttctgactgaattcaacatgcata

SEQ ID NO: 810494 - DNA, 619 bp, Homo sapiens
aggcccatgctttagccaaactgggtaaacaattcttgtagttcctgtagcccagaatattctcctgccttctctattcccataaatctaattcttacctattcctacagaatcagctcatttatccccacttccaggaagcttttcctgattgctgcacttggacctggtctctctccttccttaatgcatctctcgtgactcctgtcctgtcccactggcgtaatggccatttgttttcatactttctctccaaaaaggttaccaggtccctgcttattctttttggtcttctatttggcacgtggtagcagaccaaattcacaacgaatccttaatatttattgggtgaataaatgaatagtaagtattggtaacacactggttgctatatatatttctttagatttgtttttctctcccctgtgtcccaactggggcccccttagctttcaatctaaccaccctttccagacagtctctgcttctccctccctgtggtcccctctcagccacactctgctgcaggcgagagaagcaggtccctggcctgaccctcaatgayctctttcctccccgctctctaaatacaggctcagaggaggaactcgaggagctg

SEQ ID NO: 810495 - DNA, 619 bp, Homo sapiens
aggcccatgctttagccaaactgggtaaacaattcttgtagttcctgtagcccagaatattctcctgccttctctattcccataaatctaattcttacctattcctacagaatcagctcatttatccccacttccaggaagcttttcctgattgctgcacttggacctggtctctctccttccttaatgcatctctcgtgactcctgtcctgtcccactggcgtaatggccatttgttttcatactttctctccaaaaaggttaccaggtccctgcttattctttttggtcttctatttggcacgtggtagcagaccaaattcacaacgaatccttaatatttattgggtgaataaatgaatagtaagtattggtaacacactggttgctatatatatttctttagatttgtttttctctcccctgtgtcccaactggggcccccttagctttcaatctaaccaccctttccagacagtctctgcttctccctccctgtggtcccctctcagccacactctgctgcaggcgagagaagcaggtccctggcctgaccctcaatgacctctttcctccccsctctctaaatacaggctcagaggaggaactcgaggagctg

SEQ ID NO: 810496 - DNA, 571 bp, Homo sapiens
agtgaaattatatcaccttccacagtgttctaactccaaggacccttttctacatggaacttcaagggcagaaacattacctttgaataaaatgaacctgaatgttcactctaattacattaagcctaattgttttctgtgaatacagatatgttttcattatatttctgccatggctgtttttccttctgggcccagagtccttgggccaggcttgatgtggtaatgtgcattataaatcaatggtagctttgtggtgacttactgttaatgtctgcaagctctgaagttaaatgagatgatgtaaaccattttaagaaattcatgcctaattaataatgtattttgatgttgtttgctgttttattacatgtataaaagagtagaattcagtgcagctcagccagggatgacgaatatcctctcagtttttattacaaagacaatcaggaaaatttcatgtatagaaatgagtggttttctattcaaattatcarcgagcctatgctgtaaaaagggacttttttctgttttcaaaaaatgtttgctacaggagtagaaaataatttaa

SEQ ID NO: 810497 - DNA, 655 bp, Homo sapiens
aaaccgttggttccaggtgtggctttgagattaaacctggcgcctttcctgtggcccttgataagggtgatcctgagtgtttctctggcattttctgtttaaggcctgtctgaggttcagcaaagtcccacctccccacggagccctccatgataagcacagcactcgcgggtccacctccctgtggcctgctctgtggggagcccagggttggcaccattcctgggccctgcccctcccctcccctccccagcacaaggactgaccctgaggagtgctattaataattatatcaggacagttttgtaatcaggaactgccgtgcacgggaactgtagtctgcgggaggattgttctgttactgattgatctcccaccaccgtgcccttcaaactccgggttcagatccttggattgtatttgggggttggagctcagatgaggggaatcctcttggtgggctggagcagtcgaaagcttcttgaagggggaggattgaaactggaccctgaaggaaagtgggtrggaggaggggcagagagcattccagataagcagagggtctgggttgtcaggggcaaggggcctggggagtctgggggtggtgggaaggttaaggatgtcagggctggatcctgaagggctttgaatgtca

SEQ ID NO: 810498 - DNA, 495 bp, Homo sapiens
gctcactgcagccttaaactcctgggcttcagcgatcctcccatttcagcctcctgagtagctgggattacaggtgcgtgacaccacgctcaactaatttatttattttttgtrgagagagggtcttgatatgttgcccaggctggcctcaagtgatcatcccgcctccacctcccagaatgctgggactataggcatgagccaccacaccttgcttcttctctgttattatgtgagagtggctctttccaccaagccaaggattcagttattcagagattgagtcctggtcccatggagcccagaacaccagcagtaatccagctcatgcctctctctggggggcatgagaggacctgtggtgggaggtggaggccttagcagagggtcgagccgagttctgccacttggcccccatgaatttattagttgcatgctttgatacatgtctccgggttatcagcacaatcacactttgaaaaagtgttttgagtc

SEQ ID NO: 810499 - DNA, 563 bp, Homo sapiens
aagtattgtggagctggaattgctaaacttgttttggaagcagacagagactcaggcatgtattttaggcttgtgggcttatggcagatcttagatttaaagcatacattgagaccaagtttatcttctcctctactgaaaggaaaaaataaatgctctgattgctaagcccttcctacccctgggtctcctctctaaatgttatacctggcctctctctttggggtgtggttgaaggaagggggccaggctctgaacacagtgctgggtggctgtgtgtgcccccccagggccatgtgtgccccccagggtcgtgtgtgcctcccagagtcaagtgtgcctctcagggtaatgtgtgccccccagggtccagtgtgacccccagggccgtgtgtgcccccagggttgtgtgtacccccctgggtcgtgtgtacccccaagggctgcatgtgaccgccaggttcagttgtgactcccagggtcgtgtgtgcccccagggctgtgtgttccccccagggtcatgtgcagaagtgggggggacagrcctgggacccaggctccct

SEQ ID NO: 810500 - DNA, 578 bp, Homo sapiens
ctcactcacatcacatttggctgtgggtcagctgcagctttccttcctcttgtggtttgggctcagatgtgcttctgaagtgtakgctgaaggcatagcccaatctagaactgaacatgatgttcttgcgggaaaaggggcagtagcaagagggatggtgaaactcatgatacctcttaaaacttcttgcttacagtgaacatcacatttaattggccaaagccagacctccgctctggaatgtaaaataatcctctctggggagaggaggcaaaggactctaggctttcaccatctccagaagagagaagactttatatttctccagaagtctctatctttaggatagccaataatcgtcctttaacccatgtgcctttgctcagaaatcattaacaccaaaaacacaaaaatattcatggaacattgtttcatgacactcatgctttttaatattctgattactgtgtttagttgtagagacccagttttcagagttgtggagatgagtgcccctctggctcatagttctcagcaggcacatattctcctttgactgacatatagagactggatcc

SEQ ID NO: 810501 - DNA, 456 bp, Homo sapiens
atagaaataagctgcaaatggcttttataaagacatttacacatgttcaaagcactcttttcttgcacagtagctcctcaaccttgctgcacaatcatgtcactgggaggcttgctgaaagagcagatttytgggttcccatgccagaaatgctgatccagtgttccagggcagttgtgccaaatgatgctcatagcaactgactttgaaattagtaaccagagcaatccaaattgaaatcaatttgacagtgagactcttattactttctatattttgctcatggatgacactcaataaatatttgttggattaatggtcccagtgggaagaatggcagcctgatgaggtagaccaggaaacctggagacatgcctcacttatgcccgaaagtggctttctgtactctgtaagagacacctgttgacttgaccgccacttagtaaccaacttctg

SEQ ID NO: 810502 - DNA, 634 bp, Homo sapiens
ctgctcctcattccagggctttcaggggaagttcagtccaccagaagctggtgaatgacccacgggagacacaggaagtttttgggggyggagtgggggacattgtggggtaggctcagcagttctgaagaagacatccagaaatggaagacatcgtgaaattgtcattctaggggtgatatattactacttcatggattatcatctattgcccagatctgtccacagaccaaatccccaccacttgagtgctatttggtctcaaaaatccagatacataagccagtttgtcccctgagcccctcggcctccctttagagaactttaacctatcttctcttgactccaaggatcagacaagggtgctgagagccgggactcacaaccaaaggagaaatgagcaatccgcggtctttggaagaggtaggctgggtgcaggttgaggggagggtgatcatctggggagaaggaaggtgaggattttaatgttttggaaagagtggagggactgaaaaaatcatgatctgaactcagagctaggaggtactttgtagtcaatcaaacagcaaaaaaagactcagagatggaaccgaagttgggttgggtggtgggggcagtcaaacacagctacctc

SEQ ID NO: 810503 - DNA, 634 bp, Homo sapiens
ctgctcctcattccagggctttcaggggaagttcagtccaccagaagctggtgaatgacccacgggagacacaggaagtttttgggggcggrgtgggggacattgtggggtaggctcagcagttctgaagaagacatccagaaatggaagacatcgtgaaattgtcattctaggggtgatatattactacttcatggattatcatctattgcccagatctgtccacagaccaaatccccaccacttgagtgctatttggtctcaaaaatccagatacataagccagtttgtcccctgagcccctcggcctccctttagagaactttaacctatcttctcttgactccaaggatcagacaagggtgctgagagccgggactcacaaccaaaggagaaatgagcaatccgcggtctttggaagaggtaggctgggtgcaggttgaggggagggtgatcatctggggagaaggaaggtgaggattttaatgttttggaaagagtggagggactgaaaaaatcatgatctgaactcagagctaggaggtactttgtagtcaatcaaacagcaaaaaaagactcagagatggaaccgaagttgggttgggtggtgggggcagtcaaacacagctacctc

SEQ ID NO: 810504 - DNA, 633 bp, Homo sapiens
gccttttgatagatgctttgacttccaaaataaacttcctttctgcascttcataccagttaattacctcctgtataccagtcccaacccagaggaccaagttcctggagaccttgcagattcctatatttggctataacaaactggaccatattggtctatgataaggatgttcatattttctaggtttgcctaggaaagttctggggttttttgcttattattctggtataattatcaatagggcctcctttactctcaaggtatctaggtctagataataaagtatataatatggtcacttaaacccttcctaagttatgacagaagctgaactcttaaattttgtcttaactgtgtcaattatagtgccatattgagaaagttggaggtttacttttaaaaatcagatttttaaagttatccagtgtattaagtgacttttagtttatggctatttgaatagagattataaaaatataaatataaaggtatcaagacacaaaatatttttctagagatccacatatttattgggcactatattatcatagtattaagagtttctgggaagcaaattttaaaagatttgcttcatgcccttcatcaaatattctgtgaggcaacgcacta

SEQ ID NO: 810505 - DNA, 600 bp, Homo sapiens
gctggtgtaaacaaacctactgcacttccagtcatacaaaagtatagcacatacagttatgcacagtacgtaatacttggtaaygataataaacaactatgttactggtttatatatttactatgatatactatttatcattattttagactgctcccctacttattaaaaaaaatttaactgtaaaatagccttaggcaggtacatcaggaggcatccagaagaaggcattgctatcacaagagatgacagctccgtatgtgtcattgcccctgaagaccttccagtgagacaagatgtggaggtggaagacagtgatgttgatcatcctgaccctgagtaggccttggctaaagtgtgtgtttgtgttttagttttttaacaaaatggtttaaaaagtaaaaccaaaaaaatttaaaaattggaagtctatgaagtgtacaatgtgtttgtgttataagctaagatttattacaagacagtcaaaaaattaaaaacatgatgaagtttgtaaagtaaatagctaagcttaatttattattgaagagaaaattttaaaaaataaatttagtgtagtctaagtatactgtgtttataagg

SEQ ID NO: 810506 - DNA, 600 bp, Homo sapiens
gctggtgtaaacaaacctactgcacttccagtcatacaaaagtatagcacatacagttatgcacagtacgtaatacttggtaatgataataaacaactatgttactggtttatatatttactatgmtatactatttatcattattttagactgctcccctacttattaaaaaaaatttaactgtaaaatagccttaggcaggtacatcaggaggcatccagaagaaggcattgctatcacaagagatgacagctccgtatgtgtcattgcccctgaagaccttccagtgagacaagatgtggaggtggaagacagtgatgttgatcatcctgaccctgagtaggccttggctaaagtgtgtgtttgtgttttagttttttaacaaaatggtttaaaaagtaaaaccaaaaaaatttaaaaattggaagtctatgaagtgtacaatgtgtttgtgttataagctaagatttattacaagacagtcaaaaaattaaaaacatgatgaagtttgtaaagtaaatagctaagcttaatttattattgaagagaaaattttaaaaaataaatttagtgtagtctaagtatactgtgtttataagg

SEQ ID NO: 810507 - DNA, 631 bp, Homo sapiens
gagctaacaggttaaaacctggttcaaagacgtcatctgtcccttaatgatagtgtaggtrtcgcctgctatctgaattcttgccatacaatttcaaaagtggaacagatacagatacattttcaagtaaatccctatctaaactcttctttcttttgatctgaaatgcaagaaccaaacaggaattcaagtaacagtaaataccggtatatattttcgtctaaaagatacttgcaagtatcttcatgccacccatggaggtgaagggtagctgtgcctcatcatgcctcctgggaggtaacagaggactcaggagagacttagagctgaattccacatgttcatcagagtgacttccagcccaagatcccccagctgagggaaagcagaaggcaaagcaaactgagcgtccctggcctggctgaggtctgagggcatcaggacagaggaggagacaaaggacccggtggcactacacacaacttgcagttgtcaacctcaaaactccagagcacccacatggcaatttctgggcacggccaggacctcagcactaatgctttagtgctagaaagtccctgtttcctgctggctgccagccagggggcccttcttggctccttctcacgtg

SEQ ID NO: 810508 - DNA, 573 bp, Homo sapiens
taaatgctggagacccctgtccatcatgccgtcatgggtgctaaggtgaggtctgttcagaaactgcttaagaatcctcaggagaacagcccccctccacctgggagaggggctcagtatcagagcatctgtggcaagacagctggaaaagggaccttaaagaatctatacctccaacttccgcccctcccctctccatggtagctggagaacacatgctgagcggctgtgacccattagagccatcagagcaacacagagggcagcacaggcacacacagtgacactcaggctgacacggatgtgcacacatggagttaagccaattccagtggagtctgcacgtgctgcgctgccacactgctcacctccaagaggggacaatgcaagaacttgtggtataggcaaaatgaaacacattcgaatcacagacattctatttagaaaccaacagcattaattaggcacagatrttaagtgtgtttaattatctcttttaaagacgttttccatggatgtttattggtgttatatgacagacacagtaagaatcagataagtcaccctaaaagt

SEQ ID NO: 810509 - DNA, 514 bp, Homo sapiens
ctggccctatccaccaaaacttttcaaagctctccattttcctttagaagaccgtcttagttttataatggaatttttaaaaaaatgtgactcacactatgaatagtttctttatagccagctstcttggaatgggtctgttatcaaagtgaagactatctgtctcctacttcatggtaacaaattgctcttccaacaagatcattgacatgaacccagacatacgtcccagcctcaaggatttttggcttttgaaccatcaccactgttataggtttggactttgacattcctaaattgatttttcttcaccaaatctggactttttcacatccactggcaaatatgttgggatgtcatgaggtgacataaactaccagccagcagccccatttttgaagtatctctattccacttggctcatattgtatagcctgttgatgcaattgtttgaatatgttgttgtgtttattgatagtaaaaatgagcaaaaatggaaaatttaaagtatagg

SEQ ID NO: 810510 - DNA, 432 bp, Homo sapiens
aaatcacgagcatgttagtgatctgagcctggaaaacgcagctgtttatgtatcttcacaacttctccctgcttatgtgtgtgacttcacaaaggcaatcgatacggaaggatacatcatctctagagttaggaggcctgctatacactcaacttacattttgcagaagcatcacagccctgcaccatattaacaacaagaatatatcctgaaaaagttagtctcgttttctaatcacttaatttccacgtcagggaaaaaaacttttttttaattaattaatttatttattttgagatggagtcttgctgcagcccaggctggaatgcagtggcgtgacctcggytcactgcaacctccacctcctgggttcaagcaattctcctgtctcagcctcccgattagctgcgaatataggcacaccatcacacc

SEQ ID NO: 810511 - DNA, 524 bp, Homo sapiens
cttggacggggatcctctagccccaggccagccttcaaatatccatagccctgaccaatgcctgaatataacttctgtrcagaccctgatcaagaactacccagctaagtagcttctacattcctggcccatagaaactgtgagttcaaaaatgtttattgttttaatccactaagttttagagtgatttgctatttagcaataaacctaatacaataagtaaatgaatgaaaaggaaggtcacaagatcaacctcatattcaccagtttattaagcagggcttctatagtagtcaattagggtactaattttcaagtatcaaaaggggaggtatagtcagtactttttcctctagacaaatgtggtttataagggacaatgataaggagtccttatacagaactatagagtattggtaaaatatcttgcattcttctgaactcagtgggaaagaaagagaaaatttgctttgagaaaatttgacaattctggatgctcattctccaggcagagtccagcatct

SEQ ID NO: 810512 - DNA, 540 bp, Homo sapiens
aattttgtcttgatgtggctacttttagtaacctattaagggaggagaccacccctcatattgtcttatgcccaatttctgcctccaaagaaagaagtaaaaactaaaaggcagaaatgaaatccacaggcagacataccagcgccatgccctgggcctggtagttaaagatccacccctgacctaaccggttatgttgtctatagattccagggattgtaaaaatccctgtcctgttctgttttgttctgattaccggtgcatgcagcccccagtcacataccccctgcttgctcaatcgatcacgaccctctcacgcgcacccccttagagctgtgagcccttaagagggacaggaattgctcactcggggagctcggctcttgagacaggagtcttgccaatgctcctggccgaataaaccccttccttctttaactcggtgtctgaggtgttttgtctgcggcttgtccggctacactatygtcagattgtcttctgaatttctcaggtcttacaacagtatttctaaaaatataa

SEQ ID NO: 810513 - DNA, 634 bp, Homo sapiens
gcctgggcctctcaaagtgctgggattacaggtgtgagccaccgcacctggtcttatttatttatttattattttgagacagggtctcactctgtcwcttggactggagtacagtggcatgattatagctcactgtaacattgaactcctggactcaagtgatcccctgcttcagcttcctgagaagctgagaccacaggtgcaccaccatgctcagctaatttttaaaaaattttctgtagacacagggtctcactatgttgcacaggctggtctcgaactcctgggctcaagggatccacctcaacctcccaaagtgctgggattacaggcatgagccaccatgcccggcctaagaatgtttacatctatgtttgtaatggagatataccagaagctgcaaaatcagaggtaacttgtaggccttgtttatttgaccagcacagggttttgaagcatttgagtttgaattcctgaagaaggggtgcacactcaccagtgcctgcagctcccaccttttcctttcatttcatacccaatcagctgcacccatttatgttattttctggctcttgtagacacccccagtttgtggttttcttttctcgttgttaaagctttggtagatttggga

SEQ ID NO: 810514 - DNA, 619 bp, Homo sapiens
tttaaatattcatacacaactgctagaccaaatgggtttgattaaagatatgttagcaggccaagttaatattaattcaaaaaaaaaaaaaggccaggcacagtggctcacgcctgtaatcccagcactttgggaggccgaggcgggcggatcacaacgtcaggagatcaagatcatcctggctaacatggtgaaaccccgtctctactaaaaatacaaaaaaaaaaaaaaaaaaaaaaaattagctgggcgtggtgccaggcgcctgtagtcccagctactcgggaggctgaggcaggagaatggcgtgaacccaggaggcggagcttgcagtgagctgagatcgcgccactgcactccagcctgggcaactgagcgagactccgtctcaaaaaaaaaaaaaaaaaaaaaaaagtagctggaaaactttgagatggtagattcacagcctatttaagatgtgttttttggccaaaaatccagcctgtataagcarcaaatgcttgatttttttaaaataaagaataagaaaatatcatgcaaaataatggaagcaaaactggcataaaatttaagaaattcaacttttccttaaaacaggtagagggcagtggaagag

SEQ ID NO: 810515 - DNA, 503 bp, Homo sapiens
ccgtttaaacctcgtgccagcccagtgcggtgttatcatgtcactctctagatgaggagctgccattcagagggaaagaatcttgcctgaggtctcagcactggatcagtctcactgtcctcgggaacaacggacttcattgccttccataagccccctaagcagcaggcagcgcgtgcagaggtcccaccatgcgaggtggcatggaggtgcccttgtagccggatctggcgactctgacctttcttggccaccagcaggtacagagggccctaggggaggccttagggagtgtggtgtgctgtcccacagtgccccctgcagtcccacaggccaggaaacctgaatgttagtccccagaaggaccaatcaggagcccatatcgcacctgctcctgtggactgmgccttcctcctggagagcagatggtaaataaatacggaggctaacgggggtctcctctcaccctctcccattagcatcttagacttggagcaatacca

SEQ ID NO: 810516 - DNA, 618 bp, Homo sapiens
acacttcccagtttcaaaatgttctacaaagctgtggtaatcaagacagcatggcacggtcataaagatagacatatgaatcactgggacagaattgatcatctaaaaataaattttcrtatttatggtcaaatgatttttaatcatgatgccaagaaaatttattgggtaaaataaaagtcttttcaataaatggtgttgggaaaactggatgtccacagcaaaaattaaaagtttaatgtgttcaacatgccatatacaaaacctaattcaaaattgatcatagacataaatgtaagagctaaaattataaaattcagaagaaatagagaagtaaatatttatgactttaagttaggtagtgattttttaggtatgaccccaaaaagcataagcaaccaaagaaactaaattgaactttctcaaaatataatattttgtgcttccagggataccatcgagaaaatgaaaagactacctacagaataggagaaaatatttgaaatgatatatctgataaaaggcttgtgtcaagaatatataaagaactcttacagctcaactaatagacaacccattttttcaatggggaaaagatctgtatatacattttttcca

SEQ ID NO: 810517 - DNA, 631 bp, Homo sapiens
caaaaagataagtaaactatggtacatctctaaaatgaaatattatttggtgataaagggaaatgagctattaaacgtgatccccagtgttggaggtggggcatagtggaaagtgttagggtcatggggtgtatctctcatgaatggcttggtgccatccccttcatgatgagtgagttctcactccattagttcacatgtgagcttgttgtttaacctcctcccctctctcttgctcctttcctctccatgtgacatgctttctcctcctgcaccatgattgtaagtttcctgaggccctcgccagaagtagatgccagcactatgcttcttgtacagtctgcaaaccatgagccaaaataaacctcgttcctatataaattaccctgtctcaggtattcatttatagcaatacaaaacaaactaatgaatacaaacatgtagaggatgacatagaaaatctaggtaactttgtgtttcctgatgagattttagatacactgccaaaagtgaaatccatacaagaaaagaaaaatgataatytggacattaaatttaaaacttatgtgcaaaagatactgttaagagaataaaaagatatgctacagcctcaaagacagtatttgcaaat

SEQ ID NO: 810518 - DNA, 635 bp, Homo sapiens
atacagatggcaaataaacacatgaaaatatataaaacatcatatgttattaggtaaytgcaaattataagaacaataaggtgccatgatatgcttattagaatgtctataatccaaaaattctccaatacgcaatgctggtgaggaagtagaacaaccagaacttcattcattgctagtgggaatacaaaatgtaaatgtgactttggaagacagtttggcagtttcttacaaagttaaacatagtcttatcatatgatccagcaatcacactcctaagtatatacccaactgagttgaaaacttatgtccacacaaaacccttcacaggaatgtttatagcagctttatacataattgcaaaaaactgaaagcaaccaagatgtttttcaacagaggaaaagataagtaaactagggtacgtctctaaaatgaaatattatttggtgataaagggaaatgagctatgaagccaaggaaagacataaataaacttacatgtatttttctgagtaagcctgaaaagactcccatactaaattacattttctttttaaattaattttttttcattcccactttaaattttccattcccactctaggttcagggacacatgtgcagatttgttacat

SEQ ID NO: 810519 - DNA, 544 bp, Homo sapiens
tggccgggcacggtggcacatgcctgtgatcccagcacttttggcggccaaggcgggcgaatcacctgaggtcaggagtttgagacaagcctggccaacatgaggaaacyctgtttctactaaaaatacaaaaattagccgggtgtggtggtgcatgcctgtaatcccagctacttgggaggctgaggcaggagaatctcttgaacccgggaggcggaggttgcagtgagcaactgcactccaacctgggcaacacagtgaagctccatctcaaaaaaaaaaaaaaaaaaaaagctttgtcctattctcacaataaagtttctgaatatgacctgaaggcagaaggcaggtctgtcttgattactaactacctgtaactgagctctaatgacactctcctcattctaactgtttagtttcttggttttgtggatttctatttttgttatagaattgtatttatttttctatagttcttaaaaatatttttgctgggtatgcagttctaaacaggtattttctctgggcagtttgaagcttttat

SEQ ID NO: 810520 - DNA, 637 bp, Homo sapiens
gaaagctactgtgaccatcagtgaaaaagtttttgtgtgaacatgtgctttacttctctgggattaatgctgargagtaaaaccattgagtcacatggcaattgtcatcagtatatctcctttgatgaatatctgttcatgtattttgcgcatatttttaggcagattgcctgatttttactgatgagtttggagatttttaaaatgtattccagatgcaaggctttgcttgaatttttataggaaagggattaaacttataggtcaatttatggagtattgatagattttattatgttgagttgtctaattcatgaatatggtatgtcttatttaggtcttctttgatttattgcatcaaaaatttttaagtttcagcatatatattctatacgtctttggtgagatttgtacctgaatatttcatcttctttagagcaattgtaaatcgtattgtgtttttaatttcagttgtcatatgttcataattagtatatacaaatgcaagttattttatattttgatcttacatcctataaccttgcaaaattcacttattgttccaaggtattgtttggtttagtttttcagtttctatgtgattttctatgtggaccttcatgtcatttgcaaatag

SEQ ID NO: 810521 - DNA, 616 bp, Homo sapiens
aattgctcaataatttaaatccttaccaactttggctttaatcatgagaggatagctacttcctaaatttaacaaagtgccatacgggagcttttccaytggttttaaatcaatgaatcagtgggacataagctggaaggctaggagagattcagaaaagacatgatattattgcactccccttgaaaagaataatgatcataaaatatgggatttgataggccttcagatctctttgggtccaattctcctcttttacaggagaggaaactaacaaaatagatcaccatcactaatttctgggcaggccatttacaggcctttccactggacttcctggctttgtcacaaaacagacgtgcttcaattcccagctaggttaattactggctccatgattttgggaaaataatttttttctacaccttagttttctcacctatgaaatgaggatgccatagcacctaccccacagagtggttgagagaatcaaataatgtgtcatgtgtgaagcacatagcacagtgcctggcagcattctgcatgtgcgcttacatgtatacgtgcatgaacacacacacatgtgcacaggggtaatggtttccataactgtgtg

SEQ ID NO: 810522 - DNA, 581 bp, Homo sapiens
tctttgcatcgtaatcatggcactattttattcaaactgaatcccctcatccaacatatatacacacagcatatagaataaaataaaatctacaataagatatttaatcctaccttttaagataacatagttcaataacagcatccttgtccccacttacaaactacacacatacacacaaatatcaggccctcatgtttccaaatgtcttgcaccacaaaggaatctgtcattatatgagtgggaaacaaggaagttttcaaacggaatgtgacttgtaccaaatatcctagccattgaagaatagaaactggaaagcctcttcggtcttctgaaagtgtagttttaagctcatttctcaatattatttaccactgtatctgtactacttagtaagattcctctaacatttgaatcaagttcttcaatctatttttatattatatttgacattgtrtaatccaacaaatcatcaaactcacatttattacctgatataaataattttaaaacacttcaaaatgaaatagtttatttataacaattaagaaataagtcatactctaagaacatattttaag

SEQ ID NO: 810523 - DNA, 618 bp, Homo sapiens
ccatgttccttagctttttttaaggttgagttctacttgaagataatcagttttacctggagtgagttgaagatatctccattcttgagaaaagagaaagcaaaagaactgtttgtttgaggcaggtgttggtaaagatcctatgaaatatttttactctcctggggaaaaatagaacaaaaagttaagttgtggcaaaaacgagctagcatgtcttactccagacactaattttcactgttctaacatggaaagatggtaagacccaatctcctacttttttcttatacattgcatcaggacagccagaaaaggagtactggctagtgaaaatacaaatagcatttttgtgatttgatagtatttaggctcttgacaaaattgctcccaaattggtccaatttggaattatatcagggaaggaagtttgttgtacctttttgctatacatttggatgatgaagagagaacatttggtctctagtgtaatcatcctgagatctttcacaaggattatagttattggcgaaaaagagartcacacaactacttaacaaatgctataggatttggcaagaactagtagtagataggtactgaatctctttaacttcagaa

SEQ ID NO: 810524 - DNA, 562 bp, Homo sapiens
ttgaacatcatcccccactgccttctgacctccatgacttctgatgagaagtaagctgttaatcttaytggtgaatgttgtgcatgatgagtagctcttactactttcaagattccctttttgattcctttggcttttgatggtttgatttttatgcatttatatgcagacctgattgtatttatcctgcttgtagtttgagcttcttggatatgtagattaacactttttcatcaaaattgggcagtttttagttattactaccaaaaattatttctgctcctttctctgtcctgtccttctgggtggttctcccattatgattattttggcatgcttcattattatccactgataatctgagatcttttttttttgtccttctattcctcagtttgtataatctcagttaacatatcttcaggtgtgccaattctttcttttgactgagcaagcgtgctgttgtgcccatctagtggactagtcatttgcattgtactttgactccagaacttatacctttttcttctttttcaaataatttatacctttttattaacat

SEQ ID NO: 810525 - DNA, 624 bp, Homo sapiens
tgaagtcccaactcatttggattacakcttgtttgtaagatagttttcgttaagtgggcttggcatactttcaccccttagcttccatactctataatttctcttaatctggaaattcaatgttgttcatctttggaatatctgaattatttggttgttttcgtctatctttttctgtttttcctgaaatttcaatatttttatttgggtatttgactttgtcgatgagtcacacgactctttccttttctgcctttttaaatattaccccgtcacctgatttaaaattctttatcttcctagatctattaatagtttttaaaaaattgcagtttcgattttctcgagtgctttatttttgccattttgatctttcacattacaatctttccttgggtgacagttaaatatgggttttctgctcatgtttagctggggactggttagacttggtgagttttctacttggggcgtgttgactgtgtgtttctctatagcataactgggctggaccttgctttttgggggatctctgataagtgtccttagggcttttgccttggcagaaggctgttagacactgttttcggggggccaagtctagggaggcagatggttttcagt

SEQ ID NO: 810526 - DNA, 621 bp, Homo sapiens
tccatgtttttgcatggcttgatagtttctttttagaagtaaatgatattccattctctggatgtaccatagtttctatattcattcacctactgaagaaygtttggttgcttccaagctttagaaattataaataaaactgctgtaaatatctgtgcaggttgttgagtgagtataaattttcaactcttttgggtaaacattaaggagtaagattgctggatcatattgtaagagtttatctagtttcctgaggaactgcaaaactgtcttccaaagtggatgtactattctggattcttgccaacaatgagaggttttggttttttcgttttttttttcttttttttttttgctccacattattgccagcaatttgatagttaatgttgtggattttggccatttgtattatgtgaactattatcttattgttttacttggatttcctgaatgacctatgagcatcatttttatgtccttatttaacatttgtacttcctctttggtgaggtgtcttttaaggtcttgggctcattattttatttgggctgttttcttattgatgagttttaagagttctttgcatgtttgtgataagtcttttaccacatatctttt

SEQ ID NO: 810527 - DNA, 640 bp, Homo sapiens
tcctctttggtgaggtgtcttttaaggtcttgggctcattattttatttgggctgttttcttattgatgagttttaagagttctttgcatgtttgtgataagtcttttaccacatatcttttgtgcataggatctcccagtctgtggcatatcttttcattttctttatggtgtcttctacagagcagaaacttaatctttatttagtatagtgtaccaattttttcatgtatcattcctttagggttttacctaaagttatagccatacctaaggtcatcttggtttttctcctttgttaccttttatgagttttatagttatgtattttatatttagatctgtgatcagttttgagttaacttgggtgaaagatgtaaagtctttctagacttttattttttgcatctggatgtccagtttttcagcacaatttgctgagaagattttctttgctttattatattgtttttgttccttttccaaagttgactgtattcatatgggtctatttctgggctctctwttcctttcctttgacctacttttttttaaaccaatatcacactatcttgattacattatttttgtaactttacagtaactgttgaagtctggaagtgtcagtctcttgacataa

SEQ ID NO: 810528 - DNA, 640 bp, Homo sapiens
tcctctttggtgaggtgtcttttaaggtcttgggctcattattttatttgggctgttttcttattgatgagttttaagagttctttgcatgtttgtgataagtcttttaccacatatcttttgtgcataggatctcccagtctgtggcatatcttttcattttctttatggtgtcttctacagagcagaaacttaatctttatttagtatagtgtaccaattttttcatgtatcattcctttagggttttacctaaagttatagccatacctaaggtcatcttggtttttctcctttgttaccttttatgagttttatagttatgtattttatatttagatctgtgatcagttttgagttaacttgggtgaaagatgtaaagtctttctagacttttattttttgcatctggatgtccagtttttcagcacaatttgctgagaagattttctttgctttattatattgtttttgttccttttccaaagttgactgtattcatatgggtctatttctgggctctcttttcctttcctttgacctacttttttttaaaccaatatcacactatcttgattacattatttttgtaactttacagtaactgttgaagtctggwagtgtcagtctcttgacataa

SEQ ID NO: 810529 - DNA, 562 bp, Homo sapiens
ttgaacatcatcccccactgccttctgacctccatgacttctgatgagaagtaagctgttaatcttattggtgaatgttgtgcatgatgagtagctcttactactttcaagattccctttttgattcctttggcttttgatggtttgatttttatgcatttatatgcagacctgattgtatttatcctgcttgtagtttgagcttcttggatatgtagattaacactttttcatcaaaattgggcagtttttagttattactaccaaaaattatttctgctcctttctctgtcctgtccttctgggtggttctcccattatgattattttggcatgcttcattattatccactgataatctgagatcttttttttttgtccttctattcctcagtttgtataatctcagttaacatatcttcaggtgtgccaattctttcttttgactgagcaagcrtgctgttgtgcccatctagtggactagtcatttgcattgtactttgactccagaacttatacctttttcttctttttcaaataatttatacctttttattaacat

SEQ ID NO: 810530 - DNA, 543 bp, Homo sapiens
cctttctgctctacaaataccacaatttatgggtgctctaatccgttacataaaatgaaataacgtttacatataacctatatacatcttcctgtatatgttaaatcatctttagattacatacagtccctaatacaatataaatgctatatagttacactgtatttttataaatttgtatttttattgtttagttttgtttttcaaatgtttttgacccacgctcgaatccttaactgtggaaccaacagattctggaggcagactgtacatttagacagaatctttattacttaggaaaaataaaaactttatgcatttaaattaaattacgttgtaaacttagcaagaatttgagggaaaaaagttgaattaatgaattgtttaattttagtcatttatgtttgccataccaatatatgtaataaagataaaggcaatggctttggctcagtaaggttgcagtttyctttcatttgctagatgaggacacactcctcagtaaatatctactcaaaatgagagatgacttttagattaatg

SEQ ID NO: 810531 - DNA, 421 bp, Homo sapiens
aaaaatacttaagaagatttcaagcctcttaaacttaagatttgtggtgtaacatgtaatctgtgctggagaatagttcttgtgcacttgagaggaatgtattctgccgttggaccgaatgttctctacatgtccattatgtccatttgatctaaagtataattaaagtccagtgtttcttttttctttctcaatggtcggtccatttttgaaagtgggatatagaggtcccctactattatagtattgcaatctctctcttcattcagatttgtacataattgctgtatgtatttaggtgctccaaggttgaatgcctatatatgaattttatgtggtcttgctattttaacctctttattaatatagaatgaccttctttgtctctttgtrggccttgactttatctattttataggta

SEQ ID NO: 810532 - DNA, 585 bp, Homo sapiens
cttcaacactggggattacaattccacttgggatttcgccagggacacagatccaaaccgtataaatatacttagtgcccattttyccctctcaaacaattcaggtgtgccagagcaatgcaagtgcaggtgtgcgtgtgtgtgtgtacgtgtgttgaagggtgaggagggagccacccaggcccacagtgaggtgtcagagccaatcaagggtgaagggggtggggttggctgaccatgggatgtcagagctccagtgggagcgggaagaaaatgtcactctcattaagccatcatggggattaagtcatatggacagtttagcgcaatgtctagcatagagtatgtaaacccatggggtaggaactttttacccgttttgttcaacactgtagtctccgtgcctaggtaactactaccttatcaacgttcaatcatatttgacaaactggtaagtttcagtgttaactctccactcaataattggaattacgataaggtaaaaggagttagagaagaccaaaaaggcacagtgagtaaaaaaggaaaacagcagggactccccctagagcaaagaggagctga

SEQ ID NO: 810533 - DNA, 615 bp, Homo sapiens
cttgttacaatatttaaagatagttcatctcacaatgttctttccatttactragcaatggtaacatagcctctggttttatttgagtccattttggttactatttaataaaactgtctgtgttttttagtttaatatacagccccaaattatacaattgggaaaattaatttttaagccttctttttatacctacgtttgacagcttattaaattcctagtattatttactagtagatttatcaaaaatcatttttattcaccctgtatgagataccatgagaccatgagagagcgtatgtgattttccttcaaagtaagtatcacaaggagatgcaaaattgataatactcttctagcctctcattcagaacaactgcgagcaataaaatttaaacgggtaagtgaagaaaaactataccaagtgaaactaccctttcaaaaagtgctggtctatttcaaaagaagtgttgatattttcggaaagcctccattctgtccctcagggctatgctccatcttgtaatggtataatcaaaaagcaatggcattctgttcttacaactacatgctgtggataatcctctccacagttcatttgcttctccaggtatt

SEQ ID NO: 810534 - DNA, 648 bp, Homo sapiens
tagcaatgaacaaaatagacaaacatccctgctctcatagaactcacattctccattgaccttatattctaattgaatgtttaccatctaatatatgtaaaacaataccttcttgttattcaaatttgcatttatttgataactaatcagtttggacaaagatttgaattttagtaagccacaaaagctaaagtaaaagacagagaatcaaatgactttcataagtatgtgtcataagtaagtctgtttatctcactgatgacttcttttttttttttttcttttgagacggagtctctcactgtcacccaggctggagtgcaatggcaccatctccgctcactgcaagctccgcctcctgagttaacaccattctcctgcttcagcctcctgagcagctgggactacaggtgcctgccaccacacctggctaattttttgtatttttagtagagacagggtttcaccgtgttagccaggatggtcttgatctgacctcgtgatctgcccgcctcggcctcccaaagcactgggattacaggcrtgagccactgtgcccagcctgatgacttctttatctttccagtattcacaaactgattttatatataactaattcatatattagttcgtattttgtgaattttg

SEQ ID NO: 810535 - DNA, 619 bp, Homo sapiens
attgtcttgtcaaagtaaagacatcttgaatgccttttgtcctatttactgtgtgaaatctacacattcttccaccctgattctcttctccctggttctgtgatttgctccccagtccttggcctataaggygttttgttttgctttttttttcattttgcaggaccctatttcaatcttatcaaagacttgtcatttattatagttgattgttcatgtttgtttctgtggtaggaagaataatagtccccaaagctatccacttcctaatccttggaacgtgtgaatatgttaccttacatggcaaaagtgattttgtagttgtgattaaagttaggggtgataaggtggagaaattaatcctaaattatcctggtgagtctaatctaattatatgagcccttaatagcagaaaccctttctcagctgaaggcagagagagatatgatgactgaagaaaggtcagatagatgtgaagttgctggctttaaagatggaagaaggggtcatgagccaaggaatgcaggcaacctccagaagatggaaaaggcaaggaaaccaatttttccccagagcctccacaaatgaaggcagccttgccaatacattgcttttagct

SEQ ID NO: 810536 - DNA, 619 bp, Homo sapiens
attgtcttgtcaaagtaaagacatcttgaatgccttttgtcctatttactgtgtgaaatctacacattcttccaccctgattctcttctccctggttctgtgatttgctccccagtccttggcctataaggcgttttgttttgctttttttttcattttgcaggaccctatttcaatcttatcaaagacttgtcatttattatagttgattgttcatgtttgtttctgtggtaggaagaataatagtccccaaagctatccacttcctaatccttggaacgtgtgaatatgttaccttacatggcaaaagtgattttgtagttgtgattaaagttaggggtgataaggtggagaaattaatcctaaattatcctggtgagtctaatctaattatatgagcccttaatagcagaaaccctttctcagctgaaggcagagagagatatgatgactgaagaaaggtcagatagatgtgaagttgctggctttaaagatggaagaaggggtcatgagccaaggaatgcaggcaacctccagaagatggaaaaggcaargaaaccaatttttccccagagcctccacaaatgaaggcagccttgccaatacattgcttttagct

SEQ ID NO: 810537 - DNA, 639 bp, Homo sapiens
acccttcctagtcatcctagtcaaccacatgagtacttgggacccagtataaccagagaagatgtcagggagggtaccagtgtcatagtttcacaattcttttttgtgtgtgtgtgatggagttttgctcttgttgcccaggctggagtgcaatggcatgatctcagctcactgcaacctctgcctccaaggttcaagcgattctcctgccccagcctcccaagtagctgggattacaggcttgagccaccacacctggctaattttgtatttttagtagagacagggtttctccatgttggtcaggctagtctcaaactaccgacctcaggtgatccacccccctcgacctcccaaagtgctcggattacaggcgtgagccactgtgcctggccatagtttcacagttcttttcagttttcatgttatgttaaatcaagtaataggtggtcataaaatgtcaagtcatttctaagttaaaatactgaaacattaattattaaacatatgtttgtttatatactttgcatcttatatttatatggtatagaaaagctaaatatatctagattagytaattaaaaaattgccaggaaacttctttcttaacaattatgaaatggttttcatctacaaata

SEQ ID NO: 810538 - DNA, 625 bp, Homo sapiens
aggaccatgacttttcatacagaaggttgctgattcatgtggatttagacagtctccctgaatgtttgttttcttattacaatagccatttccatggcctctgctccatttccactccaacgaggtttactataacttaataatgatactaactactgagagttacatcagactccataggtttaagagtaaagtcctctacaagactgccctgatttcagataccagccacaagttctggggttccctaggccatccacatttctgactgacttgggtacaaattcaggagttccaataaccaacctgccttgggtttgataattcactagaacaactctcagaactcagaaaagcactggacttacaattacagctttgtcagaagaaatacacatagggcaagttctagaagagtcccggtatagagctttcatgtcctctcccatgcattcagagcatcaccttccacgtcagtgtattcatcaaccaggaagctcctccaaacctccaatgtccagaatttttattggtgttttattacataggcacaatgagatggagcaggraccctttctagggccttgccagctccttcccccatcccaaacatgaaaattaagga

SEQ ID NO: 810539 - DNA, 621 bp, Homo sapiens
cttttgcactgtagagattgttctttcttgatctacataaatgctttatatcatagaggctgttctcttccttacttttttcctcaatagtgtttgtaatacctctccacgttgctgctcattgtgcatctagtttattacttttcactgatgcagagaactccctagttgtttcttccagagcttacaaatgatttccctcgtcatcaataactacattgcctccgactccctgctgtcataagcaatgctgcaataaatatcacaattcgtatcctatttaccgaggacttggatttgtggagtcaaagggtcattgtatatacaatttcaccaagcctcagaaaggctgtgcccatttaaatgtccaatagcaatgcctgcagagtcctgtttcctcacatcctcactaacactctatattctccaatctgtagctttcgtcagtcttacagatattgtgtcacacacaaacatacatacatacttatgtacagaytttttttcttaggataaaatgtggaattaaaatattgttaagcataatcaacaaaaacagactactttgaacctacagaagttttgaatagatgctgtgctctgaaaggccttattttgata

SEQ ID NO: 810540 - DNA, 596 bp, Homo sapiens
gttctgaaaaaaaaaaaattagctcatgggttaagaaatgcctgaaacttacacacttaccagtacaatttgttaattaatagagttttgagttaaaaggtaagtattgattatcarcaagtctttatacagttatcacctctgatttccaataatgccatggattattaaaccttttatttcttgtcagccccatgtcacgtcttgtacagtttgtataaagacacttgatatcccagacttcctcaaggaatctgtcactttctctgtatgttcttaaaattttcagtctcctctagtgatagtattggtttgctgtaaacatttcctgattctgtctgacaagagactgttagtctttgaacaacaacaacaaaaatctctgaaaaataatctgagaaatcctattgcaatactatcattagtgtaatggtgatttaaaaatacgtttaaggtattacaattttgtgatgtcttttcacagagatttagtttataaaaaatccaactcatttgtaaatatcataaactatttgttaatatatttatgtctttacaaccatttcaagtttttaacgactaagcattttttctcg

SEQ ID NO: 810541 - DNA, 412 bp, Homo sapiens
ttggaagacataagaatacacaacacaaattccagtggctatcagaacaatgatggcaatggatgctatttagcctctggaaaattcaactgtatgcttataaaatgatgacagtagaaaaggcaaataatgtttgttaatattttaaaataattttgatctggtgatctccaagcgttcccaaagcacactgaaaaatactgctctatgcatcgtctggaaagaaatgttcgaatgaacggaaataaactttactcaacctatataatatcttcgttgtaaaaataacatttaatttacagaaatacgttttatttatttgttttttgttatactttaagttctggggtacatgtgcaraacatgcaggtttgttacacaggtatacatgtgccatggtggtttgctgcac

SEQ ID NO: 810542 - DNA, 643 bp, Homo sapiens
tctctgtgtgatttcacaactcgggtctttgtccaggtgagattctcactcgggtcagagggcaaaggtatccaatgacaaccctgtccttcagaaccaagtagtgttttcccatcagccgtgcaaatcacagcaaatgtcatgtggctttccagcagcctctttgctgtttgttgaggaaggataagaaaaccatggaggattaaaatcaccacattcaaattactataaagaaaaggaggccaggcgctgtggctcacgcccgtaatcctagcactttgggaggccaaagtgggacgatcgctcgaggccccgcaacacagcaagacccccatctctaataagaaaaaaaaaagggagaagaaagaaaaggaaaaatgcagacaagccagaaaataaaattgaggagattaatacaatataataatcaggcactgcagatcacacctggaacaccgcctcacccaggcaaaggaggaaaagctttcatgtgtgctcatcatttgagcaaaaaggaagaamacacacacagaaactcaggagatccagaagagacactctgaacaaagaaaatggaaatgacagggaaccaaatgatccacatcagggattttaagagggaaattatgcttctgaatgaaaa

SEQ ID NO: 810543 - DNA, 596 bp, Homo sapiens
aatttggctgttgggattggccaagactcagcagttgttacgggcatactcctaagttaggttttcagtcttgtctacctgttaagttaggttgcarttagtccacacagactcaaattagaagtacaaagtccttctcgggccatatttagtttgctttaacaacaggtatgtgcagccatcaccacagtcaactttagaataattttatcacatgataaagatattctgcaccctgtagcaatcacttttctatacaaacattccccccactcctgtgcaacccctaatctgtttatgtcactataggtttttctattctggacatttcatctaaatagagtcatttaatatgtggtcttttattactagcttctttcactttgtatagtgttctcaaggttcgtccatgttgtagcaaatgttcatgcttcattcctctttaagtctgagtaatattccagtgtgtgtgtgtgtgtgtgtgtgtgtgtgtgtatgtataaacacaattgtttagccatttatcgattggtagacatttggactgttcctaccattggctgttgtgaatagagctgctacgaagaatattcatg

SEQ ID NO: 810544 - DNA, 627 bp, Homo sapiens
caaggacagccgtggggcggccgcgaccactaccaccactgagcaccgcttcttccgccggagcgtcatctgtgactccaatgccactgcactggagcttcccggccttcctctttccctgccccagcccagcatccccgcggctgtcccgcagagtgctccaccggagccccaccgggaagagaccgtgaccgccaccgccacttcccaggtagcccagcagcctccagccgctgccgcccctggggaacaggccgtcgcgggccctgccccctcgactgtccccagcagtaccagcaaagaccgcccagtgtcccagcctagccttgtggggagcaaagaggagccgccgccggcgagaagtggcagcggcggcggcagcgccaaggagccacaggaggaacggagccagcagcaggatgatatcgaagagctggagaccaaggccgtgggaatgtctaacgatggccgctttctcaagtttgacatcgaaatcggcagaggctcctttaagacggtctacaaaggtctggacactgaaaccaccgtggaagtcgcctggtgtgaactgcaggtaaagccccacctactttatttgacrgtcctttggatcccaaatttggctcg

SEQ ID NO: 810545 - DNA, 636 bp, Homo sapiens
ccctgaagcgggcttcttttgccaagagtgtgataggtatgtttcaggtgtaccttggagcctgactggctttctsacattccttttatttagaatcctggctctgtcagagttttaagtgatataaaccttaagaaattcatagcttgaactcaggaggtgatccattgtacttatgagatataggattctctatatttgtgcttcttggaatcatcttagagactattggtaacattacgttacaagaaataaagtgaactttgttgataaaacctaatgtaatagccttttttgttgttgttgttgttgttgttgttgagatggagtctctctctgtcacccaggctagagtgcagtggcacaatctcagctcactgcaacctccacccaccgggttcaagcgattcttgtgcctcagcctcccgagtagctgggattacaggcatgcatcaccatgcctggctaatttttgtatttttagtagaaatggggtttcaccgtgttggccaggctggtctcgaactcctggcctcaagtgatccacctgccttggcctcctaaagtgttgggattacaggcgtgagccaccccgcccagccagccatcttttcattacacactgttgatacttaa

SEQ ID NO: 810546 - DNA, 540 bp, Homo sapiens
gaagcagctgggatgcagggcaccatgacctgaggctgcatacagcagggaggccctgggcctgggaagccattttccctcctatgtgtccaggcctttgatgggaagggctgccatgaaggtctctgaaatgtcctggagacattttccccattgtctttgctattaacattccacttccctttatttatgcaaatttctgcagatgaaagcttgattttctccccagaaaacgggtttttctattctactgcatggtcaggatgcaaattttccaaacttttatactctgcttctcttttaaacaagttccagtatcagatcatctctttgtgaatgcataggactatgtgctttcagaaaaagccaagtgacatcttgaatgctttgctgcctaggaatttattctgccagataccctaaatcatttttctcaagttcaaagttccayagatctctagggcagaagcaaaatgccaccagtctctttgctaaagtgtaacaagagtcacctttgctgcagttcccaagaagttccgc

SEQ ID NO: 810547 - DNA, 663 bp, Homo sapiens
atcacttcgtttaattttttaatggaatttaatacaatctgataattttttttattttataaatttgcctagcctatctccatctaagagaatgttagctcctrgaaaactgctacacagtctatttagaattctcttataagcatatttcacagtgtttgacacattacaaaagtagacagtgctcaataaatatttttggatgaattttattttcaagagtttgggaagtttgggaaaaagtaatctttgtgttttcagttagttacataggtagtgtaggtttagattttttccaatgcctgcaaattgtgtgtgcctgagtagatagtgaaacactattaccatccccattacctatatatatatgacttttttccttttattgctaaacatgagtgatatttagccatgtttctgcctgtgtatggtgcatcagagacacttgttttgattggctggctcttatgctgtaacagttttaattgttttgactatgttccctctgtaaattcaatgaattgttcacacagacataggattttagaagaggaatatcctttcctcaacttaaacttatcatctgagcataattttcctaacaattggagtacattgctacttgaaagaaaatctgcttctaactccccactatgcagagta

SEQ ID NO: 810548 - DNA, 529 bp, Homo sapiens
ataaaatattatccaggtatatcaaataggtataatttaaaaattgtctcatattgagcagctgaactaaaagtaaaaaaacttgtgacaatggcatatattagcattttactgaaattagcataagaaagagagtgtaaaagaaaatataaattcattggggaaaatgttgaataaataaacatcaaagaacatggaattaaacaaatactttttaaattatttttaacatatcaagattattttaaaggattgatttaatgttttcttcaaaatttttctgtttttccaagttttagtagtgtaaatacctagcaactgaggattggcccatgtatgtgacaagaccaattaatatggttatgaaaatattgcagtggataccaaaaagtaactacagtaacaattaaattactttactaacccactccactattcattatagaatattttcaaagctatttatataaatgtgttttgataatcaacaygtttgtcaattattatgttaactatccttgaagattta

SEQ ID NO: 810549 - DNA, 560 bp, Homo sapiens
accacagggagcctgggctgagatcctctctttcacgatcttgaagatgcctaaccctcctagaagccagcaacatccacagaagctccctcacaggagataaayctgtagggaggcatcaaccatgtgcctacttcagtcacctgcggctggctctcctgcctccagcggtggagtccctgttgctctgcagcagctgtggtgacagagaggagactctcagacagatccagagagccaccttccctgggcccccattttactcctgcctctgggggctggtgatggggaccaggtccagccacatcctagagctgcctggtgctgaatgaagagcagtgtccccaggacagaaagtcccaacccctctaggccccagtaaatcaaaattgagggccgggaggatgagtccattgcacacatgtgagacataagggcccccacggttgctatatgtaaaactagcactggacgccacacttcctggttgccaaagtaaatgtggaaactggcaagtttgtaagggctctttttcgctctgcagggttttttgacccttg

SEQ ID NO: 810550 - DNA, 541 bp, Homo sapiens
cttctgggacccagccacacctaggtggaaagaggggctacggatgcgctcagcatggcttccagccacctttgtatacctggagctgggccgcttccaccacggttgcaaggatggaggaaaagcagaaaggactggggagactggtggggtggaggtttcttccttggagagcttgcagagatgccacctgccaaagcctggggaccaaaggagggggttcttgttttaattgttcttataaaggtaatacacaccagagagaacattctaatagttctaaaaggtgtgtacagtgaaaagtctccaatttacagcattttgttatagaaaaaaaaaaaaagtaactctccatccttcccacccttaagtttcccctcagaggcagccttcattatgagttctttttttttttgagacggggtcttgtactgtcacccgggctggagtgcaacggtgcaatcttggctgactgcaacctccgcctcctgggttcatacgattcwtctgcctcagcctcccaagtagctgggattacagg

SEQ ID NO: 810551 - DNA, 625 bp, Homo sapiens
ttttaatttttgtttttctaatgactamtgatattgagcatattttcatgtgtttgttttccatatgtatatctttttgggtaaactttctatataaatcttttgcccatttttaacttaaattctttgttttcttattgtgagtttgagattatatatgaaaaaatattgtttaagaaataatctaaaataaaaataaatatattcttttatttatttacatatgtatacaactccttacatgtatgtacacacacacacacacacacacattctgcaaagatttgctcctagtttgtgggttcttttcatttacttaacagtatctttcaaggagtagaaatttttaattttgatgaagcccaattaattaatttattcttttatgtgttgtgtttttggtattatagttttgcctaactcaaggttaaaagattttctcctatgttttcttatagaagttgcacaattttagtgtttaaatttcagtctccaatttctgagttcatttttgtatatgatgtgagttcatttttgtatatgatgtgacttcaattttgtatatggtatgaggtatagattcaagtttgtttgtttgtttgcttatggatattaaagtgttccc

SEQ ID NO: 810552 - DNA, 595 bp, Homo sapiens
gctgtctcaattcatatgaaagaagcctctccagagtttcttatacatctcctaggagaggcaggggaggtaggatgaagggagtggagttgatgcctaagataggaaaagacataattattaggagaaatttcctttagcttttcaacccagttccctaagttaagaagggatttaggagtccagttttcctgatactttcttagtattaataaaagcatggaatttgtttaaattaacactagaggagtatcattgatatttcagcatctgtcagtgtcttataatgaagctatgtataccaataataatttttaatgtactttcattttaactagaggaggaggaaaaagagggagaagaagaaaaacacactgaagctactctgtttcattcaatttaatttttcaagcaagctacaaacaaggatgaagtcattatgcatctattatctcaaacatwcataatgttttactaagtatattatttattctcacagcaactgtttcaggaatgcaaaaaccagcagaattatctatagttcacagatgagttacaaaataattagataaaaacaatttagtttcctcactag

SEQ ID NO: 810553 - DNA, 654 bp, Homo sapiens
tactgatgaaaattagggttgttctggcaaaaatttattgcactatatttaactccctttatttattaatttttttttttggagatgagttctgctcttgttatccaggccrgagtgcggggcgaggtcttggctcactgcaacttccacctcccaggttcaagcgattctcctgcctcagcctcccaagtagctgggattacaggcacccaccaccatgcctggctaattttgtattttagtagagttagggtttcatcatgtaggccaggctggtctcgaactccttacctcaggggatcaacctgcctcggcctcccgaagtgctgggattacaggtgtgaaccacagcgcccagccttaactccctttaacttaggaaagtaaccagaattgagaatgaggacagtaatgccagaatttgaatttcccccagccagagcaagaacatgtcacagtagagcaggattcaccctgtggcagttggattgggagctctggtaagggccatgcgtgtttggctttgacagctttggtgactggtttgacacaagaggcctggagagaagccacagtacttggtttggaacttcaagctgtcaggtttcgtagctgcaacactggaacaagatgacaaaactggtcacatttatt

SEQ ID NO: 810554 - DNA, 590 bp, Homo sapiens
agcctggaggtcagttcagtcatcaggcagtggaggcagaaagtggggcagtgttttgcaggtgtttcatgatgacttacttgaaccagtgacctctaaagatagagcagagygcaaggaatgatctaggaagagtgaaggggataggcaagagctggtggctttggagcagaaccatgttccctgtcctgggtcctttaagtttcctttccttctgcagagggcaggtgaggaccatgtggatctttccagaaatacatgtggacatttgcaaatgcagaactgactggtggaaagggtgggaatgaactgctggaaatctggtcctcatggaccatatgtgtttgatggatatgagacaaatttggagaaaagttttgcaagtagtttctttcattggatattctactctctgatcccctgggttcgactactctagggacctcatgtaaatggattccagagtgaatatgagaagagactgctggttgccaggagctgggagtggggagaatcagaagttgttcatgggtgtgcagtttccgttatacaagttggggagtttctagagatctgctgtagagcttgat

SEQ ID NO: 810555 - DNA, 398 bp, Homo sapiens
cagtcccaatattgcacaatttgctattagagaagaaacatgcaccaaatgaagtaattatcttatcaaaaagcagcactattggcaatctgaraatgaagccaacaacaacttggcctgtcacatgctctgttttgtcacttacgtccccagtataaatgcaaaaatgtgaaaaccgggggcaagattgaacggcaatggatccattctgaagctggccatgagccacttattgaagacataaattacagggctgtcaccatcacccttcctatttgcaaataaatgttgtcatctaattgtacaagacttggagattgtttaacaaatttctctgagggaggcctcagcagcagcttggattccctggacacccagattctatctgtccactttgg

SEQ ID NO: 810556 - DNA, 565 bp, Homo sapiens
ctggtggggggggcagcgtgaattcccaggcagctccaggtccccactctggctgcctgagggcagccctctgctgggggagacgcaggtgtgggctgttggaagcaaaagcacaaatgcacagaagcaggtgctcgggaaatggtgaccctggtgaggggccgggccagggaactgacaactaatgctaaggtgtggcactgaagggagctggtcaaagccctggcctccctttggatttcagttcccactggtttcctgccctttcttccctcccttcattccttcaaagtcagtcagagcccagctgagcacctcttactcctcctgctgcggatgacggggtcacctctcacggtcttgccaagaagacccttctctaaaaccttatttccacatctgagtctcacatctttgacttgtcccttctccctcggtgtccatgggccacctgttctgccagcctagggaggkaagctcagcatagaggctcccaggaagaaaggtgctggggtttggcgggagggaggttgtaggtggatccccgttacagtatcatgcgttt

SEQ ID NO: 810557 - DNA, 565 bp, Homo sapiens
agaggggcactacatttctctcttctgactagcccatgaatgccagtcacatggtcccctttgggcaagcttgggtgagagttaaaggagaaacagcccttcttgacctctctccccacctgctccagattccagagtccatgaagggtcattctcagcagacataataaggatcctggatgcattcttctttttaacaatgaggtcatttcctcacaaatcaccaggctcttcctaagggaagtttgcacccacagcaatgcccagagtccacctgctttacagacccaccttccttccctgcctttatttgaaaaggagagagaaaggctccaatcttcatcataacaaaactaatgctgggatgaatccacttcaatgtgcttgccatgcttgtagtccctactgagggacaataccctgcatagccctggatacttggaccwacgttttgtcccacacggcctccacctcccaaccaaaacagatgaggcagaggtggatgccgatggattggtcagcacactatggctgagagataagccagttaacgggaattgaaacc

SEQ ID NO: 810558 - DNA, 588 bp, Homo sapiens
gcccctctttctctgcagaagagagagcttttctcttttctctcgcctattaaacctccactcttttttttatttttattttttgagatggagttttgctcttgttgcccaggctagagtgcaatggtgcgatctcagcttgctgcaacctctgcctcctgggttcaagtgattctcctgcctcagcctcccgagtagcacactacaggtgtgcgccaccacacctggctaattttttgtatttttagtagagacagggttttgccatgttggtcaggctggtctcgaacccctgacctcaggtaatccacctgccccagcctcccaaagtgctggattacaggcatgagccactgcgctcagcctaaacctcaactcttaagcttacttcttgtgtgtcggtgtccttgatttccttgatgtgagatgatgaacattgggtatttaccccagacaacaacgccacttcaatayattcctgataggaattaaaaatgacatggaccttttggaaacagtttgatagtttctcatcatggtaaacatacactgataatatgccccagccatcccattctaacagcaatg

SEQ ID NO: 810559 - DNA, 581 bp, Homo sapiens
ctcaatggaattctatatagcaatgcaaatggatccactagagttgtacaataaaacttagaaacaggttgagcaactgaaagacagaaaacacacacatatacacacacgtaaggcgctgggtgtggcatgcccgtagtcccagctacttgggaagctgtggtaggaagatcccttgagcccaggagttcaacaccaacctgggcaacatggtgagatcccatttttaaatatatatatatatacacacacacacacacacacacacacacacacacacacacacacacacaaacacacacacacgatttgattcatataaagttcaaaaacatgaaaaactattttatttaagaatgcttacattatggcaaaactgtgaaggaaatgattatcaaaagttagaatagccgggcacagtggctcacacctgtaatcccagcactttgggaggccraggcgggtggatcacttgaggtcaggagttcgagaccagcctggccaacatggagaaaccccatctctactaaaaatataaaaaatcagccaggcgtggtggcacatgcttgtaatcccagcta

SEQ ID NO: 810560 - DNA, 581 bp, Homo sapiens
ctcaatggaattctatatagcaatgcaaatggatccactagagttgtacaataaaacttagaaacaggttgagcaactgaaagacagaaaacacacacatatacacacacgtaaggcgctgggtgtggcatgcccgtagtcccagctacttgggaagctgtggtaggaagatcccttgagcccaggagttcaacaccaacctgggcaacatggtgagatcccatttttaaatatatatatatatacacacacacacacacacacacacacacacacacacacacacacacacaaacacacacacacgatttgattcatataaagttcaaaaacatgaaaaactattttatttaagaatgcttacattatggcaaaactgtgaaggaaatgattatcaaaagttagaatagccgggcacagtggctcacacctgtaatcccagcactttgggaggccgaggcgggtggatcacttgaggtcaggagttcgagaccagcctgrccaacatggagaaaccccatctctactaaaaatataaaaaatcagccaggcgtggtggcacatgcttgtaatcccagcta

SEQ ID NO: 810561 - DNA, 573 bp, Homo sapiens
aaggaatggaaaggactgcttggatccttgtccatagaggraacatgcctttccatgctaggagaatgagctggtttgcaagcctcattctgtctcatctgcaggtggtcactcaacatctacacagaccgaaatgatacccagagtagcattttcagttagtggcatagggagtgggctctggaatcagatttctgcgtttgaattcaggctctgacactagctaggagacttctgggaaagtgacttaacctttccaaacctcagcttcctcactgtgaagtgggcatgggactcgcctcaccggacttcagatgaggatgaagggaggccatgctggtaacatgcctggcccaaaagaagggtccagagcattttaactgctgtcattactgactgtctttaatctgccatttcccatgagcacttgttactcatttacttcttttttcaacattcttactatgctacaaggtccctgtgcctgttctcatagtttggttagtacaggttagaaaaataaagttttgcccaaggggtaacaaggttagtctgcagctcttcagggagcag

SEQ ID NO: 810562 - DNA, 555 bp, Homo sapiens
tataagaggagcttgaccgtgggtgcaccctggaccccaccatggctcaccggccccccagccctgccctggcgtccgtgctgctggccttgctgctgagcggtgagtgagccacgtgcccatccatccagcctccaggccccggtggattgtggggaaatatccaccacgaggtccatccaaagcccttctggcacagctggggaaactgaggcagggtcaggggagactccactcactgctcgggaccaacgcttgcaggggtggggaggacaagggcaagggggagccctggccatttgactcagttgcctatctgtaaaacgggcaaaacccagcccttccctcctgaggagctgttttgggaattagctagtaacaggcgaattcctggacagcacccagccttcagcaaatgctcagtgaatatrcatgaatgaatgaatgagtgaatgaatgagtgagtgagtgaatgagtgaacaaatgaatgagtgaatgaatcaatgagtgagtgaatgaatgagtgaatgagtgaatgagtgaacgaatgaatg

SEQ ID NO: 810563 - DNA, 544 bp, Homo sapiens
aaaaaaacaaacaaacagtgactccagagggttggagccctgctagataccttagtttgctcataacaggcactgctgcccccgggaagagggtcgccygccataaatgcggaaacagttaaatggcgatgggaataggatgggaactcaatggtgttgctacctttggatggactcggaggcagcccagcttcctgggacaggactgcacggactgcctggggaggggtctttggccccccggttcctgcaggggggctcggggaggccctgtgagcagttggtcacaggtgggtcccattcgatgcgatcctgttcctccccaacagccctggagaagggggacgttgcctgctgtggctgcggctgttttcctggcctgtgagaggcggggccagagtggccgttgggaatctgggtgttgcaaggtgaccacaaacagctctctgggggaggaggaggaaaatgcaattgattttcaggagccttctgaggtcaggagtgggagagtgtgcagggggaccctcctggcagcttgggggtc

SEQ ID NO: 810564 - DNA, 625 bp, Homo sapiens
ttaattaagttctcagagttaccatttgacttgacaccatttatacatgtcatgaaatcatttcactacttgctagtagtactttttggagtaataacatgtataaatttggtcataactagacatacatcaaaatctatctggcttccatttcatctcttgaaatatcagaagaccaaatgcttacttcctggtacttttgtataaaaaacaattatagtgggagtagccaagatggccgaataggaacagctctggtctacagctcccagcgtgagcgacgcagaagacgggtgatttctgcatttccatctgaggtaccgggttcatctcactagggagtgccagacagtgggcgcagctcagtgggtgcatgcaacgtgcgcgagctgaagcacggcaaggcattgcctcacttgggaagcgcaaggggtcagggagttccctttcccagtcaaagacaggggtgatggactcacctggaaaatcgggtcactcycacccgaatattgcgcttttcggaccggcttaaaaaacggtgcaccacgagattatatcccgcacctggctcggagggtcctacgcccacagagtctcgctcattgctagcacagcagtctgagat

SEQ ID NO: 810565 - DNA, 497 bp, Homo sapiens
gaaactggtaattatgaagaatagaggtgtaattgacttacagttttgcaggctgtgcaggaagcatgggtgggaggcctcaggagcttagaatcatggcagaaggtgaagggaaagcaagcacagcttaccatggcggagcaggagagagagagtgaagggaaagtgccacatgcttttaaaccatcagatcttgtgagaactcactcactatcatgagaacaacccccatgatccaatcattcctgccaggcccctccaccaattcaacatgagatttgggcagggacacaaatccaaatcatatcgagggtatataaacttttgtatcccatttcagggctgggctaatcactctatgattccctcttcccccactccccttccatgcatattaataaaatttgtatgccttttcttctattaatctgcctttyttcagttaattttcagcaaacttcccctaccgttttggcactgtgagcagcacatcaatg

SEQ ID NO: 810566 - DNA, 624 bp, Homo sapiens
atttcctcttagagaggtggctggagctgaaggcatagtcagggtacatgtgcctttttctctatcagacctttcccgaatcagccagcgtttaggctctttctcatcagaccccactaaatatatacaggaattccgacatcgagctctgtcctacaatttaatctggagtgacctaaatgtcatcctaacttctaccctctccccagatgaatgggaaagttttttctctagcccaatcgcatgctgataactgctggcttcatgaaccacacctccaggaaggcattagagcagttccctgaggcgatccccaatggaactatccggccgattccccagatatagctaggcgagactacatggtttcctgccaagttgaagggcttaaaaaggcagcttacaaagctgttaattatgacaaacttaaagaaactacccgaggtaaagaacccagcccagttcatggccggcttagcagcaacccttagacgctttaccaccctagacccagagrggccagaaggccaccttattcctaataagcattttaccacccagtcagctcctgacattagaaaaatcttcaaaaattagattccggtcctcaaaccccacaaaagg

SEQ ID NO: 810567 - DNA, 585 bp, Homo sapiens
cttgatagaaatgcagactctcaggctttacctcatatcactgaatcagaatttatattttaaaaacatcctcatttgatttatatgcacatgaaagtgtggggagcactattaagcagtctttttcaataggaaagccattagtaatttggatgagatcattctttgatgtgtgaatctttcctaattatagtaggatgtttagcatccatgagccctaggcactaaattcctgtaacatccacctccccccataatcattttaatagttaatatatatccacacatttccagatatgtactcagggtatagcaccacctctgattaagagctatctctgtaaagttatcaaaagaaccaaaaccagattgatttttctcaacctttttaatatgtgttataaatggctttcagacaggatgtactaaatacatatttaccttctagtgaacattctttgaattaaattgtataacaaatattttgcctgtttttttccttgaagcctgaattatttcattagwttgtctatgtgttttcctttcttgttagtatgtagtattaatacgtataatatataaata

SEQ ID NO: 810568 - DNA, 526 bp, Homo sapiens
ggggcaggggggtgctgaggcagragaatcacctgaacccaggaggtgaaggctgcagtaagttgagatggcactactgcactccagcctgggcaacagaacaagacatcatctcaaaaaaaaaaaaaaaaaaaaaaagtcataatttagtcctactcacattccttttgggattgttttattatctcattttgctgattagggtggttactggatatttatgtagcacaatcttaggcagtcaagaagctatccatagtttaaaataaaaaacaaaatactaataaccaaaaataagggaacatttatttttaccaaaagacttcctaagattcttttttcagtttgaaagtttggcctattaggaatggtgtttggcaaagataattagctcttaggttaaaatgacaactgcaaagaacagtaagaaattaggacagtgaaacattgatttagaaaggcagttgggagagggcatttgggaggaggtggttacaaatggttgttcagaatggcatttgggagt

SEQ ID NO: 810569 - DNA, 582 bp, Homo sapiens
cccaggctggagagtggtaccattatagtgcactgcagccttgaactcctgggctcaagggatcctcctgccttagcctcccaagtagctaagaactgcaggtgtgtgccaccattcccggctaatttttaaaatttttttgtagagacagggtctcgctgtgttgtctggggtggtctctgactcctgtcctcaagcgatcttcttgtctcagcctccagaagtgctgggattacagatgtgacctactgagcctaaactgttttaacgatagcaagactatgcttcattaataggttgggtgtaaaagttgaaacccctaaaagcagcatcttctaagctttttttttttttttttatcatagtaactgattattctgtttaattctctcttttccgggcgttttctctcccagaactcctacccttctgttccaatctaactaagttcctgggacttccctttactgttttcctgaattggatctagtgattactggatgttgtcagawaccctgatttctccctcattttgcttgagcacacatttaagtaactcttttttaaaatttatttttattt

SEQ ID NO: 810570 - DNA, 530 bp, Homo sapiens
ctctggcaaggcatactcaaggtacttggttcctttgtactctttccctctgtatttcaggttttatatgaatgaaacacaatgagtaattccttctctttggatccttcaggatattatttaaacactggcatctggtctaagggaaacttaatgctaagtcagaggagtatttgaaaaatagtttacatctggttttgtactacccatccctggaagtatgcagggagggtggaggaaatgagcacattgctggctctctgggctgtggtgctggtggggctgggtcttttggtgtaatgcataccacagcattcccttttataaagtgagggattagtgccaccttctttgtagcaatgtcgtgacctctataatgcttcttaaattgaggacaatgatggacccaccaagccttaacacatgatttaaatctgatctgacagtacttaaacccagaactccagagggctaatggttgaacaagcttgggagaatgtccagggaacmaaatgtagaagcccgatgaa

SEQ ID NO: 810571 - DNA, 589 bp, Homo sapiens
tgacatgatgcaggtccagctgctggcttgctggtagcctcatggaaacctcaaggaggaggcacccggctaagccatgtccagattctggacccacasatgaagatgtatcctctggggaggggagtggtgaaaactgacctgctgatgagacttcgccctgtcagttaacattgctaatggtaagaacccagttgcaagacatacaggttgtgaatcttttctatactttattttttttatgttttctttttctgagacagagtctcgctctgttgcccaggctggagtgcaatgacgtgatctcagctcagtgcaacctctgtacccaggttaaggtgaatctcctgcctcagcctcccgagtagctgggactacaggtgtgcaccaccatgcctggctgatttttgtagttctagtggacacgggggttacaccgtgttggccaggttggtctcaaactcctgaccttgagtgatcggccagcctcagcctcccaaagtgctgggattacaggcgtgaggcaccatacccggcccttttctgtactttatgaaatgacagcacgttgatggtcaatgacgacatg

SEQ ID NO: 810572 - DNA, 217 bp, Homo sapiens
catctcaaaaaaaaaaaagcataatcttacaggattgttaaaatmggacccattacttttatcgaacagatggcaaactttaaggacaagttgaagtctgtgtgtattaaacaggggcatctactgatagagcttggaaatgcaacctcagtctgttagatgttgcaaaggaggaggaagaggaggaggttcagagtttaaggatcctcaacccata

SEQ ID NO: 810573 - DNA, 552 bp, Homo sapiens
ccaaatgagagaaccagctctattactggaactggaacttgacacaatctttatgatctttgtctcttaatcttttatacaattaacatatccattcatycaaaaaataagaaaaatgctgtggaggtgattctttttttttttttttttttttttttagatggagtctcactctgtcgccaggctgggatgcagtggcatgatctcagttcactgcaacctccacccctccacctcctgggttcaagtgattctcctgcctcagcctcctgagtagctgggattacagtcacatgccaccacgcccagctaatttttgtatttttagtagagacagggtttcaccatgttggccaagatgggctcaatctcttgacctcgtgatccgcccacctcagcctcccaaagtgctaggattacaggcgtgagcactgcacctggctttttttttttttttttgagatgggggtcagagtatcactctgttggccaggctggagtgcaatggcaccacctcggctcactgcaacctctgcctcctaggctcaagcg

SEQ ID NO: 810574 - DNA, 611 bp, Homo sapiens
gacagtcttttctttagggatgatgtttgagtagatgctgaggggcacctggcttaagaagggctggagatggttagagttagagaaggattactggaaaggggaagggtcactgataaaaggccctcctgtgagtagcttatggggcagatgtattctgtggattctggtttgtgagataaccaggactgttcatgagcaggctggctttcagacaattgattttacctggtatcaggatccaatcatccgtccttcgtttccttttgagaggaaaggcactggaagacaggctgaatgtgtcctcttggtgcctttctcagtgctctgaagttggcatcagaggttgtcactggatgagtgaatctgctaggtgacttgggggattgtctttgatgtctgtttgctctgccctgccatctgtaactcagtggccagtgtgttctcttctcccacctagagaagggataaacagttctactttgaagaacttacmggtttcttaggtgaactctgtaaagttgtgaaagtttgacccaaggcagaattcacattgacatcatcaattcaatgatttggggagaaacatgggtagaagcatcttcgttcaa

SEQ ID NO: 810575 - DNA, 653 bp, Homo sapiens
atccttcatgaactgatgaccttgtttgggcatctctctcagtaaagatacccataggtggagttactgagcagtcagtttttttttttttaaatcaatcagagattccttatttcctacattcttctctgtaaagtgaaagtaataatagaagcaacctcattaattaatatgaagcccttgtcacaatcccgagcacatagcagatgctctcttgtatgagagctattattattcttttctctcaaatgtggtaccagattgtgatgttctcttttgcctttgtattttctgtgggtagttcacctcgtccaatggggtttcagattcccaacgtggaaggagttgctgctatctttcctttgtaaaacaaggtactttaaggcaatgtgttcttcagttctttctagatctaagatatccctaagattcaactgactctacggattagaagctaacagaactattgtcacgtaaggaatcgtgaccatttgagaaacaagaagaggaaaggagagactgtcaatatttagggctgctcactcgctgatgtaagaatccttctcatggacatagagtatgaggctgttgctcaccctggtaaaacttcagcgggtcawaaagggtgttgaagatgccctgtattatatcta

SEQ ID NO: 810576 - DNA, 587 bp, Homo sapiens
ccttttacttctctcattcactgctattgagcaccataaataaatgtcaggtgtgtgtgtgtgtgtgtgtgtgtgtgtgtacaaattacagagtttgctgattagaaaagtaaaatttagtgggatctgataattagatctctcagttgcacagactattgaatatcaagttggaatgtacaaaatcaatttctcttttacctaaaatgcagtatgtccaagattctctgatcttcactattcttaaaatctttgggcataaagttgatcttcaattcataataaaacacaatgtaatctgatagagttgagattgtacttaatttatatcttggtatgtagttacgaagtaggaaatattttctagataccaaactctggtctagactcttttcataaatgttgaatcctcatcctggcctgtaaggaagactctccctttaggaaactgaatctcagagaagttaaggaagttgacatgaagcrcatcaacaaataatcataacaacagtgacactggttgtgtagacagagagttgttggctgtggcaggcgctacactctggattgtgaagccaagcctggtc

SEQ ID NO: 810577 - DNA, 559 bp, Homo sapiens
gtgagggaaagagacaaggcaagatgggaaagagaagaaaggaatagagatcagattycatcccctagaagatgatagtctccctggtgagactgaacacgctaggatgcagtggagaagggtaccaagcaccacgggacacctgtagatggagggacatcctgagggccatggctagtgtggagtggcccgataacgtagcaccgattcccacctagttctatactttacccaacctgaaaagaaaagactcatccctccaatcctctgacaaatggttatcgagggatgactctggtcccagttgcagtgtgactggcaaattccagttctgtgtgggaccagacaggtcaatgagtgaggcactcttatgacagtaagatgcagtggggaatggtgctgtaaggaaaggcattccccatctaaaagcatgtccttaactaatgctcaaacacatcatctcagtgttttaaaacccctgagggtgaatgggacagaaaatgactgccacttttttggaatttgccatctagtgggaaaatcagcttacccaacaatt

SEQ ID NO: 810578 - DNA, 559 bp, Homo sapiens
gtgagggaaagagacaaggcaagatgggaaagagaagaaaggaatagagatcagattccatcccctagaagatgatagtctccctggtgagactgaacacgctaggatgcagtggagaagggtaccaagcaccacgggacacctgtagatggagggacatcctgagggccatggctagtgtggagtggcccgataacgtagcaccgattcccacctagttctatactttacccaacctgaaaagaaaagactcatccctccaatcctctgacaaatggttatcgagggatgactctggtcccagttgcagtgtgactggcaaattccagttctgtgtgggaccagacaggtcaatgagtgaggcactcttatgacagtaagatgcagtggggaatggtgctgtaaggaaaggcattccccatctaaaagcatgtccttaactaatgctcaaacacatcatctcwgtgttttaaaacccctgagggtgaatgggacagaaaatgactgccacttttttggaatttgccatctagtgggaaaatcagcttacccaacaatt

SEQ ID NO: 810579 - DNA, 565 bp, Homo sapiens
aatttttcaaatttatttaaaaattatttgaaaattacaacagatagatttcttttttttttccacttaacatgattattttcccagtcatttcatgttcttcaaaaaccccgatgataggaataattttctctttcctgaaatctctcttcttgtgattggatctgtttgaggtcctggacggaaaggcttggacgaagtccttgcagactcagcatggttgtaagcagtataatttcagagggctgtcccatgggctcactctgcaaccaggctggatgaagcagaaatgatttgaccttcactccttaattaaaggctctgatcattgttaaaatgcaacttgctctccagagatgcaacattctaaacagccaccccccccatagtttattgcttttctgaactgaggttttcctaaaagaggaaagatttcttacctttttggtggttcaagctacattaactcataattcctcatagaggaattaaatactatcaaytgtaataacatttacaatttattaagcacttattattatgtattaggcactgccaggaggac

SEQ ID NO: 810580 - DNA, 593 bp, Homo sapiens
cccacgtctccactgtagccagttgccggctgctaggagctgctggagcmgaccactgcccggtgctgtcgggtctactcccagtctgttctgtccaacctcagtactccctttgttcccaacttggggactgcctgtcacgctcctcatggtgcctgttccagttttgttgaattgttggattggctgctcctgttggaactggaggtccatgtagcatctccctctccaaattctgttcacttgcaccttgtcctcgtctccaaccttctcttggagttcacaaggtcaggaagctgaagacatgctttcaccagtgtgaggatgatagagattttgtcttcccattggcctcagctcagcaggctctaacattctaagccctggagtatacctggaccacacactagccaaagctcctgactggttttcctgtgtgggatttctcatggctggtgagtttgctggctgccagacctgtggcaccctgggacccactggatcccagtctctagtgtcgtcctgcacgcatggtagagcccattctgcctgatggaggaagcagctaaggctcaggcaccctggtcagggat

SEQ ID NO: 810581 - DNA, 405 bp, Homo sapiens
tgaattgtgctgtgcctacaggaggcctataaatatattagttccctatcatgtctccttctrtcctccagcccaacaaggcagcagaaatccacacctcatgctgttaagtcatgcggcaggcatggatgtgggcacattatgaggaagcctggtgctttgggttgtttctccagtgctggtccacatgaatacatctgatttgttcccttgttccccagaacacatatgcacattatggccagccagagttgtttgggagtggcctggttcaaactatcaccctagtatcccaatcttgttaactaaccagcctgtctgaaaactttgcataaggcctgggtgcctgtctgaaggatcaagacactagccagccccaggaagctcatctatccgttctgtctc

SEQ ID NO: 810582 - DNA, 405 bp, Homo sapiens
tgaattgtgctgtgcctacaggaggcctataaatatattagttccctatcatgtctccttctatcctccagcccaacaaggcagcagaartccacacctcatgctgttaagtcatgcggcaggcatggatgtgggcacattatgaggaagcctggtgctttgggttgtttctccagtgctggtccacatgaatacatctgatttgttcccttgttccccagaacacatatgcacattatggccagccagagttgtttgggagtggcctggttcaaactatcaccctagtatcccaatcttgttaactaaccagcctgtctgaaaactttgcataaggcctgggtgcctgtctgaaggatcaagacactagccagccccaggaagctcatctatccgttctgtctc

SEQ ID NO: 810583 - DNA, 690 bp, Homo sapiens
tttgtacaagaaaactctttgggctcgcttttcttatccttaattaacagccagaatggaatgagtacagaactgctgcatttcatttccattttcactctttatggttgtaatggtggacagtttgctttacttcctgagccttatttgaggttacctaaattctgatctctgtttctggaagaagtaagaggtagttttctgggaagtgaggccatgtaatagcctaagtcttacatgtttgcttctgtccattcatgctttctgagtattcacatgttctattcagactgctggaatcctgatccccactcacgaccatctttcacgaatatcctggaccagctaaccaccatagaggagtctggtttctttgaaatgcccaaggactccttccactgcctgcaggacaactggaaacacgagattcaggagatgtttgaccaactcagggccaaagaaaaggtaaacaaaacaaaaaaaacaacaaaaaaacgaacgaaaagaaaaaaggcatgcattgaattggtagacctcactcacagggacctctggaccgagtctgactgaccatcttgattctagcatgcccaccttccagcttggtatctacttaattgtccaaaccagmgaagaatgcagttgggcaaaatcccagtgcttggattacaggccttttttcttttctca

SEQ ID NO: 810584 - DNA, 609 bp, Homo sapiens
tcatgaccagggcttatataatactgggaaagggtatatgtgattcagaatgtttgtgtagaacaattgaagtcctataacatcaaggttgttttgacctcagggcaggatttacagtaggtacctactctcacacaagaaacatcaaataaactggaaatcttagaggacttcctagaacaagggttaatcagaagttaaagtgatggattagcatccaagttggagttgctttggcctccacagcacctcctctttgttaggcgctggaattgctgttagcaatacagacacaattcttgctctcaaatgcatagcctagtagaggagacagatcagttatacatacataaaggcacagataacagtaatagcaatagtaaccctttctgaaaggggtagtcgttttcaagtatttatagttcacacatacacacacaaaccaacccagcaagcccagtataatttccctacttttacagatgaggrcattgagattgggagaaatgaactggcttccttaggttccaacagaccataggtagaggctcagcctcaagttcttctcgtctatgcaaagtgacctcctgtgcaaaaggatgagtaaat

SEQ ID NO: 810585 - DNA, 372 bp, Homo sapiens
gtgagaaggctctgaggtctcttttatgasggcactaatcccatttacgagggctttgcctcaggacttcttcacctgccagagcgccacctcctgatgccctcaccttgggggttaggatttcaacgtataatttgggatgacccaaatattcagactagcaaattccagttgggttggatgggagaggcaatattttgttatgagaactttggggtgtcgcttttctggccggaaaactctgtggccagtggtgcctctgtgtgagttttgctcgggtctgctgggctcattccaccccctcagcctggcaggctgtgctcggctcatgctaccagcctggatcccacgcctcgagggagactgcgagtc

SEQ ID NO: 810586 - DNA, 372 bp, Homo sapiens
gtgagaaggctctgaggtctcttttatgacggcactaatcccatttacgagggctttgcctcaggacttcttcacctgccagagcgccacctcctgatgccctcaccttgggggttaggatttcaacgtataatttgggatgacccaaatattcagactagcaaattccagttgggttggatgggagaggcaatattttgttatgagaactttggggtgtcgcttttctggccggaaaactctgtggccagtggtgcctctgygtgagttttgctcgggtctgctgggctcattccaccccctcagcctggcaggctgtgctcggctcatgctaccagcctggatcccacgcctcgagggagactgcgagtc

SEQ ID NO: 810587 - DNA, 575 bp, Homo sapiens
tgtggttttttttgcatgtacgtagagatggggttgcgtcatgttgcccatcttgaaytcctgggctcgagagatccgcctgcctcagcctcccaatgtgctgggatcacaggtgtgagccaccttgcccagccatttcttttgtgtagtatggaatcttagtttaagccctcagtttaaatgtattatataattgaggtgctaggtgtacagaggtactagaactacagagcttttctcattaatgtatgttccttctgatgttgaatatttagaaaactgaatattgtgtttggagccaagggatattacacttgaaatatggtcatttggtgaacaggtatctcatttgtaggctatcattatttttggtgaacaggtatctcatatgtaggctatcattaattttggcagtttcacattaaaatacctgcctggaaatacctgcccagttttgccagtaatgggaattgcaggttaaccgttggtcttctatatgtggctctatgatgtggacaagacttatagctctttactttaactgagacaacaatgttggtgatccaagtctagaa

SEQ ID NO: 810588 - DNA, 570 bp, Homo sapiens
agcaaatgtggtgaagtagggtaggtggcatgaggattgggccaagggagtagaattatctccatggggtggcttcagttcccctccctcatgggtagataccccaatcttgattgaattaacatgtatattagaatccagcaaatagatgtttgagcacatatgagccatataaaatccttcacagctggccaagtaggtgtacctttctttggtgttcaaagaaagcttgataatttctgcctgggcgtgcagcccttagtagaaaaagcatgctagacttggtgagtaggtggttgcctacaaagtcttatttcaggagtctcccaaaatattcttcaacatctgttcactgatatttcaaattccagtaatacagacaaaacctttccatctaaattagagagacttaaaatacaaatgcaagtgataggataaaagtaataatagccaatatatagcatttattakgagtaagacactccttcaagcattttattttattattagtttttttttagagacagggtcttactctgtcacccaggctggagtgcagtgatatgatca

SEQ ID NO: 810589 - DNA, 598 bp, Homo sapiens
gagaaggcatcaataataagctgattctctagccaaacaatctaaatttaaatctaaccttggcctgttaaagatgtctataaggaaatctcattcactcatgttaaaagcctttcaagattaaaattaatgctggcaattgaggaatatatttttatggtatataacctctgagaacctatgtgatcatcatgttaaagaacaatgaaaatgttagtttttgtctcctttatgttttgtcagaaaagaagcatagcaaaaggttttcagcccaaactgaatctctagttttcttccctgtttatcataggttttcactttgctctgatcaatgtatttgataaatgtatgaatgaatgaatgaatgaattgtccttcattaggtatgcttaacacacagtagtaacaagcgagacgtgtattctaatgatcccatagtttataaaggaaaaaaagtagcagcttatttattgaataaatatttattcaaaatctacwatgtgtcaagtactcttataggccctggaggaataaaaaataaatgaggcagacactgttcttggctcataaggtactttaaaaaatcagaaaaaaacag

SEQ ID NO: 810590 - DNA, 625 bp, Homo sapiens
cttggaacctcatatatccttccccagtgtctagtctccacaggctttctcctgctcaacccttcccttacgttgccagatcaaccgttctggagaatcccctcatcaagtcgtacccagcagtctgctattaccaccaatttctcctcttctaaaccattctaccttccactaacaaattaatctccctaatccacttttcttaaaagcctttaattcccttcaggactaaagggatactccttagccgggcaaagaccccagcaacctgaatcactattttctccaacttaactgccgctactccccagcatgaaccctttttattggtgaatatcagtataactatttatgtttatcagcccactcatttattaatttctgcctctgtgcttttactgacaccatttgccttacttagaaaacattacccctccacctgcctgctaaaatccactacgtctactccaaacccattcttctattttttgaacagcctagagcactcacatgttccactcatttagcgtttaattatgtgctacttcaratccctccatctaaactgtacattccttgagggcaaggcacttctcagcatgttccacagggcctagcagagaaa

SEQ ID NO: 810591 - DNA, 574 bp, Homo sapiens
agaacttttctgtctagctaaaggattgtaaacacaccaatcagtgctctgtgtctagctaaacatttgtaaatgcaccaatcagcgctctgtgtctagctaaagctttgtaaatgcaccaatcagcactctgtaaaaacgcaccaaaaaaggtttgtaaacgcaccaatcagcactctataaaaatggaccaatcagcactctgtaaaatggaccaatcagtactatgtaaaatggacaaatcagcaggatgtggaggaggccaaataagggaataaaagctggcccctcaaggcagcagtggcaacccgctggagtccccttccacactgtggaggctttgttctttcactccgcaataaatcttgctgctcctcactctttgggtccgcactacctttatgaactgtaacactcaccgtgaaggtcagccgcttcgctcctgaagccagcaagaccacgaacccaacaagaccacgaacccaacrggaggaataaacaactccggatgtaccacctttaagagctgtaacactcaccgccaaggtctgcagcttcactcctgaagccagcg

SEQ ID NO: 810592 - DNA, 574 bp, Homo sapiens
agaacttttctgtctagctaaaggattgtaaacacaccaatcagtgctctgtgtctagctaaacatttgtaaatgcaccaatcagcgctctgtgtctagctaaagctttgtaaatgcaccaatcagcactctgtaaaaacgcaccaaaaaaggtttgtaaacgcaccaatcagcactctataaaaatggaccaatcagcactctgtaaaatggaccaatcagtactatgtaaaatggacaaatcagcaggatgtggaggaggccaaataagggaataaaagctggcccctcaaggcagcagtggcaacccgctggagtccccttccacactgtggaggctttgttctttcactccgcaataaatcttgctgctcctcactctttgggtccgcactacctttatgaactgtaacactcaccgtgaaggtcagccgcttcgctcctgaagccagcaagaccacgaacccaacaagaccacgaacccaacgrgaggaataaacaactccggatgtaccacctttaagagctgtaacactcaccgccaaggtctgcagcttcactcctgaagccagcg

SEQ ID NO: 810593 - DNA, 619 bp, Homo sapiens
agagaacaggatggataggagaagtgtatagaaggtagcccctcagcactcatccctcatgggataatcaggatgatacaaagggaaaagaagttaaggatgattgagtggaggttttgacgygctacccagaactcttcaagaccaaaggacttattcctctagctcctgggagaattgcccttggctgaagacagccatcttgtccaagatcacactgccttcctggacagcccacatccaatgactggtcaacatttgggtgtaaaagctattttccagacttctcaacccaactcaagacaactttgaagggccatccctgcttcaaatctcccagagggcttggatgaggccttggttgagactttgttgcagctcaacttcctcttctttccaacctgcttttttcccttcccttccacaggtgggatgtgaagagctctttctaatacacctcattatgttaatatccatctcagagtctgctcctcaggaaactcatgcctgcaatgtctatcctcctggcttgagaagtctgtagatggtgttgtcattcactgatttgtggaatagagaaagaggaggtaatttggagtgaatgggagggagattgtga

SEQ ID NO: 810594 - DNA, 620 bp, Homo sapiens
tccgtgttcatgacttagaaatgctggcggggaaactagcttttggagcgaggcagcctgggctcagataccactggggcgaagcagtggagaacagggctggaggaccatccaggggctgccccagtgggagcctcctttctccctagaggctttcaaggaagaggattttctcaaggctggctgggtaagacaaaccatttggcccttgatcattctccatcctaccaggaggtctgggcaggccctcagtcaccagtttacatatcttttcataaactagaattttcatgggttagaaaatacagcttttggttcgctcccagagaaaaagcaaactccaggagagaagaaagtgtttctatgccctctgctggtcaaccagagacgtaggcagcagagcttaaacttggtttagttcccggtggggctaaaattccggggtgcctacgttagtaaccacccccagcaccactgaagctgagttctgttcactgggcagtgactgaaacwctgcagatggttgtggtgtcgtgggagtcacctctgttcctattaatcatgggtttggtaagtggtggatcctgctgggcctagtgaaccttctgaggtcttccttg

SEQ ID NO: 810595 - DNA, 634 bp, Homo sapiens
aattccatagcttttcattaacactgggttgtagaagacaactgaatgttaactcagtatggactgtggaggtgagaggttaattctgtttggattgacaccagaattatttccctcacttagatrcatacagttttgaaaataagaatgggaaatatctctaacaactgaccaaataactcactcagaaatgaagtacaaactcattcttaaaaatcaaagagaaaggccgggcgtggtggctcacgcctgtaattccagcactttgggaggccgaggcgggcagatcacgaggtcaggagatcagaccacggtgaaaccctgtctctactaaaaatacaaaaaattagccgggcttggtggtgggtgcctgtagtcccagctactcgggaggctgaggaaagagaatggtgtgaacccgggaagtggggcttgcagttagccgagatggcaccactgcactccagcctgggcaatagagcaagactctgtctcaaaaaaaaaaaaaaaaagaaaagaaagaaagaaaagaaagaaagaaaataaaaaaagaaatcaaagaaaaccgaacctcattctgatttctcttacaagtttgagggaaaaaaaagaaagacaaagcatttaataaatt

SEQ ID NO: 810596 - DNA, 634 bp, Homo sapiens
aattccatagcttttcattaacactgggttgtagaagacaactgaatgttaactcagtatggactgtggaggtgagaggttaattctgtttggattgacaccagaattatttccctcacttagatgcatacagttttgaaaataagaatgggaaatatctctaacaactgaccaaataactcactcagaaatgaagtacaaactcattcttaaaaatcaaagagaaaggccgggcgtggtggctcacgcctgtaattccagcactttgggaggccgaggcgggcagatcacgaggtcaggagatcagaccacggtgaaaccctgtctctactaaaaatacaaaaaattagccgggcttggtggtgggtgcctgtagtcccagctactcgggaggctgaggaaagagaatggtgtgaacccgggaagtggggcttgcagttagccgagatggcaccactgcactccagcctgggcaatagagcaagactctgtctcaaaaaaaaaaaaaaaaaraaaagaaagaaagaaaagaaagaaagaaaataaaaaaagaaatcaaagaaaaccgaacctcattctgatttctcttacaagtttgagggaaaaaaaagaaagacaaagcatttaataaatt

SEQ ID NO: 810597 - DNA, 653 bp, Homo sapiens
tgaactacgtgtacttgaaaactcccaaatcccacttctaatcaaataccctatagaaatgcattaacatatttagcaagaaatgtataattgttcaacagaagattggatattttatgcgataggcactccatatagtactatatagcaataaaaacaaacacatggcaatatggacaaatctcacaaaaatgtgaagtgaacaaagccagacatagaatatatagtataaaactgcacacacgcacacacacacacacacacacacaccccatgtaacaggcaaaattaaactacagcaataagagtatttgcaagcttttgggaggaaggaggagccacaagagggtttcttgagttctggtgatgttctatttcttgacctgagtggtgtttacataattaggttcactttgtgataactgaattgaaaattttattatctgtcccctcttctatatgtgtgatatgtcataaaaaattaagaaactgaaaaactaaagagacataacaacaacaacaaaaatagcaaaaayaatttttaaagtaattctgccagagttgggtgagtgagtagctaaaaggcagttacacttgtagctctaatgtaataacatcaacacctaaattcaaactgcagatatattataaat

SEQ ID NO: 810598 - DNA, 612 bp, Homo sapiens
agtgaattttgagaaatttgatcttttagtccttggtgttgccgttaaggagtcagtgtcatttttattctttaccctttgtaagaaatgtatttagtttatagtgcttwccatgtttctgtatcttactggtattatgtctactggttcttcagagtagaatgataaaatctccaacatgactgaatttgactgtttctcccataatttctgttattattttgcttcatgtattttgaaactctattattagttgcatatatttaagaattcaatgacttgatgaattgacccctcatcattatgtaatgtccctgcttgcctcctcatactatgtctagttttaaaatctatcttgtgaatgtaaatatagttactctagctttcttacagtcagtgtttgaatggcatttcctttaccatcttttttgcttttaacatactgtatctttatatttaagtatggtttttgtaggtaacataacttacatcttgattttttcaggttttttaaagatatataactgataagtaaaatgttatttatttatggagtacaatgtgatgttttaaaaatatatatacattgtgagatacttaagtcaagataat

SEQ ID NO: 810599 - DNA, 571 bp, Homo sapiens
tgtttctacaatttcatgcttgctgtcttctaattttattttgtctcatttaattttctttctttatgtttccagaactcacttctttcatggggaattctgttccgccattctacacatttatttgttaggaaacaattcttcttaggtctccggtgtttctgcacatcatgtaccagcttttgttccagaatgtctttgcaaagatgtttgggtagcatatatctttgaagacagaaatagtgtttcccttcagaatagagggcaaatttgttgcctttcaagatacttaaaatttctttctccaggacaaattctgggtaggtgtgcttgcacttcctttaagaattgctttgcccaagcctggggatcatcgtacatgatgtacacccagtgtgtgtgcagcaaccttcggggctttggtgccaaagggaactgatacaaatrtgaatctcagaaaattccattcacagtggcttcaaaaataatgaaagatttagaaatacatttagcaaaagaaatacaaaactaataatatgaaaactacaaaatgttgttaacagaaaataaa

SEQ ID NO: 810600 - DNA, 658 bp, Homo sapiens
aattgcttgaacccaggaggcggaggttgcagtgacccgaggtcgcgccattgcactccagcctgggctatggagcaagactctgtctcaaaaaaaaaaaaaagtagataggacagcatgctgccatcccagggaacaggagaaacaataaacacagtagtagtaatgcagcagtaatgtgtttgaagggccaagaggagaaaactttccatccagacttttctgttttgcaaaactctgttaaatcctaactctatctagggatttaaccatgcagtggaggttgtgctgcagaaggaatcaccctatctcttaaaaatggaaagctttatatctaagcctatgccaagaaaatataataggagaacattttaaattagtttgtgaaagtcaaaagattgtctaatatttgcacagcaaataatttttaccaaacaattttacatacatttcttacaataattatttgatgatattatgattgcctacatttaacagttgagacgttgtatctgcatttaaggatactgagyctcaaataatttagataattagatcaaattgggttacaaagtgtagactgtcatgcaaaagtccatattcccaagacactgggctctcacttccacattttctaaggatatatgaaatatatgaa

SEQ ID NO: 810601 - DNA, 633 bp, Homo sapiens
aactgcacttgaaacctttaatttaaattataaaatatgtgcataagagaatataaacacaaaatgtggcttatgagagaaataatcaaatgatacaccaggaaaatatatacactgcamtcgtgattggttataattagaaaaaggactaaagactaccttggaaaaagatgaaaatcttaaaactgcccaaacaggggcatcttaattcgttaaaaaccactggcccccagggtatttgaaaacagtatgagtaggagaaaggtcaagttgatatttggaagtgccagccactcttatgtggtgatttctatatcctagtttgactgatttgaacttttcatttattcactcattcactcacttacttattcaagaaataattttcttatgtgtcagaaattggaattatctgcatatgggaggcgacttggaatgcaagtttatagattttgtgccttgggcaattgttaaaaatgtgttttctcactagtttgcctcttctacggtatggtttctcttcagttatgaagagcaaatgatttagatccaccttaatccctacaattcccgttggctcactggaaaggttggttattctcagtgagttgaaaaaatattttcttctgattc

SEQ ID NO: 810602 - DNA, 446 bp, Homo sapiens
ctattcaatttttgtcaaactaatttataaattaaagtcaatccagatgaagatattagtaggtctctatttacagaaatagaaaagctattacaagattygcatgcaaatgcaaaggaccaagaaaagcctagacaatcttagtgaaaaagaacatgataggggaacttgctttactaaacatcaagacttattaagccacggtaaagacactgtggttttgactacctagttggcaaatactccactggaatacagtggagaacccagaaacagagccacataaggattgacacttgtccctgactaagatggcacatcagagcagtggcaaaggctgttctcttcaatacatgatatagggtccactggatatcaatgtggagaaaaatgagcttgacttctagatcatatcacagaagactgtatttcaggtgcttttgaaa

SEQ ID NO: 810603 - DNA, 438 bp, Homo sapiens
gcgtggtagcacacgcctgtagtcccagctactctggaggctgaggcaagcgaatcacttgaacccaggaggcagaggttgcagtgaaccaagatcgygccactgcactccagcctgggtgacaagagcaaaactccgtctcaaaaaaaaaaaaatttattctaagcagacagcggtggcttgcacttgtaatctcagttgcttgggaggctaaggtgggaggatcacttgaggccaggagtttaagaccagcctaggcaacaaagcaagaccttgtctctaaaaaaacatttaaaaaaaattagccagaaaaaatattccgggcatggtgacatgaacctgtggtcctagctacctgggaggctaaggcaagaggattgcttgagcccaagagtttaagttcgcagtgagctatgatcagaccgagaggtgaagcca

SEQ ID NO: 810604 - DNA, 613 bp, Homo sapiens
ttccaggtcatgggtcgataagagataaaagtttgtgttcttttggatccttatcagcctttcactgaataacaatttacatgtgagccggggtggcgggtagaggaatagtcacttatgctttagtctggctcagtgaagctgcatttttacataaacaataagggcagaggaagcaatcagatgcatttgtctcaggtgagcagagggatgactttgagttctgtcctttgtcctgcacctgtgaagatcagctattcatttacattgccagggtgaaatccaacagaactgttttagggtaaaaatcttgaggcctacaaggaatttccttgtgggcaaaatgtgcatgaggtatgtagctttttaatccttgtagctatcttatttaggaataaaatgggaggcaagtttgcctgatgcagttcccagcttgtcttttccctttggcttaatgattttgaggtccccagatttatttccctttcatagtagataaactgctccccattccagacttacattctaagaatcagagaaggcaagtgacctggmaaaggcctcccagcatatatggtcacaggtaaaactcaagcctggtctgttattccct

SEQ ID NO: 810605 - DNA, 553 bp, Homo sapiens
caactggcacactcctgtaatcccagctactcaggaggcttaagcagcaggatcacttgaggccaggagttagaggttagagtgagctgtgatcacaccattgcactccagcctaggtgacagagcattcagyctaagtgacagaataagaccctgtcttttaaaataaaattttaaaaaaagagagagacattaggagacaactgggaaacctgaatctgggttagatattagaggatgttatggaattgttactaattttcttaggtgttacaatagtattacaacagtattatgcaggagaatgcctttattctcagaaaatgcaagctgaagtacacaaaggtgaagtttctccaacttactttcaaatagctcaaaaatcaatcaataaataaaagcatctatactcagaaaaagcaaatgtggccaaaatgataattggtgattggtgaatataggtgtagggtatgtaggcattcaatacactatgttactcttttctataggtttgaaatgtttcaaaacaaaaagctgggaggaaatagcactc

SEQ ID NO: 810606 - DNA, 541 bp, Homo sapiens
ctttacaaaaaatgctattgttaaggaatactttttgaagtattacttaagtcaaagtaacataatgaattggtgctaaaatctttaagttacaggtgtgttcaaaagaattgttgaatgaaggttaataaatgtggaagaatagccgtcctctctatatctcttggctgataataaagatcaaacaaggataatgtatacaaaagtgcaggttccattaaaaaaaattagtcacactttgtaccttcctgttaatagggacagaaatataggattaaacctagcatcattttgggttactttggctataactgggactcctcaattatgtagtcaacactgcactaaaaattcacttagacaatgtcagtattcactatgaataattccccttcattactcttaaacattctatttgctataccacaaattttaacagtgtgcttttaacaatttaatgtttttaatagcttgaaactcatctgatagggtttgactctgtgycctcaccaaaatctcatgtcaatttgtaatccccaca

SEQ ID NO: 810607 - DNA, 229 bp, Homo sapiens
aataggcattttctactacaaaaataggggtgggatggcaaatccggatccgaacagaaaggagatgcagcacggggacaaataatttgttgagaagaatgagtaataattacaggtcttgaagttcaaacttaggttgctgaagaagatgaggctggagaagaaaacaggagccaaatcacgaatcgtctatgccttggkgaggcaatgagtggacagattacaattt

SEQ ID NO: 810608 - DNA, 604 bp, Homo sapiens
tatatatatacacaaatcctattaatacaggaagaaaaaacaagcaaaygcaaactttcccttagagatatgtatgactgcttttaacgtctggaaagacacacccgtgttagcactggttactgaaagggaggggaaaggagtgaactatgggagaaaaatgactcatttttcctccttatgtttctatattatgaatttttctttatataagcatgtatccatgtattacttatacaatgaaaaaacccaaatatgatattttccaaaaaatacagtgtatttctaccaaaattcttccctcgacataaaactgattctcttgacataataaatcacactgcccctttggacatctgttaatatttgctcaacttctctctattctgccaaaatgttccttaaaatcaagagcaaccttggagtcgtgaattaagacccagagcatttagctagaaggataataacaaggtcactgaatgaatccaatgagtacacaagtaggattgcccagatgttcctttagcctcggagtgattcctctgtgacaagcatggcttcctgagacatgccatgccccagctctggtggctatgacactttt

SEQ ID NO: 810609 - DNA, 630 bp, Homo sapiens
ccatcccttgctggcattaaattctccagctttagatccttcaccttccttttgctttaagttgtcatataatgacaytgctttttctggaatcacattggagtctacagctatggctttttttcgttagacccagggacagattggaaaggtatgcctttcttacagcaaccctgcaccctcataaaagctgaattttcaatttgataaaaatgtattttgcaacaaatgcaaagcttttgtgcctgctgctgtagctgcagtgaaggcttcatatattttttcttttttttttttttacaatgtcccttactctggattcattcatcttgaaatgatgggcaatcacagctgaagacctcaatctatggtacatatcaggcaattaaacttgtttcttgtaatgttgacttttctctgcttcttgggagcacttccagcatcactagtaacatttcttatgggtcccacagtgttatttaaagtttacagtgttgtacaaacactacatttactggagagatgaactgctcacacagagataattagtgtcacatggcatttgaagtaggtatttgcaacatttgagctcaacaatagcaacaggaggtagttataaaattattacag

SEQ ID NO: 810610 - DNA, 581 bp, Homo sapiens
tacaaattatttcccatatttaaattcttagtggaacaaaatagtccctggtcctcttttcctacctatatgggggaagggtggggatcagagagagaaaattattataagctaaggtcagggtcacaagtaaagtgttcattcccatctgaaaaatatatttcagtcaattgtttggttaaacaattctaagagcataaaaaggtccttgtatttacatggaacacagcttgtatttacatacagtttaaggtcttgatgtgtaaacatgagaagatgatgcagtctctccctcaggaaataacacctacttcctttgtgctgaggaactgggaagctctctagtgtgaaacgaaaagaatcattcaagggaagtgtattaggttgttcttgtgttgctataaataaatgcctgagtctaggtgatttataaagaaaagagatttaattggcccacggttctgcagacmggacaagtatggtgctggcaatggcttctgatgagggcctcaggaagcttacaatcacagtggaaggcaaaaaggagcaggcagttcgcaaggcaagagcagtagcaagat

SEQ ID NO: 810611 - DNA, 602 bp, Homo sapiens
tccccatacacacatacacacacacacacmccctattggttctttttccctggagaacccttacatcttaactaagtaatcaaatttagcatcaaaaagtatgagacaaactaacattacacagcataaactatgagggattcttgccaaaagtattaaaccttatccaatcaagtatttgttttattttatttttactttctgaggcctggcagaaccaatcaagtctgacttctggttttctaaaaatacaggagttagagaaagaaattggactacactcagacaaattcagaatgtgagaactttctttgtgcttattttttttttaatatttaaaaaaagagacagggtcttgccattttgcgcatgctggtctccatctcctggcctcatgctatccttctgcctctgcctcccaaagtgctgggattacaggtgttagccaccacacccagccagaatgtgagaactttctagaaaacaattggcctggcacctttttaaaaaagtattatatgtcaagagactacagaaacataactatatgtaatgagtatccattataaaattctcagtttgaaaaaaattctatgaaagac

SEQ ID NO: 810612 - DNA, 433 bp, Homo sapiens
gcttcttcccatgctgggatccctgctctgtctatccaggtgaccttcccctgccctacgctgtggcccacaagcctgacttgagccmgctcatccacttaggaaatgcaacccctggccagagcacgtccacaatgaggactgcccccagcgacgccccaccctggacccctgtttagtggtagccaagccaggtaacactcagcccctctcaagcctgggagtcagaccaggtaacacgcaggccctcccactcagggtctgagtctacgtgggtcctggacattccgttccgacctgcaggggtgccgagagggttggggaggaaggtggaagctggttcttgttccggcccagcacctggccccctggccaccccacccaccctggaaacccccctcctggctcccttctttcagagtgggacaggcct

SEQ ID NO: 810613 - DNA, 539 bp, Homo sapiens
aaaggctatttcttttttctcacgttagttcttacaatgttttggaaaatactaacgccaggggaacccgcagcaggaagagtgctcagccctgcctctgctgggaatacaccagcccctgaaaccaagcacagtcacatgatgggcaggatgctccaggacagagaagcctcaccgccgagggcagcaatcacgcccccgggtttgcaatcatatctctgcagtgagtggcagtgcgccagctctctgccacctttctacaggtgacatctgataaaggtgaacaagggcctctctctgccaacttatctgcaggaaccaaacgggtttcctagggtctgacacctaagaaatggagaaacacatagactcatctggaaccaccgttaccaccaccatcaaacaatgccgaccaacagcaagatgtgccggcggaccatcctacagctcagcggccagataaaaatgaattccaggccrggtgtggtggctcacgcctgtcatcctagcacttttgggaggctgaggtgggagtatca

SEQ ID NO: 810614 - DNA, 591 bp, Homo sapiens
cttttctcccctgggggagccactaattcagactgctattaaatatctagccgatattttatattttcacacacacgtatatatttagtcaagattaacataaaattttgctttgtgtgttaaaaaatacttacataaatccttaaatggtatcacataatacatttcactcttacatcttatttctttattcagtgttatacttctgagatctgctcaccttggtctgtactgaccaaggttcttcctatttaacttctacacggtatccctttatgatggtttaagtgtccacgtagcaaagctacagtattcagtcaattaaacactaatctaggctgggcacgggagctcatacctgtaatcccagcactttggggggctgaggcaggaggactgcttgagtccaggagttgagatcagcctgggcaacatagtgagaccccgtctctaccaaaaacaacaaaaaaaattagccaggtggggtggcatggcgtgtgcttgtggtcccagctacttagaggctgagatgggagaattgcttgagccagagaggtcgaggtcacagygagccacgatcacacaaccata

SEQ ID NO: 810615 - DNA, 610 bp, Homo sapiens
gtggctcacgcctgtaatcccagcactttgggaagccaaggcaggaggattgcttgaggccaggagtttgaaaccagcctaagcaacacagggagactgtgtctctacaaaaaataaaatttaaaaaaagactagaaaatttcattctattttaattactagacaaaggttttacatttgcctatgaatggaatggttcaaaatcactttcctttgtagtttaagtgtggatgattatactgggtttaaggtccacagataccataactctatatagttatgtttatttcttggcaatgccaggaaagcgttcaggttgaagctttggcaattagcaagctatcaaactttggaacaatgtctcgtccacaccggcctccatcagatgagggattgtggaaccctgccccagaattcaagcaggttttaaattctgaacttcatagggaataagtaatgcctataagactgaagtaaaaatcatttcttcaaattcctactaggataawaccagtatccacgtttgctttgttcttagaggtacatgttcttatttgaaagaatgaaacctgaggtcaggagttcgagaccagcctgaccaacatggcga

SEQ ID NO: 810616 - DNA, 474 bp, Homo sapiens
aaaaaatcatttgcaggtggcttttgtaaacacacctggttgtgttgcatttctattastaaaatatggtagatggttaggtaatatagaggacatctcttcttaaaagcactagattcatcaacactgccagatttttgccatattaagcttaaactgttttcagcttgaacatcatggggcagggctggatagggggaagaacccaatacaggggcgggaaaaggtttttcagactcctgaattaaaatttcactttgcactgccaaagccaaagcatgggctagcagccttcactatttcatagattacataaacttgtagtctgatgctgtaaatatcctaccacctggacattaaaaaaaaaaaaggtcccaaaacactaacaaggaaatagtaattaaaacgaacaaacatttagtgagctttccagtttgctttcagacacctggcaatggaaaactatcaggtact

SEQ ID NO: 810617 - DNA, 625 bp, Homo sapiens
tatgttgtcatttaaaataatgaatttatcagcttaattagatagagcaaaagtttttatgtaatttggaaagtttgggttaattgtcccacctcgagaacgtggatgtttatcayaggaaatatttgtcagagtgtttgttgtagaaatccgtgatgctcacttcaagctataatctgtgtttgccacagaggtttgttctaattccccaaccttgccacgactgacctgggtcatcaccatgtgcttattgaagagccttggaatactgtatagacccgtacagagttgttcaaataggtaagcactttccttctggtgaatttttttttttttttttttttgagatggagtttcactcttgttgcccaggctggagtgcaatggtgagatcttggctcactgcaacctccgcctcccaggttcaagcgattctcttgcctcagcctccggagtagctgggattacaggcacctgcctccacgcccggctaattttgtatttttagtagagatggggttttctccatgttggtcaggctggtcttgaactcccaacctcaggtgatctgcctgcctcggcctcacaaagtgctgggattacaggtgtgagccaacgcgccagg

SEQ ID NO: 810618 - DNA, 623 bp, Homo sapiens
attagtagtttgtttattcagaggtcagcaacctttttctgtaaagagccagagagaaagtattttaggctttgtgggtcacatatggtctctgttgcatattcttctctgagagtgtatggtttttaaacgatcctttaaaaatataaaaactgcaaatagcccaagggccatatataaacagactctgggctggcaagccagttggctgacccctgatttttatgtataatctatgaaagtattcatatatttcacattatatttaagcaattgatattgtactaatattaattacattacaggtataatttcctacaaatgccttgtttttttttccttaaagagcacaggaaacatttacaaaaattgactaaatcgtaggccaaaaagaaatcttaaaatttcctagatcaggggttctcaacatgtggtctggggatttctgggggtttccaagatcctttcgggtgatcctcaaaggtcaaatctattttcatcataatatgtgatgttacttggctttttcactttcaatctctcatgtagatacagtggagttttacaaaagcttcctgacacawtacatctcaacagattgaatgcagaagcagacatgagaa

SEQ ID NO: 810619 - DNA, 645 bp, Homo sapiens
caaggagctcagggttttgcctattcagaaaacagggagcagaatgtttcctcaattaaaactccaaacctaatttaaggattctatattctctctagcttcattctagaaatttttatctagtcttgggtataagggaaaagctggcttcccaactgattagtgtttcttatctggagatcttaacataggaaaacccaaagtaaaaaagcttacattttaatccctggattcttatagtaccactgtcctttgagacaatgggtgcctcatgactttgctaattttcccataaaaataaaaagcagagtagtgaaaagagagtaagacaaattggtaaaattcctggataatctttgtttttcttcgcagatgcaccccactatgtgtccaaaccctgactcttgcctatggtttctggttgggtttagccaatagaagacactggcaggagaacagtgaggtcagcattttgattattggagcagcctcttggccaggatgtggagaggttaccacatccctgtacgkgtggctacgggtggtacaggtggctacgttgtcttccccacagagctcctccacaccacttcctggagccattcctagcagagtaacaccagctcccagggcacagcaccagcc

SEQ ID NO: 810620 - DNA, 694 bp, Homo sapiens
agttactggcaagcatctaatttatgtcaaatctaatattattttcctagagtgaaagttttccctgtcttgtcttagtcctaaggaaactttttaagattttctttttcagaagaagatgaattgtgaaagcaaagttgaataacacatgttaaaatttgttgtgaggaagcaaaatgtgtcacacccatttaaaaacacttgatatatatatatatatatatcccaaaaatacttaaaaatgactgaacatcggccatttcttttaacattaaatgttaaagaaaaatttcaagtgttatattttaatcaaaaccaaagcttttgagtaatttgagaggggagaaaaatggagatgggaagcttttgcaggagaattttttgctcagacccagttcaaatttgtgattccatttaggtatattattatttccataactctgaagtttctgaaacaaatgtccttctttttgctgactgtctcagatgtacctagctgtgatggtagacagtggtgttgttaaaatggaagatgaagcatttcaggaagtcacaaaaagcaactggtgttcactgagcatcaatcacattgagcttgacaggcaatgcgtagccatgactyagccatcccctcaaccagaactctccaatactgtgtatcattgcctccattttcatagaggcagtgaccgat

SEQ ID NO: 810621 - DNA, 631 bp, Homo sapiens
caatttcctttactaattcatttaatgaaatctattggtcataaatttttttatgtgtgtatgtctgaaaataatctcattccaccttcattttgtcaacattgtattattacctttttcaaacatccagcaaagttgaaagtattttatggtgtaaacctataccacatagatttgtattttactgcatttgcttgattaatatcacctatctcttcatctactcatccctctagctatcactatattttgattcctttggttcatgtcaaagtaaattgcacagttcatacactttctcctaaatgcttcagcatgtatatcactaaatagatgtttgtaattaattaacttttcttttggttatatgtatatatgtacagtgaaatgcacaaatactatgcctaaagttactgagttttgactaatccttactcctgtgtaatccaaagaaatttccctcatgccccttcccagtcaattcctttcctttcccacccaattcctttcctttcccacccaaagtcaacgactgttctgctttttccattatacataagttttttctgttctagaattgtataccctcttgygtaaggcttctttaaatcagtataatgttttggggact

SEQ ID NO: 810622 - DNA, 591 bp, Homo sapiens
tccagtcaaatccttggtaaaataaccagtttctccaattgtgtcctgttacaaatgaaaacagattcttactgcacttatgcaaataactgcattgccataagttagaatactcacaaatagtttccaaattctggagaaatcaggtagacagaaataaatatgctccaaattttgttcatgggagtatactaaattgttaaaaggtatcaatagctcaaaagaaaagttttaagactctgaaaaacaaaacaaagggtcagcaacagcttagtgatttagaggccccaagatttattttcctttcacataagataacaaatccaacctgattctagcattgcgtgacagatagcagaccctgaaggaaatcaaaatatttttccccagaatgtatttccttgacatatttttgaatggccctccaaagccatctttttgtgggggaaattcgcatctgtagagaatctccaataacacagccaggcctttcctttccaggcctttcccaaatctaagygagattaactaagtgtgtgacactttttacgttctgaaaagagacatttacaatttatctctctgatgtct

SEQ ID NO: 810623 - DNA, 589 bp, Homo sapiens
taaaaatttagccaggtgtggtggcgtacacctgtgmtctcagcttctcgggaggctgaggcaggggaatcactcaagcccaggagtttaagaccagcctggacaacatagtgagactccatctggaaaataataataataataattttctgagttataaatgaaaatttatctgacataaaattataggttcaaagtacatttccatcaacatttgaagaaaacactccttcagctttgttcttgggagatataatgtgattctcttgttcctctaaaggtggaagatgtttctcactagaggcttctagagccttctccttgattccatggtctcccatgtcagtgagatgtgtgcaaatggtgttttcttatgtatcacccctgacactctgtggctttttcagaaggaggctcagcatctcttgacagatcctagtgtattgttattactcaatgtttctttgagtattgttccccgtcagtctttctcacatctcctcctgggtagacatcggcaccctgtagttgcatctttcatttgtcttaatgtcttgctgggactttgggagttcggttggccatggtc

SEQ ID NO: 810624 - DNA, 528 bp, Homo sapiens
ttaaaaagtatggaatgaaatgtgctaatatgttagtaatggttattgcagaccagtgaaatatagataatttttttttctatatacattttggggacatttttcattgaaaaatacgtgttggasataaagatgggaacaatagatactggggactactgggggtcaagggctggaaaattacctattagacactatgctcactacctgggtgacagcgtcattcttgccccaagcctcagcatcacacaatatacccatggaacgaacgtgcacatgtaccccctgaatctaaagtaaaagttgaaattacttttaaaaaactacatgtaatctggaaaatgtagcatatctcatatgatttggctgtgtcctcacccaaatctcatcttgaattttagctcccacaattcccacatgtcatgggagggacctggtgagaagtatttgaatcatagggatgggtctttcccatgctcttcttgtggtggtgaacaagtctcacaagatttgatggctttataaagg

SEQ ID NO: 810625 - DNA, 620 bp, Homo sapiens
attaaaaaaaaaaaaaaaaagaaacactttgggagcctgaggcaggcggatcacctgaggtcaggagttcgagaccagcccggccaacatggtgaamccttgtctctactgaaaatacaaaaattagccaggcatggtggcgggcacctgtaatcccagctacttgggaggctgaggcaggaggatcgcttgaacccaggaggcagaagttgcagtgagctgatactgcgccattgcactccagcctgggcgacagaccaaaattctgtctcagaaaaacaaaataaaacaaaacaaaaacaccaaaacttggctggacacggtggctcacgcctgtaatcccagcactttgggaggccgaggtgggcagatcacaaggtcaggagattgagaccatcctggctaacacggtgaaaccccgtctctaataaaaatacaaaaaaaattagctgggcgtgatggcgggcgcctgtagtcccagctactcgggagactgaggcaggggaatggcatgaacctgggaggcagagcttgcagtgagcagaggtcgcaccactgcactccagcctgggcctcagagcgagactccatctcaagaaaaaacaaaaaacaaaaaacac

SEQ ID NO: 810626 - DNA, 540 bp, Homo sapiens
ccgtctcaaaaaaaaaaaaaaaccaccaaaaaaacacagtttacattctagctgtgctacaaagttcttaccgrcagattggtttagtggcaaaatagcagacctgctggtgactccaatttgtagtgtgcttttgggcgaatcacctcattccccggacctcatctggaaaatgtggaaattataccggatgactggtaaggttctacgattttattctgatagggtctgcacatccttgtggttgcacttctattttccaaatgtgtttgtctaaggcaggcagactttataacagagaagtactagaaaacggattccctgtggctcagggaataaagtgggacacaagaaaaaagaaaaccgcaccgcacccagactctcggcgggacgccccgcccctcaacagtggccgcctcctcgcgcccctccttcgccatctgccggccgcgtcccctcccgccggcccccgtcccccgtcccccgccccccgtccccttttcagagacctgagctccgcctccctggacgcgaggcagg

SEQ ID NO: 810627 - DNA, 416 bp, Homo sapiens
aacacatttagtcctagcaataccctaggaggtagayattattattatttccagtttacagtgagaaaatgtatgttatgtataaattgcatgtagtaaatcacttgagaacagaacatggacagcttggcttaagaatactcttgtctgttgtaccacactctatatgccctgaaacaatgaatcagaaaatagttcttaactcttaacactttccttattaccaatgtattagtcccaggtgacaaagaatctgcattttaatataattatataaagagctcaccaaggaaaattattaacatgtgtattttagaatatgctctagcgctaccttaggaaaatctcaaagtactgtaaaaccaacactttgggaggccgaagtgggtggatcccttgagctcaggtgttcaaga

SEQ ID NO: 810628 - DNA, 553 bp, Homo sapiens
tatttatcacatattactttttcataaaggtttgacaagagcaatgtcttagttgattaatatgtaactctgtaatatcatgactttgtaaatagaagttgttggataatgatcaattcaaaatttatatcactattagtcattttggaagattttgtaaaaatcagattaaacattattcaaaataatcctgactttagattttgaaattcttcaaaagttgtgaaggtgtggtattttgacttttggagctatgatacaaaggtgtgtcactggagttaaaatgagaaaaattgggataatttaaaatacacaatttcttacaggcaacttaaaattcatgataactttaaaatgcaagtttcttaaaatgcaaacctgaaaacatgatagaaaatttaatgccctatacaattatttattcacattaagcataatagcytccataacaacaatttaacattaatttttattactaggaacatatgcaatcatattaattaactctaattaaacgtattcctgaaagatccatgaaatacattaaatcttt

SEQ ID NO: 810629 - DNA, 547 bp, Homo sapiens
tatgaaatcaaatatgcttgactgggttgattcagtcgtgaaatcaaataaagcttcagtttgtattagaatatgcagataatttgtaagataactagataagcatggttattaccttmaattttcagaccaaatcaaattcagaacaatgaaacactgcagtggtcataaccattaaggagtgttgaattaatttcattaacaatgttttcacttagaaattgtccatactactctattacatatactaataatagcaataatgactaacattatatttatattgttagttattaatatctcagttacgtaatattttgcatgggttcctttgagccttacaggaattgtgtgagttatttattttattttacttttttttgaaacagagtctcactctgtcacccaggctggagttcagtggcatgatcatggctcactgaaacctgcacctcccgggttcaagcgattctcctgcttcaacctccccagtaactgagaccacgggcatgtgccaccacgcctggctaatttttgtatttttagt

SEQ ID NO: 810630 - DNA, 605 bp, Homo sapiens
actgctaattattgtcaccattcttactattatataagacaatgaagacgacaagctttagtgcatagcttgcggggcagaaaaaatcaacttaaataatttcaagtagcagtgttgtcaattataaataaattgtactctcttgtgatgtagtttcacaaagtagaggagtctcatgaaattcaagattcttatatgtaaagtccatttgatagatttctatttaagagtatgttacaacagaataaattataaattataattgatctctaatatgctaccagttaatcgtgggagaaaaaccatattttataatgagtcaattttaatttttattctatttatttatctataaatgttcatatttacttttccccccaagagtaatcataatctctaatgtatatttacttttaaaaagaagcatttgaagggagaaattgatagcaatcaccatcagttccatatttgagatattaatggttgttttataaactagtgttcttctcatgcatgtgttttgttaaatggaaagaaaaaagacactcgcaccaaaatcatgcaygaggattgggaacacttacacaaaaataataaatgatgat

SEQ ID NO: 810631 - DNA, 616 bp, Homo sapiens
cagtagtgtgtccccgcttatctgagggagatatgtgttccaagacccccagtggatgccggcaactacggatagtactgaactctgagtataccatgtttttgcctatatatamatacccatgacaaagtttaacttattaatgaggcacacagtaagagattaacaacagtaactgaataaaatagaacattacaacagtgtaccgtagtaaaaggtatacagtgtggctgtaacttttgcagtttaaggtgcagcagcaaaactagcatgaatttcttttgcctccttcacaattttatagatagaattgttcttaccatagagcttaggaactcaacatactgtttttttttctttccttacttttcacttaaaggaagcactttatggtttctctttggcatatctgcattgccagcatcacaccagcctcactgctcttgtgctttgggggcattattaagtaaaataacggttagctgaacacaagcattgataccccgacagttgatctcataactcagagacttgtgggcaggtagtaaaacagtctggatacactaacagagggatgattcacatcctagatgggatggtgcaagatttcatcatg

SEQ ID NO: 810632 - DNA, 616 bp, Homo sapiens
cagtagtgtgtccccgcttatctgagggagatatgtgttccaagacccccagtggatgccggcaactacggatagtactgaactctgagtataccatgtttttgcctatatatacatacccatgacaaagtttaacttattaatgaggcacacagtaagagattaacaacagtaactgaataaaatagaacattacaacagtgtaccgtagtaaaaggtatacagtgtggctgtaacttttgcagtttaaggtgcagcagcaaaactagcatgaatttcttttgcctccttcacaattttatagatagaattgttcttaccatagagcttaggaactcaacatactgtttttttttctttccttacttttcacttaaaggaagcactttatggtttctctttggcatatctgcattgccagcatcacaccagcctcactgctcttgtgctttgggggcattattaagtaaaataacggttagctgaacacaagcattgataccccracagttgatctcataactcagagacttgtgggcaggtagtaaaacagtctggatacactaacagagggatgattcacatcctagatgggatggtgcaagatttcatcatg

SEQ ID NO: 810633 - DNA, 589 bp, Homo sapiens
tgatcatcttgtacttggtattgagagagaaatcttaaagwgctcagttcagggaataggatataaaaattgctcagtattaaacaatgttaggccataagtcagtggaaatgtgtttttttttttcctacccttttggtaggaaatgtgtatcagtaaaatgttgaaggactttctgtggtgtgatcaagtaaagtatcatcaaggaggaggaatttggggctttgaagactaggtagtgtaagatcattcagtgaagaatggggagagtatctgaagcaagaggaatatctaatgaagtccacggacagtaagatctgaaagaatttggccacccactcttctaacaccaagagtagagaatataaatgagagtgttatccgagaggaaaaaagagaacgtttggctgatcctagggaatttcggttagtcattaattcaattcagttctcatcaagtgtcagaaaaaaatgccagctaagcaacaatttcagaagattaagacaatggaaagtgctaaagttgtcactgccccactcaccaaatggcagtgaggctgttctatagatggaagctattcagcaaagg

SEQ ID NO: 810634 - DNA, 507 bp, Homo sapiens
aaaactgtgcagatacacaatttgmtaggcaataatagactctctctccaaattgctaaagttatttacaattgaaaatctgacacaaatacagattaaggagaaactaacagaattcaatttcacaaaataatttatttcttgattctcagccagttagtagtcatgtaaaacctatctatgataagaaaacaggattgaatagggctataaccaggaaggttaaacttggataattgcacaattgcattaaaaccatctatcaagtctaaatgcctaccattattttggtggattctgatttcttttttaattcatcattttcaaatgcaaaataattgtaggattccaaacttttgaatttagaaaatgtcaaaagaaactaaaatgctttgtataatgttaataggtgatttctttccaaattatgtggtgatttgtttctttaacttagttcagaacacttttgataactaactaaattcccttaaaacaaaagcttaaaac

SEQ ID NO: 810635 - DNA, 587 bp, Homo sapiens
ctgtgtcttttgactggagagtttagtctatttacatacaatgttattactacttacatctgctattttgttatttgttttctgattgtttcatggtattctccttctttctttccttcctgttatctttyattgaacataattttctctggtgatataatttagtttcttgctttttttgtgtgtgtatccattgtacgatttttggtttgaagttaccatggtgcttgcaaatactatcttataacccattattttaacctcacaacaactgaacactgtttgtgtaaataaacaaaccaaaaaaaaggaaactaataaaagctctctgctttaatttcttgcttctaaatttatttttgtttctatttatatcttattgtactgtgttttgaaaagttgttgttgtagttattttttattggtttatcatttagtagaaatgatataagtttagtgactcaatcttttttgtttgcattggcacatataatatatttttatttttttttattttcagtacatgtgtgtctttataggtgaggtatgtttcttgtaggcaacagatcactttatatggaaaatgc

SEQ ID NO: 810636 - DNA, 611 bp, Homo sapiens
acatgagccttacccaacagaagcctactccagtggtttccaaaatgtgactagcagcttaacaccatctggaaattttttggaaatgaaaattccaagatccgacttcagacctactgtgtcagaaactctgggaatggtgcctagtaatcagtgtttaacaattccaggtgattttgatgggtgcttaagcacactaaagtttgagaatcattgctctaacccctgaatgtacaacatatgctctgatttaagtaatttcttcagcctatttcattaactctccccatattatcaccaagtgcaatatttcctaaactttgttgatttttcatacatttttcaagtccccattaacctgtattgtaattttctttaaatgttttctaaatctgcacatattttatgctaatttacattaaatttatttaaaaatgaagtatatcaataacaataaaatcagtagttctggcaataaataaaaagtaattataaaactaaatataacaaccagggattatakatatcaaagtgggatatagaagggtgagtgtagttatcaaggtgttaaacaaaggacttttgttttgatagaactattctgtatcttg

SEQ ID NO: 810637 - DNA, 557 bp, Homo sapiens
acaacatatagaactgcaagaagaaatagataaatctggagtttcacacctctttatcaataattgacaaatttaacaggcaaataatcagtaaggatatagtgaagtgaatgacaccattaatcaattagatctgtttgacatttatataatacctcattcccaaacagcagaatacacatttttctcaaacctatatgcaacattctccaagacagatcatattctgggccataaaacacctcttaacacacttaaagtataaaaattatacaaaatatgttctcagatcacagtggaatcaaattaaaaattaataactgaaaatatctgaaaaatcccaaatatcgggagattaaacaacacacatttaaagatcatgtgggtcaaagaagaattctaaagagaaattaaaaatattttgaaataaaagtaaaacacaacttaaaatttatggaatayagaaaaacagtgcttacagggaaatttatagaattgaatacatatattaggaaacaatgatctaaaatcaataacccaagcttctactttaggaa

SEQ ID NO: 810638 - DNA, 603 bp, Homo sapiens
tacttttgtggttattcaagggcgtgtccagtgtggcaaacatttgagtcyccagatgtgcatgtttctggctgagatcaaacaggacaacgctctgtcttcttggttcagctctcaaactgtaaactagcgttctttctgcaggctaccccggtgccacattttccatgttcttgtgctttttgttgataattttactgtttaaaatggccctcaagtgtaatattgaagtgttatacagtgttcctaagcacaagaaagctgtaatgtgactttacagagaaaataaatgtgttagataacctttggtaccgatttaatgttaacaagtgaaaaatacagtacttccagaaaaaaaaaaaagagaaaatttaccaatctgtatgtgagactactcaagaaagtgctaaagtagcaactatagtgtgctatgaagctatggcagagatgagtgactaaatgtgtgcatgcataaaataacagctaataaaaagaaaacaaataacagtcacaacagcaaaaccacagtgggcagcactattgtgaggttgaaagccaaagaaatttatgatcatattatctaagatcaagaaaatcttaaac

SEQ ID NO: 810639 - DNA, 603 bp, Homo sapiens
tacttttgtggttattcaagggcgtgtccagtgtggcaaacatttgagtctccagatgtgcatgtttctggctgagatcaaacaggacaacgctctgtcttcttggttcagctctcaaactgtaaactagcgttctttctgcaggctaccccggtgccacattttccatgttcttgtgctttttgttgataattttactgtttaaaatggccctcaagtgtaatattgaagtgttatacagtgttcctaagcacaagaaagctgtaatgtgactttacagagaaaataaatgtgttagataacctttggtaccgatttaatgttaacaagtgaaaaatacagtacttccagaaaaaaaaaaaagagaaaatttaccaatctgtatgtgagactactcaagaaagtgctaaagtagcaactatagtgtgctatgaagctatggcagagatgagtgactaaatgtgtgcatgcataaaataacagctaataaaaagaaaacaaatarcagtcacaacagcaaaaccacagtgggcagcactattgtgaggttgaaagccaaagaaatttatgatcatattatctaagatcaagaaaatcttaaac

SEQ ID NO: 810640 - DNA, 590 bp, Homo sapiens
ccactttccacaaaaatagtagacaaattgaagaaaattttctgaaaccaaatccaatcattcaatgatttactgggcaattgagtygggtaagttatttgaaacgattttacgaagaaactggttttgctttgactttaatgcctgtcaccttaaaaaatatcaaatatattttttgtggggaaaaaacccaaatcgactacattgtttctgagcaaaaacaacatggcttgaagtataaatactctccttttgcataggtttttggagaaaggtagaaaaatacattttgtttgttcaatgtttgttcactttttttctttaagcctttgttatagaagtgtcaagtataaacgaatccaaccttaaccataatttccacatggatgccacctgtgtgcacgtcatccccaatgatagtatctggaaaacttgctgcatcacagttgcgtttgagctcttggtaggcagcactaaagaaagggtatttgaagtaagtcttgcatacgatgtaggacaaatcactggtattcctttaaagagcaggtcaccatagaaacatttccgagaaattctgcatcccattttgg

SEQ ID NO: 810641 - DNA, 474 bp, Homo sapiens
gagtacacacataagcgaattcacactcatgcagacagatatagaaatacatacatatgcaaattcatatgcrtacagatatagaaatacacacggccacataggtatgggtgcgtgtatatttgaacacatgtatgtgtgctagaagcaatgatggcctcggggggaacaagcacaactgggacccagatcttggtttgttgataccatgctctaaaaggaaccagagctccttggagaaatgactgattttgggttagagaagagaaaacataaattgagcctggaatatcttgtgtcagaaagtaagtctttaaaaaaaggagggatggccgggtgcagtggctcatgcctgtaatcccagcactttgggaggccaaggcgggcggatcacgaggtcaggagatcaagaccatcctggctaatacggtaaaaccccgtctctactaaaaatacaaaaaattagctgggcat

SEQ ID NO: 810642 - DNA, 474 bp, Homo sapiens
gagtacacacataagcgaattcacactcatgcagacagatatagaaatacatacatatgcaaattcatatgcatacagatatagaaatacacacggccacataggtatgggtgcgtgtatatttgaacacatgtatgtgtgctagaagcaatgatggcctcggggggaacaagcacaactgggacccagatcttggtttgttgataccatgctctaaaaggaaccagagctccttggagaaatgactgattttgggttagagaagagaaaacataaattgagcctggaatatcttgtgtcagaaagtaagtctttaaaaaaaggagggatggccgggtgcagtggctcatgcctgtaatcccagcactttgggaggccaaggcgggcsgatcacgaggtcaggagatcaagaccatcctggctaatacggtaaaaccccgtctctactaaaaatacaaaaaattagctgggcat

SEQ ID NO: 810643 - DNA, 517 bp, Homo sapiens
acaggccgccaactcatcataccatgcccaaataaggcagatgcctggctgtagccaatcaagtgatttctttatttttgtgttcagcctataaaagctcactgttcactgccaggcagaggtccctgaacctctccttttttttttttttttttttttaagatggagtctggctttgtcgcccaggctggagtgcagtggcgtaatcttggctcactgcaagctccgcctcccaggttcactccattctcctgccttagcctcccgagtagctgcgtctacaggcgcccaccaccatgcctggctaattttttgtgcttttagtagaggcggggtttcaccgtgttagccaggatggcctctatctcctgaccttgtgatgtgcctgcctcggcttcccaaagtgctgagattacaggcatgagccacctcacccggccctgaacctcttctgattctgagtgctaattgattcaggaattgttmtttactcagataaactgttaaacttgtttct

SEQ ID NO: 810644 - DNA, 629 bp, Homo sapiens
gaatatgaacaaaagaagggaacatataacattttttaaagtgtttacataactaagtatctgtttttaggtttcgaatatagttttagaatttttacacttaaatgatttctatacttaaatgagttaactaataggtttgaggaaaagagacattttatttcataaaacattttcaactaggatatgaacaacttgaaaaaattttcaaggaatttttatcagattaaatagatggttattgttcttattttgtgtgtgtgtgtgtgtgtgtgtgtgtgtgtgtgtgtatggtttctatttagttgtttctaacaatctggaaaattttacaggagagtaattcaaagataaatatgaaaagtatcaaaaaaaaaaaaccaaaagaacaacaagcatgtgttattgtgattcatttaactattctctttaaaagtatttttcaactctctgttctggtaatttttttttttagtatgtgggtctgtacatttcactgctccatctgtttttcttagtattaaaaaataaaaccactcacttarcatgacactggaaatattatagtaaatcctgggcctgacatccatttacgatttgtgtcatattgagcatgttttgtaacccct

SEQ ID NO: 810645 - DNA, 622 bp, Homo sapiens
aatggaactggtggaaaagaatgaagccttatttatttatttagagatggggtctcactctgtcaccaggctggagtgcaatggcatgatctcggctcactgcaacctccacctcacaggttcaagtgattctcctgcctcagactccccgagtagctgggactataggcacacgccaccacgcacagctaatttttgtatttttcatagagacggggtttcaccatgctggccaggatggtctcgatctcttgaccttgtgatccacccgcctcagcctcccaagtactgggattactcaagttttaattcaggcctaaaaaagattctggaacaaagacaggcaggaagtgaatcaaattcaaaagtgagtttatatagatgttaattaaaatattaataatagtgcatttctggccaggtgtggtggctgatgcctgtaatctcaacactttgggaggctgaggcaggaggatcacttaagcctaggaatttaagactaccctgggcaacgtggtgagaccccatctatattttaagacaaaaaaaaccaaaaactttttttaaattraaagaaataaaaatagtgaatttctaacttaccatggcaacatcatctaaa

SEQ ID NO: 810646 - DNA, 564 bp, Homo sapiens
gaggtaggtatgtgtcttagggggtattataaaaaagtatgaatatgtcaggggattcataaacctcggggatacaggattttactcatcacccctagaggcaaasacggggatgttctttcagtacctagctagagatattaatttgccatttgcacttttttttttttcaaatttccctgggtacaataataagggtccttgtaaaatatgcagcaccccccaggctggtctcctggaggttttcggtcaaggaatcttggatggagcctgtggaatgcacgtgttagctaccccatgttattctctgtaaaaaacaatttcaagaagcggtgctataaacaccatacctgcaatatggacaccgtgagcacacaagtcaggtgaattcaagccagaaagtatctgccccatctacctgtggatgttgatgctcagctcccaacaatgcatacagatgacactttttccagagaagcaagagagatgtcagaaatggaagcagtcaggcttctctctagcttggcggcacataaagaactcagcgcccgccatggggaagcc

SEQ ID NO: 810647 - DNA, 592 bp, Homo sapiens
actaatcaggatgtttgctttctgaagagggagatatataacttcaaaatttttatctaagaatgcactgttgcgtgacagatatttatctgggtttactttgtggatgtgggccacaatgaaactctactcattatacttctacaactagttcattccattctcaatggtacatgacattcattgtagaaatctctcccttgagtttttctaaacagttttaccagccacctatactttcactaatagtatttttacacactttaattggtaatttaaattttacacgtgattttctggcatttatagagttcaaaatggggttttactataattttagtactaagatataagattttgttactctgccaaaatataaatggtattcattgcttctacctgaaagactcagaattcactaatttcctataatgcatgttgttattaaatccatcttcctctatgatctttgaaaggctactttaaaagtagcccaagatagaaacaccaaaataaacaaaattcaacaagcaaaaattcatgtgcatcatgatacacgttttatttyacctaaaagcaaaacacgaggaca

SEQ ID NO: 810648 - DNA, 537 bp, Homo sapiens
ttatagttggaggcttcaacaccatgccttcattaattgatagatcaaacagcccaaaaactcaataagcrtaaaattgacttgagcaggactattcatagacttgatctaattgacatttagagaatactccatccaaaaccagaattcatattgttctcaagctctcagggagcattcactaatatattctatgttctgagtcacaaaacacattctaaaaaatttaaattgacaaaaatcatgcaaactgttttcttagaacacaatagaatcagactagtaatcaacagatagatagatggaaaatccaaaatatttggagattaaacaacacatttctaactaacatgtgaattcaagaagtctcaagtccaggctggacttaaactccagggctccagcaatcctcctatctcagcctagaaagtaaccggtacagcttaaattatggcttaaaaatatttttaaataaatgaaatgaaaatacagcttatcaaaatttataggatccagcacaaacaccacttagaaatt

SEQ ID NO: 810649 - DNA, 577 bp, Homo sapiens
cagggagcattcactaatatattctatgttctgagtcacaaaacacattctaaaaaatttaaattgacaaaaatcatgcaaactgttttcttagaacacaatagaatcagactagtaatcaacagatagatagatggaaaatccaaaatatttggagattaaacaacacatttctaactaacatgtgaattcaagaagtctcaagtccaggctggacttaaactccagggctccagcaatcctcctatctcagcctagaaagtaaccggtacagcttaaattatggcttaaaaatatttttaaataaatgaaatgaaaatacagcttatcaaaatttataggatccagcacaaacaccacttagaaatttatagcactgaatgtgtgaattagaaaaagaaaaaatctacaatcaatattacatcttagaaaactagagaaagaagataaatttaagttgaagcaattataagaaaagaaatagtaaatattgggagaaaaatcaaggaaactgaaaacaaaaaaaraaaaataaaaaaagctatttttttttacaaagatcaataaaattgataaa

SEQ ID NO: 810650 - DNA, 586 bp, Homo sapiens
tagagcaatagtaactctcattcatttctagtgggaatgcaayatggtacaaccaaagtggaaggcagtctggcgatttttcaaaaagctaaacataaccttgtcattcaacccagcaatcaagctcctagggacttattcaatagatttgaaaacctatgcacacacaaaacttgcatgcatgcagatgtttctagcagttttaatcagaataattaagaacgagaaacaaccaatatatccttcaattggtctatggacaaactcttgtacatttataaaaggcaatattcagtaataaaaagtgagctatcaagctgtgaaaacacatatatagcatcttcagttacattaccaattaaagtaagtcaaactgaaaaggctgaattattatgtgattcccattatctgacactctggaaaaggtagagttttcatgggactggaagaggtgaggagggataccaatgggttcacatatggggattctttaaggcagtgaaattcttctgcatgaaaagtgcaatgatggatagagggcattatgcatttattaaaacccttatgtccttacagcacacagttg

SEQ ID NO: 810651 - DNA, 586 bp, Homo sapiens
tagagcaatagtaactctcattcatttctagtgggaatgcaacatggtacaaccaaagtggaaggcagtctggcgatttttcaaaaagctaaacataaccttgtcattcaacccagcaatcaagctcctagggacttattcaatagatttgaaaacctatgcacacacaaaacttgcatgcatgcagatgtttctagcagttttaatcagaataattaagaacgagaaacaaccaatatatccttcaattggtctatggacaaactcttgtacatttataaaaggcaatattcagtaataaaaagtgagctatcaagctgtgaaaacacatatatagcatcttcagttacattaccaattaaagtaagtcaaactgaaaaggctgaattattatgtgattcccattatctgacactctggaaaaggtagagttttcatgggactggaagaggtgaggagggataccaatgggttcacatatggggattctttaaggcagtgaaattcttctgcatgawaagtgcaatgatggatagagggcattatgcatttattaaaacccttatgtccttacagcacacagttg

SEQ ID NO: 810652 - DNA, 629 bp, Homo sapiens
ttaaatgaggcactaagaattagataatattctgggtatttcatcaatttaatttaaggttgtaatgaattttggccaygatgtcaaaagcttctaccgttttttgacatgcaaattgatagccaaaaatatcttatccaagaattgtaaggttgatttttattaaacagttgtatatttatcattgttaagagatttcttaaattcactttcaatcaatgaattaactgtgggttactgatgctatcttattgaagtatgcatccttatatgccattaataatagtatgaaaaagaacagatatattgtttagtaatacatgtagagaattctaagttgctactaccaattaattttttggctgttttgagttactaaaacctattaaaagtttaaacatgctatatccagccaggaagaggcaaaagacagcttccaatgcagatctcagagggagtgtggccctgctgacaccttgatctcaggcttctaccctccagaatgaggacaataaatttctgtttgccactcagtttgcagtactttgttgcaacatccctaggagttaatgcatccgtgaagcctaagaagtatatttcttatgttttaaaattgtgactaattccag

SEQ ID NO: 810653 - DNA, 543 bp, Homo sapiens
tgggacagccattcattctgccacccaggakgtgagggagcttctaagaggtattgataaaggaacagggccttccattgctcttttctaggtgggcagcctataggaaaggggatttacaacagtggaaaggagcagtaaaagtgctgtggttaacgcgaatcacatgcccccagaacagcctgtggtaagtatcctttcaataattaatcttccagttcacattattctggtgcaccagctgatcttgctggagggcagtgtgcatatagaggaggagaatggcgggagaggagatgtgataaatgtaagaaggaagcagcaggcatcatgacaaatctggactaggaaaaaggagaggctgtcagggaatgcaaaggagaaggggcaggcaagactggccccagtgacaatgattttattctccatcacaaaggaagccaatgacagcaaatgaaatataggaaaaaatttgtatggcgatgctttggaaccccttagaaatctcagacttagtaatgtcagtttttttatttgcaatat

SEQ ID NO: 810654 - DNA, 619 bp, Homo sapiens
atgacatgtactattaatattaggtcatattaatatctttactgttaatatattaatatgctcatgctagtgatatggttgataatacccattttatagatgaggaaattgaggcactgagagtgtgtctggtgtaaggtggcaagattctatctcaggcagtcttattcttgaccagggcttttaatcattaacccatgttatgtttgtgttggagagtctcataaaaatatttcaaaagaaataactgttgccttccatttcaattaagagttctttttttctccctcctttgggcagatcttatttggggaactggggtctgcctaaattgctgttggcactactgtagttaagtagttttattagatgcagtttttattctttagggacttcccatcaaatggggatacaaagttaagaaatgcaagcttgatattgatgattgtgactgcagcttctgctcgtggcatgtgggacacaagcattttasgaagtctgcatctattgacctgaccaatatgaaaaatgatccctgggtctcagggtaaggtaagaagcgagactgggacataaagtacaaccctcagtcatctgtagtagatttaaaaatgataca

SEQ ID NO: 810655 - DNA, 495 bp, Homo sapiens
ccatccagtctttttgatatactctttctttaaatatgttaccaccactgatgaaacttcagttaaatagctgtaccatggacctgttgaatattcctcctrttcccatttttgatttattatatccactgaaggcatttttatctcccttaatgccttggttccttgataggctagaatctcattgacagccttgatttttcatcatgttttacagctctctttgtaaggagatgtaaaggccttgggagtagaactgtgaatgtatgatgctgatttaataggtcagattattcatggtggggaattcaagcaattaattaggatcctaggcaaagccatttaggtatgtggtggaaagaggggaaaagaaagccttttccatgcttctattcaaatgtttgacttgtttttctagtgggcatcctaaagacatatctcagttttcctaaatttcttaggattatagaagttggtgcctgataaagtattaaa

SEQ ID NO: 810656 - DNA, 572 bp, Homo sapiens
aacttttaccttcttgtgctctgtcaatcatgcatttctgcccagtgaccttttcttcatgtctctttactaggtgcccatttgtggatgcaaacagtgtctcattattggtttccttgctgtgtcccttgccagccttgtgtcaggctacagcctgtcagcaacttgtcacccacagttctaaaccaacactatggcttattgttttctgcacacatctcccctctgtctggcattggatggaacctcactcagtgccacgatctggcgccgttgtgcagcacaaagggagatagggttaggagatgctatgcacttagtcgcctgtcaaagattatgtctctatggggcaatttccaactaggctttgttatttggcttctagttcttccctagccccctccctcatgccctttcctcccactacttatcgcttatccacayggccacaagtgagacctgtgaaaaatatgagacaagattttaccttgaacaactttaggacttgaaagttgaaggcctaggcaataccagtggaatgaatgggaagaaaataataattgtaactaaat

SEQ ID NO: 810657 - DNA, 597 bp, Homo sapiens
tgattatgctattctgccacatgtatcattgtagtgcacaccatatgtgggaataaaaatgctaagtgattatttcttgaatagaggctaagcatttgtggattcaggtggactgacagactcacggacctctaactcctagggaaattaaattgtttcttttgctggtaaattatctcacctaccttgtgctttatataaatgtacacttgtataccaatattttaagtgtaataaaatattcagacttttaatgaataagatgattgtagcccagattatcttgttctttggcattcaggatagggtgctttatatgataaactttcttatgctaactctaagcgcaatcatctagttcttttctcccaggtaaggcttttaatgtattaaacataaatattctccattaattttgatattgtaatgcaattaatacttgatcatttttatttttcagaggagaaaacttacagcagtatactttgaaaaaacaattttcaatyacatatgtgtgcttggttttgtcccaaactgaccactttagaaaatataaatgtctttcacataaaatactggctttgcctgtgtctcata

SEQ ID NO: 810658 - DNA, 597 bp, Homo sapiens
tgattatgctattctgccacatgtatcattgtagtgcacaccatatgtgggaataaaaatgctaagtgattatttcttgaatagaggctaagcatttgtggattcaggtggactgacagactcacggacctctaactcctagggaaattaaattgtttcttttgctggtaaattatctcacctaccttgtgctttatataaatgtacacttgtataccaatattttaagtgtaataaaatattcagacttttaatgaataagatgattgtagcccagattatcttgttctttggcattcaggatagggtgctttatatgataaactttcttatgctaactctaagcgcaatcatctagttcttttctcccaggtaaggcttttaatgtattaaacataaatattctccattaattttgatattgtaatgcaattaatacttgatcatttttatttttcagaggagaaaacttacagcagtatactttgaaaaaacaattttcaattacatatgtgtgcttggttttgtcccaawctgaccactttagaaaatataaatgtctttcacataaaatactggctttgcctgtgtctcata

SEQ ID NO: 810659 - DNA, 587 bp, Homo sapiens
atactcattaagcagtcatctctttctaccctacctgtctctacgaatttgccctttctggacatttcatatacaaatggaataacacatatgtggccttttgcatctggcttctttaacttaccaaaatgttttcaaggttcatccatgttttagcacatatcaatagttcgttccttttcatagctcaataatattccattgtatgcatataacatattttatttatccattcatcagttcatataatttgtttgggttgttttgttgtgattttgatttgtgtttccataatgactaataatgttgagaaaaattttcatatacctgtaggtcatttgcataccttctttggagaactgtctactctgtttctttgcccattaaaataaaattaattatttgtcttcttgagttgtgaacactctttatatattctggatgctagacccttatcagatataggatatataaatatttcacccatcttatgggttgtcttttatcttttttttwaaaaaaatattaccttaaattctgggatacatgtacagaatgtgcaggtttgttacataggtatacatatg

SEQ ID NO: 810660 - DNA, 486 bp, Homo sapiens
cttggcagcaacccagtgacatgggggcgggggtgcagtgtttcatctgtacttgagagcaccagagcccccacaaggcctggccacatcaacatgagtttgrcaatctgctgtacaagtgaaagatgtgggctggggagtcggatggcctgtgtggagtcctggctctggcactgactagcggcaacaccttgagccaatcacttatccatgccaaagttgctttgtctgtaaaatcagaacccttcagaggattcttggaagggctgaatgaggtctcatgatgtgtttagcagggcatgtgttcagcacctggtagctgtgaactgatggagcctggaagggagagagcaggtgcagggcagaccacgcaggaggcttctcgtcaccaatgaacatttattgagtgtccacatgtgcacagctttgaacttggcgatcacagaacgcactgggggagggaagcaagggatcaagagtgtgtgt

SEQ ID NO: 810661 - DNA, 617 bp, Homo sapiens
aggtggatcccgtgtccctggattttactaatgccaggagtcacataaatactcctatatatacacagagagggcccgcgcatgcttggaaatcctcagataccaaagaacaaagtgcaggacacaacagagatactgtacatattgagaaatgtgtacatcccccaaatgcagagaaatgcacaccaacatacagagacacacctcacaaacacattcacagaaacagacacactcacactccaagaaatactaagacacccatgaagggaacatttcagacatgcacaggaccctgaactcacatggacacagacacccaggagcaggtgggccctgactcaggtgcacacagcctaacacacagtactcacacacaagctcccctaagtctaaatgccgcaagagactcccacagaaagaaaattcccccagaggcctccaaggccctgcctggaaggaagaggaagaaagtgcccgccaggcaccgaaatgctaaggcactgtaaagtgaaaatcatttccccaactccgtgggaacagcacttccattcccayctcttagggaaacagggaagtggtttaactcgttctgcaaatcaactccagatccacaa

SEQ ID NO: 810662 - DNA, 488 bp, Homo sapiens
gatccagacccatagacacagctgccagctgcgtattttctccagacatctcattgcagctgtctgaaattttccaagtccaacactgaactcaacatctcctctatccccagcaccaaccccaacctgcttctcctttgctctgtagtttcataaatgacaccaccctttttcaagttcaaaacttgctagtcatcccagaagagcgtaggtcctttccttaacccccacaagctaatccttatggagtgttgccatttctaacccttaaacatccacccacagaaggtatgtggtggagaattgaggcaggtatcccagagggcacatggcaccctgtctcagcaccttaaactaccttactcttactcatagatcagtggctctcaaagtgtggtcccttgagcccaggagkttgagaccagcctgggcaacacagccaaagagtggttcctggaccagcatcaccaacaatatctgggagcttg

SEQ ID NO: 810663 - DNA, 591 bp, Homo sapiens
gaaaaaggatagagaaataaatttagaaggatcctttaaatccaaatctgtgggttctagtttaacaaggttggccttaatcctataggtagtaacagttcttatgtgtttcttaaatagagggtagatagcaccagagttgtacttgaggaaaatttatctggtagtgatgagtaagataaattctgtctctactaaaaaatacaaaaaattagccaggcatggtggcaggcgcctgtagtcccagctacttgggaggctgaggcaggagaatggcatgaacccagttggcagagcttgcagggacctgagattgcgccactgcactccagcctgggcaacaaagagagactcgcctcaaaaaaaaaaaaaaaagagagagagagaggggctatcttttttcatatacaacgtggtcctactccaaaatttttcttcatgaggaatcctgtgaatcagatagtatcaccaccctcatctacayacacacacacacacacacacacacacacacacacagcaaattagttaccaattcttggcatttcttcttataaacaaactacatcaggcagtaccttgcttatgtta

SEQ ID NO: 810664 - DNA, 630 bp, Homo sapiens
tatgtgcttaacaatgcagatgggaagagatataaaacatattttctgatctcaatgctttttcaattaggttraggtaagcagggaacattttttaaataattaataaaatgatattgcatattccaagatctgtataaagttcctgaggacatagaagaagagaaagctctgcatactgtggtagagagaaggcacttcatgaagaagcaagaaacggagtttgtttgaagaatgggtccagttaagacagcagaggaatacttaaaatggggaaatggtaagagcaaaaggtaaagatgtgaaagcaatatggcattcaagtgacagcaaaactggtttccttctgaagtttgattcaattagaaacagagaggctttggaacctgaaatgacaaagcaagattaaacttaattttatagacaatagagagccagcaattgatcagggaaatacaacaaagtattatttgattgattgtatttttttcatgaatttagactatatgaataattaagtaggatgaatttaaaagtggggataacaattaagtgtaggcattggtttaatagtacccttaatagagctacagggcagatttgaattatagtttgaaaagctaaacaatt

SEQ ID NO: 810665 - DNA, 417 bp, Homo sapiens
aaaacaattataagccaagaattttggatccagtgaaactaagcatcatatatgaaagaaagatacaatccttttcagacaaacaaatgctgawataatttgccattaccaaaccaccactacaagaactgctaaaagaagctctaaatcttgaaacaaatactggaaacacaacaaaacagaacctgtttaaagcataaatcacacaggacctataaaacaaaaattaaagttaaaaaagcaaaaacaaataacaaaaaaacccaaagtacacaggcaacaaagagcacaatggatacaaaagtacatcacatttcaatactaacattgaatgtaagtggcctaaatgcttactaaaaacatacagaaccgcagaatggataagaactcaccaagaaactatctggtgccttcagg

SEQ ID NO: 810666 - DNA, 331 bp, Homo sapiens
aaaaagatcccccatagccaaagcaagactaagcaaaaataacaaatctggagatatcacactacctgatttcaaactatactggtttggtgactatagtcaccaaaacagcatggtactggtatamaactaggcacatagaataatggaacaaaatagagaactcagaaatcaacccaaatgcttacagccaactgacctttgacaaagcaaaaacataaagtggggaaaggacacccttttcaactaatggtgctgccataagtggctagccacatgtaggagaatgaaactggatcctcatctctcatcttatacaaaaatcaactca

SEQ ID NO: 810667 - DNA, 331 bp, Homo sapiens
aaaaagatcccccatagccaaagcaagactaagcaaaaataacaaatctggagatatcacactacctgatttcaaactatactggtttggtgactatagtcaccaaaacagcatggtactggtataaaactaggcacatagaataatggaacaaaatagagaactcagaaatcaacccaaatgcttacagccaactgacctttgacaaagcaaaaacataaagtggggaaaggacacccttttcaactaatggtgctgccmtaagtggctagccacatgtaggagaatgaaactggatcctcatctctcatcttatacaaaaatcaactca

SEQ ID NO: 810668 - DNA, 491 bp, Homo sapiens
taggatcacctcaataatgtgggatccaaaatagggagaaaaggctgggcactctggctcatgcctttaatcccggcacttcgggagcctgaggcagacagatcatttgacgtcaggagttcaagaccaacctgccaacattgtgaaaccccacccctactaaaaatacaaaaaagaaaaatgataagctgggcatggtggcacatgcttgtatcccagttacttgagagactgaggcaagagaatctcttgaacctgggagacaaaggttgcagtgagctgagtttgtgcaactgtactccagcctggatgacatggtgagactgtcccaaaaacaaaataaataaaataaggaaaagacacagaamctattatatgatagacctatcatatggtctatcttcaagaatattccatgtgctgatgaatagtatgtacattctgcagttgttgggtagaatattctgtaaatatctgttaagtccatttgt

SEQ ID NO: 810669 - DNA, 359 bp, Homo sapiens
gagtggagtttggattcctcttgtacggaaaatatgggttgttcttttaatgactactgctgaagtgggaaatgggagatggaactagggtaaatccataaagtttacagctcctaccaagaatctcccatttttcccaaatgaacattctcttagttgctgcaagctttcagttaatttccagagttctgttgattctgatagattttgcccatttttaaattatacttttaaagtgctggagtttgaygttcttaattctgccatatttgctgatgtcattccttattcaatcttgaagtcctggcagctttctcagtatatgagacagtaaatgatggttgacagagaacacttca

SEQ ID NO: 810670 - DNA, 526 bp, Homo sapiens
attatagagggtaatctccttcacttaacgtcaactgattgtggatgctaaccacatctataaaatgccttcacagcaacccctagattggtgtaggattaaacagttgtctactgtagtctagccaagttgacacatgagactaaccattacaagtgccaacatgctcactataaatttctaccaattttacacccccactattactattgtttgtgtatttctgcaaaacttcaaaactaagattgtcttttgaagttttaatcttgccaatttgatatgtcttcatgtttttgttttatctggttgcattttatacttattgccaactttaactcttcttttgtaagatgccttatctcatgctttcttgcggtatttttatgcctttttcttgcccatttacatttttgaatcatataaacgtaaagatataatgagaggaataaagatccagctttttgycctaaacatctagccaattgttctaatgattattctgtaatccatccttgctttgttgttt

SEQ ID NO: 810671 - DNA, 628 bp, Homo sapiens
gttagtgagtctatgggccccaggacaagaagtccttaaacctaaacactcaacacactttttttttttttaaaaggcttgtgcttttctgacatttaataarcctaaattcaacatgatggtggcgaagtcataaaatactttgccaccatgctaagtgttcttaaaataagacacattcttctaatgtcacattgagaaatagagaactaacatcatcatatattggctactgcatagtaaataacaaaatgttgtagagcgttaaataaaaatcatcacagtaaaaatatgcttctgtgctttttttgccttgtcctgaaacaaaattattaattagtaaaaatttgagtttttaaaatctatctggcttttcaaattttaacattaatataatgtaatataaattgatgtattttatattacattgtgagttaaacatttctaagtatttggccatgttatgaaatagtaaatagtaatatagcatgtataaaatgaaatagtcacattttctcttttgaaaatttcaaattttcataacctttttgttcaagtaggttttgtacttaaaatatatatatatttaagtacaaatatatatatatatttaggtacaaatataagt

SEQ ID NO: 810672 - DNA, 628 bp, Homo sapiens
gttagtgagtctatgggccccaggacaagaagtccttaaacctaaacactcaacacactttttttttttttaaaaggcttgtgcttttctgacatttaataaacctaaattcaacatgatggtggcgaagtcataaaatactttgccaccatgctaagtgttcttaaaataagacacattcttctaatgtcacattgagaaatagagaactaacatcatcatatattggctactgcatagtaaataacaaaatgttgtagagcgttaaataaaaatcatcacagtaaaaatatgcttctgtgctttttttgccttgtcctgaaacaaaattattaattagtaaaaatttgagtttttaaaatctatctggcttttcaaattttaacattaatataatgtaatataaattgatgtattttatattacattgtgagttaaacatttctaagtatttggccatgttatgaaatagtaaatagtaatatagcatgtataaaatgaaatagtcacattttctcttttgaaaatttcaaattwtcataacctttttgttcaagtaggttttgtacttaaaatatatatatatttaagtacaaatatatatatatatttaggtacaaatataagt

SEQ ID NO: 810673 - DNA, 510 bp, Homo sapiens
tccttccagatcatatcttttaagagatagtgccatgtggtattctgtgccatacaggtgggaggaggggrctaaaaatgtggcccgagtagataatgaaggctcatagtgatacctaactgtgttttctccaggctttgcctcaggtaaccttcatttaagcaagttaggaatattgctggaatcaaatttttaaccctaggttgtcatgctccaatgttttaagatctttttctactttatgagtctaagtttgttcataaaggcaactcaatgaaaggatgcatcttaaatggacaagtagttcctttatcattctaaaattagctttctagtttttccaaaacatttttcagtgtcaattccatgaagactgtattagtaaatcatggcataatgttattaacatgtgcttaaaggaaaaaaaaaagaagagcatgtggcttagagagtcaagacataggagaaataatgaggacataatgttcatatgccaatgacttcattgtc

SEQ ID NO: 810674 - DNA, 587 bp, Homo sapiens
gagttatatgtaatttaattttctcgtttcatagacaatctagaaaaaatagaaaaaattttcaaatatattttttaaactttctgatagatcagccatttttccatattgtttttttctagattaacttattctataaataaaagttaaaatagttttgcttctaggtgaacatcctaatattttaaagatatttcatttacttatttattactatttataaatcctattctgatttactctcataaccttctctggacaaagaatgtgtgacgtgtacagcaaggggcatgagatgggaaatgacctcgggcctgcccttgtcttatagaatgggtcagctggtaataatagtgcagtcattccatctgtaagcctgtcttgaaaggcaagtaacagaagagttaattaagtgcctggatcaattaagatcttgatctcctcgctcagcagtgctgaggcgagtgaggccaggggagctcraagctccactcctggggctgtgagttggtggatttatgacaccccctagaatagtggctgacagcatagtcacaggagccagatggccagagcttgaatttgtg

SEQ ID NO: 810675 - DNA, 605 bp, Homo sapiens
agggcaaacaatcaagtcagaggaagaggcagagagattctaacatgaatataagggttgaagtccacgggaggtggggaggcagagggaggatgattgctccatctgggacttggggaaaggtgsaatttggtagatagaaggacctacaggcatccaccaggcttgagagaaggtccacgcaccccctctttctccttcttcagaatttcttctggcttgtggggcctacctccttctacagaagttggattgagaagggtggggctgtgctcctcctgagtgtgaggagatccagaaacctggtccttaggcaaatgtctaggtctttcttcacttacatgaggcctgagctacttccccttgggaggaggtgtggcattgctccctctctttggcctggagcaggtagcctcatctggctgttccctgggaacctggtacgttcgctttccacagtgcccttcccacactggccttggttcacatatgggtaatccaggatctagctatgggttgggaaggagtcgggctgtgtagtcattggctgctttggttctaagtttcaggtctttcagctagatggagttctctccaatggctcc

SEQ ID NO: 810676 - DNA, 614 bp, Homo sapiens
ttaattttaatagacttagtaaaaataactgcaagcttgtgctatgtacaaacacaatttgtatgaatgagtcaaggaatcrttgcacataacccaagaggagtttctgcaggcaagcagaattcacagggctcgtggcaatcaggaaggactgaggaggctctcatggagtggagggatttgggattaaggctgtgaagtccagtttcactctacctttactatgtaagtactcttggaaaatgtaccaagcatcagtttgttatctgcacagagaaggtaattctaacaaaaatatcaatttaaacaaccacagcttttgtgcactgactacttctcaaggactcactaacttatttattgtaacacaagaagtagatgagtcagtggggaggaaatggggcttgaactcaaagtgcctctatctcaaagagtaatttgaatattttccatgttcatggaagcagctatagggaggtgtgaaaatctatctgtgaagagcaagcacttcttgagaagaatgggatccacatgaaaaaacagactctcatggtgttcatgaaattgaacaaagaccatgctatacacagcaggactagattgtaaatcaaaca

SEQ ID NO: 810677 - DNA, 407 bp, Homo sapiens
aagaatggacaataatgcttattgtctctggtgtgtcaggcccttcccatagcttagctcctttaaccactgcaacaaccctatgagataagtaccattattcccattctacagatgacaaaacctaggttcaggggagtaaaaagttctttgtccaaaagagtacactgagggagcagcagagccagcaatgcaaacccgggtggccacatccaggtgcagcatctccagatgctggttctttctcttcagggagattttaggctctttgagggcaggaaatgggtcttagaatgcctttggaatcctacactagcccttggcttgacgggacttgtggaatgatacaatgactcctagcttgaaaccctgyaggccttcaagtgctgaagaaaagtcaggatggg

SEQ ID NO: 810678 - DNA, 574 bp, Homo sapiens
gtaaaatggtgatgtaatcatatctactttatagaattgctgtgtggattaaattttccacgtgaaatgtatagaataatatacctatacrtttcacacaataatatacctatacatttcaggcacaagccaccacacctggccataccccttatcatctttaaaacaccttacattaaatgacaggatcttcaggaaaatatctactgaaaagtgatatatccttagccttgcacttacatggaaaactttaatctaggacaatgggcatttccttgtccccaagcagcacagaaatccagagggtccagcctgagacagatgccagggtgatggtgagagtctggggagggtattttccttcataaggttcttcccaggcctggatcagagggggcagctgtggattccccacagccaacatattgaggaagattcagccctcactagggatgttctgaggtcatgggagactttgtgaaagttggaggatgggctcagctacctcctgcttctgcttcctccatagtagtcagaccagaagaaaaaaaaagtataatgtgtgtttttcctc

SEQ ID NO: 810679 - DNA, 492 bp, Homo sapiens
gctgcaagactgagaaacagatctagccttcagaaatgatcaaaggaacagtggccatcaagtggttaggtgaggtcttctgggacatagcctggaggcttttcccccaagatgagcacatacttatcagttcatgcgctttccatatacttgacacacactatggtatttctctaaaagacgttaatgacattgcattttctgccatttagcttcttggtcccaaacatagatttgattactggcttgtcaaaagcaatctgtctgaaatgcattggctgtatatctggctagttaagaaatggacatttgagtggtcatttctacagtcaccatacaataccactgcacagctcacccaatcatttcagcctcattcatcatctatacacgatgctatgcgattgctttggagtataaggagaaacttgacagaatatatgattatttatggtctwaccagtgctctagcctagctgcttatctgtgaat

SEQ ID NO: 810680 - DNA, 462 bp, Homo sapiens
atcatcgggaggccaaggggatcctgccagccttgggaagaaacggagagcacgcagttaaatgagaattccagatacacaacaaatcattttagggataaatgtgttgcatgcagtgtttgggacacayttaactctaaaactgcatctgttgtgtatctggaatttcagatttcatttcctgtattttatctggccaccctaccttaaacggatttttatgcccaatgcgtctccaaacgggctgcccccaactccctgagctgcctttatggaaggaggagcaactcttcaggatgcgggtctgttgtgggtgatttcgtttgcccagtttagttttatttgaatcagttcacaagtacctgcgattagaaaaggcttaagatgggaggccaaggtggggaggtcgcttgagcccaggagttccagaccagctgagcaagctggcaaaacctcatccct

SEQ ID NO: 810681 - DNA, 473 bp, Homo sapiens
ggcgctggtctctgggcacccggatcccccmtgcagggacctagatgtctggggactgagagagggcataaaccagcagagaactgacaggtagggcctgcacgcgcactcacccgtgcctcagcgccaggcgcacgaagcctttgcgcttctggagcgtaaggcagtgctccccggggactgaatacagggcctcgtgcgcaccccccaccatgatgaccacggcctgcccgagctggggctgggacaggatgaagtccaggctctggcggctcaccggacagagtcctgtgggcaggaggaggtggaaagtagttcccatctgcctccacggcacccccgcccctcacccagcctttagttccaagccccctacccccatctccaaggcggggaacctacccaaatgctcactgcaagtctgggcagtgctcaggctggcccctgtcctgggtgggggacttattatgggg

SEQ ID NO: 810682 - DNA, 663 bp, Homo sapiens
cccccagttgagatcccctatctcaggataaaagaatgaacagagtagsaacagatgagggctgcaaagagcagtcgtggtcctgacttcagtctgttctgccaagctttcctcaccaaacagcccctgggcgaagctggatgtggaaggcggtcactgtcagtcagtctaattgtattctccttcctccctcacaggcgccaggctcaggaaggaggagatgggagccctctatgtggaggagcccaggacccagaagccacccatcctgccctccagggaagcagcggaggttctgaaggactgcatcatggagcctcccgagagactcctgtatccccacaccagccaggaggcccccgggatgtcctgagggacagggagtccttgggactgccttggagacgcctctgtgatcactgggacaggctctgcagattctaggctgccctaggatcttctgctggtggcgatggtctctaagcaccaggaagtgggcagtggcatcccagagcagcaggggtatcaggaggtgcatgacctgtttcctgaggccccactcagcacagccatgcctcacagcacacaaatgtgccagaaggttctatatctcaagttcatttttaaggtgctgcagaaaataaccccatcatgaaaggtttc

SEQ ID NO: 810683 - DNA, 512 bp, Homo sapiens
atgtcattctggtgtttcagaaaagagcagaagcagaaaggtcactctcaatttcctcttaccctttccttcctgaagcaggacatgaaacatagaaagaattatctgacctccttgaggaaggacataaaatctagctgaccttctcctgaagtaggtcatgaggtcctcctacaagaattgccctctctatacctggaaaaaagaaggtctctgaatgcactgggaatcagagaaaaggctgaacaaacaggacttgctaagtgtattacaattagatcatacccctttgtccgattatccttctccatgactatccactctttaagaaacctaaccataaaaatacacagatttctctgcttctttgggccttcatttctgaaggctcctgtgttgtataaaacttaaattaaataaatktgtatgcttttctcttgttaagttgtcttttattatagatacctcagccattaatcttgtgatggaagaaaaagttttctcccctacat

SEQ ID NO: 810684 - DNA, 674 bp, Homo sapiens
acagatttgtctggctgtcaatccaatacgtattcttctcttctttattgttattaataaagtaatattttagtaatattagtatattactgatatccgcttaagcagtgkggaatattttctttaaatacctggctttgatattcttaactagcaaagatgtggaaattgcactaatccttccatcaattccttgattctctgttgccacaatcttaggtgaatttttactaattttgatgacaattaaatagaactaaaaataaaattagttgaccattaatgatttcctctctggaaacagagttatcctgccagcaacagagcagttagaaaccctttattcttccaacagtcactgtatccacaaatacaaagattgtatcaaccagaaaagaagaagaaaaaaagaagaaaggtgtttgtatatgtgttgactgtgctgaagctagactttgaaacatataaaaagaaagaaaaaggtgataagatagcactccatttcctggaagaacattcacattctctgacccttctcctgatagccagaaaaaactttaaacaagaagcacttgtttttaactatctttccaattttcctttgcttaaagaatgaagccaggtagaagagaatgctgacattttctgattgctttttggttttccattaagct

SEQ ID NO: 810685 - DNA, 541 bp, Homo sapiens
attccactattagagtatgtgaagtttattttttggtaaccatcctaaatttacacttayaaaagttatttcttttcaagtgaggtacaaataatttttcttaaatgtagaactttatcaccagtaatagcaagaaattttaaaataagctttgacaatgactgatattttaggttttagatcaaaggacaatttttagtattcctcaatgactgtttcttcaaccagtatcaaccacattgtcaataatgcatgaattaaaggggtggcctaataatgtttatgtgaattcactgaaagacaagaaagtataatgtctttgcatttcacaaatatttggataaacactgcccaaattcttaaagaattttatattgtgcacttttgtacaatagttttgtggaccctgcaaaagtctatgtgttattttaagcatagactaaagaacataaacaaacctttagcttccttttagcttattgtgaatggcttaacaatactaaaagagtttaagtaagttaataggtaaggtgaattaaat

SEQ ID NO: 810686 - DNA, 576 bp, Homo sapiens
tgtgattttaattttcatctttctaatgattaatgatgctgagtgcatcttttcttgtacctatagatcactttttgtatttttatgaattatttgctaaagtctgttgcctgttttttattggtttgtttaatttcttattgttgtgttttaagagttctttgtatattctgaataccagtccactattaggtacatcatttgcaaatgatttctcccagttggtaacttctctttccatttccttaatgatatctcccacagaggagatgtttttaattttgatgaagttcattttatcaagttgtttaaatgatcgtgcttttgatttcatatttaaaaaatcgttgcctaacccaaggttgcaaagctcatcctatgttttcttctagaaattttataattttagattttacatttagatctatgatgaattttgagtcttttttatatatgttgtgagatatgaaacaaagttcacatyatttcctatggctatctgaatgttccagtactgtttgatggaagactttctttctccactgaattgcttatttcacattgatgaaaaataaa

SEQ ID NO: 810687 - DNA, 639 bp, Homo sapiens
tctctcttaaatgtttggtagaattcatcagtgaggccatttaggacttgagtttttgtttgtttgtytgtttttgtttttaattcttaactacacattccaggtcttaaacatttacaaagatattcagaatttctgtttcttcttgggtgtgtgctttgataacttgtaagttttaagaaatctgttcatctatttaattcattaaaagtaatgtcaaaaatgcaattattttgcaccagcctaataaggtgtcaaattattggaaaaagttctctataatatttatttaacagtattctaatgtctgtaacttttgtaatgttgtcagttttcttagttctggtattgttaatttttaactttctttttctgatcagtcatgctggaagtatatcaattttatggatcttctcaaataatcagatttttgcttcactgatgtagctatcatctcactcttttctatttcattgctatccactctgattcttgttgtttccttttgtgtaattactttgggtttaattttttctttcttccagttttagagtggaagttgaagttattgagtcaatttttttctaatataaaggtttagtgtataaattttcctctaaataatatttaattggcatc

SEQ ID NO: 810688 - DNA, 622 bp, Homo sapiens
ttcctacaccgtcaacatattatcacaacctggtttttgatttgttatcacaatcttgtgacctttaagcagaaatttatggtgtacatcaaagcagtaataaacacataaagaaattcttctacaaagaaacagtcactttactatttctgctgaacatgtgtttagagtttacatcttggttaccttgcactagcttccatggcagacaaagccgttgtttgtatgagagtgaactgcttacattctcgcatcaacactttccctcaaaagctgaagtttccctctgcttgcctcttctgtttagactgatggaaaatatttgctacttatcttcactacagaattgtcaatacagaagtctgtaaaaagtttcattaatttattcatccttttgaatcataggagtcttttaaaaaaatcggatatatttacagagtatctaatgtttgataagttagttatgagggtctcacatttttgtagcggttaggaagagacaatgtagttaaaagtcctctatgttagagtcaagaaacttgttcttgatgctttcactaagagactcatgattttggaytaatctcaattttgagattacctataaaatgtggaaattcag

SEQ ID NO: 810689 - DNA, 508 bp, Homo sapiens
ggggttaatatccaaaatagattaggaattcaaacaactctacagcaagaaaatcatgcaaataaaaaatggacaaatgacctgaataggcatttttcaaaagaagaactacaaatggccaacagatatatttaaaaactgctcaacggcactaataatcagggaaattcaaattaaaactacaatgaatatcacctcatacttgttaggacggccactatcaaaaagatgagagaccaacctgggcaacatagtgagacctggtctctatataaaaattaaaaattagccaggtgtagtggcgtgcacctgtggtcatcccagctacttgggtggctgaagtggggggaaagcctgagcccaggaggttgaggctgcagtgagccatgaccacaccactgccttctagcctgggcaacagartgagactctgtcaggaaaaaaaaaaaaaaaaaaaaaaaaaaaaagatgagcgctaagttttggtgagaatgtggagaaaaagaaa

SEQ ID NO: 810690 - DNA, 508 bp, Homo sapiens
ggggttaatatccaaaatagattaggaattcaaacaactctacagcaagaaaatcatgcaaataaaaaatggacaaatgacctgaataggcatttttcaaaagaagaactacaaatggccaacagatatatttaaaaactgctcaacggcactaataatcagggaaattcaaattaaaactacaatgaatatcacctcatacttgttaggacggccactatcaaaaagatgagagaccaacctgggcaacatagtgagacctggtctctatataaaaattaaaaattagccaggtgtagtggcgtgcacctgtggtcatcccagctacttgggtggctgaagtggggggaaagcctgagcccaggaggttgaggctgcagtgagccatgaccacaccactgccttctagcctgggcaacagaatgagacyctgtcaggaaaaaaaaaaaaaaaaaaaaaaaaaaaaagatgagcgctaagttttggtgagaatgtggagaaaaagaaa

SEQ ID NO: 810691 - DNA, 508 bp, Homo sapiens
ggggttaatatccaaaatagattaggaattcaaacaactctacagcaagaaaatcatgcaaataaaaaatggacaaatgacctgaataggcatttttcaaaagaagaactacaaatggccaacagatatatttaaaaactgctcaacggcactaataatcagggaaattcaaattaaaactacaatgaatatcacctcatacttgttaggacggccactatcaaaaagatgagagaccaacctgggcaacatagtgagacctggtctctatataaaaattaaaaattagccaggtgtagtggcgtgcacctgtggtcatcccagctacttgggtggctgaagtggggggaaagcctgagcccaggaggttgaggctgcagtgagccatgaccacaccactgccttctagcctgggcaacagaatgagactctgtcaggaaaaaaaaaaaaaaaaaaaaaaaaaaaaagatgagcrctaagttttggtgagaatgtggagaaaaagaaa

SEQ ID NO: 810692 - DNA, 616 bp, Homo sapiens
gcccttctcctctgattacatttagggagaagcccatcctgatgcagctcccttctagagggagttccatttaggcaaaaaagcgctctccattcccatcagaaccgggctttccaaagggctctgaaattggttccactgaagaaggcagctgagctgcctccccacattccgcttgttagtcgggaacttcaaggccaaaagatttggcaggatttaaagagttgctctcaagctgtctcattctgagcacactaatgctgtctgtcttctgatggtgaagtggtgggtttggagtctccctcccctgccctttatggagccgccgatagtaccgaggactcttcacatgcagactcgaggggtccagagaatgggccagaccatcttgcctgccccatggcaacctccagaggaaagaggctcagagaggtcaggggtgtctgcagtgagctgctgatggcagagagtgagctctcggaccttctcagccsggtgtggagctcttgcctctcccgcgaacctcagtttagttatcttcatagcccacgtcctggtcgcttaacaaacattgagctcctgatcggcacataacactaagccagatatttggggg

SEQ ID NO: 810693 - DNA, 566 bp, Homo sapiens
caagtctattccacccataagtgtctcttggatttacwtgtaatctcccacgccttgcttgttctaggtgagctgatataatcacattctagatctgaagagctgaggaccagactctaggaggtcctgagacacacttgggaaggccctgactggccagtcagctggagccactgctgcaaagtgggcttgggatggtggcccgggtcggggaagacactctgcagaggtccaagtggggcaggctggatatcgcaggtccccgcagggacctgagctgtgcagaggactttacctgtcagtagaaacttcctgcagggccgcttgttctgctcatccagcaagatggcagctgcatctgcgagagaagagagggacgggattcggatggttcaggctccaccaaaggaggcaggaagtggaagccacaggggcatatggaccctttatctcgacacagctgtgcagaaagaagagtttcctgttccacggaggagtggaagcaggagatgaccacaggtgggagtcctgggcagatggatccgagctgcaggtgacctcaatcc

SEQ ID NO: 810694 - DNA, 566 bp, Homo sapiens
caagtctattccacccataagtgtctcttggatttacatgtaatctcccacgccttgcttgttctaggtgagctgatataatcacattctagatctgaagagctgaggaccagactctaggaggtcctgagacacacttgggaaggccctgactggccagtcagctggagccactgctgcaaagtgggcttgggatggtggcccgggtcggggaagacactctgcagaggtccaagtggggcaggctggatatcgcaggtccccgcagggacctgagctgtgcagaggactttacctgtcagtagaaacttcctgcagggccgcttgttctgctcatccagcaagatggcagctgcatctgcgagagaagagagggacgggattcggatggttcaggctccaccaaaggaggcaggaagtggaagccacaggggcayatggaccctttatctcgacacagctgtgcagaaagaagagtttcctgttccacggaggagtggaagcaggagatgaccacaggtgggagtcctgggcagatggatccgagctgcaggtgacctcaatcc

SEQ ID NO: 810695 - DNA, 518 bp, Homo sapiens
taaggtgggtgcagtggctcacacctgtcatcctaggactttgggastctgaggcgggcagatcacctgaggtcaggagttcaagactagcctggctaacatggtgaaactccgtctctactaaaaatacaaaattatccaggaatggtggtgcacgccagtaatcccagctacttgggaggctgaggcaggagaatcacttgaactcaggaggtggaggtggcaatgagctgagatcccacgactgcactccagcctgggcaacaagagcaaaactctgtctaaaaataataataataataactttaagatattttaattatccagtaaatacatctcttatttatcatttggttaatgttggctcaagtttcagtttcccctcatcttccattttaaaacacttagaattctaaattaaactccaaactgtcagttaaaatacatcatgaaattcattcctattttctttcatgaatttagtacattcagttagtattcaaagtgaacaaaacatt

SEQ ID NO: 810696 - DNA, 518 bp, Homo sapiens
taaggtgggtgcagtggctcacacctgtcatcctaggactttgggackctgaggcgggcagatcacctgaggtcaggagttcaagactagcctggctaacatggtgaaactccgtctctactaaaaatacaaaattatccaggaatggtggtgcacgccagtaatcccagctacttgggaggctgaggcaggagaatcacttgaactcaggaggtggaggtggcaatgagctgagatcccacgactgcactccagcctgggcaacaagagcaaaactctgtctaaaaataataataataataactttaagatattttaattatccagtaaatacatctcttatttatcatttggttaatgttggctcaagtttcagtttcccctcatcttccattttaaaacacttagaattctaaattaaactccaaactgtcagttaaaatacatcatgaaattcattcctattttctttcatgaatttagtacattcagttagtattcaaagtgaacaaaacatt

SEQ ID NO: 810697 - DNA, 659 bp, Homo sapiens
cccaaaaaccacatcatgctctataaactgttctataagtgacttactttactyaacaacataaaacagacagtattattctttttaatggctgcatagtgtttcctatagtgaatatactttacttaagcactccccatattaatggatatttaggtgaatcccattttttgctattaaaaaaaaaggctgtgcactatttttagggtggaattctagaaatgggcttgctaagtccttgattcatttgaaacttaatttgacactggttatcttgaccacagtgacatcagatcataaatatggtcataatgacatcataatgggagagacaagagatagagaacttctacaggtattcagagcattttttttcttttggacataaaatgaatccattgtacaagaatgccttctccccattctcagtgcagagacaaagctgacaagcttaaaagtgcatgtttaggattctagacttggtttaactcaaatggccttgattggatggggtccctctgcagtattaaaactgctctaattgcattcttcaagccagctgaaggctgacagcttccgctcccggctcattatcagagcacttcaaggggctccattatgagcagagcacctggtccaaatttatttcaacggcccag

SEQ ID NO: 810698 - DNA, 597 bp, Homo sapiens
aggatcccttgaggccggccaggggtttgaggctgtagtgtactatgatcgcgcctctgaaaagccactgcactccagcatgggaagcagagcaagatccatctctaaaatatttttttttaattgcccactgaagattatcatttggcatccaacaggcatcgcaaacttaacctggccaaaacagagatcctgatttccatcttcctccaaaacttcctccagccagtcaccctcatcttagcgaatgccaaccaaatccttccagttgttcaggtcaaccactctggagtcatccttggtttctttctttctctcatacctaaaccaaacctgttgaccttatctctaaaatctacccagaactctaccacttcccaccaccttcacaactaccacctggaccaggaccactggttatcttgttactggactattgcaatcccctcttaatcagtctccctgcttccacccttgtcccctccagtctactcgagacactgcagccagagtcacactatkaaagcacccattcatccatcctgtcctcctcttctcaagggccactggctccccatctcccagagagtaaatgcc

SEQ ID NO: 810699 - DNA, 507 bp, Homo sapiens
ttgagggcattattctaaatgaaaaagtcagacacagaaagacaagtactgtatgatctcacttatatgtgggaactaagaaagtcgaactcatagaaacagagggtagaattagaatggtggttgccaggggctgggggtggatggctggaggaggaataggaagccattagctaaaggatataaacttccagttataagatgaataattctggggatgtaattaatagcacagtaactatcgttaacaatactgttttacatacttgaaagctggtgagagggctggtcttcaatgttttcaccacacacacaaagataactatgtgaggtgatgggtcagttaattagctggtttctggtaatcattccacaatgtcgacatatatcaaaacatcacattgtatayggtaaatatattcacttttaattcatcagtgatacctcaataaagcggggaaaaataaaattgaaatttaaaaaaataataatttaaaaaccagccta

SEQ ID NO: 810700 - DNA, 590 bp, Homo sapiens
tttcttggtaatagaaacaagcaaatatctgggattacaaaaatttttaggacatctaattcaccagcatgcaaataacttgacattttacaactatatttatagtaccatttgaggttgcctgaataaatagtttccaatctatatgcatctctttgacatgtgagagagggctcaagaaatgccacagtgtgaaagttaccaaaatggaattttaaatgtaatgagttgcatatcatattgaagcagagtttcaacatgactgcaataaatgctccattttttctcttcccaaaatattctaaaaggtcacaccagtctaacagtgataggtaactgccaagagttaaaaaaaattggacatcctgtaaattataatttaaaaaatatatatatatgtctgaggtaggcaaaatcaaggaaaccaaagatatggaattaacacccctcaatgaccrgaacatctggctatatatttacttatttttgtcttttaattttaatttccccccaaaatagaaacatatttcaaacctcatcattttctactttaaccagccagcaggaaaccaacataaaatttaaaagaa

SEQ ID NO: 810701 - DNA, 617 bp, Homo sapiens
aagcaatccaatgaagtactaaaactaaaaaagaaaacacttgaatttcttgagaaattacttctagttaagaaaggttctaccattttattaactctttgggggcagaaaagaaaatgttataatcaaaatctattttaaaatagagaacttgaaaattataataatcatatgaattgcttctaattccttaaaagtatataattgattcaaattaatatatttgaatatgttcatttgaatataatttactcaaatgaaatatggcattctcaataaaagaaaaaataatttttaattgagatatttatttttcacatgtaattttaaataaataaaaattaactgtatttattctcataatatgatcttacatctactaataccagaagttattttaggtaaaacatttataaagttaccagatatataatctctgtagacagtgagatgctatttttgaaatatcaactgatacatttctcttgtgaaatttcccttctcctttccctttatttctatcagacagtttattccgtgttgagtgtcatgaggaagagttatrctatggtccaaagatttgaatctggtagtctctcaaattcttctttccccaa

SEQ ID NO: 810702 - DNA, 614 bp, Homo sapiens
attggaatttgatggagtagggggtgttgycaacaacactagatatttccaaatggcctcccaaggtcattgcatcaattttcaccatctctggtaaaatacaaataatcctgttgactcatgttctcaccaatgtttcctagagtcaaccttcctaaatgttgccaacctgtaagtgtggctttaatttgcatttccatggttactaatgaggctgatcatcattttatgtacttattgctgattatataccttaaaaaaaaaagtctagtgttgagtgtttaattccataagcccatgtgtgtggcttaggaaggagtgtgtgtgtgtgtgtgtgtgtgtgtgtgtgtgtgttcttcattttgaggatttttgtcaagcataactctttttgacaccttgggaaggtatttgtaagagttacatagtgctttctttggagactccaataattatttgaactaatgtaattctcaagtatgaataataacatcttgagaaaaagaaaatcatattccccaataaaatcatcataattccattacatttactgatctttcattgtattattagcctacatttgtattcgttaactctcacaagtacccagggaa

SEQ ID NO: 810703 - DNA, 616 bp, Homo sapiens
aaactatagaactataaaatattgatgaaagaaaatagagcagacacaaataaatgaaatgacatcccatgtttatgaattagaataattaacattgttaaaatatctrtactacccatagcaatctacagattcaatgcaatcctatcaaaatctcaatggcattatttacagaaatagaaaaagcaatcctaaaattcatatggaaccagaaaagactccaaatagccaaagcaattttgaataagaagaacaaagctgggggtatcacacttccagatttcaaaatatattacaaagctacagtaatcaaaacagtatggtacaggcataaaaatagatatatagaccaagggaacataattaagggcccagaaataaatccacacagctatagccaactgatttttgacaagagtgccaagaataagcgatggggaaagggcagtctcttcaatagtgttgagaaaactggatgactacacccaaaagaataaaactggatctttgtcttacacaatacagaaaaaataactcaaaatggattaaagatttaaaagtaagataagtaagatctgaaaccataaaactcctagaagaaaacataggagaaaac

SEQ ID NO: 810704 - DNA, 595 bp, Homo sapiens
ctaacgcagattagcacaaatgcattctatttactggaaagataattaaaccagagtctcccggtaacaggttagtgacatcatcttcacctacaatggacagcttcattrccgtagtctaaatttcatgccctaagcatatctttatctaattttgctttatttgaaaggattattcattgacatttccaactgctactggatgatgttgcataaatgaataaatgactgttagggacattaccactttctaattctgttttataacgtgcatactctagggtttgctgatttctacagctgggcatctgcagggatcatctcagctcaccgttttgaatactgacctctattatattagtagatgagaaagttgatggcagtgccaactccagaaacatgaattaaaagatatcagatgtggcctggtacggtggctcacgcctgtaatcccagccctttgggaggctgaggcgggcagatcactaggtcaggagtttgagaccagcctggccaacatggtgaaaccccgtctttactaaaaatacaaaaattagccgggtgtggtggtgtatgcctgtaatcccagctactc

SEQ ID NO: 810705 - DNA, 587 bp, Homo sapiens
ctctcccagtcgaaacatcagaatattgtttgagaygttgctattgtctgaatgtctgcatcctctccctccaccaaatttatattgaaatccccacctccaaggtaatggtattaagaggtggagccggctgggtgtcatggctcacacctgtagtcccagccctctgagagcctgaggcgggaagatctcttgagcccaggagttcaagaccaggctgggcaacatggtgaaaccccatctctacaaaattttaaaaatcagctgggcacggtggcatgcacctgtagtcccagctacttgggaagctgaggtgggaggatcacttgagcccaagagttcaacgctacagtgagtcatgatcacaacactgtgctccagcctaggcaacagagtgagcccctaactctacaaaaaaaattaaacaaagagcccagcatggtggttcatgcctgtagtcccagcgactgaggactgtctcaaaaaaaagaaaaagagatagagacttgggaggtgattaggttgtgagggtggcactttgatgaaggaaaggaaagtggattccagacagaccccctcatctcttc

SEQ ID NO: 810706 - DNA, 536 bp, Homo sapiens
atgcattgcaaacaaaaaatgcaattctaagccaagtaaaattcccaaccatttgaatggatcccttctcttggccaagggtgttccaaagttaaccrgaaaaactagttcagatcatgatggaaaactggagtcagatgtgccccattataccctcctcccactggaattcaggcatagctgaccagtattaacttcaacacagaaaccttaaggctggtagaacagactcttagagtctgatgggaacatatacaatccattttctctggagcctgttacctggagacttcatctgcgggataaaaccatggtctccacagctccttatcttaacccagacattcctttctattgagtctaggatttttttttttttttttttttttttaaagacagagttttgctcttgttgcccaggctggagtgcaatggcgtgatcttggattcaagtgattctgcaacctctgcctcctgggttcaagcaattctcctgcctcagcctcctgagtagctgggattacaggtatgtgccc

SEQ ID NO: 810707 - DNA, 523 bp, Homo sapiens
gaggcacaaagggtcaccttttcatagcgtggttagtgatacaataaggwaaaggaaaaagtcagagacggtttagacttgagtagacatagataagagaattaaaagggaaagctgcatttaattttagagatgattaatttgcatgagaatagttgtcacctacaagacaatctaaaggagagcattcattaactgatataagaaacaacagtcaccatctaccagaaatttttatagcccaaacaaggtacaaacggggaggacattgtgctagaagttggaatagaaaatatatgatccctgcctctttgctctctggctgggaagacaagattaattccagaaagcattctcttcactttctctccaccttctcactccctggccctttgtcagtatttctcttcttctgcactcatcactatctgccttgttttagttattcctacatgcacatgtgatattcgtgataccagactgtgaaccccatgagggcaacaactgtttcatcgccgtataa

SEQ ID NO: 810708 - DNA, 555 bp, Homo sapiens
aaaagcacttatgctggtgagtatgaaattaaagaggtgttcatgtccatatccagctcatgccaggactgactgaagaaacagcaggtgaaatttgtagaggcaaatatgtgggagaagaatgagggaaagaaaaagccatgctcaacattatgaatgaaaccaaacagtcactaagataaatttgaagtgagtgagaaaatacactcttacatgcaaagacaaatgagaattgtcagaagaagaaaaacaagtgcatacagacgaaccaaaattatggggatggggaaagacagaagacgatttgaaaatcatgtagaaagggtagaaaacgtgggagtggggtggggagacaagccctggagacagaaatggccatggagaggtgtaaatgggaatgttaattaagagccctccctcagtgaaaggaaaatcaatgatgggagaagaaatataagtatcttccttctaagatacttttgccatttgtattgtagaagagaayctcaagatcagaagggtcccagtcatttatacagcttaatgcattctgtt

SEQ ID NO: 810709 - DNA, 511 bp, Homo sapiens
taattttcagagaatattaccaatgtagcaagatttaccaataaccaatggttgcttgaagacaaaagagtttgttggaacttgctgaataaattgatgtgccatcagtgtattttttacatsatacatgctgaaaaaaatctgtccttgattctgtgcaaaggaagatgctgaaattggtgtgcatatgcagggaaagtcaagatgcagatggaaactgggattattttgttaactcaaaaaccaattggcagggtgcggtggctcacgcctgtaatcccagcactctgggaggccgaggtgggcagatcacctgaggtcagtagttcgagaccagcctggccaacatggtgatacctcgtctctacttaaaatacaaaattagcccccatggtggcgcatgcctgtaatcccagctacttgggaggctgaggcaggagaatcacttgaacccgggaggcagaggttccagtgagcagagattgcgccattccactctagtctgggcaac

SEQ ID NO: 810710 - DNA, 550 bp, Homo sapiens
tctccggtttcctggatcctgggttgggggatcccgctgcactagtgcccctcaactacaccgtgagtcaccccarcccccagcacaggccctaggagagtcccgtagggagctctaaccacagagctgatcaaagatggtgacactcaggatgctggcctctgcattttgttcacttgaatacctctttagtatttagcacgtgtctagcctggatgggcaccacagggggtacaagtgatcggagttgagcaacagacatgaagaggaaattggcaccctaaggtggtacaatttgcttgacagcagagttgatgggaggagtcagagctcatgatacgataagcgtgagattaaccttcatggagaagtcagggactagaggatgaattggatggggcagagggaaaggagggaggacgcaatgtgggacaagggtgaaacacactggggagaatgcaattgggattgaaaggcagaagactggcagagccagaggccgtggaccagctgctggtggtctgggccccacagagctgcagcccttttg

SEQ ID NO: 810711 - DNA, 452 bp, Homo sapiens
gctttaattttaagtgggagctaagctatgaggacgcaaagtcataagaatgatatagtggactatggggacttgggaagactgggagcaggggtgagggatagaagactacacactggatgctgctgygtacactgcttgagtgatggatgcaccaaatcccagatatcacacctggagaacttatccatgtcgctaaacactacctgttccccaaaaactattagaataataataatagtccgggtgcggtagctcacacctgtaatcccagcactttgggaggctgaagcagacagatcacttgaggtaagcaatagttgaagatcagcctggccaacatggtgaatcccagtctccactaaaaattcaaaaattagctgggcatggtggtgcgcgcctgtagtcccagctactcaagaggctgagcatgagaatcacttgaccccagg

SEQ ID NO: 810712 - DNA, 518 bp, Homo sapiens
cctggagaatgtgtccaacgtctcgaccatgttctccagcgcagcctctgagtctctggcccggcgggcgcaggccactgcacaagaccctgtctttcagaagctgaaaggccagttcacgacgggtgagtctccattttccttcccttccatagggagaattgtgcacgctgatttcctccggctttagtgttgaagctgattggatccttggttttctgatcactgcacggggcacactggttacactctgtttacagtgcagacttcagagtgcatagctgagaccacatgtttttctcccagggaggggtcaaggtttggagcaggagctgccaggatccaagacggggtagaaaatgcatggtttcaggccacactgccctcctgccctcctgccttcctgagacccttccttcacttgtttttggtgggaaacagggtagggtggggtggtgggagacmttgttagtgtgaaccagtaggagacagagtcctggtgagccggtgggagatgg

SEQ ID NO: 810713 - DNA, 589 bp, Homo sapiens
aaaatttctcccttatattaggatataatcttgacagctaagggggtaaacagtcacaagaggttgctcaatggaaaaatttcagtagcgctaagttcaagaaraatttaaaatgaaaggactgtatacaagcaatgtaattacctttgtcatctccttcaacttttcagtgctggaactttccagtagctaaacacacaactagaaatgaatctattttcatatttcttcatatacatttataaataggaggtggcaaaatacagattacgttgttatgtattttcccctttttgtttttctgcatatgattgcattgggaaacagaattcatatgtggcatcccggttcatctcttactttgtgaccttgaataattattttggcaatttaatgaagctcagtttcattttttacaagatagagataatatagttttgccaaatacaaagcttttaaaacatatcaaattaatttatacagaagagtactataatagtagaagtgtttacaaatgcaaaatattctttcttacataatacacatatcatattcattgttgaagtttctaaacataagttaattagag

SEQ ID NO: 810714 - DNA, 629 bp, Homo sapiens
ccaaaatcttgctgcctagagctgcctctgaactctgttccctgcattctggtgcagtgctcctcagccaccccaactgtggctcaagcaggcccggagtagcttgggatactgctatggaacagccttaagcttggcagcatccacatggtgctaattctgcaggcttacagaatgcaagcactctggaggcatagtgatctccacctagacttcaaagaatgtatccaacagcctggggacccaggcagacacttgttgcaggggtggaggcactgcagtgagtccctactagggtagtgcatgagaactgggactgtgattgagatattgcatgggaagtgggatcatgatcgataccccagaactgtagatctaccagcgttggaaagcttcaggcacccacctcccacccatgagagcagccacatgacctgcaccttgcaaagctatagggatggggctgcctgaggccttgggagtccaacccccacaccagtgtgcccaggatctgagacatggagtcaaaggaggttattctagcattttaagacttactgtttttacccygttgaattttggacttacttgggaaaagtaacccctttattgttacccattttttcctt

SEQ ID NO: 810715 - DNA, 605 bp, Homo sapiens
ccatagctcttctttccttctcttcatccacaacgttgtgagcaagggacatgattcagccctgtttgtgttacagcagctcttttagcctcaccrttcaatgggtcctgagttattgtcctgcgaccaggaagaaagtggagggtgagcaagacaaacaggagatttattgagccatagaacagctcagagaagacctgctggaggcagcttctctccacagccagggtgtaccaacgaatattaagctcctgccagaaagggtagctcctctctgtaggcaggtcgttcccacaagtgttcagctaccagcagacaaggtagctcctctctgttgctggtcatcttgttgtctgcagctctcagcgagaggaggcactagagtgggtggctccacttggcaggcaggtcgtctgcagctttcagtagggagggtagctcctgtgtgcacctggtcgttccagcatctctgtgtcctcttctttgctctggctgagattggaacttttatgggcctcagagggggaagaagcgcgtgctgattggttcatggggtgccatgggtgggcctggaaaatgtaccacaagctcccattcctgtctgc

SEQ ID NO: 810716 - DNA, 619 bp, Homo sapiens
cctgtcaatactttcatattagctcagcgtgacccatgtcaaatttccaacctamagaactataaaataaatttgtgttgttttaaaccaagtttgggacgatctgtaatagcaccaatagaaaacaaatacaactatttttatctgtaagaaaattaacagttaattctatataatcaatatacaatccatataaaatctcttctaattttctctaaaaaagccttttatagattttttcccccaaatctacgatccagtgaagtttacacattacatttggtttttggtctctttagtctcttttaatctagaacagtagccttccctttgtcctgacattgactgttctatttaggagttcaggctggctgtcttatagaatgtcccttattttggatttgtctgagtgcttttcacatgattagattcaacttagataatttcttggcaaggatacgtcataggcaatgatgtgcactttttattgcttcaaagcttgaggctcttatcaggttgtccaacttttggtgagtctaaatttgatcacttgttttagaagatgactgtgattattttattgtaaaagctatggctttgtaattgatgtcatctgtag

SEQ ID NO: 810717 - DNA, 617 bp, Homo sapiens
gcaaccctctagtaacttgacaatacaatcaaaacctcacatatcaatattcatcttgaacataaatggtataaatgcccccacccccgctccaaaagacacagaggttagctgcggtggctcatgcytgcaaacccaacactttgggaggccgaggtgggaggatcacttgagctcaggagttcaagaccagcctgagcaaaataatgaatccttatcatctctaccaaaagtttaaaaaagagccaggcatgggagcacatacctgttatcacagctacctggaagactgaggcagaaggattgcttttgcccatgagattgagactacagtgagctatgattgtaccactgcactgaagcctgggtaacatttgacaccctgtttcaaaaaaaaacaaaaaagaaaaccaaaaaacaaaagacacagagtagcaagttggataaaacaacaagactcatccttctgctgtcttcaagagacccatttcacaagtaacaacatctatagactcaaaataaagggttggagaaagatctgtcacaaaaatggaaataaaaaatgagcaggggtcattattcttaaatcagataaaatagactttaaaccaacaaca

SEQ ID NO: 810718 - DNA, 615 bp, Homo sapiens
tatggtttttagtaagatgggaggtggtacaggattttgattagaggagtgacacaatctgacttacattttagtggggtcacactggctgctgtgttgcgaatggactgagggggcacgggcagaagcagggtgccaggtgccaccatacacgcgagagaggtgggcaggcaggaggggtggggagctcctgcatggattttgaaggtgacgtcagtcttgtctgcttgctggtctgttctcagctttgaagtattttcagttgtaaactcttaagtaatactgaaaaagccagtggtttttaaaatattgtttatgcatttggggttgttaatgtgatattgaattttgataggttctttattccatgcaagttttcaaaatgctttttaaaaacaattttttaattgtaggatccttgtgaggatatttctcgtatccagaaaatcaggtatgtgtgaaaaactttcttgattatgcagactattgaaaagaaatcaaaattaagaaaatactgatttgaggttaaaacataatatygttagtattatttatgaacattaaaaactttgttctcagcaattaagtactgctctgagacttgctttgcttctt

SEQ ID NO: 810719 - DNA, 339 bp, Homo sapiens
ctcatgcccaggcccattcagttccctgggcttcagctgacagtggcaggggccttcaccatgcagggtcaggcccccagccctgtagccccagagatgacaggacaactagtgatccctcagggtgtcctgtctctcctcccacctgcagctgatggcctcacctggcttctccaccggcctcacttgttttcctcacttagagccaatagcaaagccccagcactgtctttcctgccstaggctctgttttcagggaacttgggctgcattaggcctctcgaaggaccagacctgcattgctactgtgtgtgtgtgtgtgtgtgtgtggtttgtgtg

SEQ ID NO: 810720 - DNA, 616 bp, Homo sapiens
ctttctcagcagcatctctggatcagagaggaagaggcaagaagctctgaatttttcacatcrgtaatagtggtgctgctaacccttttccagggaattccatttacagatttaaacatgacattttcttcccatatcttatctacacaaatttgtattctctactattttttcacaggcaaaccatgtaatggctttgactctgtggtaatagaatagatcatcatacttcatgaatcaacagctttaatttttccatttgctattaggacagaatttgaaaatattacttaaatttatccactacatatttcagaataaggaaatgactttctaaaatgatcctttacaaaggagtaaataaagatttgcccgccttgaaaaagatgttgatttctgctcctagtatttctaaaatgtctaataaatgtatacagatggaatattacttgaaagtatgcattgttatatttcataattaggaggccatggattgtaagatacaccactctatcgtgaacccctaagaaagagaaaatgaagcatctcaaaagagctcttctaatcttttaaaaattatatcacttttgtgcatacttgaaaaggaaaacataag

SEQ ID NO: 810721 - DNA, 630 bp, Homo sapiens
tgagaaaaggaagattggtttttatctttttatggtggagttcactttcaaaagccaaaatgaatcaccagaacaggtataaatrttaaatatatttgctaatctttatttgcattgggaaagagaaagctgactttctcactgagacccatggtataaaaacaatccaaattgtccagtgtcatttttcatgatatggtgctgttaaactcagaatctacaagctctcaagggtataatgtagatagatggtgctgatatgctcacatattttctgtgccatttgattctaaaatggacatgtatcgtttccattttatgattagcataacttttttacacattattccacttgccatgattaaagatggtttcatccccatggtctggctcttttcttgtttatctaatggttgcccagtggctactgtactgtatatgttctgagctcatctactgtgtgtcattttaaaaaatcacaaaagatattacttacttcctgcttacctctgcatttggctatttgatagaatactagcttgttcggattggtattataacagatttacatatagaatcaactcctgggctctcctccgatgcctgttcttctgggcattacacatccta

SEQ ID NO: 810722 - DNA, 582 bp, Homo sapiens
cgcacccttcctcatgtccccatatgggccatctyaatgatgcagaatttttgctccttagttcagctaaatccacgttcttgtgtcttaaccagaaaaaattaggcatgtggacacattgaagggtgagaagagcagaaagaaaacactcagcaaagtgagagggaatcctgccaatggctcccacctcacagattgaataccagccaccacatactagctgaagaggcccagctcctccccctgcacaaggcatgaacttcccatggctccaccccatcttcccagtgcaggtaggtccccagtccattccaggcatgcgcagacaagaccctgggcaggttttctcatctgatcaaaagcgtctgatgtaaacacttgtgaggtgggtcagagatcctcaagggaccctccttatcagcctcctgcatctgtcagtgtgatgaaacctgtccttcttttcagatccgtctcattttcagatggactgtcacggtatctcagtgtttatgttcaagtcgctcttattttacctaataatggccctaaagcaccgaggtactgatgctggcatattgttac

SEQ ID NO: 810723 - DNA, 634 bp, Homo sapiens
aaacaaacaaaagtccttccttcatggaagaacttacattctagtgtgtgagcagataataagtaagtaagtgtcatacacagtggctacacgtggtcatagaatacatrgctatagaagtgccagggaaaaacaggtaggaaaggggaaagggcatgttggagtagggtgttaaattaaatagggcagagaaggagggtctcactgaagtgtctttctgatttagcagtgttttgcacattggtttcaatgactgtgcaattctaggaccagatgtcaatttcataaggtagggcacggcccttcatttgtcacagccacatggctgttcctatgggtgtccattcttcactctggggtgaagagtagtgcacactcaccacaagcttcatcaacacacttcaaaatatccttgccaaagtctatgaattcctgctttccttggttggttggaaattaaaatagaaataggccaattttgattatttggggctttcatcattattaaatatttaaataaaacacctttttaaaatatcatatttatgattctttctatttctgccaaatttactttccaaagaacaaagtatgtgtgttgatgtggtctggtattttgattttttttatgtta

SEQ ID NO: 810724 - DNA, 635 bp, Homo sapiens
aaatgtaaataatataggaggtacaaaaaaaatcacaatgaaagcgtctacatatttgacatttcttccctctagggtaaattttatatcttgacacctttcaaagccaagagaacaggataaaagtgtttctctagactttattggaatcatgtagtcataatttatctaatggaaaaagaataaaatattttgcctcatataatatgggaattaatataaaatttattaaatgagaattagtaagaaagtattattaattttaacctcttttttcatgtgtctctatggcatttttaacatagagacaacaccatagaactgttttgtagcaggtgcactgccacagtttaaggaatttgtgaggtgttaaattctttcagtaatctctaaggaagttactactgtattttctgctttttaatgatgaagaccctaaggcccagagtttgttcaagttgcccaatatatcccaggtaaatagagtagagttaaaattagcatcactgcttccccaacatcaagcacatatgctttcamaactctaattttttccactacatttcctagagctgtgggtcccctccaggatttggggcactattataggatgctaagatggcccaagtatttct

SEQ ID NO: 810725 - DNA, 511 bp, Homo sapiens
aatgctgacagctcaacagtaaaaatccaattttttaaaaatgcaaaaagtatttgaataattatttctgcaaggaagatatacaaatggccagtcaatataaaaaagatgctcagcatcattagtcactagggacatgcaaatcaaagcacagtgagttacttctcgggcactgtgatgattataatcaaaaagactatagctaacatgtactggtgagaatatagagataatggaatgcttattcctcactcttgtgggaaaggaaaatagtatcctccattggaaaatggtttggcagatcttcaaaaagatgtacatagagttatgtgattcagaatttctacccccagatatatatccacgagaattgaaaacagaaatttggatacctctayactaatgttcatagtagcattattcgcaatagtcagaaagtgaaaacaacttttcaacagacgaatggaaaaataaaaggcagcatttccataaaaagaatattatttggtta

SEQ ID NO: 810726 - DNA, 585 bp, Homo sapiens
gaagattttctcccactctgtgggttgtctgtttactctgctgactattccttttgctgtgcaaaagctttttagtttaattaggtccccgctatttatctttgtgttttattgcatttgcttttgggtttttgatcatgaaatccttgcctgagccaatatctagaaggggttttccaatgttatcttctagaatttttatagtttcaggtcttaggtttaagtccttaatccatcttagtcgatttttgtataaggtgagagatgaggatccagtttctttctcctacatgtggctagccaattatcccagcaccatttgttgaaaagggtgtcctttccctactttatgttttcgagtcctccatgtctttcaatggcttcatggctcatttctttgtagtggtgtgtaacatttaatcatctggatttaccacagtttatttatccactcacctactgaaggacatcttgtttgacatttccaagttttggcaattatgaataaagctgctataaaaatccatgtgcaggacatatcraatgttgacaaatttatgaaacaacagaaacttccaaaaacta

SEQ ID NO: 810727 - DNA, 570 bp, Homo sapiens
ccgtgcctggcctaaaaatataaggttttattcagatgtttctacttttacattttgatactctgaagtttccaatttggaatttcaatagtttttagagatttaaagagatcaattttgacactgtaaaatatttgttttgctttaaaagtcaattcaaattatggccactttggtctcatatattgtgaggctggtttgttattaggggcataaagacttaggattgttatgttttgttgattaactgaaccttttactattgtgacatgacatttgttatttattgatagaattttttttttttttgctatgaaatctactttgttattaatacagccactcctgctctgctgcctttggcaactgttagcatgtatctttttccatccttacaaccaatttgtgtctttacatttaaagtgcatttcttataggcagcctgcagttgggtcttgctttcttgctgagcctgacagtctgtattatagttgaggttcttagacaagtgtcrtttataatgtgactattgatacagttatgtttgtctagtagctgtttgattgctat

SEQ ID NO: 810728 - DNA, 504 bp, Homo sapiens
atcaaaatgaaatgttttccttcatttatrtatgctttcaacattatgtatgatatagctatagtaactggttagactttgcactgtgtatctttcgtgtgtgtgtgtgtgtgtgtgtgtgtgtgtgtttttccactgtgctgcccaggctatagtgcaggggctgttcacagacgtgtctgtggctccctgctgccttaaactcctgggctcaaatgatcctcctacctcagtctttagagtgatgtgtgccaccactgccaaataattgtttttatttctttagagatagaatttggctatattgcccaggctggtcttgagttcttggtctcaagtgatcctctcacctctgcttcctgagtcactgggattacaggcatgtgccgccaagtccggctcctctgatacatattttaataccttttaaaatcattctatatctttgtattttaaatatgacttataaatagcatggaatgggattttaacaatttatccatc

SEQ ID NO: 810729 - DNA, 571 bp, Homo sapiens
ggaattgcaaagaatggaatggaatggaatggaatggaatagaatcaaayggaatggaatagaatggaatggataggaattgaattgaatggaatggcatggaatggaatcaaatggaatggaatggaatgaattcgaacggaatggaatggaatggacttgaaaggaatggactggaatggaatggaatggattcaaatttaatggaatggaatagaatggaatggaatggattcgaatttaatggaatggaatggaatggattggaatggaattgatttgaatggaatggaatcgaatggactggaatggaatggaatggaatcgagtggaatggcataaaatgcactagaatctaatggaatggaatggattaaaatggaatggaatggactcgaatggaatggactagaatggaatggactcgaaaggaagaggaatcgaacggaatggaatagaacagaatggaatcgaatcggatggcatgcaatcagatggcatgcaattggatggaacggattagaatggaatggaatgcaatcgaaattgaatggaatggactggaatggaa

SEQ ID NO: 810730 - DNA, 569 bp, Homo sapiens
aattgcaaagaatggaatggaatggaatggaatggaatagaatcaaacggaatggaatagaatggartggataggaattgaattgaatggaatggcatggaatggaatcaaatggaatggaatggaatgaattcgaacggaatggaatggaatggacttgaaaggaatggactggaatggaatggaatggattcaaatttaatggaatggaatagaatggaatggaatggattcgaatttaatggaatggaatggaatggattggaatggaattgatttgaatggaatggaatcgaatggactggaatggaatggaatggaatcgagtggaatggcataaaatgcactagaatctaatggaatggaatggattaaaatggaatggaatggactcgaatggaatggactagaatggaatggactcgaaaggaagaggaatcgaacggaatggaatagaacagaatggaatcgaatcggatggcatgcaatcagatggcatgcaattggatggaacggattagaatggaatggaatgcaatcgaaattgaatggaatggactggaatggaa

SEQ ID NO: 810731 - DNA, 588 bp, Homo sapiens
taatttacttttttattattagttttattcgstaatactctaaactacatagggtacatttttgttctagtttgttgtggttaataaaagaaactaatggatatcatagtatttgtataataatcaactggggttgaaaggagtaacattttgaaaatatctgtctcaccaatcataaccatcatgccatgtgaatctgtagataagtaaatggcagacttgaggtttgaatctacatatgagtgacttcaacgtccatacttttcctgttagatcatgttgtaatggtgggtattatcattattttaacttgccccatgttattcttaaacctattgtgtttttcttctagactatttcaaaactatacatcccagagagaaggattatttctctatgatcgatagaagatggtaagctatttgaagcctgcctattgcagtatttactgattcttcatttgttttttgttttttttttcttttttaaacacagtcttactagtctgcagcccaggctggagtgcagtggtgcgatcttgggtcactgcagcttccacctcttgggttcaagtgattctcctgcctc

SEQ ID NO: 810732 - DNA, 588 bp, Homo sapiens
taatttacttttttattattagttttattcggtaatactctaaaytacatagggtacatttttgttctagtttgttgtggttaataaaagaaactaatggatatcatagtatttgtataataatcaactggggttgaaaggagtaacattttgaaaatatctgtctcaccaatcataaccatcatgccatgtgaatctgtagataagtaaatggcagacttgaggtttgaatctacatatgagtgacttcaacgtccatacttttcctgttagatcatgttgtaatggtgggtattatcattattttaacttgccccatgttattcttaaacctattgtgtttttcttctagactatttcaaaactatacatcccagagagaaggattatttctctatgatcgatagaagatggtaagctatttgaagcctgcctattgcagtatttactgattcttcatttgttttttgttttttttttcttttttaaacacagtcttactagtctgcagcccaggctggagtgcagtggtgcgatcttgggtcactgcagcttccacctcttgggttcaagtgattctcctgcctc

SEQ ID NO: 810733 - DNA, 588 bp, Homo sapiens
taatttacttttttattattagttttattcggtaatactctaaactacatagggtacatttttgtyctagtttgttgtggttaataaaagaaactaatggatatcatagtatttgtataataatcaactggggttgaaaggagtaacattttgaaaatatctgtctcaccaatcataaccatcatgccatgtgaatctgtagataagtaaatggcagacttgaggtttgaatctacatatgagtgacttcaacgtccatacttttcctgttagatcatgttgtaatggtgggtattatcattattttaacttgccccatgttattcttaaacctattgtgtttttcttctagactatttcaaaactatacatcccagagagaaggattatttctctatgatcgatagaagatggtaagctatttgaagcctgcctattgcagtatttactgattcttcatttgttttttgttttttttttcttttttaaacacagtcttactagtctgcagcccaggctggagtgcagtggtgcgatcttgggtcactgcagcttccacctcttgggttcaagtgattctcctgcctc

SEQ ID NO: 810734 - DNA, 588 bp, Homo sapiens
taatttacttttttattattagttttattcggtaatactctaaactacatagggtacatttttgttctagtttgttgtggytaataaaagaaactaatggatatcatagtatttgtataataatcaactggggttgaaaggagtaacattttgaaaatatctgtctcaccaatcataaccatcatgccatgtgaatctgtagataagtaaatggcagacttgaggtttgaatctacatatgagtgacttcaacgtccatacttttcctgttagatcatgttgtaatggtgggtattatcattattttaacttgccccatgttattcttaaacctattgtgtttttcttctagactatttcaaaactatacatcccagagagaaggattatttctctatgatcgatagaagatggtaagctatttgaagcctgcctattgcagtatttactgattcttcatttgttttttgttttttttttcttttttaaacacagtcttactagtctgcagcccaggctggagtgcagtggtgcgatcttgggtcactgcagcttccacctcttgggttcaagtgattctcctgcctc

SEQ ID NO: 810735 - DNA, 556 bp, Homo sapiens
tttgttttcttttaagaaacgaacgtgctcatttttgtcatatctttttgctctgtaggtgtcgctacctactggatagtgttgcacagcctgtgacaaaggataagtttgctttggaatctgaagtagagtactgtctcgtgaaattaattttctcattctgaatctcattttttgtattattttcttctaaaacttagcgattgtctacctatcattgttttatgttagtattaaaacttttattagagataaccattttaaagaaataggagggcttaattttaattttttttttcactttgcaaataagaaatagttgataaatacgttgagaggtgtgatctgaaaaaaaaaaaatacatagtgacagaaaaatgttgtttgggaacgctttcccacaagagaggagatacaaattttgrtctaggcttatctcagtaagtgtttttactttgagttgtatatcatatgagtatgactaataatacctctgtttaactgaatgtttgttacatcagatgacttattatgggaatcatgaaatcaccctgtt

SEQ ID NO: 810736 - DNA, 487 bp, Homo sapiens
acttaaatgtttaagtaagacctaaaaccataataaccctagaagacaacctaggcaataccattcaggacattggcatgggcaaagacttcatgactaaaacaccaaaagcagtggcaacaaaagccaaaattgacaaacgggatctaattcaactaaggaacttgtgcagctttatttggaagtgtgcaatgaggtacgtctgagtttcaaaaatgaagaaagtaagtagtcatgctttcctgactctttggtagacagccttttaagacggtgattctgagctgttactgttttgggttttctataatactaaagcttactgccaaaatgtaaccaagagcttgaattaagtaaaaagaaatcwcccaaatgcacattaaaaacctcttacaacatatgtgcacattcatagataacatgtagaacttgattttgtgtattaaaaacttgtagaaaagttcaggcagtgcacttattgaatgca

SEQ ID NO: 810737 - DNA, 582 bp, Homo sapiens
tttattttggcagctccaggaactactggatgaagcaaagaaagctagaattgggataaaccacattgactaattacttctcttcgttactattaggcataagacatatcttttgttgatttttgttataaaaattagataaacttgaatatcaatacattggcttcattcatccaagtgctatctcatggctaaaatagctatttaatgaatatgatttagaggatagcataatcctcctaatgagacaaaaacaactataatgttgagttcatcaactgactcttaaaatggttcacaggcgtgaaccaccgtgcctggcctaaaaatataaggttttattcagatgtttctacttttacattttgatactctgaagtttccaatttggaatttcaatagtttttagagatttaaagagatcaattttgacactgtaaaatatttgttttgctttaaaagtcaattcaaattatggccactttggtctcatatattgtgaggctggtttgttattaggggcataaagasttaggattgttatgttttgttgattaactgaaccttttactattgtgacat

SEQ ID NO: 810738 - DNA, 606 bp, Homo sapiens
tgtatatatatgagatatacatatatatacacaatatgcaaatgcttttttgcattgcatctattgtgaaaagatgttgtgtttgataccatattttacaagataatttaaaagtacctatgtttaacatttaccttttttattattctaaaataatgtttccttataatagattattttaaatattaccaaaataatttagaatatataattatgccatgatccaacgttctccacccaaggtaaccaatgtaaataatttggcactgaaattctttgtacagaatgctgcacaatgaaacaatatatataaatagaaggagcacaggcaccagacaaatttcccacagtacaaaattgcaaagtgttcagctggcaaacagtacattttctattttcaaacagtttctttttgaaaaacaaattgaattaatcattcctaaacattttaaaacttctttgaaattatttaaactcatgtaccagtatcacaaggcttattttgcactctcayggaaagtaaacttatgtttggagaaggttaaatgagattttcagtttgaactgaaacgttatacttctgttttaaaaactgaatcacaaagt

SEQ ID NO: 810739 - DNA, 445 bp, Homo sapiens
attgaagaaacattttctaaaaaacaatyatttatcattgctccctagattcttataatagttacatgataatgattttgttgttgtgattctgttgttatttctagcaacaatgcttcataagaaaaatgtatgagaaaatgtgtgagatgtatgcatgtatgagaatttcaacatgaaaaccacttaagtattttatgaagaacacatattttagaataaaaacttgactacttaaagataacactttatacaactgccaaaacctaacaaaattagaataaaaaagtccttttttatttaaaaaataatattatccaaaatttctcatgttatttttcttccttttgcatctaaaataggatgaattagtcctatggccccttcttttaccacactcgtcaccaaaagttttgtatttacattcctatgtcttcaattgtat

SEQ ID NO: 810740 - DNA, 587 bp, Homo sapiens
attgtctacaactttcagaaaatgttaaataagatgatcgtagttctcattcattcgacaagagtgacatgactcattttgtttctgcttttggtagaagcacstctcatgtatcacctttggctgggctgactttccccactccctggtgaaatttccaattctcttttatggggtctaaattctgatataaatattacattcatgccaggtgcccaacaaaattctctgtaagagttatgacagaatgacaaggtaatatacagaagaacaaaaatgaccgtttaaggaagaaatctgagaagaaaaatgactcctgctagagatgtacctactaaggcatggattccttccagtcattcattagagttcgtgcttgactctagctgagaatgaaagtaatgtggaactatcacttttaatggcaaaaacagcagtgacttttacaccaatctaatggttccatcccatcattaccttagattctaaactaataggagggaggctccaaatgtcaattgttaataaacttggaaccacactggccacagaagtatcttaatgtgcttatttcctgagaataatga

SEQ ID NO: 810741 - DNA, 583 bp, Homo sapiens
atagatgcaataaaaaatgataaaggggatatcaccaccaatcccacagaaatacaaactaacatcagagaatactataaacacctctatgcatataaactagaraatctagaagaaatggataaattcctcgacactaaaattcccaagactgaaacaggaagaagttgaatctcttaatagaccagtaacaggctctgaaattgaggcaataattaatagcttaccaaccaaaaaaagtccaggacaagatggattcacagccgaattctgccagaggtacaaagaggagctggtaccattccttctgaaactattccaatcaatagaaaaagagggaatcctccataactcattttaagaggccagcatcatcctgataccaaagcctggcagagacacaacaaaaaaacagaattgtagaccaatatccctgatgaacattgacgcaaaaatcctcaataaaatattggcaaactgaatccagcagcacatcaaaaagcttatccaccatgatcaagtgggcttcattcctgggatgcaaggctggttcaatatatacaaatcaataaacgtaatccag

SEQ ID NO: 810742 - DNA, 645 bp, Homo sapiens
ggccttccatctttcttctatacctacacaacataaaatttgtgtgtgtgtgtgtgtgtgtgtgtgtgtrtgtatttagattatattgtgtatttttactgtatttagaccagcatttagttttggcaaagaaataaacaactaaactgtgtaacagtagcacatattttattttttagagcactttcaggttgatagcaaaattgagaggaaggtacacagattttccatgtacactcagatataatagaagctgtataacattttcaagaagtttatgaagcgtaaagctctaaaagcattagatattcaaatatagtcctgcaatattattttcccaagagtcacttgatataatgaaatttaacattgattgctactatgtgcagctatttagagaattgatttctcctaataatctggctgctgtaaatattttacacaaagggcagccctaatgaaaacattttaggatttttcaaacaattatatttcaagtctgagaaaagctaagtgcatttaaacttgccttttctgcccatgaatattgaaagggcaatttcgtttccatgactgtgattcattgatatctaattcatcaaataaggctttatgagtgctatttgatgtttaagggatctcatg

SEQ ID NO: 810743 - DNA, 523 bp, Homo sapiens
ctgaggctttctgtaattctcttttgagtgcttcaatattctcagaaaaatagcatgttgggtcatggactgagaataagcagaaaggagtaggtgttgaakatttgaagagaggaaagacaatttgaaatagtcatcaaggaaaatgggagagtgactagattaggaaaccacaacgtgaattctaggcatcattaaaagctcactttaaatttgtggtcatgtttaaagtgatgtggtgtgcttttctccagccagctttctactgggcagaagtagaagggagacaagttagatgtatatgtgacacacactggctttgccgagagagtacaacaaagacaaaagcttatgttccaaagtctagtcagatgggaaggaaaacaatggtacacaattttgacaataagatagtgactctggtaacaaatgtaaacttgtcaagctgacaaaaatattttcaaaataagaagcaacataataaagtggaatggacactctactagacttgcattctagtatt

SEQ ID NO: 810744 - DNA, 618 bp, Homo sapiens
tcaatatcaagctataagctaagttagatatttaagtattatttcttaaaargcttttttgggcatcttaaattaaaaaacaaatcacgtataataggagaaaatcagtgacctgccaaagttctcttcagcaaccttcaaagccagaatacaatgaagtgatttctacagagttcttagaatagtgtgtgacccaaaagattacacccagccaaagtatcagtcatagtataatggccatagacatatcagatttgaaaaatatcaaagaatatacaacctacaaacccttctcgacaaaaatttggacaaagcaatttagcaaattaagagaaagctcaaatagaaaactcaacataagcacaaagtgattgatggtaaacattaaccaaataaaatagaaaaacaaatcagaacaatgttaaaagtcatcatttctatagaagaaataagtaataaatatacagtgtatataacaatatagacacacaaattaaaggtaacaaaattcaagtaaaataaaactattttatataaaagaactcagacagtataattttattttaaaaaataatttatcagtcatttgtttatgtacagaatgacatatatgtttgc

SEQ ID NO: 810745 - DNA, 618 bp, Homo sapiens
tcaatatcaagctataagctaagttagatatttaagtattatttcttaaaaggcttttttgggcatcttaaattaaaaaacaaatcacgtataataggagaaaatcagtgacctgccaaagttctcttcagcaaccttcaaagccagaatacaatgaagtgatttctacagagttcttagaatagtgtgtgacccaaaagattacacccagccaaagtatcagtcatagtataatggccatagacatatcagatttgaaaaatatcaaagaatatacaacctacaaacccttctcgacaaaaatttggacaaagcaatttagcaaattaagagaaagctcaaatagaaaactcaacataagcacaaagtgattgatggtaaacattaaccaaataaaatagaaaaacaaatcagaacaatgttaaaagtcatcatttctatagaagaaataagtaataaatatacagtgtatataacaatatagacacacaaattaaaggtaacaaaattcaagtaaaataaaacyattttatataaaagaactcagacagtataattttattttaaaaaataatttatcagtcatttgtttatgtacagaatgacatatatgtttgc

SEQ ID NO: 810746 - DNA, 630 bp, Homo sapiens
tagtgattctattagtcattaactactcactagtctgatagcattgcataatcaaataaatagtaggtcgggcayggtgggctcacacctgtaatcccagcactttgggaagccaaggtgggtggatcacctgaggtcgagagttcaaaaccaggctggccaacatggtgaaatcccgtctctactaaaaatacaaaaattagccaggcgtgtggcgcgtgcctgtaatcccaactactcgggaggctgaggcacgagaatcgtttgaatccaggaggcagaggttgcagtgagcagagagtgttccacttcactccagcctggacaacagagtgagactttatctcaaaaaaaagaaaaaaagaaaaaagatagcaaaaatccacctgcagattacgtttgtacttttgtaatagcctgctaaaggttggtatgtgttgaaatagatagctagactagccatcaatatcagcacaaactttcttgttacttttatactaactttacaagtcctttgcctctctaattttcagctatctgtattttatggtatacacctgctaaatcaagtctgagtcctcttcaggtcaattctcctccataggcataattatctgaggagttttttat

SEQ ID NO: 810747 - DNA, 650 bp, Homo sapiens
ccaaattacataattgataacaacaaagaatttacatgaaaaaccatcaacaaaaatattagtaaacccaatttaacaatatgcataaaaagaactttsctgcattaccaaataacattaattccaagtatgttaagactgattaaacatttgaatatcattcagtgtaatccactgaatgaagaaacacctgaggctgggtaatttataaaggaaaaaggtttaactgactcacagtcccgcagggttggggaggcctcaggaaacctacagtcagtcatggcagaaggggaagcaaacacatccttcttcacaccgcagcgggaaagagaggagtgcctcttataaaacgaccagatctcgtgagaactcactcactatcacaagaacagcatgggggtaattgtccctatgattcaattacctcaccctggttccttcccacaacacctggagataatggaaactacaatttaagatgatacttaggtggagacacagtcaaaccatatcacaatcatgtcaataagctaaaaaaaaacatatgagcattttaagtggcccacaaaaataacaaaatccaaaattgattcatgatttataaaaaaaggaacgttcagcaaatgagagatagagaagtaccacagttt

SEQ ID NO: 810748 - DNA, 650 bp, Homo sapiens
ccaaattacataattgataacaacaaagaatttacatgaaaaaccatcaacaaaaatattagtaaacccaatttaacaatatgcataaaaagaactttcctgcattaccaaataacattaattccaartatgttaagactgattaaacatttgaatatcattcagtgtaatccactgaatgaagaaacacctgaggctgggtaatttataaaggaaaaaggtttaactgactcacagtcccgcagggttggggaggcctcaggaaacctacagtcagtcatggcagaaggggaagcaaacacatccttcttcacaccgcagcgggaaagagaggagtgcctcttataaaacgaccagatctcgtgagaactcactcactatcacaagaacagcatgggggtaattgtccctatgattcaattacctcaccctggttccttcccacaacacctggagataatggaaactacaatttaagatgatacttaggtggagacacagtcaaaccatatcacaatcatgtcaataagctaaaaaaaaacatatgagcattttaagtggcccacaaaaataacaaaatccaaaattgattcatgatttataaaaaaaggaacgttcagcaaatgagagatagagaagtaccacagttt

SEQ ID NO: 810749 - DNA, 499 bp, Homo sapiens
tgaatctaatacatatcaagtgcttagcacatgtctgaatcattttgcattgctataagagaacacctgaccttgggtaatttataaagaaaagaggtttaagctgggtgtagtgtctcgctccygtgatcccagcacttcgggaggccaaggtgggaggattgtatgaggttaggagtttgagaacagcctgggcaacatggcaaatccccgtctctacaaaaaacacaaaaattagttgggtgtggtggtgcacacctgtaatcccagctactcgtgaggctgagatgggaggatcaattgggcctaggaggttgacgctgcagtgagccgtaatcataccactgccctccagcttgggtgacagagtgagaccatgtctcaaacaaaaaagaaaaagaaaaggggtttatttagctcacaggtctgcaggctgtctgtacaagaagtatggcaccagcattggcttctagtgagggctttgggaggctcttactca

SEQ ID NO: 810750 - DNA, 547 bp, Homo sapiens
aagaagagagagaagagtggagaggactttgtcttgaatcttggataccacctcagccacagcakgatagtaaaccagtcagagtcatgaggccccctttttagcccctagctccctgatgatatttttaggcacaccatgggctagaagggaacacattgccttgaagaaaaagacccagtcctggaaagattcctcacctgctaaatgaagagcccctgggccctgaataaccatcaatgatacccacgtaggacattctggactttgggtgacactctgagacttgctggttttaggagagactcagtgcattctcagctgtggtggctaaggggcaagatcccttctgtttaagaaaagcagatgtaaaagtaaaggggactttttcttgcacagtaggtaccagctcagccacaggtgggtagagcatcaagtgggctattggggtcctgattccaggacttagttcttggacagcgttcttaggcctgctgtaggtcaaagaagatctcagttcctggaaggatgagtcccatcccaggca

SEQ ID NO: 810751 - DNA, 529 bp, Homo sapiens
ggctttgagtgccagctcagcctcagtataatagaacacccagtagacttctaaagcttttgactcaagtccctggctcctggatggcacctctggacccatccagggcccagggaaagtcattgccctgaaggaaaggacacagccctggctggctttgccacctgatgatttcagagctccagaaacttaaaggaacaaaggcagtagccacgaaatggttccagcaagccttgggtgagacccagtcatgtgctgattcaggtctgacacagtacagtcctagtcatggcagccacaagggtggttgaatcactccactctcaagttcaggtggttcagaacaaagagagatactctgttcgttttggagaaaataggggaaaagagcaagagtctttgtctgataatccagagaattctttcagatsttctccaagacttatcagggtggtacctctacaagtctgcaagaaccacagtattacttggcttacagtgtctcctaaagcagatatagcctcatggt

SEQ ID NO: 810752 - DNA, 639 bp, Homo sapiens
aaccgctgcatctaagtcactctccatctcctgctgtctacactgtatcagacccagtcttggaggaaggaaytgagcacatgtgggccgcgggccagccccgatggcatctgccacccccctgcaattgtcccattctgggtgaagtattagcatagcaagcccatgtgatcagatggggactctatttttcaaacagctttaccagtaagataagagaaaattttatttcctttgcctaaaacctctttccatacctcagttggttccaaacttaggcagaaaatagagaagttttgcttctgaccctcccccaccccccagctttccaccgaggccccatttgctacacttccccttcctgcatcctccagacagcccctggcacagtcctacgtggcctccgagcaccactggaaaatcacatggaggtagcaagcagtcaggcagagaggtgaagagcgctccggagctggattctgattttggctctgctgcttactagctatgagacttggagcacgctacttaatctctccgtgcctagtttcctcctctgtaaaatgggatggtaataataaggatgatggtatttatctcgcaggaatgtggtgaagaggcagtgtgttagtctaaaca

SEQ ID NO: 810753 - DNA, 507 bp, Homo sapiens
gagaaaattttatttcctttgcctaaaacctctttccatacctcagttggttccaaacttaggcagaaaatagagaagttttgcttctgaccctcccccrccccccagctttccaccgaggccccatttgctacacttccccttcctgcatcctccagacagcccctggcacagtcctacgtggcctccgagcaccactggaaaatcacatggaggtagcaagcagtcaggcagagaggtgaagagcgctccggagctggattctgattttggctctgctgcttactagctatgagacttggagcacgctacttaatctctccgtgcctagtttcctcctctgtaaaatgggatggtaataataaggatgatggtatttatctcgcaggaatgtggtgaagaggcagtgtgttagtctaaacaggcaacccttggtacctgactctgagctgtgtgagtgtgagcaggtgctgcatacagagacaggctctgcccccaaacaccaac

SEQ ID NO: 810754 - DNA, 630 bp, Homo sapiens
caggcaatctgtacccatggtgtcagtggagaccatgtggtgaatataacaagacaatcctacccaccttctcggccctagtgagaagccagaattcctacccccattcagcagtaatgaggggctcctttccccatttcaggtatcagtggaaacagaggagaaatctggactctgacttggcagtattgaggcagtgcccaccccacccccattaggacagtgtcagaaaaacagctaaaacatttaaataagatccagagttgtataatgtaatacccaaaacattcaggtttcaataagaaattacttaccagaaagctctcaaactgaatgaagaaagattatcagtagatgccaacattgagatgagaaagatgttagaattatataaaaaagattttaagcagccatcaaaaaatatttcaataagcaattatgaacactcttaaatgaaaaatacaaagctacttcaaagaaatagaaaatctcagcaaagaatcaagagatataaaaaagaactagatgaaaattttagaaktgaaaaaaaaatacaaccaccaacataaaaagctcagtggatgggctcaacattagaatagaggacagaggaaataattggtgaacttg

SEQ ID NO: 810755 - DNA, 706 bp, Homo sapiens
tggagttgcaacccaaatcactcccaggtataatttctggatttttctgaggttctgcagaaaaactttatcttcccctaggcagtcctcacttcatttagtcttaggctttctctggtctcaccatttgctttcatattccccaaattttggtgcaattgtcttctcttccattctccttgtcttttaagttaatgcctttaaaaattccctttactgatacttcagtggaattagcagagattaatagatgccatgttttcttggctttttaaaagattaaatgtaattccatgttttatatatgattttcaaaaaatgaattaccaatcgtaaattacaacagtatgcaatacacttagggtgaataagattagaagcttaaataaggttgatgttttgtactggtgatattttaaaatccaatttggtattagatgattaatatagcacttttacctaatttattagagaattagtttaatttcattaaactagacaatcctgttttattctcaacaatggaaaagtaggattatatagaagaatatattctttctttccttcctaccctatccctatggcattcagccacacatasattacacagacactttgttctcaagcataacttgggcttcaagcataacggaatattcttctgaaagagaagacagatgacagcaaagtagaaaacaagttgtct

SEQ ID NO: 810756 - DNA, 606 bp, Homo sapiens
tgggacaggacatcctgtgcctgttcccaccctgatatgttgacaggtcctttgaagggctgggcagggctgcctgcaaggtgagttttgagctgggcaccctaatctcagctgacagggactcaccacacatatcctctggtccaccattcagcccttgtggcatcatctagctagagccagatgggggaactcgactttggtggatatacaccaaagaaagagaaagaggaagcaaggctgcctggcactgagcatctcgttttatagccatctgtgaaagaagagctatcatttaatttaaatttcccttgtattcacaactttacaggaagagttaaaaatacatgaaatgtcaactatttggataaccttttgccacttcccaataaatatgatgtacatgtttccatctcaatagccagaagtgagtttcgcattctgttttggtttcagctgcctccaggcacccctttctatgaattgacaccctccacatgcatgtctgtggggcacttggcccttttccagtttttggctgctrtgaatagcaccgcaagaaatgcccctgggcaagccattttttttttttcaaatccattacac

SEQ ID NO: 810757 - DNA, 513 bp, Homo sapiens
agcttcatctgaaaagctttctgttttatcacagttcatgctaacagttctgaaatgcagagtagagcagaaactcagtttttaaaatttgttcttataggtctgattatatgtcctttgaagaytttggttgcttttcccggaatctccaattaatctgtaccgtatctacaagcatttatttttcttatatttctgtaaaatgtgtacatttttaaatgtgaaaagtcaaagcagaaacattgctataactaagccctaaccaatactgagaaccaacgaaggataacctcataattggtaaattttatattatttctacgtaacactattagactcattttaaaatgtgctactttcctgactcttttctttttctttttttctttttttttttttttttttttgagatggagtttcactgtctcccaggctggagtgcagtggcatgatctcggctcactctgagattctggttccagcggttctcctgcctcagcctcccgagtagct

SEQ ID NO: 810758 - DNA, 513 bp, Homo sapiens
agcttcatctgaaaagctttctgttttatcacagttcatgctaacagttctgaaatgcagagtagagcagaaactcagtttttaaaatttgttcttataggtctgattatatgtcctttgaagattttggttgcttttcccggaatctccaattaatctgtaccgtatctacaagcatttatttttcttatatttctgtaaaatgtgtacatttttaaatgtgaaaagtcaaagcagaaacattgctataactaagccctaaccaatactgagaaccaacgaaggataacctcataattggtaaattttatattatttctacgtaacactattagactcattttaaaatgtgctactttcctgactcttttctttttctttttttctttttytttttttttttttttgagatggagtttcactgtctcccaggctggagtgcagtggcatgatctcggctcactctgagattctggttccagcggttctcctgcctcagcctcccgagtagct

SEQ ID NO: 810759 - DNA, 650 bp, Homo sapiens
gttgatttaggatccattggcctagagatggtatcttagtctgttcatgctgccataagaaaatatcatagactggctggcttataatcaacagaaatctatttcttgcagttctggasactgggaagtccaagatcaaggcaccagcagatttggtgtctagtgagagcccgcctcttggtttgtagactgtgccttttcactgtaacctcacatcatggaaggggtaaaggagctctctgaggttccttttataacagattagtgccatgagtgctccaccatgatgacctaatcacctccctaagtccccacatctaaataacatcacattggggattaggtttcaatatataaattttggggggacataaacattcaatctagcagatagccattaagccatgggactgggtgagagtccctagggcagtggttctcaaacctaagtgcgcatcaaaatcacttggatagtttgttaaaacacaggtggattggacccgccccagagtttctaataccgttgtactttcagaggcagtatgaacattttaaggcttttgaaatatactggtaaatttctttctggagagctcatagcaatttatatttttaccagctgaatacaagaaagtctattctcagcgtac

SEQ ID NO: 810760 - DNA, 633 bp, Homo sapiens
ttgtcctcactgctacactcccaccagcaccatgacagtttacaaatgccatggcaacatcaggaagttaccctatatggtctgaaaaggggaggcatgaataatccaccccttgtttagcatataatcaagaaataaccataaaaatggacaaccagcagccctgaggaatggccattcttttattcctttactttctgaataaactcgctttccctttactctatggacttgccctgaattatttcttgcgcaagatccaagaaccctctcttggggtctggattcggacccttttcctgtaacacgttcacattgcagtctgtgagaaagagaagagggaatcagaaggccttatgaaacctgacacagggaatgaaagggaaagaagcttgaccagctgtccaatgttttaagagtcattagattttgggactgaaacaggctcctaaggaatgctgtgtctttctaggaaaaaaataatcagtctctgagatgccctyacccatcctgtttctgtccctaagaagatgccctggtgtgaagggaagagggttgtggtttatgtccccactgatgtgggatgagttggggagatttggctgctcaccaggtttgatgatgtctttcctg

SEQ ID NO: 810761 - DNA, 646 bp, Homo sapiens
ttggacttacagttccacatggctttggatgcctcacaatcatggcggaaggcaaggaggagcaagtcatatcttatgtggatggtggcaggcaaagagagagcttatgcagtcaaactcccatttttaaagccgttagatctcatgagacttatttgctatcacaagaacagcatgggaaagacttgcccccattgattcaattacctcccaaaaggttcctcacacgacacattggaattgtgggagttgcaattcaagatgagatttgggtggggacacatcatatcattctgcccctggcccctccgaaatctcatgtcctcacatttcaaaaccaatcatgtcctcccaacagtcctccaaagtcttagctcatttcagtattacctcaaaagtccacagtccaaagtctcatctgagacaagacaagtcctttctgcctatgagcctgtaaaaaaatcaaaagcaagttagttacttcctagatacaatggaggtacaggcattgggtaaatacagccattccaaatgggcgaaattggccagaacamaggggctactggccccatgcaagtccatagtccagtgggccagtcaaatcttaaagctccaaaaggatcccctttgactccatgtctcacat

SEQ ID NO: 810762 - DNA, 482 bp, Homo sapiens
tgcaatgaatggcacgatctcagctcactgcaacctctgtctcccaggttcaagtgattttcctgcctcagcctcgtgaatagctgggattacaggtgcatgccaccacacctggctcatttttttgtatttttagtagagatggggtttcaccacattggcgagactggtctcgatctcctaacctcaggtgatccacaaggctgggtaatttataaagaaaagaggtttatttggctcgaggttctgcagactgtagaagaaacatagcaccagcatctgctcaacttttggtgaggcctcaggaaacttttacttatggcagaaggaaagtagagccagtgtgtcttatggtaagagagcagagagagatgccaggctcttttagactactggctgtcatgtaaactaatagagtaagaagtcactcattacctcagcgagggaaccaagayattcatgagggatccacttccatgatc

SEQ ID NO: 810763 - DNA, 596 bp, Homo sapiens
cttcattttgtctattttattgtgcaaaataattttataattataaagttaaacttatcatttatgttatattttctgatgattatattctacttacatcattcttagacttctaagaraaatatttctcccataattgtatttgaatgcttttacagtttatttatttatttatttatttatttatttagggacagagtcttgttctgttgctccagctggagtgcaaagtatgaccatagcttactgcagccctctacctcttgggcaatcctcctgcgtgagcctcctgagtaacaaggattataggtggatacagatggctaatttttaaaatttttcataagatggggttttcctctgttgtgcaggctggtcttgaatacctggcctctagtgacgcttctacctccacctctcaaagcactaggattacaggtgtgagccaccgcacctggcctaattctccctttaataatacttgatctgtatagaatctatttttgtgtgagacgtgaggtaagactataactttcccagctcattagagcgcccccactctcacgtgcaagaacaaacaaaaaaaaccctgcaca

SEQ ID NO: 810764 - DNA, 606 bp, Homo sapiens
gtacaaaaaccatattaacaacaatggcataagatagccttgctgaagtctggtcttcaggaaaggattcggtatagacatcaattataagcaaggtgcagccgggcgcagtggctcacgccagtaatcccagcactttgggaggccgaggcgggtggatcacctgaggtcaggggttcgagaccagcctggccaacatggcgaaaacttgtctctactaaaaatacaaaaattatctgggcatgctgatgggcgcctgtaatcccagctactcaggaggctaaggtgagagaattgcttgaatccaggaggtggagattgcagtgagccgagaccgcgccactgcactccagcctggctgataagcaaaactccatctcaaaaaaaaccaaaaccaaaaccaaaaccaaaaaacaagcaaggtgcttcatggggagtgaggactttcaatcattagaagatgatttcaaccgagaatttttatattgtctctttrcaaatgcaattacagagttacaaggtaattttatgtttggctttactatatttcaggtaatcagcttgctacagtttatactttttgtagtttaagtactctgagagtca

SEQ ID NO: 810765 - DNA, 636 bp, Homo sapiens
tcttttcttgtagatacaattttttttcttttcctatatayatatatatttttttcattctctttcccctcctgcctaaaggatgcagctgtagagtatgttgggtaaggtcttttggctttgcttatagagtcttatgcacttctgccagtagattttatattgggatgtacagtttgacctacaggccagttgcgggtacttacatgcgggagcccgctatagaaagagcacgggggtatatacttgatctttgtttactgtgtggtgctctatgttgtttcaggtgaaaggctgaacagtagagtcctggtgtcctgagattcctgttttgtgggggtgccagaaacatagctatgcagaactagagcccctggcttgcctatgcatacctcaatggcaagtgcaggcaccaaccctgacaagtgtggctggatctcctgatgaagtgttctgagttctctgtggtggggtgagggggctgcactagctttttaccctatataggcaggaacttaatcttttgtcttccagtcacacccctattcctgcgctcatggctgctaactgctagctcagctgttcactatagtatatctctggaccacaacatgattgaaagccatgagaaacatc

SEQ ID NO: 810766 - DNA, 532 bp, Homo sapiens
aaaggctgccaacagttctggatcyatttttccctaagttgaaagagcacacccattacatataatgtttagcaatatgagttaagttttgtcataattcattaaagctgatttcaggggaaaaatacaagccttttttaagtcttatatttaataacaaatataacttcggattgctaaagaacattcttggcaagaggaaatgaaggagttatggaatagaagcccagtgatccaactggaggaagttttgattctaagaaagtctgggggttagcgggagtgcaggacaaccaagggcctgggtagcaacggtggggatgacgggagctatggaacctggctgaacaccgtgttctgctcagcaagaatgtgctgcttaaagaacatccagagcactgaccaaaacagatgccaggtctagacggcaggatgaggtgaaagtccaggaacagaggacaacggcaggcccctcaggcaggagagaatataagtcaaagatgcatttttaagagaacttggagaaaggggg

SEQ ID NO: 810767 - DNA, 535 bp, Homo sapiens
gagctacaaaattccacctgtcaaaaattgcatttacatgcagtttttcaggaaggtgtctgttctataaattgaggtgtaccagtgctatgtgctaaggagtaaagaagarcaagaaaagaaagcgggtcctgacttctgcccgcagcactcccaggttaagggagaggtgcaggtaaggccatgggctcggtgggaatctgcacccctacagagcggtacagggagggtggcagggtgctaagcgcttctcggcaacaggactgtgcacaaggcctctgcctcttgtcttagctgctgtccagccttccagctctgtggctgggactcaagtacctgaacagtgaatgggtgtgggggtgagccatgggcggaggcaggcgctgggagattgtgtcattagcaactgagtcaggaacagagggccagggagacagtgatagcatgggggtgcatctgaaatgctgacagaggcaaattccctcttctcttctacttaaaaggggtcggatccttcctccaaacaggcaattct

SEQ ID NO: 810768 - DNA, 538 bp, Homo sapiens
ggattcttgtttcttttttttttttttttttttttytgagacgtagtctcgctttgtcgagtgcagtggcatgatctcggctcacttcaagctctgcctcccggattcacgccattctcctgcctcagcctcccgagtagctgggactagaggtgcccgccaccacatcctgctaatttttttgtattttttttttttagtggagacagggtttcactgtgttagccaagatggtctcgatctcctgacctcatgatccacctgcctcggcctcccaaagtgctgggattacaggtgtgagccactgcgcctggccaattcagggttccacagtgcatttagaattgccccatcttgatcatcatatagtacatattgtaatgcatattttcctgaaaatttatgtagaaattggatttctgtaccatttgacccagcaatcctattactgggtatatacccaaaggattataaatcattctactgtaaagacacatgcacacgtatgtttattgcagcactattcacaatagcaaag

SEQ ID NO: 810769 - DNA, 588 bp, Homo sapiens
cctcccaccttagcctcccaaagtgctgggattacaggcatgagccactgtgcccggtctcaacacatttttmtgtagaaccccaatatgtaaaacagatacatgtggggctgctttggttgagagtggggttcagggcctgaaatcccaccccagttggtctcctatcaccgtagagtagctccccaaagaacacagcatgaaaaccatgcatccggcccaaccttcttgttttaaagatgacaaaactgagttccaaagaggctgtgcaacctgcccgacgctgggccatgagctgggtggggaggggccaggaccccggctcctgaatccccagcctttgttgtaattggccacctttgtcatatttgtgtttcccaatttaacattacagactgacccaaaaacacagaagtcaaacaaacatggtataaagccatgctgattactgagtactccaggggaggactcaggaagtggattaagtgaattttttagaggaaaggagcccagagcttcagcttgaactacaagaggctttattttgttgtcaggaagagtaaaacacttcaacaaacacattttatt

SEQ ID NO: 810770 - DNA, 670 bp, Homo sapiens
cctgtaaagataaagtatgatgatggctggccattctttcttataacccattttgagagtgggaatggggctgcgaaatcaataattgggtgttttaatgctacaaagcttggttgttcacatatccaagctggcttgaattaatctagtggggggaaaacccaagtgtttggtttcaggaaactgttcaagtttttatttagctttcatttctttgaatacgtgttttatctgattttaaaacttttcactcacactaaggtaaataccatttgtcactcaatgagaaataaagatgtattggagactaaaatattcctcatctcttcaaacccgtgctgtgttgcccagttgtttgatagctaaacctatgccaccccttcagaagcctgtaccaagacacttagaattttgctgctttaagtctgtctgattcacagctcatcttgatcttacaatatctgctaccttatagagagcaacaacagttctatcacatgtgctaagaataatactgtcgaatattgttaaactgctaggaatcaacttttggaaaagagctaaatgaatgtgtgtttcccatgttgtctcaattcagttaaagagatctttttttaaccatatgtgccagaaatgcttaccttggatccragcttgaatatgagatatt

SEQ ID NO: 810771 - DNA, 570 bp, Homo sapiens
tttgttatctatatggactggtgtcctccagagcatctccctacctgtctggactttgacatttggtccacgtaggtttttctttgttatatctttctgatctaatggacaacctctktgttgaggatcccaagatcagccccaggctggagtaatcaccaggagaacttgcagatttcagcctgtacttgtctttatgttatgattaattaattaatttatttatttattttgagatagagtcaccctggctggagtgcagtgacacaatctcagctcactgcaatctccacctcccagattcaagtgattctcctacctcagcctcctgagtagctggggttacaggaacctgccactatgtccagccatttcttgtatttttagtagagacaagttggccaagctggtcttgaactcctgacctcaggtgatccacccacctcagcctcccaaagtgctgagattacaggcgtgagccaccatgaccagcctatgtctatgatttattacagtgaaagaatacacagcaaaatcatcaaaggggaaaagcatatggggcaaagtcca

SEQ ID NO: 810772 - DNA, 564 bp, Homo sapiens
cagaatggtggtcaccaaaggcaggtaggtgggagaaatggggagatgtcggtcaaagggtacaaggttgcagttatgtaggaggagtaagtctggagctctaatgtacagcatgaagattgtagttaataatattttacttgtgtagaagaaaattgctaacagagtagattttgggtgctcttcccacaaacacaaacccacacatatgcacacacacacatacacaaaggtaataatgtaagttgatggacatgttaaattgcttgactgtaataatcattttactgcatatgtgtatttcaaaatatcatgttgtgtaccatcaacatagacaataaaaattaaaaaaaaataaaagcatggtctgcagctatgattcccaaatagctggggaaataactagaagctgaggctgggtacagtggcttatgcctgtaaagctcagcactttggaagckaagaggtaggaggagcgcttgaagctaggaatttgagaccagcctgggcaacatagtgagacccctgtctctataaaaaagaaaaatttcagctggttgtggt

SEQ ID NO: 810773 - DNA, 665 bp, Homo sapiens
gaatataggaataatcaaaagagaaaaagtctcttctctcaaagagcatattgccttgtgttggaggcaaaccataattaaacagacaagtgaatatctagtttgtcagataatgattagtcctatggagaagtataaagcaggatacaggaaatggggagggctggtaggtggggagaagagtggttattttatgtaggtaaacagggaacctgaagtaaataagggagtgagccatgctgatgtcaggagaaaagtttcagaaggtgaggagaacaaatgcagaggccacaaggtgagagaatgcttaggtgtatgaaagacagcaaggagcccagtgtatatagaccaactgaaccagaggaagaatcataggaggtgagaacggtaatgtaggggaagattacgctaaaccctgtatgttattgtaagaattttagcttttgctgggagtgagataggctactgaaggtttatgagcagaggaatcttatcagatttaggttttaaaagtgaaatgtgttggttgtagaaacagctgactttagatggataaggcagaaamagtgagattaattgcaagatcgttgcaataatctaggagttaaatggaggttgaatgaataagggagaatggaagggtgagtgagaaggaatcaggtttt

SEQ ID NO: 810774 - DNA, 549 bp, Homo sapiens
cacaaaatcctctgaattttgtggtagtcaaattaaaagagaagtgacataaaatcataataatctcattagatattaaaaggaagcatgccaactcactacaaaggccaacatttttgctgattctgatgtctacatgatgtgctgagtctgatgtctaagagagatgtcatcatataaagtatgtttaatcgtattattacatatgtagaaaatcattcatacaaccatgtttatatagccattccttatactgaccattaatgtaaatcagtaataaaagattaaatcacaattgttccatggcagttagaatgcactgtaaagcaactcgtatagctgtctagtatttttacattatgtccagataaaactcagagaactccgttctaaagagaaacattttaccatgtctcataggctattttttatagtaaatgatttcagactaattcwctcatcttttttacaacgtagagtttgtgtgtttgtttgttttcttttgctacaaaataaccatgaccatatttgtagttagtagagaagtca

SEQ ID NO: 810775 - DNA, 559 bp, Homo sapiens
cttcaaagagtttgaatagaggaagaaaaaacaaagtaggatatttctttyatctgtattcttagatgtaatttttttttttttcaatttcagaagttttagaaggaggagatgggcaaggagaaaaacatcaggaaagagagagagaaagagtcacacacataatttcacacactgctgtggctcactggcaccatggagtattcagggtgtcaattaatatgaatattatttggtgtattagataccaagtagagttaattgcaaaaggtcttaattgatcacaatgtactatttattctctctcaaattgcacagaaaatgcatgtattctcttcccctgacttttggaatgctttgatgtcactaaggataacttcagttttacaaggaagactcttgactcataaattattcattctttatataatcgcctgggaacatttctttattgtcttaaccattcattgcttagcacacagttttaagcagaggaataaagtcatatttgtaaaataggtaaactttaatttcttgggggagccataaaataatatgg

SEQ ID NO: 810776 - DNA, 347 bp, Homo sapiens
attctggggatgaagcctacttgattgcaatggataagcttttgatgtgtttctggatttggtttgmcagtatttagttgaggatttttgcactgatattcatcaaggatattcacctgaggttttctttttttattgtatctctgccaggttttagtgtcaggatgatgctcgcctcatagaatgagttagggaggagtccctcctactgaaatttttggaaccgtttcagtaggaatgctatcagctcttctttgtacctctagtggaattcagctgtgaatctgtctggtcctgggctttttttggttggtagactattttactgcctcaattttagaactcat

SEQ ID NO: 810777 - DNA, 650 bp, Homo sapiens
aagctttaagcattcctttagaaaactggtacaagacaaggatgccctctcttaccayacctattcaacgcagtattggaagttctggccagggcaattaggcaagagaaaggaataaagcgtattcaaatacgaagcaaggaagtcaaattgtgtctgtttgtgatgacgtgattctatatttagaaaaccccaccatcgcagcccaaaaactccttaagctgataagcaacttcagcaaagtctcaggatacaaaatcaatgtgcaaaaatcacaagcattcctttacacaaacaattgacaagcagacagccaaatcatgaatgaactcctattcataattgctacaaagagaataaaatacctaggaatacagctaacaagggacatggaggacttcttcaaggagaactacaaaccactgctcaaggaaatgagaggacacaaacaaatggaaaaacattccatcctcatgggtaggaagaatcaatagcgtgaaaatggccatattgaccaaagtagtttatagattcaatgttattcccatcaaactaccactaacatacttcacagaattagaaaaaaatactttaaatttcatatggaatcaaagaagaccccacatagccaagacaatcctaaggaaaaa

SEQ ID NO: 810778 - DNA, 618 bp, Homo sapiens
gcgttagctctaattccacccttactccacccttactctccctggatagacagcaatgatacagtgaaccttgytgtaattggtttttaaagagtaaaacaaaaagtataaattattcacagacttctgctccctaattattagcaatagcaaattactttgattcaacaatgtctcccagtgcctctgtcaagcacagatgttgtcggcaatgggaagccactaaaggtttttaaatggtagaatctgttataagaagataactgtgatggcaaaatgtaggctggattggatgaaaagattctaaaggcagaaaggtcatttgggaggctatcatggtaggaagggagaggaacgagggacctgagccaaaccaataaagacaatggagatggagcaactgctcacagaggtattgcgcaggacatagctacttattaaataaaggacaacaacagagtaatgatgcttcaggtttagctgacacgttccagaccatccattctcacaccctttttcccattagctgtgtcacttgccagctagcacacacacactgaaaaacagtaaatgagatggacagagatgaggattcccgtctgagcaaagctcccactc

SEQ ID NO: 810779 - DNA, 647 bp, Homo sapiens
tacatatttggtttctgcctccatttcctggcacacagctcctgaaatmcttgggatctctgaagtgatgagtgtctggtgaatatggtagtaagaggactgatggctggggggtcctgggtagcctcaggatcagggatagttgccaggagaatcaactgtgattaaagggttggaaattttagcccaatccccctacctccagggaggggagagggactgaaggttgaatagattactattgaccaatgatttaacagtgaagcctctttaaatatacctgcataaaaccccaaaaggatggccttcaaagagttttcagattgctgaacatgtgaaggtgctggaaaggtggtatgcctggagaaggcatggaaaccccatgccaattcccatgtaccttgctccatgtacctcttcatctggctgtttatccacatcccttgtaatgtcccttaaaataaagtggtaagtttaagtaagtacttccctgagttttgtgagccattctagcaaaagaccaaatatgagaaggaggtcataggaactcccaatttatagccagcctgtcagaagtactggaagtttgcacttaaaatcggcaactgaagtgaggtcagacgtgtgactaagcccttaacctgtgg

SEQ ID NO: 810780 - DNA, 614 bp, Homo sapiens
tgatagggaagccaagcttgagaaaaggactctgccaaaatatccagtcacggacagtgaatccttctgcccratttcccatattaggcccttcagctatttgcctggaaactacatggaggagtgggaaatatccacataatttgggattattggtggctctgctgcatctgtgaagctcctggagatccagtaatttgagtaacatcagaatatcccagaaaagaccacatcctgcaccttgccctggttgccaccaccatcagaggtggcttgagagaccacagttactacccatggtgtgctgctcccacccgaaaggctttgtatagggcctagggcaagagaaacccctccagctggtggcaggggcagtgcaagcagccctgccacctggctgttctgacacagctggtcttgggtgcatggagggtctccggcagatggagatgctgtctgacatctccagcgagcttgcgtaggggaattcatcactcagactttggtaatcaagtgagtgagacacagaaatgaaaagagtttagagtttattttgctggtgcggtagctctggcatggatccagtatggagtcactctcttttttcccctaca

SEQ ID NO: 810781 - DNA, 553 bp, Homo sapiens
agccaacagtgtaggcgtgggtaggaaattactgtgtagggtgataagcaccgtgataagggtctgcattgtgctgcagaggcctggagtaaaggcacccacccagacatagacctaacatacccaagcaggtgatggccaacctgagatctggcatgtggtataggatagccccacttgtccacacatatggactcccagcccaactcccccgtgcctagggagagaggggctcagtgaagacagtggatggaatgaatgatgccagtttctcttttgtttctgaaagatttctccgtggacgatggcagccacgattcaggccatggagaggaagattgaatcgcaggctgctcacctgctttccctagaaggtcaaaccgggatggccgagaagaagctggctgattgcgagaagacagccgtggagttcgggaaccagctggagggcaagtgggccgtgctggggaccctgctgcaggagtacgggctgctgcagaggcggctggagaacgtggagaacctgctgcrcaacaggaacttctggatcctg

SEQ ID NO: 810782 - DNA, 553 bp, Homo sapiens
gtggactggacgatgtgcagrgcaaggctgataagctgcatcccaagatggcagagctctggtctagcaacagggctagcagctgcatccagcatccggcagggctgcagtgacccctggccagcacactctctgctgtgaccttgccgtgattctaggttcacaccttcccatcagtgctgtgagctcctggtgctgtcagcgatggtttcatctgtttccattagacaaagtcaggttctagttttgtgcctgtgtctgtgcctagaacagaaattggtaccaggtgtgatttgcaagcaagagatcctcagagaaatgggtatgtgggaggacactggagttgccagatctagttgtactgaagtcaataaaaatccagctggttcttcctggatgggaatccagcagaccagggctcacaacagcggaagagctacatacactggtgcctgtgattggctgcaatggagcccattgagggcaagagatccagctgccataaaacaggagaagctacaggtagggagccgattctaatgcatggagaact

SEQ ID NO: 810783 - DNA, 587 bp, Homo sapiens
agcaatcagtaacaagggtggcaacagtccaaggctagtcaggcttttgctgggcagatgtccttgcagaagtattttttgtgagtgtgtaaggttacaatggcctttgtgcaaggttgtggtttttacagtcttttgtgatagttcttgttatcaggaattcatatataaaagctctacctttgtggccttccctggctccatttgccgggttttaacacaagtgactccattttcattctgacaactttcacagtgggatattggacaagttaccattataggcaactggagcttaataccgttggggactttgtaagatgtataacatgcttgagggttatcctctccaaaagaacaaggcaacttgtgtatttctccatctactgctatcagtcatcggtagagggttgctttcgaaggttgggtcctaattatttggtactttcagcctgttayatgtttgggcagcctgagaatgccctcagacataaagttacaggtgctgacagttgaaattggggcctgcatgcacagaactgataagttctgaaggaatatcagtggggcagcaacagcatttgcta

SEQ ID NO: 810784 - DNA, 553 bp, Homo sapiens
atctataaaacccaatgcaaatgagtaaacttcatagaataaagakcatgcagtaaaattacttagagaaagaagcaatgtcttttctaagactctttttcccatgaaaataatgcgcattctagaaaacagagataagggcaataaaaataaatcccctttaattagagagaaacgctcattacatgttagtgtcattaccatatgccaccaccattctttttgctcacattcaaaacatggttcctaaaagatagttgactccttttccagttgaacagatcacacccatgtctgcctgtctcaaaaatggtattttcaacatcaacactttcacaacatttctaggatctgaccgcttcccagcatctccactcctaacacgctggtcccacagatcaggatgacagcctctcactgcccccacgtccacctggtctccctcagtgagggtggccagggcaaccccgtgaatgtccaagtcagatcctgccactcctctgcagaaatcctcagggacaaagagcccctcacacacagagttaaggcccgc

SEQ ID NO: 810785 - DNA, 527 bp, Homo sapiens
actgctctctgaacatggctcgttctaaggggcgtggctttggggtggactcaatgcagattctggsgctgcttcttagttctggggctccatggggtctgggaaccatctcattcttgtcagtaccagggggcttgtatcgtggcatctgttaatatggctacgaatatgctttgcagttcctctgcctggaatacaattttggttttcaactaacaaacgctttctcatttttcaagattcataccagatatggcctctacttagaattctctgattttcagtaatttgaaaatcaaagagcagtagaaattcccattctcaaaacatttacaatatatttgtaaatgccaaaaaagaaaagaagaaaatttcaggatgcaaaaaaaaatgcacttacagtatatggggtccacaaagcacatcacaactactgcccttctacagagacatagatgttcgtagtgtagaaatctcctttgctttgtacctgttttgctgcctgctgatagtctcactaatcttta

SEQ ID NO: 810786 - DNA, 599 bp, Homo sapiens
actaacctttttactgtctccacagttttgccttttccaaaatgycatataggtgaaatcataaagtgtgtagacttttcagattggcttctttcacttagcaatatacatttatgtttcctctacatcttttcatagcttgatagcttatttatttttagcattgaataatactctattgcctggatgtaccacagtttatttattcattcacctacctacagaatgacattttagaagcgttcaagtcttggccattatgagtgaagttgttataaacatccttgtgcacgtttttgtatcaacataaattttcgttcacttgagtaagtaccaaggagcatgattgttggatcataagttaagagtacgttcagctttataaagaactgccaaactatatttcaaagtacaatactgtaccattttgcattcctaccagcaataaataagagttcctcttgctccacatgcttgtcagcatttagcgttgtcagtgattttggattttggcctcttaatagatatgtttcattattgttttaatttgcaattctctaatcacatatgatgttgatcatcttttcatatgtttgttt

SEQ ID NO: 810787 - DNA, 599 bp, Homo sapiens
actaacctttttactgtctccacagttttgccttttccaaaatgccatataggtgaaatcataaagtgtgtagacttttcagattggcttctttcacttagcartatacatttatgtttcctctacatcttttcatagcttgatagcttatttatttttagcattgaataatactctattgcctggatgtaccacagtttatttattcattcacctacctacagaatgacattttagaagcgttcaagtcttggccattatgagtgaagttgttataaacatccttgtgcacgtttttgtatcaacataaattttcgttcacttgagtaagtaccaaggagcatgattgttggatcataagttaagagtacgttcagctttataaagaactgccaaactatatttcaaagtacaatactgtaccattttgcattcctaccagcaataaataagagttcctcttgctccacatgcttgtcagcatttagcgttgtcagtgattttggattttggcctcttaatagatatgtttcattattgttttaatttgcaattctctaatcacatatgatgttgatcatcttttcatatgtttgttt

SEQ ID NO: 810788 - DNA, 450 bp, Homo sapiens
agagactgttggtaaagtactaacatttgacattaaaggagattctggtgaatgctcagaaacaaaagagtggaactatatgaacaacctctctcagagaatrcatatattattataagcagaatggttcttgaaatataaatggtgcttctggtgaagtttcatatagaaatgaagaacatattgtacactaataagaaaggtaatcattgttataaagtggcagagaactcgaaagaattgtattcttgttgatggaaagtagaactttaactgatcaacttcaatatttaactgaggaaatttctaaacagattatcaaaagtgcagcctggtccttcctttggcctataaatgtgagaaaagagataaattgaagaggtaattgataagcaaaaggaaaacagaacttgaaaatgtggaaaacttgtagccagtccatactgcaaa

SEQ ID NO: 810789 - DNA, 606 bp, Homo sapiens
ctgcttcttgggccatatgatctgcagatccaatggtgcttgaaatgtcagtggcagataggaatgctctttggagacaataccaggcccttttttgtgaataatagcaaagatcttcagaattttggagmaatacctggccattctccacagaaaatgcctccctttgataaatagctcctggcctgctactgagcaacagtagagactgagcatttaaccatgggcctccaagttaccatgtgacctgaactgcctatcattaactaggtgttatctgacccactgagccataaagtgagtgtacacagcagcactgcatcatcaaacagaaatggtatatacataataaggcttgaacaggtacaagtatgttacatgaagaagtggcccaaatactcatagtccccactgctgatatacaagcctttctctctcagcttgcatctgtggcctcatgggaagtttcctatgcagttgacagacaaatagaagccttgggcctggtttataaatctgcataatatgcaggcatcccctgaaaatggacagctatagtactacagtcccttcctgggacatcctaaaggatagtggtgaagggaa

SEQ ID NO: 810790 - DNA, 544 bp, Homo sapiens
acctcagcaaatgggtgaacggtggagccggatcctgagatgaagaacactagagaagagattaattaatctttactttggacataagaagtttgagatggctaggctgagcatggtggctcayggctgtaatcccagcactttgggaggccaaggtgggcggatccccagaggccaggagttcgagaccagcttgtccaacatggcaaaaccccgtcactactaaaaatacaaaaattagccaggtgtggtggtgctcatctgtaatccccgctacttgggaggctgaggcacgagaattgcttgaacctgggagtcagagtctgcaatgagccgagattgtgccactgtactccagcctgggtgacagggcaagacgccgtctcaagaaaaaaaaaaaaaaaaagaagtttgagatgcctaatgaatgtacaagtaaaggtgttcctttttagataaacatttggaatggaggggccatgtgcaggctggagagataattttggtggtcttccatgtctgggtaaatttaaagctatgaaaa

SEQ ID NO: 810791 - DNA, 614 bp, Homo sapiens
tatagggtttttctatttatgctatcatgtctgcaaacagataggttttttttacccattcttatgcctcgaattgatttattgtgtctaattgcattggctaatactctaatacaatttctagtaacagggattctaacaggcatccttgccttgttataatcttagtgaaaacaccttgaatgtatttccattaaataagatgtcagcgttaggattcagacacacacatatcacatataaagaaagtatttctcattttctgttctcctgagtatgttttgttttttaaatcatgaatggatgttgaattttgtcaaaggctttttcggcatatatggagataataatatgatttttccccattaggtttataaattttgtttatgatgttaactaattttctgatactgaactactcttgtgttctccagaaaggttttgaaatgtattaaaagtaatggtgaaaactgcaattactttcacaccaacctaataaaacttaaatacagtgagttaagttaaaattttatatacaaagtgaaatattgtatcctaaaaattsctcaaaaggcctgaaaagtttatgccctcatcattagatgcatcaaaaa

SEQ ID NO: 810792 - DNA, 642 bp, Homo sapiens
ttgattttttgttttcattcatttaacaaatatctgtataggcatactgcacctccattttctttctgtctttctctctctctctctctttctttttttagagacggagtccaggctggagtgcagtggckcaatctctgctcactgcaacttccacctcctgggttcaagcgattttcctgcctcagctttccaagtagctgggactacaggcatgcgtcaccatgcctagctaatttttgtattttttagtagagatgaggtttcactatatgatggccaggctggtcccgaactcctgacctcaggtgagctgtccgccttggcctcccaaagtgctgggattacaggcatgagccatcgcacctggcctgcacctccaatttgttatgaggatcaagatgcctacatgggaagggggtgttacatgcataggtgtgtgtgtgtgataaatggaattatccatgcaaagcacccaaaataatgcctgaatcatttttttgcctcttgacaaatgctgatactagctaacttttgcatagcacttactatgagcctggtatgattctaagggctcgacatatgttagttcatttaatcctcacaacaattctgatactatttttaatcccaattaaaaat

SEQ ID NO: 810793 - DNA, 659 bp, Homo sapiens
ataaaccatgcatcaaggtaattttgatgatgtcgggatatagagattaatagatattaaaaaataggcaattctaaaatcaaagcaaatgatccttctttctatcccccggaatatctrtgcctgagagcctgagcagaatttgggggaatcaaaaatgttctccccaggccaagctcgggacctgctgatgagcccttatattcaatgtaagctctcatttactttagctgcattttagatttgtctcccaagtgacataagggagagcttttataaacacaaaacacaaatttgatgtttgaattccagcagccggccctgctctcggactcccggatttccggactcccggactcccggttcccgtttcctaaggcctgggctctgctggtctccagcccttgaggtgccacttggaatcctttacttctttctctcctctcttcactagatttcaaggccttatgaatggcggcagctcatacttcgcaggtgctttggaggcagttaattaatgctaattaagctgaaatatttaaaatttaatttgataaacattcatcaagttccccactgcatgccaaatactcttctaaacactggtaatgagggcagaaagatctagcatggtgatttacactaaatagcagttcaat

SEQ ID NO: 810794 - DNA, 559 bp, Homo sapiens
ctgctctggcatattcactgttttaagttaaaggcacttaaaaaaaaatacatagcaggtacacgaacatcactctgaccttcatgctatttcttaaaagccagagatgaaattcccatgtggaagatggcgtctctaccctggaaagaaagcagcatccttaccaaagacggaaaattgaagccaaggaaaatctgtacaagcaaatcttgtttattttttatttatttatttatttttgagacagagtttcactcttgttgcccaggctggagtgcaattgtgtgatctcggctgactgcaacctccgccttccgggttcaagcaattctcctacctcagctccctgagtagctgggattacaggcatgagcaccacgcccggctaatttttgtattattggtagagaaggggttacaccatgttgggccaggctggtcttgaacccctgacctcaggtgatctgcctaccttggcctcccaaagtgctgggattacaggtgtgagccaccgcrcccggccacaaaccttgttaaactaactcttatcttcctagtc

SEQ ID NO: 810795 - DNA, 554 bp, Homo sapiens
agtatcatgatcttgggccaacagagggagkctacggtcaattctggcatgttgaagtggccttgagaaaacaaaaaaacatggtaaatatgaaattacttcagagtgactggcaaacttggtacaagcagcccatgggtgttgcggaccctccacagtatttctggacaaattcactacttacccaaagtccttgtgagcttcgtggactttattggagactgtctatgggagagaagatggatgaggtgaggcattgggaagggttgataggtgagttaaagccttttttggcttgtctaccagtggtggtggggtctcttttggctctgccccccatgcaggacccagctgttcagatgggagtaagctcccgcccctactgcctccctattcttgctgcccatgcagagccacccgccctctgaaacgaatcttgaaacccagcctccataccctgcgtggctcacagctattgaccacagtgtttccccagccccccgatcaattttcttcttaagggaatctgaagctgttcaccttatttcttctca

SEQ ID NO: 810796 - DNA, 591 bp, Homo sapiens
catcagccactcttcctagcttcacagtaagcatggtgagcacatgctgataatcagactagcgttccaagacagcctacaaaaagatgcctattgcaatgacgtaaatagcaaatgatgtgtgcaaatactattgcttaccagcagatgttactgttagtgtggttcttcttctgacacacttataagggttgactgcttgggggctttttgtttatttaaactttcccagaaagaaggaaaaagaaaagactatgatattttgacagtctttgctttttttcccttgacaaatgtgtggtgacttccactttgatccaaatacttctgtttttattctcaatctcatctctaaaaatgattactgtattttgctattggtcttacactgactaatttctatacagcatattgatttctaattttgttaccagcaatccatcactcaacctgtaggacactcatttttctctctgaattgaagttttgtattatccaycttgaccctttattctatgtaatgttttctcctttctatatacattaggtcttaaggtctttttccatccctaaggacttatcttgtttaaa

SEQ ID NO: 810797 - DNA, 595 bp, Homo sapiens
gtggagagcctataaacagacacatggggggtgcctgtccatatggataagatagggctataaacgccctcatcttgccaaggctcttctagscctctttagggttaaggcatactccccgctgagaatttctggtctaacctgttgtctagcttcacgtcctgtttctatggattgtttgtaaccacctgttgctgcaactgttactgctgattaatatctttctagtcataggttatggaaagactgtgtttctgttttagggctctgttagaaattactgatgcacacactatattgtaaattcttatctctgtatactgtacttctgcatacagatgttatattaaagaattacttcatccccatgtgaccatctcacttcataatcaaatgactccaaatccctcactaacctaaccctgacttcactaaacttaataataaatgctggtatatccagtgcattggtggcaccataggacgagaaggcggtgatccccctggacccagctttcactatcttgtgtgtgtctattatttctcgacctgcggatcctctgcctgggaacaaagaaacagcaccgttgtactg

SEQ ID NO: 810798 - DNA, 595 bp, Homo sapiens
gtggagagcctataaacagacacatggggggtgcctgtccatatggataagatagggctataaacgccctcatcttgccaaggctcttctaggcctctttagggttaaggcatactccccgctgagaatttctggtctaacctgttgtctagcttcacgtcctgtttctatggattgtttgtaaccacctgttgctgcaactgttactgctgattaatatctttctagtcataggttatggaaagactgtgtttctgttttagggctctgttagaaattactgatgcacacactatattgtaaattcttatctctgtatactgtacttctgcatacagatgttatattaaagaattacttcatccccatgtgaccatctcacttcataatcaaatgactccaaatccctcactaacctaaccctgacttcactaaacttaataataaatgctggtatatccagtgcattggtggcaccataggacgagaaggcggtgayccccctggacccagctttcactatcttgtgtgtgtctattatttctcgacctgcggatcctctgcctgggaacaaagaaacagcaccgttgtactg

SEQ ID NO: 810799 - DNA, 605 bp, Homo sapiens
actgaatatcctgtgaaagatcaaggggatttacttgaaggaaaaaatccttatttataagaaacaataaacagaaatagatatctgagcacatctgtctatacacaaacacagacacatgctcataacaccccagcgaaacaggctgcttggccattttaaaaaaatctataaagcagaaagcttaaaataattatataatagatgtaataccaacatatacattcaaatgaacagagattaacaaccctgtctgtgaagttgtatgaaccattttaaacagaatagccacaaaggatggaaataacaaatgggcaaacatataccaggcaactaccaattacataaatatatagaaggaggtaggtggatagagagatacaatagataatagaacaacttaatagaggccgtaatcttatcataaaataaggacatctttaggctaagaaccacagcttaaaacaaaaaagcactaaaaaatgtcaaaggacacatttcataatcaaaatataatatgtatagtttttaaattatgaactatcatagcakaaatgtttgtaaagcaaaaattacaatttataaaactagaagtaaatgcacaa

SEQ ID NO: 810800 - DNA, 670 bp, Homo sapiens
taaattgaatgactagtgtccttataagaagaggaaaatttggacacagagacaagcaggagataatagggaagaagaccatgtaacagcggggcagagattggagtaatgcggstggaagccacgcaacaccaaggagtgccagcaaacaccagacgctggggagaggcaagggagggctcatccccagagccttcagatggcctatgaccctactacaccttgattttacacttctagcctgcaggtgtgccagggagtaactttatgttgtttaagccactttgtttgtgaaactctgtgacagcagccctagggaactcacacaaaaggatattaggtaattaataataaaccatactaattctaaccatttttagataagaatccatgagtaatcactctgtatttgtagataatgacaccggtgaaatctgtaatgcatctgcagaaaacacaaggcgttgataggcctccttcacaagcctgctatacagaattccttcacttttcatggtaatataatgacatatataggttatataggttcattaaggatctgtcatactatacaatggagcataagtgggaaaactaaagttttaatgtgctgtgtcggaaaagttgcaattaaaaataaagcatatgtgtccaggggtgataaacccac

SEQ ID NO: 810801 - DNA, 326 bp, Homo sapiens
agacaagataaaattaattctaattgaattcacacagcgtttgaaattggatgtaaatctgtaatatcaaattacattacatatgaattattattatatttgcattcaggaaattgtactgtgttcacttctgagtatcacttagaaagaacattagaacagataccctattttcactttctcttctcttttcctgctccttttcttcctcttttcaataacctgtcattgaaaaatctctccatcttaattatcaatatgaaagactgattctgagaaatgtagagaacctaagatttgcattttrgtggaatatagaatataat

SEQ ID NO: 810802 - DNA, 572 bp, Homo sapiens
acctatcttcaagaatatatattagaactgtgatttcctctatgtagcgtctattaatgcaatctaaataatggcccataaaaatcagcaaataattaacaatgctggtggaaatacctgtaatcaaccagatttgagattaggcagaactgagtttgagctcagattcttttcactgaagctccataaactttgtaaaatgaaggtagaggtgaagactaaacaagataataaggggaagattttgaccaagtacagtgctgtgtgctcaatagaaacataactacacagatatagcctttcttttttagtttcaaatatttcccttgcaaatatatcattgtattataaacatgttattagtaaccttagttgtaacaaagcacatttacaaatatcactattaaactgaaatagaaattttcataatatttgtctgagctcctcacttattagttattttctaaaagtacagcttaagtgttccaccrtgacaacattggtgctggtcctgatactgctggggaatagggagaagcagtatttcttttattccaccctctgtgacagtc

SEQ ID NO: 810803 - DNA, 581 bp, Homo sapiens
atttagtattacctcatatgcccactcaaataggtttatttgtcagtttcataggagttccatcagtatattttattctgtaaaaaaattactttccaacttaactactatagtgattgccaaaagtaaaatttttgaatgcagatatcaaggtgttgaaaggaaaaaaatggatatggtatttacataaactatattttgaatttggctatattttcagttttgttcaaaatgatttttatctgaatatattagctgcctactacttatatacattcaggtatattctgatggaatcagctcatataattagtagttaactcattaataacattcagcacagacttagctgctaggcatcctagcctgtagcgaggtgaggggaaagtactgagtctcattctatgccttagagaaatattgcattcggcccactaatcacacacactccagcatgaagttttcagcagggatgcaatgatatcctcaaccacctgtcatcaagtggcagtaacagmttttcatcttaaccttcttgagctttgtggtaggcagaataatggctcccaaagacgtctagg

SEQ ID NO: 810804 - DNA, 652 bp, Homo sapiens
aaaaacaaatcatgtcctttgcagccacatggatggagctggagaccactatcctaagtgaattaacatagaaacagaaaaacaaatatcacatgttctccctgctaagtgggagctaaacaytgagcacatatgaacacgaagaaggaaacagtggacaccggggcttacttgagggtggagggtagaaggaggggactattgagtattatgctgattacctgcatgacaaaattatctgcacaccaaacccctaaagcacgcaatttacccatgtaacaaaactgcacatggaccccttgaacctaaaataaaagttggaaaggaaaaaaacaaaaagattataagggagttgaaaaattcctactgcctagggatgcgcagccattgtaatgtccttgcctaatgcgttactcaggtgtctgtgaggatgctgctgtgctgccagtcttgcacaagtacagcacatacaattatgtacaatatataatacttgatcatgataataaacgatgttactggtttatatatttagtatactatacttttaatcattattttttagtgtactccttctacttataaaagaaagctaactgtaaaacagcctgaagcaggctctttcaagaggtattccagaagaaggcattgg

SEQ ID NO: 810805 - DNA, 639 bp, Homo sapiens
tgcccttgacttggcatgtgtgtgactcctaggaagtccctgaattctctgcacttcagtttccccatgaagctggttgatctctgctcccataaacctttcagaatatctctataagacttgggtatcttagaagaagactccataagaatagccctatataagccagtggttaagaaatcagactaagtttaagtccggctctgccatatattcaccacaagatgctatgactttctaaatcctggtttctgggtttccgtctctacacagcagggatagtagtaataattcttatctggcttggtgttgtggggatgcaacggaaagctctcagcacagtgccaggcataggatgggggggggcacaaagtgtgcatttatcaaacagaggccccaaagtccctcaaagcagagcctcaggggccctgcccaccatgatcctgtcaccaagagcctcagccttcacctgcagacaccagacctgcattcaccatgagtgtggggctgagtggcatgatctggggagtgcagaccacattacagtgtagggcttttctaccctagtctgytgtccgttagcaatccgcccaaatgatgggtggctcctctggtcaagatggggctccattcaggctc

SEQ ID NO: 810806 - DNA, 661 bp, Homo sapiens
aatgcagttggcagcggtaaggctgaagggcagggcagggcactggtaaggcctrctaccctatgaagcccactttacagatgagtaaactgggaagtagaggtttactggttctcccagtgacacagacaatagtcagcacaggcagaatgcagtcccagcttctgcctcacttgaaagtcagtgacttaaccttttagccacatggttctgatcatgctgtccagctgaggaagcggcatgcctcccaagtttttttttttttttgaggcggagtctcgctccgtcgcccaggctggaatgcagtggcgagatcttggctcactgcacgctctgcctcccgggttcatgccattctcctgcctcagcctcccgagtagctgggactacaggtgcctgccaccatgcccggctaatttttttgtatttttagtagagacggggtttcaccgtgttaggaaggtttcgatctcctgacctcgtgatgtgcccgcctcggcctcccaaagttctgggattacaggcgtgagccaccgcgcccagctctgcctcccgagttttaaaaatcaagttttgagggtttttttcactgagtcagggctgggtgctgtattgcagataggagaaagggaactggaagtgttacactgccttagcttct

SEQ ID NO: 810807 - DNA, 661 bp, Homo sapiens
aatgcagttggcagcggtaaggctgaagggcagggcagggcactggtaaggcctactaccctatgaagcccactttacagatgagtaaactgggaagtagaggtttactggttctcccagtgacacagacaatagtcagcacaggcagaatgcagtcccagcttctgcctcacttgaaagtcagtgacttaaccttttagccacatggttctgatcatgctgtccagctgaggaagcggcatgcctcccaagtttttttttttttttgaggcggagtctcgctccgtcgcccaggctggaatgcagtggcgagatcttggctcactgcacgctctgcctcccgggttcatgccattctcctgcctcagcctcccgagtagctgggactacaggtgcctgccaccatgcccggctaatttttttgtatttttagtagagacggggtttcaccgtgttaggaaggtttcgatctcctgacctcgtgatgtgcccgcctcggcctcccaaagttctgggattacaggcgtgagccaccgcgcccagctctgcctcccgagttttaaaaatcawgttttgagggtttttttcactgagtcagggctgggtgctgtattgcagataggagaaagggaactggaagtgttacactgccttagcttct

SEQ ID NO: 810808 - DNA, 576 bp, Homo sapiens
tggtgaaaccctgtctctactaaaaatacaaaaattagckgggcatagtgacacacgcctgtagtcccagctactcgggaggctgaggcaggagaattccttgaacccgggaggcagaggttgcagttagctgagatcatgccactgcactccagcccaggtgacagagcgagcctccatctcaaaaaaataagtaaataaataaaaaaggtacagtaaattttttaaaaacatttcactctttttgaataacacttagcttaaaacacgctgtacagctgaacaaaaatatttttctttgtattcttatgaacttttttctatttccaaaattaaattttctttttacattttaacttttttgttaaaaactaaaacacaagcacacacactagcctaggcctatacaggatcatcaatatcactgtcttctacctccatatcttgtcccagtggaagttcttcaagggccataacatgcagggaactgtcatctcctataacaaggtcttctttgggaagacctcctgaaggactctcctgaggctgtttacagttaccttttttcctgtaagt

SEQ ID NO: 810809 - DNA, 498 bp, Homo sapiens
tgagattttaatatttatcaatgaagggtttaaaaagatggagaatgagttaaaggaattaactgccacagagaaaaataaagtggtcccttgtcctacatcttggaatctctattgcgataattgctatgtgtgtggcaacttcctggaggttacttattaaaaatgtaccctgaagtaattcatatgtgtcatgctaatgccctgtccacttcttactaaaatgtatgggttaaaattaacagtaatacttttgtctggatactgaatccaactaagtagaaattactcatttctaagttgtaatgtattgtatataaatgtaacattgttataatacaattatatgtatacaatgtaaaaatgtaatatattgtgtatatgtacaaatgtacatttgttgtgmaatattgtgcaatataattgtaatattttcaagccctatatgaaaaagctgttatttgcatgactgtatcctatgaatagttatggaaatga

SEQ ID NO: 810810 - DNA, 583 bp, Homo sapiens
atggtatctcattgagattctaatttacttttccttgttgactgatgatatgggtcattttccttgtggtggtttgctgttcatgtatcttgctaggtgaagtggctgttcatattttttgcccrgtttttattgagctgttttttcattattgagttttaagagttctttatatatcctttatatacattatttatcaaatatgtgatttccaggaattttctcccatttttgtggtttggacagatgaatttatttatttatttattgtttgagacgaagtttcactcttgttgcccaggctggagtgcaatggtggggtctcagctcactgcaacctccgcctcccaagttcaagtaattctcctgcctctcagcctcctgagtagctgggattgcaggcgtgcgccaccacatccagctaatttttatattattagtagagatggggtttcaccttgttggctaggccaggtctctaactcctaacctcaggtgatccacccgccttggccccgcaaagtgctgggattacaggcgtcagccactgcgcccggctgacaggtgaattctttatccccca

SEQ ID NO: 810811 - DNA, 611 bp, Homo sapiens
tttctgtggtttcagttatctgtggtcaaccatggcctaaaaatattaaatataaaatttctgaaataarcaattcatcaactttaaattgcttgccattctgagtaccataatgaaatcttatctgtcttcctctgtactgccctggatatggatcctccctttgcccagcatatccacgctgtctacccaaactgtactattagtaacttagcagttgtctcccttaccagattcactgtcatgggattgcaatgcttgtcttaagtagcctttattttatttaataatatccccaaaatacaagagtggtgatgctggcatattgttttacttgttctattctttcattagttattgttgtttatctcttactatgccttatttatgaattaaacttcactataggtatgtatgtacaggagaaagcagtacatttagagttttaggcatccactgggggtcttggaaagtgtctccctcatgtaaaggaggactactgtgttctaccagggtgtttcctgcaggtgtagcactgacaagggtgaaatttgtagcttgtgattataaaatacagcttgaaagcattgagaccatagaaaatccacatg

SEQ ID NO: 810812 - DNA, 562 bp, Homo sapiens
tttttgttctgttaatgcgatatatcaaatgtatcaatttatgtgtgttgcactagtcttgcattttagaaatagagtcctcttgatcatggtgaatgatccttttaatgtgcagacacatggtttgctagtatttcgttgaggatttttgcatctatgtttatcattggtattgactgtaatttttttttaaacatgtacatttacatttccaactataaacttctccttagtactctttactggatcccattaattttggtgtgtttttattttcatttgtctcaaggtatttttaaaattttcttgttacttatttgactcactggttgtttaagagtgtgttaattttcttatgtatttgcggattttccagtttccttgtactattgatttctagtttcatttcattgtcattggaaaagatacttgtgtgatttcaatctttttgtatttgttaagacctgttttgtgtccttacatgtggtctatcctagaaaatattctrtgtatactataaaagaatgtatactttgctgttattgggtggattattctgtac

SEQ ID NO: 810813 - DNA, 661 bp, Homo sapiens
atattgactctttagtggaaagcatacctattgaatgaataggtctttgwtaacagcatgaagatttctggtgatacactacatgctactagaaaaagtcaaagcatggataagatactaaatattgaaactaatggcatatattaccctaggcaaggaaaaaagcaaatgaaaaattagctttttatttctgacacaaaactatcattgaatttaaatcatgttgtgatggagactatataatgaatatcttaatgacaatgcttataatgctattttgtttgattgtgtttatttgttgaattaataagcctttgagagcactctattagtatctagggttcattagaagtacattttgcaatttctgggttgtaaattctttataataatttgacatgtaaatagaatttatatagagagatttagatccaatttaacacctgttgaataaatggttctgtgatttaaaaattattttagcatatatctacttttagtttcatataattagtttgataaataaacactgaactgaattaactgtataactgaatttcattatatttatctgagctctgctgtgctgtataaatcacatagaaagttaatgtatcagatatgttttctgtttcatagttcttgtttctgtttcttgaca

SEQ ID NO: 810814 - DNA, 661 bp, Homo sapiens
atattgactctttagtggaaagcatacctattgaatgaataggtctttgttaacagcatgaagatttctggtgatacactacatgctactagaaaaagtmaaagcatggataagatactaaatattgaaactaatggcatatattaccctaggcaaggaaaaaagcaaatgaaaaattagctttttatttctgacacaaaactatcattgaatttaaatcatgttgtgatggagactatataatgaatatcttaatgacaatgcttataatgctattttgtttgattgtgtttatttgttgaattaataagcctttgagagcactctattagtatctagggttcattagaagtacattttgcaatttctgggttgtaaattctttataataatttgacatgtaaatagaatttatatagagagatttagatccaatttaacacctgttgaataaatggttctgtgatttaaaaattattttagcatatatctacttttagtttcatataattagtttgataaataaacactgaactgaattaactgtataactgaatttcattatatttatctgagctctgctgtgctgtataaatcacatagaaagttaatgtatcagatatgttttctgtttcatagttcttgtttctgtttcttgaca

SEQ ID NO: 810815 - DNA, 581 bp, Homo sapiens
ctcccaccaaacttgagcatcccagattgacttcagactgctatgctggcagcgagaatttcaagccagtggatcttagcttgttgagcyctgtgcgggtgggatctgcttagtaatagtactaggctccctggcttcagctccctttccaggagagtgaatgattctgtctcactggcattccaggtgcgactggggtacgaaaaaactaatgcagctaactcggtgtctgcccaaacagctgtgcagttttgtgcttgaaacccagggccctggtggtgtaggcacctgagggaatctcctggtgtgtgggttgcaaagatcatggtgaaagcctagtatctgggccagatagcaccgtccctcaaggcagagtccctcatggcttcccttggctaggggagggagttccccgaccccttgcacttcctgggtgaggcgatgcccccctctgcttctgctcgccctctgtgggctgcacccactgcctaaccagtcccagtgagatgaaccaggtacctcagttggaaatgcagaaataacccaccttctgtgttggtctcgctgggagctgcagacga

SEQ ID NO: 810816 - DNA, 616 bp, Homo sapiens
agccatatgccctcttgaaaatttgaggatcttttactaaaggaaaaaaaataatggttatttgggaactactagtagcctctgtcgtaarggataaaatgaagagtttggttttagttttgttaagtttgatctaagtagagagggaaagaggtgattgactattcaactagggaaaatatgggactggaaattagagagtcatcttatttagatcttacttgaaaccatgagattgaatgagattaattagagaattattttatagatagtagagaatacccaaaactgttgagatgtgggacactctaataattgatgttgagaagaaaagaatccacaccatgagaatgaagaggattggtaagtgtgctttgcaagaaaaactgtgggaagcgatatcctagaagtcatatgaacaagatgtttcaagaaagaaaagacggtcagtagtgtcagctcctgccaagaggtgagatatggtggaaacaaataattgaacattggatttaatgaggtagaggtcactggtcatcaagaagagagtgatttcaatgaaagaaaagggacaacaacatgattacagtgagttaagggaggtaaagatgagatagca

SEQ ID NO: 810817 - DNA, 631 bp, Homo sapiens
atctgtcctgaaggtacttttctcctttctctttcargttggttcagaactttgataaggggaaaatgttgatctcttgaaaacccagcactacccagctgtttctaatgtgctacaaccacagtgtaatttgaagagcagcatctaagtccaaaaattcgctgtgtatttgcagccagtctttctagagtgagcatgaagtaagtgaagtagtaaatttaaagtgtttatcatcttcattaattataaatattttagctaaggacgcatatataaattgagttaaaattcagaaattttagaaaatatacgtgtgtttaactgtacataaatatgcactttgatagatttgttacattttgtttatgtttattatttagaaagaatcacctctttttcacacaataatatgaagagtaattaaaacacaattgaagtaggtatttgctcatttcattttacattgtatataacctagatttgctccccccattttaaacatgagaccactgtttaatttttgttgttcagtgggtctcctgtattgtttttgcctctcatctgccatctttcaaaagcttcttttcatccttggtgttttgaaacttctcggtgatgtcttggggaagag

SEQ ID NO: 810818 - DNA, 602 bp, Homo sapiens
gcaatactgctcaccttgagcccagagcagctactatccccggcccctccgctggctttctgggaggycccaggaagacgtgacctcttgtcaggcactcgtgggctcccccatagctgccggggtggttcttgcccctccaaaatcacacatgctcctcggcaaggatgcgtcagctaacacaggggatcggggctctgctttccttgcgaatgattttgttgcggaggggacaccacgtggctcatgctcacacctctgacacttccatgtgtctctgatttttaaaactatgaggaaacacattaggaattgccggtgcacagcgtggacacaaagcccataaggggccttgctggtggtgctgggggaggctctggggcctggggtcctgccagagggaagcagggagcagcccaggaggatgggtggcactggggaggcacccggagactggcactgctctccccacccacatgttccctgggcagaacctcaactaagctggagacacctacagcagcagatgtgtgtccctttcgtcccgcttgacttcatttctctctcccgtccttcaggagaagacagacctcccagggtcc

SEQ ID NO: 810819 - DNA, 611 bp, Homo sapiens
ctactaagggaggcatttaaatgggtctataagccttgaaattacagcccgtgtttgtttgtttgtttgttttgagacarggttttgctgttgttgcccaggctggagtgcaatggtgccatcttggctcactgcaacctccacctcccgggtttaagcagttctcctgcctgagcctcccgagtagctgggattacaggcgcccatcaccacgcccggctaatttttgtatttttagtagagacagaatttcaccatgttggccaggctggtcttgaactcctgacctcaggtgatccacccgcctcagcctcccaaagtgctggccctgtgtttgcatttttaaagtaattactaaaaaaacaaaacaaaacaaaacaaaaaacacaaaaggtttacaggtgaaacattttatttggaatgcaaatctatatttaaacctagtttctttttctttgttctgtttgttctaatgcagtaaattactcataattttaattatacttcaattgcctggcagttgacaagcatttatttctacaggacgttgtattgaccacctcctgctctggtcttcttgcaattagtttgttctgttgggctctggaggg

SEQ ID NO: 810820 - DNA, 661 bp, Homo sapiens
ataatataatgtagcaaatttggaaatcagattccctgaccccccaccacaaagagtttgttgttgctattgctgtttgtttccttagtgatttttctggattaattctataaagtctgtgttctttttcatgttttgctgctaaaattcctgttagcttagtagtcaactaatgattgcacaggctttttttttttttttttttttgacagagtcttgctctgtcatccaggctggagtgcagtggcgtgatcttggctccctgcagcctctacttcctgggtttaagcaattctcgtgcctcagcctcccaagtggctgagactacaggcacacaccaccatgcctggctaatttttgtatttttggtagagatggggttttgcgtgttggccaggctggtctcaaactcctggcctcaagtgatccacccacctcggcctcccaaagggctgggattacaggtgtgaaccactgtgcccagcccagatatttctttaaatcccttaaccccataagtgtcccagcctttgctgaggaacactgtgtgtgtgtggagcctgacttcaatgctttatcaagcagtttgcagctctgccrtagccttcatttccttcttgtgcagagcctcaaggtcagccagaggtgagacatcagggtc

SEQ ID NO: 810821 - DNA, 413 bp, Homo sapiens
ctctggcctcagtcttctcatctgtcaaatggtataataataggatgtactcctcagggttgctgggagggttacacacgttagtgcacactgcctggggctcggtgastgttctctaagtgtttgctgctatttttttttacttaaggaaacttaacatcgaataggttaagcagccggggcttgaatttagtcttctctgcaccaaagttgcgctgtggactcttgtgccgactgtgatctagagattcccaagccccagaggctttggggaaggcggagccaggagaggctgctcagctgtcagtagatggcgctgtggagccacaagggccgccctcgctgcaaaagcccgttgacgcaccaggctgtgcacagactggggtctccccgccctgggccaggccctgcac

SEQ ID NO: 810822 - DNA, 623 bp, Homo sapiens
agttcctattctgaactaaacatcatttcttttagcatatccctgtccatttgttatttaggttgataaaaacarcagcaaactgcatagtctacaagcctggttttcctaatttccctgtaaaaataatttaccatccttcaagttgccaaattttccgcatctctccccttttcttatgaagaagtgtatatatgcctgcacctgcacctaattgggttattggataatcatttccctgtgactcccccatgctatgtacattaaataaattggcagtaattaaaagagagacaattgaaacacagttataaagataactgaagtgaatatggtccatctattttttagctcacatagatcctaaattgcctttttattatatatttttttccccaaaagattagtaataactgattggaatccctttaaaatagcaaatgcttctcaaggaatatatgacttcaaaaccgttatttaaagaatagggcaaatggcaaataaaatgctacacatatgtcatgacataaacatttaaaatttttatttaagtaaaatgtgtctcactagacttttgtgtctcactagggtacattttcatcttacaggtgagataattattg

SEQ ID NO: 810823 - DNA, 377 bp, Homo sapiens
tctttgataaaacaggcaatgcattctaaaaccagtaaaattttgtttacatataaatgtagttacatcaagtaagagaaagagtgagatctattctaccacacctaaaacccatcatgttttagcagcctaaaagtattttgaaaagaatggcacttttgtcttcccttcctgggacagaaatcattatgtctagtaggacaagagaggtatttatcataccattcccagcacccatacctagtttagtgaccttgtttaagataatcctcaatatctgtctctgttggcgtaagtcarcttttgataattagctttagagtaaaaaaaaaattcaaattggagtcaattcaagattttacggtttctactgaaga

SEQ ID NO: 810824 - DNA, 481 bp, Homo sapiens
gaggcacttcttgtacctttttatattaggatataaattaacaggaaaatggagtccaaaatagcagcttcctaggatatcttctttattctcatatttgaacattcatattctgtatcttataattaaccaaayagtattttgttttctgatctattctgaaccaatagtgcatttcagtttatgaataaggtattgtgaacaaaatgaggattgtgccacagaaaaaagttaaactatattgttcatataaaatagattaaaaatttattcactaggaggcagtaagaccttttcttcagtaccaatatcagtatcttcaattcctcctatactgatgtcaatatacattgataaagtttgagagcagagctgtggaaaatgtgaaaactatttccaacaatataggctgtaacagggaacaggagaaagggtgtgctttgaacatagtcaaatttaagttactgaatattaaataaaa

SEQ ID NO: 810825 - DNA, 481 bp, Homo sapiens
gaggcacttcttgtacctttttatattaggatataaattaacaggaaaatggagtccaaaatagcagcttcctaggatatcttctttattctcatatttgaacattcatattctgtatcttataattaaccaaacagtattttgttttctgatctattctgaaccaatagtgcatttcagtttatgaataaggtattgtgaacaaaatgaggattgtgccacagaaaaaagttaaactatattgttcatataaaatagattaaaaatttattcactaggaggcagtaagaccttttcttcagtaccaatatcagtatcttcaattcctcctatactgatgtcaatatacattgataaagtttgagagcagagctgtggaaaatgtgaaaactatttccmacaatataggctgtaacagggaacaggagaaagggtgtgctttgaacatagtcaaatttaagttactgaatattaaataaaa

SEQ ID NO: 810826 - DNA, 548 bp, Homo sapiens
atctaccaccttataatgttcatgtatttggttgtgatactgctttccagagccaaagaaaataagactgctctctttagaatacgtaaagatgtgtagtgcttcataggaggcaccctactccagtcctttcaatattctttctcagctgttatgttcaaatgcccttttaaaccaccaggtccagaagagaatagaacatgataaacatgatccactccatgcagaatggagctctgattacctctattcatgagctaaaaaccaaagaaatgtcaattagattcaattattataacacagaacctgccatctattgacaggctattatatgtccaaaactgggaaagaacttcatataacaccgtatcatttaatcctcataacaactccctaaggtgggtactttggggagcaaggcatactatttctatccagatgyaatttttctttctccacattttgttcactgtggtctctcagtgcccactcagtatcacttcttcaggcaggcttgtgaaacttctcttgcatgctttgtggatatt

SEQ ID NO: 810827 - DNA, 606 bp, Homo sapiens
gtagcaaagcctctttaaaaatccaaattcagaaccagcagaaggaacacaggaagctttactgagtaattgaagtgattacatgcaaagcactttcccataatcagcgagtttcaaagaagggcagagggtgattgacagtgttggccacccttgaaactacatcctgattggagaaaataattacaagcagggagaaagagactcagtgctctacatctcttttatttttagatttaatctgagagaagaaagattatagaagaaaataaagtttagaaagtttagaaatcttgttcttggagaataagaaagcaaaaagtccctgctataccaaccgcaatagcttattttatgttttattttccttttattcatttactgagcacctactatgctccaggttgtagaaaagatcaaaggatgttttggcataaaaacatgtgaactgtaaacctataaacagatattaagctgtcattgtggatataaacttttcaagaaaaagagggtaaaatgacaagctaagattccakatcaagcttgctgtctgtttgctggaatgtataactatgtacacatatgtgcaatagatagggtagagca

SEQ ID NO: 810828 - DNA, 612 bp, Homo sapiens
taggttgaaatttgaaggagaaggaattttcaggcataaaacatggaggaagaaagccacagtgtgttgtgggaacaacagcataaaggcttagaggaagaaacgtgaggtatctagaaaacaagagacaatgtggttcaaattcaatgtatcttggggtgtgttgcatggtaaggttctgatagagatagccaaagacataaatattttagcattccaattaacatacagaataatatatgtagtatatgaaagttgtaagatcagattttaagttaacttatattttcagtatttaattcttatgacataattattaagcataattttctctaacaatatgatttgcaaagtgattttatgtagaatatgtcattgattcttaagagcattgagaaatagacatgtcaagaattttgtatccccactgattattataatatcaagactatttaactattggcctttttgtaaagataaaatgctctagaatttaaaattrccatttttcatttgattgacaaggaaaaagtcagaaattaaaaacaaatataaatgttttgacatgatcatgcataaacatattagaaaataaacccataatatcctaga

SEQ ID NO: 810829 - DNA, 637 bp, Homo sapiens
tctactaaaaatacccaaattagccargcatggtgtcgtgcgcctgtagtccctgctactcaggaggctgaggcacgagaatcgcttgaacccgggaagaggaggttgcagtgagctgagatcgcaccactgtacacctgagcgacagagcgagactccgtctcaaaaaaaaaaaaaaaaaagttctggttacaggtgatttgggattttaaaggatgagatagagccttttaggacgagggcagaattacagccccagcttctctttatcacctccctgcacctctcagcccacccccttcccaactacttttgtgactatagggttcgattgagaagtctctctctgacttcagcattatcccactccaacagatctggctcacagcaagaaaaccaagccccacttcctgcctcctaccttccagacttcaggccatttcctatcccaggtaacacgggggttgggaggagacgctggtcacaccctctgtcaaggcttgtcctcgagataccctcccaacgtagcaaagttctgtttccctaatgaatcccgtacacgggctcccactcctgctcctgtctgtaccactcccacgtgcctggaatccatgaaaaatcttctgagtcttaagtc

SEQ ID NO: 810830 - DNA, 573 bp, Homo sapiens
tatggggagtgggacaagaaaggcttcctggggagaggatggtaatcctgaggcctagaggacggctagatgttggcaggaaaaggggagaggggtgttctgtgcaaaagggacagtatgtttaagaatgggcatggggccgggcgcagtggctcacacctgtaatcccagcactttgggaggccgaggcagttggatcacgaggtcaggaggtcgagaccatcctggctaacacggtgaaaccccgtctctactaaagatacaaaaaaattagcgggcatggtggcgggtgcctgtagtcccagttactcgggaggctgaggcaggagaatggcgtgaacccgggaggcagagcttgcagtgagcccagatcgcgccactacagtccagcctgggtgacagagcgagactccgtctcaaaaaaaaaaaagagtgggcgtggcraagcctgatcagagagggggcagtggtgagatgaggcccaagggggtcagcttatgtggggctgtgcacaccctgaaagtcagaagcttagaccttattctaagggtagcaggaggccgttataaccaa

SEQ ID NO: 810831 - DNA, 573 bp, Homo sapiens
aaccagattccaggaatagagagccagttaattttacttttgattaatgttcaaggcctagactgacttgaggatgatatagaatcctggagctttagagtttaggtaaacttgaagctggccttggctctcagctgggaagtgggcctggagcaggaatgaacctgccacatgtcatctgactcgcaagacactcgaggacaggacaggcgccactcctctctggttggtcctgctgagtgaagagaagactggctggatcaacctttgagctgccaaagctgtgtaagttcgtgaaacaggtgcccattctctttattttgcaatagggagagaaatacagggaggacatcaatttgcccaaggtcaggctgaatgaaacccaagtgtcctgatcaggaagccagtgtttcttctagtagccaggggcagtgtgatttggcgaaaagatcagagccttgaagagacataatcctagattcacttactggggatgtgacctcagacaaattacttgccctgtgtgcctctcagattctccattggtgrgacactcgtgctaatggtacccac

SEQ ID NO: 810832 - DNA, 658 bp, Homo sapiens
gccacattatccccagcaggcttggggacacatcaaacacctgccacctccactcaggttcagagtacacaacagcctcctatagggacccagggaggctagcaaaccctattcggctcaaagytgtccaaaaactaggaaacatggttgtctgttccaagaagaagctacctctgtgggtttgtagttcatgaacccatcctgatgcagtatttcccaacaaatcaatgggaccccaaatctaactccatcctcctcattcccttttcctgtcctgccactcacactgccctctctgtgaatgcctccccgccatggagacacgaatccaaactgagtgtcaggtcagattttttgctctttctcattgctcacatccaacaattaaatcctgccactttagcccctggacgggcagggttttccaaaaatggccacagcaatattttgagatcttgccacaccccgtcaagaggaggagataatctttcctcctcctgaacttgtgcctggcttgatgaacagaacggggcgacagcggcggtatatggggacttcagaggctacatcctaaaattcagtattgttctgcttggtgttctcattctctctctcctcctccccactcgccctcataatccagacaccatgttgtgaa

SEQ ID NO: 810833 - DNA, 635 bp, Homo sapiens
cattgcgtggtacatgacccatttacagagggcccttgcaaacaagaggtgaagagagtttaaggaggaaaaaaaaaagagcagctttcactaacatccttgcacactgactccagagagggcgctgcctcacccagtcagggaggtttatttacatagtcacatactccacctactcagcccttcaaacctaaggaactagcttgacctgaactcctaaagtctcggttcaattctgcacctatagaaattaaacaggtttaatttcaacattaacgtcaagtaaagcaaatttcatttgcaatacaaaggaaaatcgttttaagggtcaaaacgaaaacatgtatcttgacatggtttggctgtgtccccacccaaaactcatcttgaattgtagcttccataattcccatgtgtcccatgagggacccggtgggagataactgaatcatgggggcagatctttccggtgctattgtcgtgacagtgagtaaatctcacaagatctggtgattttataaaggggagtctccctgcacaaactctcttctctctctyctcttgtctgtcgccatgtgaaacgtgcctttcaccttctgccatgtttgtgaggcctccctagccacgtggaacta

SEQ ID NO: 810834 - DNA, 480 bp, Homo sapiens
ggtagagccctccataaatcccacctgcttggacttcacaggagtccacgggaaagatttaagaaacttgagcaacctttaaaatgcctggctcccactctgtaccaagtggctttggccctcttacatgcacagtgcactggctctagcagcctctccattaattccaagggaataaagaacattaaggtcaaggtttccttctccaccctcgggagcaatgaatgaagaccggctgcagagcaagagagcacgtgtctccccaggcactaggagccctttgccttctcggagcagcctcccactgcagcaggcggagggcatcaacagatgggacacgcattacccaaaacaagcaccggcagaggatgaaggtgcttgaggggccaggtggagasagaggaagagccccctatatttcacaatttttccctgctctttttctgcaggcttcatgtcactgcaaatgacactaggcag

SEQ ID NO: 810835 - DNA, 630 bp, Homo sapiens
ggctcagttgagtttccttcctcctatgagttttggttacaggtccatagtaattcttcagcccattcagaagtctttaacataactgtgrttggccgggcgtggtggctcacacctgtaatcccagcactttgggaggccaaggcgggcggatcagggggtcaggagatcgagaccatcctggctaacactgtgaaaccccgtctctactaaaaatacaaaaaattagccaggtgcagtggtgggcacctgtagtcccagttactcaggaggctgaggcaggagaatggcatgaacccaggaggcggagcttgcagtgagccaagatagtgccactgcagtccggcctgggcgaagagcgagactccgtctcaaaaaaaaaaaaaactgtggttgtgtttttggtttggattttaagtttgtttttttagagacagagtctgctctgtcatccaggctggagtgcagtgacattatcatagctgtttacagccttgaactcctgggttcaagcaattcccccacttcagtctcccgattaggagaccacaggcacatgccaccatgcctggaaaagtgtttttggtttcttgttttgttttgtagagatgggatcctgctatattgcct

SEQ ID NO: 810836 - DNA, 547 bp, Homo sapiens
tcccaagggctgtgggtcagcacagaaccagagaatgagagccccaaaggcaaggccacccctaccatcaggcagtagagatgcacccaccatcccagactcytgccatcacaggctggattcatccggctccccttgtcctgaatataggctcccagagcaaccttctgatcatcctggcttcccatatggccaacagggaactcttgcacagatcatgccaatgagaatatgctaggctctggagcagttctatctctctttgcaatttaattcattggccttctaaggtctacttctgttgaaggtaactttcagctgatatgagtccctcacagaggtactgtcttgggagccttcagaacagaagacacgatgctgatggaggatgcgctcatccagggactgcccagctccctcgccatcctctctccctccaacacctcaccctagtcctgtgaacatgggacaaaagccacaaggtagggattggctcttacccctgacactgccccaggcttgtcagctcaataactcatagactcca

SEQ ID NO: 810837 - DNA, 619 bp, Homo sapiens
ctttgaatgcccttatcttatttctttcatagaacataattgctctgtgttggaatgatagatttatctgcttgtctcctctctagattgtgagatccatgagagcccagaaaatatcttaggatccctagtgcttagcacagagcttggcatatggaggtaagcaaaaagattttttaaatccagttgtccatccactcatccattcaatatgaatgagagaacagcccttttttaaagagggatggccttttcttaaaagacctctatcttgaggcattattttcccttattcaagtcccagtttattaggtcctggtacttaatggtgataaaagggcattattattgaaaggttgggtatgtcaggggcacaatattagttcaaacagtgaactgaagcttttttgcctggaatccattggcttctttgatggggataggaagcagcctgggactattgctgtgacatgacatcaatcttggtggctaacgggaaggggttatgaagaagggggtggacttgggggatgaagaggacctgtggctccagtccaccagaatgaatgacctaggycatgggaagtaagactgggaagtgtttttcatcttcttagag

SEQ ID NO: 810838 - DNA, 637 bp, Homo sapiens
ctgtggtcaccgtggaggtcggggtggagtgagaatattggtcttggtttacccctgagtcagcacaggggaggaggttgggctcctctgttgctgagttagggctatgacttagtgsaagaggcaactcaggaaagcccactggctcatggaggcaacaagaaaacttgtccatcttctgtgtactctggatggggaaaatttggctggaaaaaatcaaaacctagccaggtgtggtggctcacgcctgtaatcccagcactttgggaggccaaggtgggaggatcacttgagaccaggggttcgagatgagcttgggcaacatactgagagccctgtctctacaaaaaaataaaaaattagccagtgtgcggcatgtgcctgcctgtagtccaagctactagggaggctgaggcaggagggtcgcctgagtccaggaggttgaggctgcagtgagctatgatcgtgccactgcactccagcctgggcaatagagcaagaccctgtctcaaaaaaacagaaacaaaaccttggcctctacttcccacaaattggccctacctctgtgaccaccaaatattcagttggagctataaatgatttaggcacaaacccccaaataagatagctattcaaa

SEQ ID NO: 810839 - DNA, 566 bp, Homo sapiens
ttttgggaatttgtctgttccttgagaggygattgcctcctcctgagccttgaccagtgggtgctacaggaagatgaggcctcacctagtcccaaggctgtgggtgcccctcagccctctggggttcagagtgcctggcagtgtcaggccgctccccaccccaccacagcctggaggctccaaggctgccagctttgtttcatgaccctttgaaccttgaccttgggcttggagcaccattaagacaaattctttcccagtgatgaagagcaatggcagcgccaactccccgtgtccaagtgggtcaggaaccacagagtccgtctccccctgcacttggtgtcatctttcaggcccaggcggggccagctgccagctttgcggggccctggagttatttatgatttctttctggatgaggaagaaagggttagagcacttgaagcaataacttcagatgaacaatgcgatcctcagaaatccacccaagagaagcaattgaatcgctgaaaccggcaagataaacatgtacagtgatgttcccctctcctggtatccttgctgcc

SEQ ID NO: 810840 - DNA, 617 bp, Homo sapiens
tacaagcatgagccactgcacctgacttatgcattacttttgtagcaaaaaaaattaataaaattttaaaaagtaaaaaaaaaaaagaaaaattaaacattaaaaaaattctctaatgccaccaggaaaagtgctcaattttttcctcctaggaatgtggataaattcccccaaaacagcccctccataatgattccatagtcccctttccccacaacctctcttccaccactccactccctgtactcggcccccatccctcctttgccacaggcagcactcactgaacccagtgtaaagcactaatgttgttgttagacagtttccttctacaggcttctgccaggccagagctacccgagtgaacaataatcattatcatgtctgacaatctgtgaagattagctctaaggggaaaaaattgaaaaattgcatgtgcaagttatattatgtgtcttaattttaaagccatgctgaaaccacagagtgttgtagcttaccgctatttatcaaaggcaattattaraaaagccagtttgtatggtacacatttgtgtccataaaaatgcattacttactgacctgtctggtctctgaactccagactcctttcttgc

SEQ ID NO: 810841 - DNA, 513 bp, Homo sapiens
ttttactacctggaactccagacagataatccatccctttaaccagctgaggatgcttttagggtttctaattcttttattcaatttcgccacaagactttacttgattctcttgaaaacctttaagggcattagagagggtgatttctgatgcaaacaacagaaaattcaacctaaactagcttaattataaaacttaagagggggatttctaagtttatgtagaggtgagacggagcacagatccctgcaggaaatgaagaaaaatcttgagttccttcaagggaatttccaggcacctagctagccctgagaagtcaatgagcaacttgataagcaaaaaagtaatcgtagctttaaacaatagccacggaagttaaaatcatgagatgtttgaccccctatagaaataaagataacatcttcacrtatgtctccgagttgcttttcagaaatccggacccccatcagacagatcctctggaatgtagacctcagatactgaggcctgaa

SEQ ID NO: 810842 - DNA, 590 bp, Homo sapiens
ctttgtctttgatcccacagggatcctattagctatctttgtggagggttctaaaatggctcctgatgacctattccgttcccaaatccaccccttcttccttgccctgaaagttttgcagacagtgggaaatatatcattagtaccttcaagccccgttccaacagaaatagtcatggaatagtgcagaggaagttgggttcaaattctggttctgtgtgcccttaggcaagtcatttaacctctcttcatctcagtttcctcatgggtaaaatggatatataaccagagttcctaccttgcaaggcagttcttgttatagaactgttaccggcaggtctttgttcttagagctcccaagatggcagcggaccactcccaacatggcggcaagccttttgttctctgacctggggttcttggcctcacggattccaaggaatggaaccttgggcgatgcagtragtgttacagctctattagaagccatgggtcactgagagccatggaacccagggactagtgttcagctcaattaggatgaaccagggcacttagccgcgcaggaacaatggagagcccttagcccc

SEQ ID NO: 810843 - DNA, 513 bp, Homo sapiens
acaacatggtgaccaatatattggctgggcaaggtagctcatgcctgtaatcccagtgctgtgagaggctgaggccagaggattgcttgagcccgggagttcaagaccagccagggcaaaataacgagaccccatctctacaaaaagtttaaaaatcagccaggcgtggtggtgcgcacctgtagtctcagctactcgggaggctgaggagagaggaccacttgagcccaggagtctgaggctgaagtgagctgtgattgtgccattgcactccagcctgggtgagagagagataccctgcctcaaaaaataaaaataaaataacaatatgttgttttcttgaaaaatgctaaaacagtagattttaagtgtttccactgcaaaaattacaaatgtgaggtgatgcgtatgcctgttggttggcttggtttggccattctgmaatgaatatgtgtttcagaacatcatgttgtaaacaataaacatatacaagtttagctgtcagttaaaaaa

SEQ ID NO: 810844 - DNA, 439 bp, Homo sapiens
aaagaccgtgatctctgttaggggagaaaccaatgaggcaaagtgtttccagctgctgcgggaggagggcagccgagcagagcccagtggtctccytgagtgcaggagacagagctgaaagtgtgagcaggcctggccaggtgcagtggttcacgcctgtaatcctagcaccttgggaggccgaggtgggtggatcatttgaggtcaggagttcgagaccagcctggccaacgtggtgaaaccctgtctctactaaaaatacaaaacatttagctgggcgtggtggtgcatgcttgtaatcccagctactcaggcggctgaagcacgagaatcacttgaacctgggaggcggaggttgcagtgagccgagatcgcgcccctgcactccagcctgggccacaaagtgagactccatctcaaaaaaaaaaaaaaaaaaaag

SEQ ID NO: 810845 - DNA, 569 bp, Homo sapiens
actgctggtctcaagccaacctcccacttcagcctcccaaagtgctgggattgcaggtgtgagccaccacagatccattttcaagtcctttttcttcttttcattttgagacagtctcactctgtcacccaggctggagtgaggtggcacgatcttggctcactgcaacccctgcctcccgggttcaagcaattctcctgtctcagcctcctgagtagctgggattacaggtgcccaccaccacgtgcagctaattttgtatttctgaagacagggtttcaccttgttggccaggctggtctcgaactcctgatctcaggtgatccacctgcctaggccttccaaaggattccaagccacaattaggcatgcaccaccatacctggccatcttcttcttctttgagaaacaagctatcaaaaaaaaaaaaaaaasagagagagagagagagagagagaaaaacgagctctcagagaggctcacctgctctcacccaatcctctgacacctcccccttctctttctcagccactggtttcctggctctaaggcgattcacctaagcccaa

SEQ ID NO: 810846 - DNA, 622 bp, Homo sapiens
atagaatcagcagcccaaggataaagagatcatgttgtaacttggtaagaatccaagaagtaaataaacagggatgtcactaccattagggctgtgaataggtaactgaaataaatctaatgagagctgtgcaagaaaaccaacccatgcacaaccctaacattgtgcataagaagacaagagttcagaactattgcatatgaccatacaaaatctaaatattccataaaagaaaaacaggcaagaaagaaacaactgctacttattaatattttttaacaagttaaaatttgcgtatcgcttccttcaggtatttaaatgctaaaatctcaatgtgatgcttaaaattaaaaacacattataacgccagagaatcaacatttgagcattttccaacaatacaacattataatttaaaacttggcaatattcgcctaatttaaatcagtctctcaatggaagggactgcaactgcagaagtgaaatccagcaagctactgytgtataaccaaaagatcttccaagacagtgctatgttcttgctgctgacattaacagctgctgaaacacattctttttaaaatcattttcttccaggggtggagtttccaaaagaattcca

SEQ ID NO: 810847 - DNA, 548 bp, Homo sapiens
ttgattcttaccattgagccttaaaattagctagtgtggtgaataagacattcataataacccttggctcataaatgagaatagagggagaaaggttaagtgatctttccatagacattgaataatatagtgattgagtggtgaacaaaggttaactacatgattttgttttcctttgttttcacatagatttatattctgacaagagcagacagatgtgtccagccaagggaaggccaactagtatagtactattgctctaatgtctaatattttaatagattagctatggtaaaatggcctatgtgaatgaaaatataagttgcttgcagagagagttcaggaattctcctttagagaatgcatcactttgaaaacacaaggcactccagaaatgcatgataaataaaagaatttttaaaaatggttaatcaatctaaatggtatttttacagtctataagaattttaaattyttctgctagaataaaaccccctaaagatttcaatcttatagacacttagaaatcccctggatcataagaaata

SEQ ID NO: 810848 - DNA, 472 bp, Homo sapiens
acatgagtaagttgggctgtgccaacatttaggaacaccagggcagccatcytggtacagcaaaacagcagtcgcattagaaatatgcttcactttttttaaaagggggtgaaagagaactttgggtcgaattctggagttcctaacattttaacaccaggttgttttctgttatttttctttttatgaaaagattttactgtagaacttaaatttcattttggttaatgtctgatggaaaccaacaaatttatttgactcatagtttattttcctggcttatgggcatagagttgactgtgggccacacagtcaacaagcttcctcactgtcatgggcttttccttggctttgctcttgagtgtggtctccttaccatgcagacaaatggctgggtaactctccagggccactctggttttccacccagactccgtttgtagtggccatcagtcagcaaacactgccaacc

SEQ ID NO: 810849 - DNA, 612 bp, Homo sapiens
tattatttacaacctttctattttcctatgtttttagatgtcttttgagaaccgtatatagtttagttttttaaaaaaaaattcagtcaggcaatctttgcttttaattgcaacmtataggcctacatatttaatgtcataattgatatatttggacttcattataccaccttactatttgcttcccatttcctcattagttctatgttttttttctttctctcttatatgacctcatttcagattgattgagattatttattatttcagttttcccttctcaagcaagcatactttatcttactatttttagaagttactctagagattataatatcatcattgacatagcagtctaatattaattggcacttttacctcttcttgttcaatgtcaggaacgtctaccctttaacttcagttaacccccttttgacatatatgctattgttgtcatgtgttttaattctatatatatttaaactcaatagaaattataattatggttttatatttattgagatttatacacagttaccctttcggttaaaaaaaaaatctttagtgttccttttagtgtgtaatgcatgcctgctggaaaaaaaaattttt

SEQ ID NO: 810850 - DNA, 530 bp, Homo sapiens
tcactggatctttcaattatgaaactaatacacttcttttactggtcaagtcatttggaattaaattttatttcattagaaaattaaattatatcatatataatgtgtatgaaatatgtatacacaattaaaataataataataaaatgaacactcatgtaccagacacccagcttaagaaataaaacagtgttcagagctcccctaagtgccctgccttattataactggcttcccatcccaaccctgagaggtacacaccatcctgaacttttggtttatgatatataacaaatatcttttcacaatgtgactaacctttttcagttcctctatggtttccattcattatagagagtttttaattttaatgtcaaatggatacattttttcctctgctagttcatattactrtatgtgtcttatttaatagacctatcctggctaggtacagtggctcatgcctgtaatcccagcactatgagaggcccaagtgagaggatcacttgagcccaggagttccaggctgc

SEQ ID NO: 810851 - DNA, 576 bp, Homo sapiens
gattaaaatgtaatagatgtgtttttaacttattgaacaaataatatattcacattgttaaaaaaattcaaggtctctttgattattgccattttagccagtggaacgagacaaagaacagatggctagagctaaagattccctcttaaattagcaaagcagaagttgcacacattacttctgttttgtactgcagtggcaagagcttagtcccatatcaacgactactgcagagacttagggacatgtttttcctgggtgggcagccatagctagacacaattctattactatgaaagtaaagaagaccgacactgatggacatgtagtagtcttcaaccatcagagaatggtaattcctcagagtatctggagcctccatgactctcgctatgactctaaagtccacactccttatattacattaaagagcctggcttcatatccaaaagtgatgacaaaacaactgttttgttctgttatcttttatatgtgtgtgtgtgtgtgtgtgtgtgtgtgtgtgtrtatatattctccattgcccttcactaacagaatttaaagaaaaaattgttt

SEQ ID NO: 810852 - DNA, 554 bp, Homo sapiens
tttttattttcatctggccccaggtttatactttttcaaatatccatggatccatcaccagagtaacaaatcactggctgtttctccatatttagcatgtgtcttatcctgtctgacaggtggaagggtattctgaaatcatctcacatttttttgctgccactgagcttctttaacacttattttgaagtcaggactattgatatctacataaattgttagcctatctaaacctatagtctagtttttgaaaatattttaaaagcagaaataaaaatatgctttagttcaattcggtagtagtttactgaacttccattatatgtaaaacattctagtgtaaataaatagagagcacaattctttctctctagtacctggatttctacatattccccaaaacagagtctctatttgttcaacaaatwgagttgaatttatgccatggggaaggaattttatttatccaagtactgatttaaaaagaaatatggataaaataaaataaataataatgttaatttaaaaatagcatttgattaaatatcagttga

SEQ ID NO: 810853 - DNA, 640 bp, Homo sapiens
tatagaaggttatttaaagttcagatgtcaagtggttttaaaaatgagtttcaatttgttattgtgctgatagctagagttatttagactctaagcaaggttttgattccacactcagggtaagaaaattgtggacttcggccgggcgcagtggctcacgcctgtaatcccagaactttgggaggctaaggcgagtggatcacgaggtcaggagatagagaccatcctggctaacgtggtgaaaccccgtcactactaaaaatacaaaaaattagccaggcgtggtggcgggagtctgtagtcccagctactcgggaggctgaggcaggagaatggcgggaacccgggaggcggagtttgcagtgagccgagatcgcgccactgcactccagcctgagcgacagagcgagactctgtcaaaaaaaaaaaaagaaagaaaatcatgaacttccagtcaatttaataactctggttttgcccctttacaaatacaacatttaacacagaactgaattttttttcacygattaaaaacattaaaataattcagcaactatctttcttgattatacatccttccaccaaacttttgaattgtcttgaataagtggtaagaaagacacacaagacccagccgagc

SEQ ID NO: 810854 - DNA, 326 bp, Homo sapiens
aaagtttctatagagcacacttctgatccaccatgtccaaatccacttgtccattgcccacaacaatcaaactgaacaacagccagatagattttggaggagacttctggttgtcattcaccttcaacaaataagataactgggacacacacctcccaaatgctaaatttgcttaccatactctgcacccatctattagaggaccctttttcatagtcattgcasctttctttctcataccaaccagctgcatcaccatcttttgctttcggtcaacagatgtcaattatctattatgcaccagacactgtactggatgtgagggt

SEQ ID NO: 810855 - DNA, 598 bp, Homo sapiens
tagttcaactacctgggaatacaaaacgtaaggatctcaaaatcctcaaagtatgataataggttaaaaaaaaaagcaagaaacaaatgttttaaggaaataggacttgatgctttgtgaacaagaatctaaatacgaaatagtacccgagtatgcacagcattgtgcagatgccaagatgcacctccaggaagagtctccgaagcccagcaccttactctgtctttaagatcactaaccatccatgtttcctccgaagcactagggaattgtgcagcaatgtcaccatggcaattttacttaaacaaaaatgagaaatcacagagggcaaagacatgaagcaaacaatcaccgttaagtcagaagagaaaaagcgactcattctggaggaaacgcaaaggctgtagtaaagtgatttctcattttcatccatataagcagcacacacttacctgtgtgcttccacaatgccattactataaagcactttaattacgatacaaagggtggtggtaacgatcagtgataayagatcagccaatttcttatgtatataaacagagtgagtaagaacactttttattagtacgtggctata

SEQ ID NO: 810856 - DNA, 601 bp, Homo sapiens
tccctcagcctcccgagtagctgggcctacagtcgtgtgccaccatgcccggctaatttttgtagttttagtagagatgtggctttatggtgttgcccaggctgatctcgaactcctgacctcaagtgatatgtccactttggcctcctatagtgctaggattacaggcgtgagccgccgcacctggccggtagtgtacatctttcagggaatcatttcatctaaattgtcaattattggcatacaattattaaaaattttcattttaatgctttgcctatatatagaatctgtgataacatcatctttctcatttttttaattggtaattagtgtcttctctctttttttgttgatcatagtttgtcctattgatctcaaaataatggcttttggtttcattaatttttaaaatcatttttctgttttcttttttgttgttgttgtctgctctgatctttgcaatttcttataatttctttggaattaatttgcttttttagtttcttaaggtagaaactgagatcaytgatttgaagtatttcttcttttctaatataggcatttgctgctttatattactatttaaatactgctttaa

SEQ ID NO: 810857 - DNA, 598 bp, Homo sapiens
tatgatgttattttattcaaaatactccatcccattccagatctccagatctggatttcaatawaccccatcatctttcccctccttaatcccttcctcaaaagtctcatttttcattattcttttgcttttatttattaatgaagtcaaatttatcttcttggcatattcacataatatttgttttagcattcagatggaggagagggaagaaaagggttgaaggagacaatggggtaggggaggaagggaagacaagaaagagaaagcggaaagtatctgaaggaggagaggacagaacaggcctctgctattccatgtggtatctcagtgtaaatgtgcaccgggtacagagctttatcagtagagcctgggatgcatgcctcttgcaccccacttgccccttttggtgtgaagggaacattttgtgtaggtgcaattctgtgcacttgccttgggaagcagcagaagatgaaaatttctcttaccaggagaaataactgttaacttaccctgcttcccagaacatgtattatgttactcttagaaagcaggttgttcctcatgtgctagttaccattccctgagatagtcatta

SEQ ID NO: 810858 - DNA, 598 bp, Homo sapiens
cttctttggtgaattcagtttctaggtgtttaattatatttatagttattgtaaataggattatttkcttgatttcttttcagattgttcactcttggcatatagaaatgctactgatttttgcattttgctttggtatcctgcaactttactgaatttgattatcggttctaatagttttttggtggagtctttcggtttctacagaaataagatcatatcatctgcaatccaggataatttgatttcttccattccaatttggatgccctttatttctctctcttgtcttattgctctagctaggacttccagtactatgttgaataatagtggtgacagtgggcatccctgttgtgttccagatcttagagggagggctttcaaattttccccattcagtgtgatactagctgtgcacctgtcatatatggctctttattgtgttgaggtatgttccttctattccccgttttttgagttttttttttttaacatgaaggaatgttgaattttatcaaatgctttttcagcatcagttgaaatcataggtttttgtctttcattccattgatatggtgtatcacattgattaatt

SEQ ID NO: 810859 - DNA, 510 bp, Homo sapiens
cagtgtcatgggaagggcatcgccagagttaggtgtgtttttgttttcttccaaatttggatattaagattaaggaaaggaaagtccttttgttgataacctgctaatttccatgtctaaattgagtacataaaagatgtgtgggccgggcacggtggctcactcttgtaatcccagcagtttgggaggtcaaggtgggcagatcatgaggtcaggagtttgagaccagcctggccaatatggtgaaaccccatctctactaaaaatacaaaaattagccaggtgtggtggtaggcgcctgtaattccagctacttgggatgctgagggaggagaatcgcttgaacctgggaggcagaggttgcagtgagctgaggttgtgccactgcackccggcctgggagacagagcgagactccatctcaaaaaaaaaaaaaaaaaaaaaaaaaaagatgtacggaggggttagggaggagagggcgtagggttgattaaaatcagggacaatgga

SEQ ID NO: 810860 - DNA, 642 bp, Homo sapiens
atacgttaattattcttgtggtaactgcccctgacaagcacatttctgtgtccaagcacataaaatgaagtaacttcaggaagcctccttgtgtctattggatttaggccaaatggagttcaaatcatggctcccccaggccctacaataaattcaacagtcatcagtgggcaaaaagacaagtatctttaccttaataccttgctgtccaattccaggagctcctggagaaccataaggaccaggaggacctggctcaccctggaggaagaaatagtgacatcagttatatgttaggtcgactcaatagtattgactaagcagcttttagatgtatggttttgcaataggggctttcagagcaacaacaaacctgtacatcgtgcctgccctcaattgtttacaactcatttggaaagaaaacacagacccaagatcaaattatccactaggcacagtagtcacaatatctgggtccacaacactttcaggagcctgcaaatatgttccaattgtaattttttgattcaaaataaaaataaacataatgactatataacaatgaatacagcttgcattcataaatataattttttaatgtktttatggaggaaggggcccacaaagtcaagtgttttcagg

SEQ ID NO: 810861 - DNA, 468 bp, Homo sapiens
gccctccacatggccaccccaccccctttctgcccccccgacctccccgaccttgccccctcatggctgccccccccatgtccgcccacccccttcactcctgccccacctgccctccacgtggccacctcgcccaccttcccgtgccgcttgccattgcaccagtggccgatgtaggacacaggctgggtgctgcacttgaacatcccgaatccgttcctcatgccgttgaccacttcgccttcatacatgctgccgtccggccacgtgtacacgccgtggttcatcgggacattcttcacaaagtcgccctgaagcagaacggccatggggtgacagaaggaagygttggggggtgggggcgggaatccctagtcctgcgggcggttccaggagctgcttgacctctgattctgttcttgcctctcctgtggacacactgaacatccccctcacactctctctctt

SEQ ID NO: 810862 - DNA, 647 bp, Homo sapiens
gcctgggatggagaggttcaagcaattctccttgcctcggcctcccaagtacctgggattacaggygcctgccaccacgcccagctaatttttttgtatttttagtagagacaggtttcactatgttggccaggctggtctcgaactcctgaccttgtgatctgcccaccttggcctcccaaagtgctgggattacaggcgtgagccaccgcccccagtccacaagcatgtttttaagaggagtgagtcattgagtagaggaaaattggattttactttacttttaatttatgtattttattttatttatttatttatttatttatttatttatttatttatttattgggacagagttttgttcttttcgcccaggctggagtgcagtagtgcaatctcagctcactgcaacttccgcttcctggattcaaacaattctccggcctcaggctcccgagtagctgagattataggcacctgccaccatgcccggctaatttttatatttttagtagagacggagtttcaccatgttggccaggctggtctcgaactcctgacctcaggtgattgacccgccacagccttccaaagtgctgggattacaggcgtgagctactgctcctggccaaaaaattggattttag

SEQ ID NO: 810863 - DNA, 449 bp, Homo sapiens
gaaaactgcacatccacatgcaaaagaatgaaggtggacccttatcttacgccacatacaaaaattaactcaaaacagaacaaagatttaaacctaagacctaaaattgaaagcacttasaataaaacataagagagaagattcacgatgttggatttagcagtgatttcttggatgtaacaagaaaaggacaggcaacaaaagaaagacggcagaagaggaggtccccagctttcgtcccctcacaaaacaaccaactagcaaaactatctatagacaaaacacctttgtggaaatcccagaataaggggatgaggcagaaccaaccccttggaccacagaaaccaagaaaagtttcattagaagggtaagaagagtggagggatttggtttggtcatgctgcccctccccagtctggtagagcactagacaaagagacttcccctaa

SEQ ID NO: 810864 - DNA, 464 bp, Homo sapiens
attctctgagatatgcccaagaatgcagtagcttgcaaaggatcataaagtaagcacccatgggtcacagagtaagttgggaagaaattctcaactccctattttctagagtggctgtaccaggttacattcccactaacaatatatgagtgatccagtttctctgcattctcacgccattatctggtgctatcaacttttttattttatccattctgatgggtttgtagtgatatctccttgtggtttcagtttatattttcctggtggctagtaaagttgaatatctttatacatgtttgtttgccatttgtatatcctctttggtgaaatrtctgtgtatgtattttgcacattttctgataggtttttaatgttgagttctaagagtagtctatatattcaatatattctagtatattctagttcttcatcaggtacgtggtttacaaattttttttcca

SEQ ID NO: 810865 - DNA, 602 bp, Homo sapiens
taaaatacagatgcttgcctggcacggtggctcacgcctgtaatyccagcactttgggaggccgaggagggtggatcctgaggtcaggagttcaataccaacctggccaagatggtgaaaccccatctctactaaaaatacaaaaaaattagctgggcgtagtggcgggcgcctgcaatcccagctattcaggaggctgaggcagagaattgtttgaacccaagaggcggaggttgcagtgagccgagatcacgccactgcactccagcctggacgacagagtgagactccatctcaaaaaaaaaaaaaaaaaaaaaaaaaaagagagagagatgcttgtctcccactctttcaggttctggtctgaggtttggatgtaggtgtgcagactcttagtggacattgtaagggctgcaggggatccacagttcacactgaggaacccactggtggaagccctgggcctagctcatgtccctaatctcaaaaatagctggtagcctcatctttctggcccatgggatgaccagtgtttttataaggcagccaagaaagcaggaaaggggctagatgtggtggcatcatcttgagttttgtaccct

SEQ ID NO: 810866 - DNA, 596 bp, Homo sapiens
tttaaactggctttgatgattcacctttaaactcacccttcaatagttctcagaatcctccttgagaagatgaaattggaatgatcccatcagctctggcagttgtaggtggattctaatggtaagggactgtagtggggaaaatggggaattcttaatgagctccctttctattgctgacttgaaccaaatgtagttatccttgaacgtttgaggattctataagcattgtggtttcagacagtgagtcataaccttgtgccagaggggtgggtgatatagtatctggattgattcatgagacatatagtggctttttaaggtatattctgaaatgagtcttccagcagtcaggtttcgttgttgtcgtctttgttttgccttcttctctgaaaacacaattattttctcattcaaggtttggactttaaaagcttactttttccttgagacacctttagcttgagacaaatctaggaagaacatygttttgtgattctgtagatcttttgacaaagtggatcctcctgcttcagcctccctgacaattactttattttttgtagaggcgagatcttgatatgtttccctggctg

SEQ ID NO: 810867 - DNA, 379 bp, Homo sapiens
tatatcaggttaattggaaccatatatagttaagctactcccatatttattttatttactactggaaattttaaaactttttttcaacttaacctttatttaatgagtacctttctgaagaatttatgtttcaaggttttaggaattaagattatattaaattgttccttctcaacaaggccttaaaataaagaccttggaatcatttaaaataatttattcttagggatattctaaacttgtagcatttactaaacttcgccatctyggatcactgcaacctctgcctccttgctccaagcgattctcctgcctcagcctccagaggagctgggatgacaggtgcgtgccaccatgcctggctatttttgtattttta

SEQ ID NO: 810868 - DNA, 568 bp, Homo sapiens
gtgcaaagcaagacaatcttctgaatccacctgagacccaaacctaattactagtttattgatcctgcttgtacctctgcagtttatacttaggagacgaytttcaatttaaaatgtggattctacgaaaagttaaagcactgaataagttcatcttcattttagactttattttctgccatctgcttgcttatattaacagaatgggaacacgtagaaaacaaggtgaggctgcattgaatttcaagcagttcaacatcgtcattttcaacagatactcactaatatctatatgcacacactgttgtgccaagaaaggcaaaaaataactcaaacctatcaactcctactcttttggtaaaataatggatacaaatcagttgcataaaacaacatatgtatgtaggattacacttggtccatggtactagaattaatgattagtcaatgtatttcctagtaataaaatataaataaataatcatcaaggctaagattaagagtatttcacctagtgtcagaagggttacaagtatgattttttaagtgccagtattgatataaacta

SEQ ID NO: 810869 - DNA, 613 bp, Homo sapiens
ataaagacctgattttttttttcttccttctcttgagaagttggaatactgttccgtactggacttgacaaacaaggagctttagaggaaggcacactcrccctttggccagtccccatctgagtccctcctctgttcagagtttcctgcctataccttggagacatgaattcatgataaggccctgttcaagccagcaggggccttgctggcttccccctagttcctgccttatccctatcctagtcctttgatctctggcttcctatcttttggtgtcttagtaatttgtatttcttattttaaaataagtagtgcaggatgaatatttatattccatttaaacaacatttttatataggtctttttcagcttgcactggcccattctcagattacttcataaagaactacatgtgttacaaatttcataatttttgtgttccattttatacatcacctctttccttttataaaaatgatgcacgatattaaaaattttgtattggaatgaaagatggacagtttgggaactttaggcctcctactgacaggtggagaggaggatcttgattagcgttgaactgttccttccgatcgtcaactcctcgatg

SEQ ID NO: 810870 - DNA, 580 bp, Homo sapiens
ggagcaagcattatacataatgatatcaccttaagagttatttactttaaaattgggaataagacagttayctgctttaccacttctagtcagcatttgatggagggtattaatcagcaaagatggaaaaaaaagtggtctaaagtttggggaaaaacaatcgtaaactatatgattgtttatatagaatatccaagcgactttacagacacattatttaaaatagatttgttatatgaagattaacaaaaatagatacaacaacattttaaaaattaattttgtttctataaaccagagatcagcaaacttcctctgtaaagggccagataaatattttagacttttgcctgacacatacaatctctgaaatacattctttttcttcttcctttgaagtaatataaaaatttcctttagctatggggcgagacagacagaggcctaaagctagatttggccagtggaccataatttgttgacatctgttatatacagaaatagataattgaaaactgtaaatactggccagggacagtgactcatggttataatcttagcactttggaaggccaaggtg

SEQ ID NO: 810871 - DNA, 283 bp, Homo sapiens
gagttattttctgggggcatagtacccaagtgctagactggctgtggacctctctggggagacacccagagtgtgagggatgtgattcctgagccccaggggtggtggcggggccctgttgggacgaggcctgtagtcctggatgaaatccaggccctgcttgtcaggccagtcactcagccttsctgagccagactctgcacatgcaaaacggatatggtattgggagtaaatcggcaccttttcctttacacgtggcacaaaggaggtgcccagatgttac

SEQ ID NO: 810872 - DNA, 601 bp, Homo sapiens
aagtaacgacaaaaaccacaaggacttttgcaccaacctagtacttgcagctatagcaatcctacaaaacattaagtctagcaattcctacagtaccctaaaaattctttttctgataactaaaagtaaagtttcatttttccaaagtgggtgataaaacttcaaattataaagtatttttaaaaccctcaaaactgtacattagaaatatcattgaaaattaaaataataatcagtagtattaaaagattctcaacaaatttccccacaagtaggaaaatttcacttactttaacttccacagtcttgcctccatgttcaatgtgtctctctatgtattcagaggacagcaaatcactgcaacaacaaaaataaatgatgactaaagaggatcccaaaaatgtaaaacacgaaaatcaggatctagtttacacatatctgctttaacaattctttaagccccccaaatcaacactttataggtctctctctctytctcacactcacacacacacacagacacacacacacccagtatttctaaaaggacatgaggttgaactgcctacaccacctgtcactccattgctgagcacagctg

SEQ ID NO: 810873 - DNA, 635 bp, Homo sapiens
atttgggaatcactagaataccacatatctcaatggaatgatgacttggtaaacgtgacctctgcaaaagctccttctgccagaaagctctcaaagcaacttctcagtttgatgtggcaarttcttagagggcccagtgttgccagaaagtatataacttttttttcttttttacctcctgcttcagcctcctgagtagctgggattacaggtgtctgccaccacccctgactaatttttgtatttttagtagagacgggtttttgccatgttggctaggttagtgtcaaattcctgacctcaggtgctctactcgcctcagcctcccaaagtgctgggattacaggtatgagccacttcacccagtcaaaagtatataacttcttgacaatgtgcctgctgaaaaaacttcctcacctacctttcagatttaaagaatggtgcaataaaatatgaaaaagtttatgatggggagttgggagaaagttgaaccttcctagaatagaagcagcatcgggcccattatattgtcacgcctatgcagaatcagaaagactctgtcctgccctacttgggacaatgtgtttttgtttaacagctaatttttgacagaacccataaaaatcagtatacag

SEQ ID NO: 810874 - DNA, 404 bp, Homo sapiens
caaatctatatccaatcgctctaaacgatgatgtagtattgtttgccaattagctgtccgaagarttagcaacttttatttaccatactatatagggtttacttgatatagctatctatgtgtgaaaggttgataactttttaaaagaaggtgttgaaaaacatggtaacgaataacctgtattcatttcaaagaataatagctacaaattcaacatgtgatatgtgaattctaatgctgtaattcctcacacttgaattctcttatgattctctcactattcaactaccacttgagaatcattctggaggccgtttgaaaaaacactggatttttcctactcactttcttagaaactgtggtgagaaaacaagatagtattctttctatagggtatctgctca

SEQ ID NO: 810875 - DNA, 637 bp, Homo sapiens
ccaccttatcactagcataattccagtgaattatgacgcacagtcacttcatagcttctccattttaccagaccctttttttttaattaytaggagacaaggtctcaggaaaggagtgggtaaaacacttatctccagaaagccagcaagagggaagaaggaagaaaaccccatcctgcatggtatgatgctgagattcctcacatatcttcaaagcatcctaagaaagtaagtttgagtatctgtgggcacttgggcttcaaagaacaaacaagagaggcagaatcaagggagttcacaactctctttcattcttacattataacatttatacattcatagacagcaaatgaagagtctcacacacatcatgtttaggatacaggtcagaaagctgagacacaaagatgtcaaccacttgcgtatttctgactcttagttctgattctcaggacttaatttttgtcttttgttaatgccccatcccagagtaaggtcaactgtttcttcagggccaagggactgtgggtgtccagagaatgctcaattggaatatttttttcagctcttttattacacaaatgaaatactcttcaacaattgttggggggtggtttttttgttgttctgaaacaac

SEQ ID NO: 810876 - DNA, 595 bp, Homo sapiens
tcaattatctaaagtcactactgaacaaaccaaatcactggattaaagaaagaaagagacagagcgatccaaatctggtttaagttcactctttcctctggcaatgaaaaaaagtcccataaaatgccaaatttagatgggatagtaaaaagtggaaggaaagagtggaatgaagttaatctttgatctctatccaaattcctctttcttttacctacagggtttatttccattcacatgttacccatgtgatctctgcagtcagagactgaggcagctgaactctaagttatgcatgcacaaaacattcaagtgatgtaaggaaagttctacaaggcccatgccctttcttcaaatcaaaataagcaattcagtatttttttttaattttattatcctgaattctgctgtgtccactgttactgtacatattagaaacattaaaaatgccagccgagtgtggctacccaggtgaagktattatttttcaggacatattaaaggtttcagtggcatgtgtacgtgtgtgtgtgtgtgtttgtgtgtatgtgtgtgttagattagagcatatataacaattttagtaggcatgatt

SEQ ID NO: 810877 - DNA, 570 bp, Homo sapiens
aataatattgtagatagatatgactcttctcatttacagataacaagactggggctcacagaagttaagtaatttgccatcatgacacacattaaaagtggtggtggtgggatttgaacctgagtctgtgtgaggccaacatctgacttcttcccactatgctatttgaaagtaaatttctgttagagagaatcctgactatgtaggaaaatacactgtgaagatgacttccacttaggcaaaggtcatcttccgcatccaccaccaagcccctgactcatgctatttcctgccctgctcccccgtcttagttctccaaactataccattctctgctctaggagccccagctcaggttgctgagtgaaaaaaaaagggaactagggcaagaactagtagagttgataaagttttcttcagaaaccactttgtcaacctgactgtctctgcttttgtctgaaaccagcatggaagcttcccactactgagactagaaacagaaatcccatcctgtttcatgagttttcaaccagaaatatcaccyggcatgcgtttctctcttctaccttt

SEQ ID NO: 810878 - DNA, 591 bp, Homo sapiens
ccttagctttaaaaccaggaaattgttagcaacaggctctcaccttcctccaacacccacagcattgcctatctccctgtgatagcttrattctaaagataacagcctgcctttactcagaaaccaggactgtgacgtgttttgcacacattctcttttcactttcacagtgtgtgactatggcatgcaacttatgttctctgtgcctcagtttactcaagtgttaaacaggaatactcacatgaggattacatgagttaaaatggataaaatggataaaagtagagagtaaattatttaaactttatcaaatccttggtacatgaccttaatacaattaagtatttgttaaatacatacattttaaagaaacgtcatcatatccacacacctatgaggcacctgcccaggaccacagagccaatcaatcaggtgatgagtgattccaggccagcaggaaaccaccgcccactgacacagggactgcaccatccatccttggtttgcatggtgcctgccatgcttcctgtattactgttaaatacatggggcaggcctttggaggatcccaatgttttaaaagggcaatac

SEQ ID NO: 810879 - DNA, 571 bp, Homo sapiens
aagcaaccaaactttaaaagaaatattcaacatttaaggcytcaatcaatctctacttaagcacctgctttcataatcctgaaactcatttaaaaaaaaaaaaaaaaaaaaactttctgacctttaaaaatgcaacagcctgaaatcaatttatttcagtcaggcattcaatagtatatacttgctaaaacagtcaaagttcaagttatagcatctgtgacatctatttttttcgtttttgcatttttgccttcttattttatttttttcttttaagttaaagtcaaaatggaactattatctctttggcagtttcttgggaatcctattaacctattgggaaataagtaaactctgagaatgattcctttcttaatatgtttataatgagagctttaaaaaaatgatctctcactaacctgtatttagaaacaagatgtaacttactgcatttcttacacaggatagttaatatttatctttgggattaagattactcattttcacactatggggcagaaaataaatattatgtataaattattatgcaagtaagataatatttatgata

SEQ ID NO: 810880 - DNA, 571 bp, Homo sapiens
aagcaaccaaactttaaaagaaatattcaacatttaaggcttcaatcaatctctacttaagcacctgctttcataatcctgaaactcatttaaaaaaaaaaaaaamaaaaaactttctgacctttaaaaatgcaacagcctgaaatcaatttatttcagtcaggcattcaatagtatatacttgctaaaacagtcaaagttcaagttatagcatctgtgacatctatttttttcgtttttgcatttttgccttcttattttatttttttcttttaagttaaagtcaaaatggaactattatctctttggcagtttcttgggaatcctattaacctattgggaaataagtaaactctgagaatgattcctttcttaatatgtttataatgagagctttaaaaaaatgatctctcactaacctgtatttagaaacaagatgtaacttactgcatttcttacacaggatagttaatatttatctttgggattaagattactcattttcacactatggggcagaaaataaatattatgtataaattattatgcaagtaagataatatttatgata

SEQ ID NO: 810881 - DNA, 460 bp, Homo sapiens
gtaaatctcatggagaaaagaacacgtacgtccggcagaatgggataggcacatataattctaaacagcacatagtttgagatttacagttaaatagtagagatgactgagaatattgttgacccagggcaaggaaaattttgtcattgggcacaattgagaataatgaatttataataagctggattcagacaattctgtatccttacccatgaatggataaaccagagagtgggactaataaagtgttcacagattgcatattttatttggaaaactatcaaggataattaaaggggcaagagattagctaagatataattggttctgggaacaaaagcaatagagttccatgaagcaaasagcattcatgatttgggtgaagcggggcattcacccagaataaaagacttgctaagtttgctcaggttacatcagggacacatgtaatataggtggt

SEQ ID NO: 810882 - DNA, 521 bp, Homo sapiens
gcgtgacgtaggctggcgtgggctcttcccccagccccttgccggtgctgccacgtgagaagggcccgggtgccggtcccgctattccggaattgtgggttcacctgaagtttgaggccaaacccccagcgrtcagtgggagaccagtcgcgtttgacctgttggtcgagctggccttgccgagacaaaaaagaaaaaacaagtgccaatgtgtcccggggggcagggccggggctgggatcctagtgtgtgcccagtctccttctcgtccctgcgggttccaccatcctcccatcctaacgcatcgttagggatgcggttaggtcgggtccatccccagggcggtccaaggggaccgctttctggtttgtcaggaaggcaggctagtaagaagggtcccgccgagtcccatctgccaaggacagggtcccgcagtgggccagggctggcccaaagcggccgagatgctgatccgccatgtgcggggcgctgttggcgttttttcctcagcaaagggcgga

SEQ ID NO: 810883 - DNA, 597 bp, Homo sapiens
aggtggggaaatggccattcctccctaaagtgaaggagaaaaaacaaggaggaatccagacaggggtagttaaaattcatagcccaggtctttgtcatatgctcatgttgtgctgaacccctgtacactccaatggggatgaatactgggttcagtaggctgaagaagagacccagagccagtgaatgagacatgaggttttattgagggcttacaattggggaacaagacccaacgacagtgggctggacaacagaaccacaaccacttgcaaaataaagtcacacaatttatagagggttttattttgagatggagtctcgatcagtcgccaggctggagtgcagtggcgcggtctcggctcactgcaacctccacctcctgggttcaagcgattctcctgcctcagcctcccgagtagctgggactacacgcacgtgctaacatgcccagctaacttttttgtatttttagtagagacggggtttcaccatgttggccaggatggtctcgatctcttgaccccatgatccrcccacctcggcctcccaaagtgctgggattacaggtgtgagccaccgcgcccggccttatata

SEQ ID NO: 810884 - DNA, 652 bp, Homo sapiens
tctatctacatcattttactttcccactagcagtgtatgacagtttcaatttctctacatcttcacatacttttttgtttgtttgttttgattttgtttttttgagaccaagtcttgctgtgtcgcccaggctggagtgcagtggcgtgatctcggctcactgcaagctccgcctcctgggttcacgccattctcctgcctcagcctcctgagtagctgggactacaggcgcccgccaccacgcccggctaattttttgtatttttagtagagacggggtttcactgtgttagccaggatggtcttgatctcctgacctcgtgatccgcccatctcggcctcccaaagtgctgggattacaggcgtgagccaccgcgcctggcctcacacacttgttattttcaatttggttttttttctagccatcctaataagtgtgaggtgtatctccttgtgagtttcctttgtatttgcctatttgcctaaatgaatgatattgagcagcaggtttttttttttttttttttttttttttttagatggagtttcgctcttgttgcccaggcaggcatcctgtactgagctgcttggccgtttgcatggaraaagcaaaggatttgcagcatgagagcctggcatgtttggttccatc

SEQ ID NO: 810885 - DNA, 628 bp, Homo sapiens
aaatgagcaccacggggaacggcccgcctccaagacaacctcggggacatggacacaacaagacagggtggcaagtctcaacaaggcgggtgcgcggcgtctgarggtggccgggccgggccgggcctggccttgcgtccacctcgtcaagaaccgtctgggtacgggccccgcgggatgccccgcggcccaccttcctccctaggacgcaaggaggaacgccccggcgcgcggccagcagcggcgggcaccggcccaatggccacggaactcagcactggcagtcggccctcctcacaccgcaggcgtgcagtgtggccgacggagcctcccgggccgaggacccagctaggccgtcaccccggttgctcccacgggaaggggcaccaggcaaactgcccaaggccccgagcccaggctccctggcggaggcctccgctggtcccgcccagatcatggccgccaccaggctcccgagccatggcttcctgtccgggaacggcccggcgtcctggctgtccagctagtcctggcgcctctctctggggcttccaccgcccgaccccgcggcggagcctgcttctctcggacctccagagacctcggatccgtccgagcacctgcccta

SEQ ID NO: 810886 - DNA, 478 bp, Homo sapiens
acattgtttgactctttcatgaaaggttcctctgtagtatgagatgctatctgatagtattttacccacagmattacatctttcaaaattggagtaaatcttcccaaaatctgctgccttaccaactatgtttatggaatcttctaaattatttgctgtcatttcaataatttcacagcatttttgccaggagtaaattccatctcaaaaaaatagctcacctctttttctcatccattaaaagcgacccattcatttgttaaatttatgtcatgagattgtggcaattttgtcacatcttcaggctccacttctaattctgattatcttgttaacttcaccacatgttcaaatacttcctccactgatatcttgaatcctcaaagtcatccacgaggactggaatcaacttcttcaaaactcctgttaagttgatattttgatcacttctcataaaccataaatgttcttaatggaa

SEQ ID NO: 810887 - DNA, 769 bp, Homo sapiens
agttttttaatttttttttatttttaatttttgcaggcacaaattaggtttgtatacttatggggcggatgagatgttttgttaaaggtatgcaatgtgaaataagcacatcatggagaatggggtattctaacccctcaagcattaattctttgagttacaaacaatccaattacactctattagttattgtaaaatgtccagttcaattattatgtactgtagtcacctggtgtgctatcaaataaaaggacttattcattctaactgttttttttttttttcagtactcactaaccatccacaccttcattaagcaccctactacccttcccagcttctggtaaccatccttcactctctatgtctgagttcaattgctttgattttttagatactacaaataagtgagaaagtgaagtcagccagttacagtctttctgtaacttcacttaacataattatctccagttccatccatgttattacaaatgacaggatctcattttttatggctgaatagtagtccattgtagataactaccacattttctttatacattcatctgttgatgcacacttaggttgctgccaaatcttagctattgtaaggattgctgcaaccaatatatagggtgcagatatatcttcartatactgatttcctttatttggggtaaatacccagcagtagaattgccagatcacgtggtaactcaatttttagttttttgaggaatcttcaaactgtttttcatagtggttgtac

SEQ ID NO: 810888 - DNA, 591 bp, Homo sapiens
tagatttcagctcaacgtaagtaaattttgaaacatgaaagtttcctaaaaaccacacaggcttccccaggagatagtgtttgagcaggcaccaggtgaccttttcacaggaatgtcataaaaaatgacttaagaataaatgtggtatagaggaatctagtattttttctgacttctaatagtccatgattctattattttctaaatggtctctagcaagtaactttatctgaatatgttcttctctgctactgccagtccattcagtcatttctactgaacctacttctccctatagctcttaggctagctataccactggactggtctttgcgctaataggaaacatacacggtgtttgctagctgggacaggtaaaattcaaattgccttttactattcctcaagagtgttttctaattcattttgccttgtcattgcttgaggctcttctgacattgaccttttgaccagctgttgggtttgcttttcagtagtttggtccttcagtrtattactttccccagattgctgactcattgctctgatgctttatttgcatgagtttttgaactctagattttctatata

SEQ ID NO: 810889 - DNA, 534 bp, Homo sapiens
agaaacagggacttggtatgttgcccaggctggactgggcttaagccatcctcctgccttagcctcctgagtagctgggactayagtcatgtgctactgcaccttgcttgagaagggaccttttttttttttgagacggagtctcactctttcgcccaggatggagtgcaatggcacaatcccggctcactgtaacctctgcctcccaggttcaagtgatttccctgcctcagcctcccaagtagctgggattacaggtgtgtgctaccacacctggctaattttgtatttttagtagagacagggtttcaccatgtttggagatgttggaggagatgcctcccaccctttatggaatggggccaaagccattctaacttcagtattaatgagaaggatgatcccatacagcaggaggtgtggagggcagatgctcaggctgacattaaacaacagtctgaggaaatgtgaaacgggcagggaatatggcttccataggcatggcctacttggggttctcaggtgcctcgtttg

SEQ ID NO: 810890 - DNA, 542 bp, Homo sapiens
taccagagggacctgtggaagttcaagctgcagactaaggcacagtcatgaaataagagtccagtaacaggaccctagtgatcaaaggaaatttgatcactaraaacaaggagaaattaaaggaccctttccctaatgaaaggactagtaagaacaaggtagagtctaaagcagacatcagtcagtgatatgctagtaaatgtctaacacttgaccctctgggggaaagccctgttatgtagtatttagtaatttctacagtacaaatactcctaactatggcaatttcaatttcaaattatcaacatggcatcacagaatgtaggatggggaaaagggtgtgtagtagcaactatcataggttgagcatcccaaatccaaaaatccaaaatctgaagtgctccaaaatccaaatgttttttgagcactgacattacagtcaaagaaaatgttcattggagcattgcagatttcagattttcagatttgggatactcgaccagtaggtacaatgcaaatattccaaaacaaatacaaaaaca

SEQ ID NO: 810891 - DNA, 537 bp, Homo sapiens
gcaaatgagcaggccttcggcagctccaaatggacatcttaactgacacygtctaccagtcactcgtgataagaattcggatctgcccctgaaagctctgccacattaaacactcttccttgtaagaccaaggcccagaccagacttccttgcaagaccaagactggctccagaccagaacttcgtttgtcttcttagctcccccttagactggttaattaactctttctcctatcgctttttccccttcatgttaaatgttactttgtttcttgtggaatgtttaatctataacatttatatattaattaagtatactattatgtatgttttgcaatattgactgacttctagcatggctagagcctgtgtgtctgtggctctgactactgagtgaatgggaagcactaagaattgtctccttgggacctccatgtagctcatgacttttgtgactgaaatagcaacaataaaagcctgacattgttgaaatacacaaatatgcatggacctggttatctcttatgttgcaccgct

SEQ ID NO: 810892 - DNA, 595 bp, Homo sapiens
tgaacatccacaagcatcatgaccatccaggaaaacatgatctcaccagacaaactaaataagtcaccagtgaccaatcttgaagggacagagatatgtaacctttcagacttcaaaagaattcaaaagagctgttttgaggaagaaacatcagacttaatctgcactgtagaccaaatggatctaatagatatttacagaacatttcatccagtagctgcagaatacacatttttctccacagcacatggttcatcatcaaggatataccatattttaagttacaaaacaagtctcaaaacattcaaaaaaattgaaataagcatcttctctgaccacaatggaataaaactacaaatcaatagcaagaagagatttggaaactatatcaacacagtgaaattaaacaatgtgcttctgaatgaccaatgggtctatgaagaaattaaggaaattaaaatacttcgtgcagcaagtgaaaatggaaacacaatatacccaaacctgtggaatayggtgaaagcagtaataaaaaaattttagcagtaagtgcctacatcaaaaaatagaataacttaagcaaagaaactaataa

SEQ ID NO: 810893 - DNA, 600 bp, Homo sapiens
atatgggcttcttctcaccaagtatgatccagctaaaagctgccaaatagctaacctgtcattgacagaataaagttacctttatccaaaaatgaaacaaagataatgttcatgggacagaaatagctttggaaaaacaattgactgaaatgccaactgcaagtgacttttgaaatgatatttgttctaaatgcggaaaattgaaggcttcctctacatgtgaataagtaagtcttggcagtattacttggcagtactactgctggagatttttctagaccaacgctttatggttgggctctgctggccttcgaactttgccttgatggctgtcagatgatttctgacacaagcaaatccaaactatcagagaatcatttcaccctggttcacaaagctgcacacctctagctgtaatctcatgtgaatgatggcactgaacttgaaagttttgtatgcaagaaggttaatgagaaaattgaaactccaaaaaatcttgtttggagagctggtagtgacaacacccgattttgctttactacagtatacaarctggattatagatcttctgcatttggtagagtaactcatgccagtctg

SEQ ID NO: 810894 - DNA, 558 bp, Homo sapiens
atgctgattggtccacgggcaggaggaggtatgtgcyaattggttcatgggaggacatggaaaaagcatcacttgattggctaaaaggcatcaaagaagtggtcactctgggtgtcagacttcacctggaacttggtaaagttccccaggcttcaggctgtccctggcttgaaggtggggtttcaacagggacccaccctttcctgcctagaacctgtctgcctcctgctgccatcaacacgctgtccatggcattcaggctgtccatgccaaggggcacccacaggcctgagccgagccaccctcagccccctggcctccctcccgtgctcgtcagtaaccaaagtttcagtctcagaagcagtttccagagcagactgaggcagctgggggttggtgtgtcagcaccaccccaagcatgcacacacccagccgggtcatgccagcacccaggctcagctattgggacgtgaccacagctttgctttgctgtggagtggggagaggccaaggagtgggagcaggcacttctgagcctgtgggggtagggggcttctc

SEQ ID NO: 810895 - DNA, 480 bp, Homo sapiens
gattggtccacgggcaggaggaggtatgtgccaattggttcatgggaggacatggaaaaagcatcacttgattggctaaaaggcatcaaagaagtggtcactctgggtgtcagacttcacctggaacttggtaaagttccccaggcttcaggctgtccctggcttgaaggtggggtttcaacagggacccaccctttcctgcctagaacctgtctgcctcctgctgccatcaacacgctgtccatggcattcaggctgtccatgccaaggggcacccacaggcctgagccgagccaccctcagccccctggcctccctcccgtgctcgtcagtaaccaaagtttcagtctcagaagcagtttccagagsagactgaggcagctgggggttggtgtgtcagcaccaccccaagcatgcacacacccagccgggtcatgccagcacccaggctcagctattgggacgtgaccacagctttgc

SEQ ID NO: 810896 - DNA, 524 bp, Homo sapiens
cctgtggatgaccactcagatctgcccaccaactccatgcagctcactgccccacaaatagcaaccactttagcagcttagaattctattaaataatcmctgcctcctcaagtcagaaagactgccactgctacatggcaggaaagtgccctgtgcagaatactggggaatctatggggtaaccatggggtttccctcatgtgtttttttttctgtcaaagatcatagtttgcttcatattttttctacaattttgtagttattttcagcaggagggtaaatccagttaacagtccaatatctgtacttgacttctcctagtaaccatgtcataggaatggtcaccaggaatatgtgaatgatagaagtgatatctttgtaaagacatgtgtgacatatgttctgttttgtagacttgttggagcaataatggtaacgtcttcctaaatcctaattctgtatttattactgctgactaccatcttgagcaatttgctttactctttctctcagtccctctctca

SEQ ID NO: 810897 - DNA, 524 bp, Homo sapiens
acagcttttgtcctttggttaacaactgacaaagattggcatgccttttgttattgataaggccatatttctcatattattgttatacaagtgacttcagggaccacagaaaaatatagattagytcaacttgtggctctgttaaaacttcaagagacattgtcaaaaatcaatatctgaggtactaaacgatgtgtttctaacaggtcttttgatgtcaagtcaccctggaagtcatgctttcgcaggtgttgctggcaaacacaaacactcttgacaccagatatgacacagactttttgatcctgttgttaggaactggaacatgaaccacttcacttctgtgatttctcctgaaaactaatgcatgggggaaaagggaagcaaagagcagatgcagactaattcagtgggcaaaataccttcttgtttgtcttgtaagtacctgctaaatctggatggaaagaaagttattcctgagatagttccttgttagtaagggaacaagctagatatctgaatgt

SEQ ID NO: 810898 - DNA, 632 bp, Homo sapiens
tattcaagaaattctatgcaccttaaaaaaataatggtagaggggatgaaacatccacttaactgaaagaagttagaatctggggattagcccaaccaaggaagccacagtcctgtctaaatgtttatttgtcattttcccataaagattcatggggcatattgtcttgaaattgccactgaaattgttgactggggagaggagacaaaagagatgggcgagggagtccagggtgtggaatttatgaaactttgtcttttgtagttgtagttctagaaagtcaaggccttttaagttaattgtaaaaacacatttgacattttcatattgaaggcactggccctgagctgttctcttctgtgtctgtcatgtcggcatgctgtgaatttggctggtgagatgccagggcctctggggacctccatgacctgccagcatgcaggttacgggtgattcccgcgatcgcgtgtttggattaaaccaggttcagcgggagtcgcctggtccagacacactggaccccggtgacttgggtcctgacacagactggccgagctgggggygtccccagagaccagagaccctgggaatggcgagcatcgaggcgcggagttgcatggaagacccagggc

SEQ ID NO: 810899 - DNA, 576 bp, Homo sapiens
ggatgggaaattggacactgagaaaagtctcagtaatatctctcaaattttaatagayggttttgatgttttcattataatattttattgtatttttaaaattccctctgctacttcataaattttatagaaaaccatcttacaatttaatttccgagtcactgggatttttaagtttctagtttacattttacttttctcctttctttttcggatggagctctgtcacccaggctggagtgcagtggcgcgatctcagctcactgcaatctctgcctcccaggttcaagcaattctcctgcctcagcctcccaagtggctgggactacaggcatgcgccaccaggtctggctaatttttgtacttttttttagtagacatggggtttcaccatgttggccgggctagtctcgaactcctgacctccagcgatctgcccaccttggcctcccaaagtgctgggattacaggcgtgagccaattttctattttcattgcattatgcaaagtaagtataacctgatatttgctaagatttttctctgtaaccaagaataagatgaactttcatgaagg

SEQ ID NO: 810900 - DNA, 607 bp, Homo sapiens
gcatttgtaggacggttcctgtcccactgaggttaactaaatggtctggggatgggcaaggagaaagaaggggagcacttgcaaagtagctggctccactttggaggwaaaaaatcctggggttgtttttgaggtccggctgagaaccaagagcaacaacaaatcatctatatttttttcagcgcatcatgtctatttttcacgtagcaactcccttccgggcattcggaaaacgctcctcgtcggatatttctacccacaggatgctctttctgtttaacatggaagtagctttgaattctctctgcaaagaagaggtccggtatcccggcgggagaagcaaagtgccactgggtgctggaacgtggaggagagggctcgcaggaggaagggtggggcttgggaaggaaaaaggcgcggctcggaggagaaaccggctgctcacaatccgcgaagccagaagttacccggctcgtggaaccacgtccacttcccccagccagttccctcctgggtttcattcttaaaaagcgatttgtattggtgcctctcttccgtgtgctacaaagagaagtgaccgctagagggcaatatgctgcaaaataag

SEQ ID NO: 810901 - DNA, 564 bp, Homo sapiens
agtgaatttaaagaaaatattaactacacaatggtccaggacataacaaaaatgtttgaaagtgatgctcaaatgccacctagtgcttatagtcttagagttaattttacaaaagagtggaaagtcactcccctcctcctctcaccaggtttcccaagagacctggaccaggctagggtaaagtgcagcccagggctataacagaacaaagtgaaattgtagtttcaaggatcaaatttgctgcctttttggcaaccagctgaattaactgactctaaaaagcagaagcagtataattagaatcattaggagtccagagaaaaagacttaaaattacccacttttccctgggtggtatgacaaactctcactgtctttgattttatgaagctcagctttcctacagccctgtcactctacaggttggaagcgtgatttcataccacgtacttcaaggccaacttttccttgtccggtcctcatagtctcacrtgaagtttatgttatttgttcattcccattatgctagacagacaatggatgcacacatagttttcatcttgg

SEQ ID NO: 810902 - DNA, 588 bp, Homo sapiens
cagacaggcagtgtggcccctgacacagacgaagtaggaaacaggagactccccagtgattagctggcatattatcaaatgccccccaaagttgtctttctctctatgagctgcatcttagccccagcctgagagacaagtttattgtcctcgggatcaggaatgcgaatgagatacccactggtttacagaatatccaccaattctccatttcctgggaaatacaggaatgcaggtccctggctaggtacgagccttattaaatcagaatctctgggcagcaaagctgtggcatctgcatttgtaagctaccagatgatttttatgcacactcaagtttgagaaaaccaatagacagtgcttcaaaacacctatttatgactggctgatcatgtaacaacaataataatataataataaccggcacttatgtagtgcttagtgagggccaggcagtgatctaagcactctacataaaataactcatttacttccataactacctggtggggtagaaatgattattgtcttcattttacagagagctctttaaaaatataggatcckagccccacccccagaaaatca

SEQ ID NO: 810903 - DNA, 547 bp, Homo sapiens
aagatcatcaatatggttgtcagtgttgctcatgaagtactaaataaaagattcctagctgacagacactaaaaattattaatttccaccttccgttttcccatctatacccaattagagttacctaatggktatagttctttatttttaagaactattaatttctaaagcctttatatttaaaataccctcttaattccgtatagctacacatttaaactccagcctcagggataatttctgcttctggaaattggtcttctccttctcattttcctttccaccgttaattcatagcttctcacttgttaatatgattaaatagtttgctaaattatatcaaaatggctttctcgtttagctcatagcattgttatattctgtccaataggctgaaaataaaaagaagctaatctttattaagcacacatatatgtatacacagaaacaaattcaccttttaaaaaaagggagccttgataatgtttcgtatttaaattctatttcccaaatggatagggttgacattcatctaattagtgatcag

SEQ ID NO: 810904 - DNA, 547 bp, Homo sapiens
aagatcatcaatatggttgtcagtgttgctcatgaagtactaaataaaagattcctagctgacagacactaaaaattattaatttccaccttccgttttcccatctatacccaattagagttacctaatggttatagttctttatttttaagaactattaatttctaaagcctttatatttaaaataccctcttaattccgtatagctacacatttaaactccagcctcagggataatttctgcttctggaaattggtcttctccttctcattttcctttccaccgttaattcatagcttctcacttgttaatatgattaaatagtttgctaaattatatcaaaatggctttctcgtttagctcatagcattgttatattctgtccaataggctgaaaataaaaagaagctaatctttattaagcacacatatatgtatacacagaaacaaattcaccttttaaaaaaagggagcctygataatgtttcgtatttaaattctatttcccaaatggatagggttgacattcatctaattagtgatcag

SEQ ID NO: 810905 - DNA, 588 bp, Homo sapiens
ctgctgagtttcattcactttcactgctccagtatatgctttattagaaatacaccatagtgtatgtatttcttctcttgtccataaacatttaggctgttctgtgtttgctattatgaacaattttgttctgagcaaacttctatgtgtctccaggaacacagtgaccaagagtttctctggactatgtaattcagagtggagtttctgagttataaggttttcaactatcgcttgaaattttattccatagtggttgtatctgtttataaagccactagcagaggatgagagtttttgctgaaccacagtttcatcaacactgtgtactaccaaaattctaaatgtttgccaatcaagaagatataaaacaaatcccattatagtttttatttgtatttccctgattactgataaggttgagcatcttttcacagtttaattcaccatgtatgtttcctcttcagtgaactatttatttcttttgcttattttctaatttctgttagtttmtttcttatcaacttatcatagtctgctattaatactgaatattaatctcttgccaattatgcgtgatatgaatat

SEQ ID NO: 810906 - DNA, 538 bp, Homo sapiens
gaaggatggtaactgcggaggattttattgccaatagaggtggttctcagcgagaaggggagctgaaaaggggacagggagggatggtaatcttcccctgagatccagctatctctrgccagattattctctgaggttatgctgtcaagctgtccctttaaagtcaagctgcttctctccgacgtccagctatagtctctgacatccagctgctgcttctctctctgccgctaagttctggggtttttataagcacagaatggggggtggggcgggccatgggtggttttggaaaaggcaacattcgagcaggaaaacagggatgtaacttctcactttgggccacggtttcagtttttttggcttgcaggtagggccctggcgggggccctcttctgcccagaatttccctgcctcctgtccctatcaatattaagattgatctgtgggctggttgtggtggctcacacctgtaatcccagcactttgggagaccgagacaggaggaccacctgaggtaaggagttcgagaccagcc

SEQ ID NO: 810907 - DNA, 648 bp, Homo sapiens
cttaactgcaaaaaatagaacccaccccagctagattaagcagaaaaagaatttgtcaaaggaaccaggtgacttataaatcctaggggtaggagggacagagagtcagacttagcaatgacataaaaaggacaatgcctaagtcatattgtagaggctgcagtgacagagacagtggagcccacacaagaactacatacactgtggggcccagtgcaaaatgaaaatatgagtccacttgttcaagtagaatacttccattgaaggtactaaaatataaagctctttcctttcttctgcagcctttctcaacttttcacgagtgttttttcttgccatttcatgttgttctaagtaaagaaaaattttaaatttatgaatttttaaattaaaaaattcgagtatgaattttatcatttttctttatatcagttttaaagatgatatgtcagttttaaatggaaatataaaaacatttaattacatacagaattacagaaattaccacaattcayagattatagcttgtatgtgcgtatgcattttgttcttacaaggagagtgtaaacactgtacaaaactaacctaactgctttcatttcacttcttgatatatatgctcattctgccaacactctctgcctttgg

SEQ ID NO: 810908 - DNA, 645 bp, Homo sapiens
tacgttatcccataaagtgaatttggtagagagctatactttgycactcagttcctgagaaccttttcttgtgacctatcatcaatattcaccttcaacgcacactgatggatccaacaatatcaagaaaggcctttcctcaaataactgggggcgaatgtataaattccctatgatagacagtgtgttatgaatttctgaagttcatttcaaactctttttttattctattttaactttgtattattcttattgttctctatctttaaagacaggtttattctcacgaaaaacatgtttcactttatcagacgttatccaaatgacttacgtgaaaaatttcctggctataagattgttcgtatattcatctatcttttttgttttatttttgtttgtaaaagtaaaggccttacattctgaatcttataagaaaatttaaattacacaagtcagaaatacataattattttcatgatagaaataacattggtaaattggcttctatttcttccttaatatttattgattcagatgatttggatgaaattatatgtatagataaatgaatattgagagtcttgttactttttttggatatgtttttcagaattcatgtaagcaacttattgctcaataaatatt

SEQ ID NO: 810909 - DNA, 645 bp, Homo sapiens
tacgttatcccataaagtgaatttggtagagagctatactttgtcactcagttcctgagaaccttttcttgtgacctatcatcaatattcaccttcaacgcacactgatggrtccaacaatatcaagaaaggcctttcctcaaataactgggggcgaatgtataaattccctatgatagacagtgtgttatgaatttctgaagttcatttcaaactctttttttattctattttaactttgtattattcttattgttctctatctttaaagacaggtttattctcacgaaaaacatgtttcactttatcagacgttatccaaatgacttacgtgaaaaatttcctggctataagattgttcgtatattcatctatcttttttgttttatttttgtttgtaaaagtaaaggccttacattctgaatcttataagaaaatttaaattacacaagtcagaaatacataattattttcatgatagaaataacattggtaaattggcttctatttcttccttaatatttattgattcagatgatttggatgaaattatatgtatagataaatgaatattgagagtcttgttactttttttggatatgtttttcagaattcatgtaagcaacttattgctcaataaatatt

SEQ ID NO: 810910 - DNA, 645 bp, Homo sapiens
tacgttatcccataaagtgaatttggtagagagctatactttgtcactcagttcctgagaaccttttcttgtgacctatcatcaatattcaccttcaacgcacactgatggatccaacaatatcaagaaaggcctttcctcaaataactgggggcgaatgtataaattccctatgatagacagtgtgttatgaatttctgaagttcatttcaaactctttttttattctattttaactttgtattattcttattgttctctatctttaaagacaggtttattctcacgaaaaacatgtttcactttatcagacgttatccaaatgacttacgtgaaaaatttcctggctataagattgttcgtatattcatctatcttttttgttttatttttgtttgtaaaagtaaaggccttacattctgaatcttataagaaaatttaaattacacaagtcagaaatacataattattttcatgatagaaataacattggtaaattggcttctatttcttccttaatatttattgattcagatgatttggatgaaattatatgtatagayaaatgaatattgagagtcttgttactttttttggatatgtttttcagaattcatgtaagcaacttattgctcaataaatatt

SEQ ID NO: 810911 - DNA, 645 bp, Homo sapiens
tacgttatcccataaagtgaatttggtagagagctatactttgtcactcagttcctgagaaccttttcttgtgacctatcatcaatattcaccttcaacgcacactgatggatccaacaatatcaagaaaggcctttcctcaaataactgggggcgaatgtataaattccctatgatagacagtgtgttatgaatttctgaagttcatttcaaactctttttttattctattttaactttgtattattcttattgttctctatctttaaagacaggtttattctcacgaaaaacatgtttcactttatcagacgttatccaaatgacttacgtgaaaaatttcctggctataagattgttcgtatattcatctatcttttttgttttatttttgtttgtaaaagtaaaggccttacattctgaatcttataagaaaatttaaattacacaagtcagaaatacataattattttcatgatagaaataacattggtaaattggcttctatttcttccttaatatttattgattcagatgatttggatgaaattatatgtatagataaatgaataytgagagtcttgttactttttttggatatgtttttcagaattcatgtaagcaacttattgctcaataaatatt

SEQ ID NO: 810912 - DNA, 495 bp, Homo sapiens
gcagtcagggtggggcttcctggaggaggtgacacctgagctgccgggaccctcccaggggagttggcgtttgcaggtgaggaggggagacaggcactgtgcccaggccctgctcttctacaagggaggcgccttccctgccccaccgcagcacccacctcccctagaaataaatgctgaataaataaagacctgtttgaaggagtgccaaattactggctgcccaggaaacccaaccgccagcctgggccgcccacgtgtcctggtcgggcctgagcggggccagaggctgtgggagtgggtgggtgggtggggaacaaatccagctctgcatggctggagtgtgcagggcagggcaggaagtggtgggcagagaccagcgtggccattggggtgaggccaaggayctcggaaggtcagcctcgctgcagggtgtggggcaggggtgagacgtgggcagtgagggggatcccaggaagctacggcggaggaact

SEQ ID NO: 810913 - DNA, 641 bp, Homo sapiens
aaaaaaaaaaaaaaaagaaattcttgccagtggcttgtccccatccatagaagtttttccttttgtcaagccccctgaccgcaaagaaccccacatcgccagactctaatcacctctgcccctcacaggccccagctcttctcctgtgggctctggccaggttccccctactaggcagatatggaaactgaggcccctctcacgccttcctctccgctgcctcgcagtcacagaactgaggcctggtaaagcttttgccatccacactcttgttcactgaaccttactgaggaccctctggccggtgggcgggactatcccatttcacagatgggaatgcaggatgcaggtcatttgcagaagtgagtgtgtacctgggcatcctaaggaactcctaaggcacaagctggccacttcctcctggcccggtgcagaactggccaccagaaagcaatgcccatatgaacctagccttcagctcccctggcattcgggctcacggctggatccctgacctcctataagcgtcactttatttccccccaatcctggaccacttctcccctcctctcrcttggttccttgaaggaaacatgccaaggggacctgggagcaggtagagggaccaccccgtcatctcc

SEQ ID NO: 810914 - DNA, 574 bp, Homo sapiens
gaggctgaggcaggagaattgcttgaacccaggaggcagaggttgcagtgagccaagatcactccactgcactccagcatgggcgatggagtgagactgtgtctcaaaaaaaaaaaaaaaaaaaaagccagcaaagatttaaaatcaagagttttctttataatcatgaaaaatagttcagataaaagaaattaaaagactagcagcaccaataagatgaataccttataaatgagagggctaatgtgtattacaaagttaaaatcagcaaatacaaaattaaaatgaaaagctatgaagttggtcttaaaagttactctccacaagagataaaagttaagaggtttaaaataatgataaagtgacaaaataaatgtgatttaagaagatagatgatcaatgcctcaggtctgggattaaaagattaaaaatacaaacattaaagacgtaagtctgagaagatggagatgaccacccaggagacrgagagacggtgcagagaaggggaccgcagatgaagaactggcattagggagaaagaatatcttgtttcttttcttttcttcttttttct

SEQ ID NO: 810915 - DNA, 563 bp, Homo sapiens
aggctggtaccatgagtcaaaggaaacctgccaggctgagtggrcagaatgagtccagcgggcctgagcagaactcgggcaaaggtgtcactggccacagaggtttctggccagaaaagcaacaccctaaaaattctgtgacaatatgaagactaagaaacattaaatggatttagtgacatcaaggatatttgggaccttggtaagagtagtcttagaggagtcatggggatgaaaacctgatcagagtggattcaagacagaatgaggtacacccatgtttctggcagcattattcataatagtcaaaaactagaaagaacgtgaatgtctatcaatgagtgaatggctatgcaaaatgtggcatatacgtacaatgaaacactattcagccttaaaaaggaaggaaattctgacacattctacaacatagatagaacttgaggacattatcctaagtaaaataagccagtcacaaaattataaatatggtaagattccactcatatgaggtacctcgagcagtcaaattcatagagatggaaagtacaatgttggaatga

SEQ ID NO: 810916 - DNA, 624 bp, Homo sapiens
agagagtgccttgatttccactttgagaacacagtgtttgagagtctctttaatgtggtatttggtaatgtaaatggaaagcaaaactcctttccaaagtggaaggatttaagacaatgaacaactaaattgattggcaaagtaaagtaaaggccgttttcattgtgaagtgaaatcttggcaatgtgtttctttaaggaaatgcttcttgttcttaatatagatttgggctgctacgaatctggatattcttttggttcccaaagaaccaaatcattacgccaggagggctagagctgaggtgggcatgaacaaaggatgaaggagtctagtttctctttgctaatgtgaacggaacacagaggtgggcctggtagttccagagcccagcaccttcagttctgtgcgcagttccctcttggtgtttttttataccagatgtttcaaaatgtgaaaaagatgctactgtcagcttgaattcggatgccttgtccttttsgcaataggaggtggggccttcctgaatgtcagggcttcctgggtggttggccatcctggaaggcagaagtttgtgagcagtgaagttttccttcaaacattggttggggcctgggctctgggaga

SEQ ID NO: 810917 - DNA, 632 bp, Homo sapiens
tcctgaacaggtttctgggttctcagtgagatgcrgtgtgttttatagatgagcttagggaggtggtctctgatttatatagggcccaaagactggttggaccaggtgtatcatatacatagcctgcaaagaagctggacatattccaccctaattttttattacgcagatggagtctctacctggctggcggcatgttgcctgcttttttactgcacacacgtggcaacaaagaaaagggaagagggaacctccatgttgaatacacctggcccccaggtagtcttttcctattggcacagctgctggcatttacctatgcaagcttccagcttgcttatctatgtctgtagctcaattttacaagctggtctttgttagaaaagaaatgatttgggggctgctttttgttaaaagataattccactaagaactctcttacccttactaaatacctaaataatttttgtttttttttagctcctgtatcactggttactggcccgtgtggttaggtttaaatggcagggttacagaaaatctccagaagggccagtagctattaagggattatgtctgctttttgagtactgtgcttacaattttagctgttaatgactaatgtttctcag

SEQ ID NO: 810918 - DNA, 632 bp, Homo sapiens
tcctgaacaggtttctgggttctcagtgagatgcagtgtgttttatagatgagcttagggaggtggtctctgatttatatagggcccaaagactggttggaccaggtgtatcatatacatagcctgcaaagaagctggacatattccaccctaattttttattacgcagatggagtctctacctggctggcggcatgttgcctgcttttttactgcacacacgtggcaacaaagaaaagggaagagggaacctccatgttgaatacacctggcccccaggtagtcttttcctattggcacagctgctggcatttacctatgcaagcttccagcttgcttatctatgtctgtagctcaattttacaagctggtctttgttagaaaagaaatgatttgggggctgctttttgttaaaagataattccactaagaactctcttacccttactaaatacctaaataatttttgtttttttttagctcctgtatcactggttactggcccgtgtggttaggtttaaatggcagggttacagaaaatctccagaagggccagtagctattaagggattatgtctgctttttgagtactgtgcttacaatttkagctgttaatgactaatgtttctcag

SEQ ID NO: 810919 - DNA, 386 bp, Homo sapiens
ttttcagacaaagctgagaatctgtccaatttcttgtttggctaaggtagtctttattttaatagaaaggctagtcgacttggcacatttgcaaatgacaagagcaaatgaaagctagcaacatttagataattctcatagccaatgggagataactttgtgtatgtaacagctgcacttttttttccacagcagtttaccaaaaggagtaatatattctgaaaacagtgaaaaaattttgtctagttttacagttgttaatcaccatatgattttatagccatattgtgaaagaaattttgttgggatatgtgcatttaaaaagagaatygtacctttatatagttcatgcatcttaactaatatgccactcttcttttcaatgc

SEQ ID NO: 810920 - DNA, 572 bp, Homo sapiens
agaccccctgtaattatccccagaaattcagcaattacgtatcactggaagctcctggtgccctctgaagcctaattgccacccagtctctgattccacagctgggagtcatggtttcatggctctgccttggagaggctggcagaaagccagtaaaagtaaaccagtaggtaggtaagagtcaagtgaaatgggccaacatggtggagtttgccaacctctgaagtaagagcttagctctttggttttggaatggcagaatacattttggttttaattttctaatttgtggttaaaaatgcctcaagatttagtcaaggattaatcctgtggtttaacttcctttttcctgggggtatgaaatgtttgagtcaagccaccaacccatatcccagcaaatgaaacctatttgcatttctcatgtgtgtaagcctagtaaatgttgattgcttccagctcactgacacagcagcagtrtgctttccattttgttaccaaataatcaaacctcaaacaggcactgtctctgggcttaacaggaagcatgactcacacctctaaccacgagaagg

SEQ ID NO: 810921 - DNA, 650 bp, Homo sapiens
gttctgttctggtgcttaagatmatttatatggtatttcttaaaaccaatgacttcataaagcttctaaagttgcaattaattaactgggcaactgtgttgtttttcttatttatttttcaaaataacatttttttcaaatcatatatttgtgacattttcaatgtagaaaattcgagggaaaagaaaaacatgatgaaaacatcatgactgtactttccctcatccaaagaaaatattttggacgtgatgtacttccgttattaaagtattgttatcatttctagacaggtttagtccttcaattaagatctcattctatctccttatcccttctatagctgcacacattttctttacatgtggcaatttagtttaatctttgccagatttaaatacagtaatgtagccagatttcacttaagactacttattgatatctaaataagtgaaaatttccagccctttgtgagaaaatttctcataatttcctttgaaagccaacatatttatgggagcactttgctataaatctccttctttaatctcttttaaattaaacctacattgtgtgttgaaatctttgaaagttataaaaataattattatctcactcattccactgtaaaacatggctgcacctgagacagg

SEQ ID NO: 810922 - DNA, 641 bp, Homo sapiens
tacacattagtacactcataggatgggataggtttgaacctacttgcctttgttgttctggggtgatgttagatttaagtggttgggaatggttgtgtaattgtacataagagctgcattgcatgaggctacccagaatacacgagagcagctggcaaacctaggtattgaagctgatagcaggtagcctataacaaattgaaagaatgaaggccaaccagatctggctgccaacctgtgatagcatttaaaaggttgaactaaacttctgttaagaacatgagaagcccattaccgcacagctttaaatccccgagctaaataattaactatagatgaaactcttttaactatacattgccctggtagtactttattcaaattaaaagcaaatcactttcataatacactcatcagtttaaacgcatggtatacgctaacattattaaaacatatgtctgtcatgaattaaagcattaaaggcccacctcattagggtcacacaggtcctcaatatgccataatgacttccctaaatatattatgttgattacagaaaaaaaayagcatacttttagaaagtatttaaaataattcattgatcatcctgcactgctttagttcttactagatatttttaa

SEQ ID NO: 810923 - DNA, 630 bp, Homo sapiens
tattaataacactattatattaataataattgttaataatatagtgttaacagtattataattatattaataattaataacactcgtatattaataktataattaataataataaagtgttaatagtattaacactattatattaatgataatagtgttaacactattaataatgtaatagtatctacactataataataatatagtgtttcataatatagtgttaggccgggcgcggtggctcacgcctgtaatcccagtcctttgggaggccaaggcaggcggatcacgaggtcagaagatcgagaccatcctgtctaacacggtgaaaccccgtctctactaaaaaatacaaaaaattagccgggcgtggtgggggcgcctgtagtcccagttactcgggagactgaggcaggagaatggtgtgaacctgggaggcggagcttgcagtgagcagagatggcaccactgcactccagcctgggcgacagagcaagactctgtctcaaataataataataatatagtgttaacactattatattaataatatagtgctaacaccattatattaataatatagtgttaatagtattaacattattatattaataatatagtgttaacaca

SEQ ID NO: 810924 - DNA, 630 bp, Homo sapiens
tattaataacactattatattaataataattgttaataatatagtgttaacagtattataattatattaataattaataacactcgtatattaatattataattaataataataaagtgttaatagtrttaacactattatattaatgataatagtgttaacactattaataatgtaatagtatctacactataataataatatagtgtttcataatatagtgttaggccgggcgcggtggctcacgcctgtaatcccagtcctttgggaggccaaggcaggcggatcacgaggtcagaagatcgagaccatcctgtctaacacggtgaaaccccgtctctactaaaaaatacaaaaaattagccgggcgtggtgggggcgcctgtagtcccagttactcgggagactgaggcaggagaatggtgtgaacctgggaggcggagcttgcagtgagcagagatggcaccactgcactccagcctgggcgacagagcaagactctgtctcaaataataataataatatagtgttaacactattatattaataatatagtgctaacaccattatattaataatatagtgttaatagtattaacattattatattaataatatagtgttaacaca

SEQ ID NO: 810925 - DNA, 590 bp, Homo sapiens
caaagattggatttgacggtgccctaggaggaaaaaaaaaaaaaaaaaaatatatatatatatatatatatatatatatrtgtgtgtatatatatatatgtgtgtgtatatatatatacatgtatatatatgtgtatatatatgtgtgtgtatatatatgtgtgtatatatatatatggagcaaagatgcacttaagtggattattgagaagactcgtgggtaggtagaaaatggcaaccatagcaagatcaaaccccctaaggaatggagcattagtgagggtctagaaggtaattcgggataccacgtaatcataggctctgtatcaggtagccgttccttttgtaggcttttatcttattgggctgtaccacagacttgcccagaacttttagagtcatgccccagccattcaaggtctcagttactgttttataaaaggtgaagttattcttgatctaatcatagaagccctaattattacaataacacttggacagcaaaaacgcctcaaattcaacttatttcaccgttgctaatctgaaaactccctggaaacataaggcaaactcagaattttataactatc

SEQ ID NO: 810926 - DNA, 657 bp, Homo sapiens
ggttaaataaatcatggaatgtgaaaatattaaaaagaacaaagtaactatatatgctgatgtggaaagctgctcacactgttttaggaatgaagaaggttgtgaaatatttacactaaaattctatttgtgaaaaaaagagtcaatatatttgtttgcaaatgcactgaaactatcaggaaagataaaaaagggagctttatctttggggttatttctgttgggggtgatgaagagtttgatgagagatttttatttttatttactttccattttatatctttctatattgtttgcacatacactgtttatatgaactttgcacaaaaaatactgtgcagttgtgaagaaaaggtaacattatgtacaaacataagtttccaaaacctagtattaagtacaaaaagctagttttgaaatattatgcataatttgacctcacttatgtttttaaaaattatgtacaggagtattcataaaaagaaaaagatggaaggacactcaaaacttgtttaacaatgttacctattcagagaagagmacatttccatgtaacccgagttttaatttctaaagagtaaaacaaaatattaaattgtctctcctacctctagagaaggatgttgttgtaaaggactagaagtgactcaatgacag

SEQ ID NO: 810927 - DNA, 507 bp, Homo sapiens
tgggaaaattaacagtgaaaaatatcagttctccctcaaatctatcagcctgtttatctatctgtccctatgtatgtatgtatgtatgtatgtatgtatgtatgtatgyatgtatctatctatctatctatctatctatctatctatctatctatctacctctatccatctatctatctatctatattagctaaactcaaacattgattattttagagttgaggaagagatttagagagatatttatgtataagaataagtgagactgtagccgggaaatatttcgaaaaaaattaagactgattttggagggagagcacagaataatttttttaaatggcagaacgtttataattaaaatattctagtgttgatatgggcccagtacaaaagaatcatagtatacaataaagttcagaaaaagtatgtgtgtgtgtgtgtgtgtgtgtgtgtgtgtgtgtcggtattatttcagtatttgattcgagtgtcctttcaaattacttc

SEQ ID NO: 810928 - DNA, 345 bp, Homo sapiens
acagcacgtgaagaagcctctctgttccttggagtcattcctccctcgtgggggcggcaaataggaaatcatcaatgtgttgtaatagcacataattgtcactaggtggcgcaaaagcctcaagatctgtagccaaggcctcctcaaaaatggtagaattcttaaacccttacggcagccttgtccaggtatattgcgattgccccctctgactttggggagcaagcttcaaacaaaagaaggcatcctttaagtccagacatgtgawccaagtggcatcagcaggaatctgtcccaacattgtgtatgggttgggtactgttgcatggatagcgacagtggcct

SEQ ID NO: 810929 - DNA, 413 bp, Homo sapiens
tttttctattcctttccttcagttttattttcaaataaaagatgtttcatggaagtaagagcacaatttgagttaaaggagctttactctaataagccataaaaggarttgctgatgtgggttgtgtaatggactctgagatgcctcaagagaaacttctagttgaccttctttcgctagtaaccatacatctcttgtctcctcctagcgccccatgcaggagtcagcccagcagaatactatcatcagatggccctgctaactggccagcgcagcccctatgcagacattattccctcagctgccaccgccggcacgggggccatccacatggaatatcttcatgctatggatagtaagtgacggggctggtttctagagtcttgggaaatggcaaaggcaactttatgaaa

SEQ ID NO: 810930 - DNA, 579 bp, Homo sapiens
ctcttacatcccacacgtttcataggcagtgtgaacttttaatgtgtgtctcttgcaactcggcgcatcccatgtaatgtattccacgcattgcagttacattatagtgttaagcacgcaggttgccagattttgagctctgttctatacagaatgttttgaggattttacatgacatcgccagggtccctcccctccatttctttttaaatcatgtctcctggtaattgtatgggaagaattatagatttctgagcacagaaaaaaaaagtcaaatgtttttaattaaggtatatttccagaatttttccatgaacttaattcgattctttctctttaatttaatgcaagtgttattttgaagccaagcctgacttaatggccgtttattcttgctgactgttttaatggaaatcacaaaaacattggaatatcaaaggggaaaagtttggaatttttgttttattrtggggaaatactcccaaagagtagcatatgctatgtgtatccttagtgatataacgaatgaccaacaaacatgaagagaattgtttgtgtaaaagctgccattatagaaca

SEQ ID NO: 810931 - DNA, 606 bp, Homo sapiens
agattctaaagacctgggaaggatacttatgaagttcatttaaagagaattactrtttccaaagttcttgatttatgaagcaggcattcaatttcaagatgtaaaataatagtgtaagttggttggggtcgggggagaccatcatcatatgattatacagattttcccaatttttttcctcaatgaaatagcttattttaaaaatataaaattagaatccctataaagaacactaccaattttctttcctgaaagaaacaataaaatactttgtaaatagaagcaacttcatgaagtaacagatgttttatgtaaagacataaaactgaacctgaatataacgagacgtgtgtgcgagtagtaaaagttgaaagttggacacactcattgagacatatctatttgattccaatgtttttctaaaaggtagagtaatcctagccagaggtttcactggctcagtgcatcacccagtagtgtctcagaagccaggaagggctttccattagataatgaattatgaaatgtctcacactggaaaaaccagtcatccgctgatgtcatgctgattccaaccaatcccaaacaaagccccagccctcctct

SEQ ID NO: 810932 - DNA, 629 bp, Homo sapiens
atttgactcagcatttctcctccggttagtgtgcctaagcttccaaggtctgacctagcagcatgtcaggaaccttgccacagtgttaaatcttgggtcagggggcagggctttcacaaagactaactcttccttattctccttgatctagcacccccaggatccaggcccatagatactctcctggcctctcttagtacaggttgattatgtcttatagctcttctaaggttgttctagtcacctattgttgcataacaaaccattccaaattcagtggagtataacaatggtctttcattattactatctttccacagctctaggggttgactgggcttggctaagcagtccttgttctgggtctcatgcggttaggagtcagacactggctggggctgggttcatcagatcactgcactattcttttatttatcaaatatttattgactctctattttgtgtgaagcgccgctaagcggtgaagatacaatagttattacagcataattctagtctccttgggrcaggatgccatctttaagaatctcagtaggtggtaagtgctaaaaaatagtatgaaagagcattatggactcatggagtcaaacatggaaggcttcctggag

SEQ ID NO: 810933 - DNA, 629 bp, Homo sapiens
atttgactcagcatttctcctccggttagtgtgcctaagcttccaaggtctgacctagcagcatgtcaggaaccttgccacagtgttaaatcttgggtcagggggcagggctttcacaaagactaactcttccttattctccttgatctagcacccccaggatccaggcccatagatactctcctggcctctcttagtacaggttgattatgtcttatagctcttctaaggttgttctagtcacctattgttgcataacaaaccattccaaattcagtggagtataacaatggtctttcattattactatctttccacagctctaggggttgactgggcttggctaagcagtccttgttctgggtctcatgcggttaggagtcagacactggctggggctgggttcatcagatcactgcactattcttttatttatcaaatatttattgactctctattttgtgtgaagcgccgctaagcggtgaagatacaatagttattacagcataattctagtctccttgggacaggatgccatctttaagaatctcagtaggtggtaagtgctaaaaaatagtatgaaagagcattatggactcatggagtyaaacatggaaggcttcctggag

SEQ ID NO: 810934 - DNA, 599 bp, Homo sapiens
cagaaaacaagggcaacccaaatgtctatcagttaatgaayggataaacaaaatatggtatatccattgaaataatattgaaatacatgttgaataccattttcccgtaaaaaggaatgctatactgataaatgctataacatggatgaacctaaaacactataccaactgacagaagccagccctccctctgtcccccacacagaaataacatgtattattagattccctttatggggaatgttcagaatgggaaaatatacagagagacaaagttgattagtggttgcttagggttgggggaatgagccgattgggggttattgataaggggtgcagggtttcttttgcaggagatgaaaatgttcgaaaattcattcttatgatggttgaacaattctaaatatactggaaaaatcatcgaattgagcactttaaataggtaaattgtatgctgtatgaattattaacatatcttaataaagctgttaccaaaaataagtgaaaagaaagcagagacaattctatggctgagtatctaaataaatcttctctatagaaatggaagatgagagagtgaggatccagctgtaattgat

SEQ ID NO: 810935 - DNA, 616 bp, Homo sapiens
atgcaatcaaatgagtccagtgcaggggaggaggctccagaaaggccaccaaaggggctaccagagaaggtgagctttaatctccagccagcctgagatcatggtgcctctcactgcagactggtcaagtggctttcctgcttctcacttctctctttcctcactggaagtcagacttagcaaaatggagggaaaggtgaggaagcatggcagggaatgagaaacggatagccaccagctcttttgaacttcacctgcagaagattcaagtcagataaagagatttatcctaaaaccaagtcctttattttgacaattacacagcactggatattttactgagttgcgactgtgtttgtctttcagagattgatagtatttaattgcctaagaatgatttaaaaaaaacaaaacaaagcatgggactccgtaagtttcaatcaaggtgtctattctctccctacctaaaagtgtctgaagaaactatggaggatagaaatgcagatgctgactaattgattgctyggtactgcattaactattctgcaatattatttttcaattgttgacaattgcaaataattgttaacaatgattaataattctttatccaata

SEQ ID NO: 810936 - DNA, 617 bp, Homo sapiens
tgcactccagcttgggtgagagttagactgtatcaaaaacaaaaagaaattaactstgtagtttatttctgttaatggcaaccctgcagaaaagttaaacttagaatatgtctcaaagtaatctctgtctgatcccttaatgaaggatctcttcaaacacagcaacttttgtctgtcttctgaatgtaggtacagctgtggctgtagaacagaccatgtaattttcatctagattccttacaaccacaaggacaattattacaatgaaagccagagaactagctcagttttgattttattactaggataaatccagccaggtagtgtggtggctttgatgttttctgtctatatctaagggggaagctgcttcattattcgatattaagataaatagggcctaaaaatagtcctaggtcaaacaccattatgattaactcaactttcaaaaccatttacctaatgtaggatttgttaataagtcttcttcaaaattagcaagaaatacaactaatgcctaacccgtcatgatgaattaaagactgatccaaaaataactgacagttctcttccagttgccctcttctttgacaatcccaccagtctatgctctaagc

SEQ ID NO: 810937 - DNA, 473 bp, Homo sapiens
gcttcacgctcaaaaaggaagctttcttgctgacctttggtgttgcctgcaggccgcagcgagagggcagaggtccttgcggctcttctctagggtccgacgtagatccagacaggaaagtcagtggggcattctggacatgtcgtcgcaccaggctgcagagctggacactgaggaaacccctccagaaagaaagccctacctcccgacccactgcaggtgactagaggactgggcagatgcccttcagaccagacggagaggagcacttctctgattccaagtaacaacagctgctgttgaggaggtgtaatgaaaaccgcacctaagctcttcacccagcttcgaaagctagcctggatgttttcaatctcagaygctagtcgtgttttttctctaaaattgacaatggagagaattttttctcaccatcaagggagagcatctgtggatggtgtctgaagaatgatacc

SEQ ID NO: 810938 - DNA, 573 bp, Homo sapiens
acacatgtttaatattctttgtgacaaaatcaaagtattcataaggcacttttgctgcatcttgaaatgcaatggctgccttaaggaaaagcatttgtgtgactgagttgcaagctgaactagacgttgtttttaagaagcatcaccattttacttgaaagaatgactaacaaaccgattattcagacatggctatctgacaaacattttctcaaaacatgagcccggttgtgcctatcaataaaatgagagatttcaagtgaaaattgagattttggaaaacttatattctctactgtgaacctaacagctttccagtacttacagactgattaatcagtggtaatactatgatttttttggtattgtacaataaaatgctccaacatttgcaagatctgcaaactcagctaatgaataccttccaaataatgcaagatgttaccaatcgttcatgagtaaaagatccaaagtacaaaacagaacagagttttaaggtaagagcaccccaaatttaatcatatggtttaagawtccatttggcaactttttttttttttttttttttttttt

SEQ ID NO: 810939 - DNA, 630 bp, Homo sapiens
aattcaacatgagatctgggtggagacagagatccaaaccatatcaacaactttctgatcttgattagcaaaatctcagcaatggtaaaaatctgratatcaacaatatcatcttcctttggcaggggattgagaaaaataattgcttctgttttctgatagcatccaatttggagcaaattcctacatccttaacacccaccgtcaatcatctaagacaaactcaaatcctaaaaccttcctactgagagagcccaggagtagtaaacccaagttccacaactgcaggtgcatttgtagtagtctttgactggagggaattgacagattgagtgatgtaaaattgccattgttgtaagcaaaaaatcgttgcatattggccattttatatggttcaacttaatgcaacaaacatggccattttgagggtctatctctgagagtcagtggtaattctaagagaaaaagccctactactacatgttgagcatccctagtccaaatacctgaaatccaaaatgatccaaaatctaaaacctttaaagtggcaacatgattcaacaaaagggaaattccacatgtgacttcatgtgatggagcacagtaaaaatgtagacaaaactttgtttc

SEQ ID NO: 810940 - DNA, 480 bp, Homo sapiens
tggtatttttattaccactatatcattatctttcattaacagctgtrattagtctgagccagactgtcatctgctattgaaatatctgaaacaaattagacataagatatgttacgggaacaagattgggagactgaaaatttacacaaatgaggccttctgaaatgatgaacacaagtcataataatgtttctgaaataaatcaaaaacaagacaaaagagagaatgaaatcaatcaggaggatagaaaccagaataccagcacctcaaaaagtttaatcaccatactataaaatccaactgtggaagggcactacaatttttattacaatgaccaggagctcttgtaatagcactacttaagatttagtctaaacaatagagaaaggatcagttgaagataagctgtaacagctcacatttgactttcaatgttctcacaacagttaccaggaaagtttgtagaaattctcctgaaga

SEQ ID NO: 810941 - DNA, 625 bp, Homo sapiens
cgagagcaagaatttaaactaccaaccataaaaaccactacattcagaataggccctcaatttggaggtagctgggggcactaagaggaatcattaaaaaattaagaaagtccttaatatcttaataggtaatgtgaaaagctggcctcttgcattagaacttcaaaagaaaatatcaaaaactgaaacatacacaccatcaacaaaataacatcagtctgtactgttaaccttatgcctatgattgcaaataacaaagcccagggaattttaatgaacatgcttcttcaggcttacccaactaagaatgataaacatgatacaatcttttgaagcttttacaaactgatgtaatttattttcttaaattatcctttctttaaaaataaaatcaaacagacagaaaaactgtgtgatgtcctaacgtgatcatcaaatctctcaaactacagagattttattacttaaattttcccaagcgtgcctaagtaaatatgtacttktccaactaagctttaattatctaagttcctattctagtttggtatttaaaagcaaagctttcatctcacaattctaaaaacttttctaaataaaattacactagtaatagtgagatctagtt

SEQ ID NO: 810942 - DNA, 634 bp, Homo sapiens
attgcattacatatcctgctttgcaggtgtaaaggtagtgtggaatagtgaagaagcaccatctgaacagccagacatgtaaaatagttccttctaccacttaccgtgggyaagttttaagcaagttgtgtcatttctctgggtccagtgaaataaggttaatatttttcccatctcaaaccaagttgctggacagtatgatccagggaagagcttaagagtatgatctttgcagtgctaattactagccatgcagccttgggtgagtcacttaatctctggatctcagtatcttcactgagaggtgaaggttaaatttgatgatacctacaagcacttggtctggtccctaaacatgctatggtaagagcactatatgattcatgtactatggttttcttcattcatatattccaaggacctagaagacagtccaacacatgaggtgcttaagaagtattgttaattttaacccagtgtattcacaggttttcatactgctattatgaacttccctaagactgggtgatttataaaggaaagaggtttaattgactcacagttccacatggctgggtgggggcctcaggaaacttacaatcatggtggaagcggaagcaaacacgtctttttt

SEQ ID NO: 810943 - DNA, 562 bp, Homo sapiens
tagctatcacatgaacctgcttgaaagattggaatctgcggcagttccaacatcagaaacagttcgttccaacatcagaaacatttccttccaactgccactgattctcccccacaagcctgcagtagttcaggatgcacagtgctatgctggaaaacaaagaattatttcctgaagtcctggtggtgcttatattcctaagtcccactatagagaaatgcttgcagtacacttagaacagaccttaacctcaagtcatttaacacaggaggggcactatactttgtaaagtggcaacccaacctcagacctagctcagctgcagattggatcaaagggatctctctctagctatctgacagaggaaagagtaggccctctctgggggaaagaaaacttagtttagtctctatgagcctcttaaacataatatatgccatgcaattttaaaaaasacatgtgcaaggaaataggagaatttgacccacaatcaaaattatatatacacatatatatgtgtatatatatatatatttaatagaagcaaaactacacatataga

SEQ ID NO: 810944 - DNA, 562 bp, Homo sapiens
tagctatcacatgaacctgcttgaaagattggaatctgcggcagttccaacatcagaaacagttcgttccaacatcagaaacatttccttccaactgccactgattctcccccacaagcctgcagtagttcaggatgcacagtgctatgctggaaaacaaagaattatttcctgaagtcctggtggtgcttatattcctaagtcccactatagagaaatgcttgcagtacacttagaacagaccttaacctcaagtcatttaacacaggaggggcactatactttgtaaagtggcaacccaacctcagacctagctcagctgcagattggatcaaagggatctctctctagctatctgacagaggaaagagtaggccctctctgggggaaagaaaacttagtttagtctctatgagcctcttaaacataatatatgccatgcaattttaaaaaacacatrtgcaaggaaataggagaatttgacccacaatcaaaattatatatacacatatatatgtgtatatatatatatatttaatagaagcaaaactacacatataga

SEQ ID NO: 810945 - DNA, 694 bp, Homo sapiens
ggtcttcattctgatggttctcatgaatacaggttaaataaatttgtatgccttttcctcagttaatcgctttttgtttattttttattttttgagatggagtcttactctgttgcccaggctggagtgtagcggcgctatctgggctcactgcaacctctgcctcccatgttcaagtgattctcctgcctcagcctcctgagtagctgagattacaggcacacgccactatgcccagctaattttttgtattttcagtagagacagggttttgcatgttggccaggctggtctcaaattcctgacctcaggtgatccaccagcctcagcctcccaaagtgctgggattataggcgtgagccactgcacctggcctaatccgctttttgagagctgatttttcagtgaaccctcagagagtctagggtcccttggccctaagagtgcttcagggtctagaactctcatttgcataaagtagacactgaaatatttgctaatggaaggacttgagtgccaggtttgagcaggaaagagatttgatcagtttgagttttaggaagacctaaaactggtcctgcagtgaggaaagagtggagagcaggaagcagttgcctagtttcctaggcctaagaagatagtgttaactgaccaaactsggatccactcacccagtgcaccaaagccaaacatt

SEQ ID NO: 810946 - DNA, 584 bp, Homo sapiens
ccctcccaccatggcagctgagcacatccaagctgggggatcctgaagagaccttcacctgggtgccacgtggaagattggccagcaccattttgactcctgtggatgggtgagtgttttgcccacccccamcccaataacatcaggtaagctcaggaattaaagcctttggctaagaggtcagttaaaagtccctcatcatttggatacccttaaacacttccttgtccttgtcacccttttccctgattgtttcccctctgactccattgtattgctccaccagtcgttttattttcagtcctaagatgtatgttttgttggcagtctttgttttcattttgattttctgttgactaaatttggggaatgatttaaggcaggacacttggccatgcaaggcctcctgttgtgttgttctgtgacctccaacttggcctgaggtttgctgttggccaaccccctggtgccctggggttttcagcatttggtgaggggacccttgttggctgaaactcaggtactccaggtttttcagcattggtattgctgaaaatgctctggggttttcggcattgacattc

SEQ ID NO: 810947 - DNA, 598 bp, Homo sapiens
tggctttatgcaaggaaaaatttggttgtgttttagaggatcctgggaagtttacagaggagtttgttaagttgascgtattctttgatttaacttggcatgacatgcaaatattactatccacttgttgtactgtagaggaaaaacaaagaattctagatactgtccgtgaacatgcagatggagtagccacccaacccaggccatgccatatcgtgtgggaggagatgcaattccagatctaggctctcaattggattactagacaggttctcaagatcttaaatgcagaaatcacaggctaatttgtttaacatgaaaaagtgtgtgcttaagccagtcagttatgacaaggtgagagaaataactcaggacaaagatgaaaaccctgctctatttcagggccgttttcttggggcactcaggaaatatgctaatgcagacccagactccccagaagggtgggttctcctgggtgtgcattttatcactcaatctgcccctgacatcaggaggaagctacaaaaggtagcaatggggcccccatgagccaacccttagacgttgcttttagggtttacaacaacagggacaaggc

SEQ ID NO: 810948 - DNA, 601 bp, Homo sapiens
gaggtacaagcagggtatggtaggttgctggtgaggcttgtgacatctgccttctggctgtcctcacatgacctttcctctgtgactatgcagagagctctctggtgcctcttcctatatattttwtatatatatatatatatatatatatatatatatatatatacacacacacacacacacacacacacacacacgcatatataaacacacacacacacacatatatataatatatatgaaattatgaaatgagaaatgtgtgtttaatggcaaaccttggcacattccaacaccaggaatggcatgaggtcacagaagcaggtatgggtaggtgatctccatggagcttcacatgatgaagaggatgaggaagaccaccatcaaacagaagagtcccatggactcagacaggacaaagctgacaatggcacaggagaagagctgctgcttgagagatgggttcctggcatagcttgatcaagctgccaagcactcttatttttatttatttatttatttatttatttttgaggcagggtcttgctctgtcacccaggctggagtgcagtggcacaatcacagctcaccgcagccttaa

SEQ ID NO: 810949 - DNA, 566 bp, Homo sapiens
ccattttttaaggattttattttaagtcttcacaatgatttctctgaatttgatgttagatcgaagactttaacattaaacttggaaattatcattccagaaaataatggctagaatcataaaaaaaaaaaaaaactggcaaaaggattttagaaaattgttatgtttcattgctttgcttttttggcagttatggacctgaaaaatttagcatgtactttattcccgctgtcatatggctcagctacacacatgaattcaaaatggtttccattattagaaggagacaatcttattccagaatcaagctaagtaacttttagtgttccagataattgctaaattaagctctactcacagatattttatggtatttattttgctctgaaaaccccattcatttttaaggtagctgaataaattcagtgataataaactcttaaagagatgaagcagggagaaaatttttggctagatacagggtgartatttaataggaaaaaatgctacctgctgaggtatgtttgaagaaccataatattattaagcccactctggtgcaaagc

SEQ ID NO: 810950 - DNA, 610 bp, Homo sapiens
agcacttttccaactcacttaygtattttttaaattaatctctctctcagagaaaagtaatcttcataaacatagtgaaaactgtcttatatttacattttattttactcaatatgttagcataaaacctggttcacagagggcatgcaacaaaattaaggaaatgaataaatgatatgacaattaattttaagttatcacaaatcatttgataaaagaattactaatattctaccgaaatgtactgaagaattactattttttattcattactgaataaagtgaattttttatttttcacatatttgtgaattagcttcaaagttcatatatgataatgtgtctttaaccctttgtattagtataatctactttgaatgagttaggaaaggacaagagtattagaaacacataccagcaacatcttatcaaaatcatagtccagagttcagttaggtgggtggtggtgaagaatggaccacacattggtagaaaacgttgttggataatagctgacctagaagacccttctagcacaactcagaattctccaaggaattccaaggcttctgccctcatattttctttactaccctcttctatccttact

SEQ ID NO: 810951 - DNA, 633 bp, Homo sapiens
gtaattgataagggaagatacagaacatatatgtgcctctatggtgttatcttctccactttgtcacatstttctttccattattttctaaacaaaacgtatacgcagtggctggtaaggtagcaggatcaaattatttttaattttttcttcatgtcaaaaataagacctaaagtatattcctttaaggatttataaaggtaatatggtaaaatagatacgtattagtcccctttcccagctaaacttcaatcccttgataatagatagatagagtcttaataagtttggagacacaataatgatttaaaatcacacataaaactatgctaacataatctaaaatccccaaaccttattttaccacttaggcttgcaggaagtctggagcaactttatattgtgaggattctcctgacccacaccaggtatcaagttagtgtagattccaggctcagagatccattgatcttttgatcttagcatgtcatttaacaaagttattactctcttttttcctatcctaaaatgaagatgctaattatctacctagaaagattagaggacataatgaatgagtaatcacacaataaaattatgaagtgctatacaaatgtaaggaattactatgac

SEQ ID NO: 810952 - DNA, 633 bp, Homo sapiens
gtaattgataagggaagatacagaacatatatgtgcctctatggtgttatcttctccactttgtcacatgtwtctttccattattttctaaacaaaacgtatacgcagtggctggtaaggtagcaggatcaaattatttttaattttttcttcatgtcaaaaataagacctaaagtatattcctttaaggatttataaaggtaatatggtaaaatagatacgtattagtcccctttcccagctaaacttcaatcccttgataatagatagatagagtcttaataagtttggagacacaataatgatttaaaatcacacataaaactatgctaacataatctaaaatccccaaaccttattttaccacttaggcttgcaggaagtctggagcaactttatattgtgaggattctcctgacccacaccaggtatcaagttagtgtagattccaggctcagagatccattgatcttttgatcttagcatgtcatttaacaaagttattactctcttttttcctatcctaaaatgaagatgctaattatctacctagaaagattagaggacataatgaatgagtaatcacacaataaaattatgaagtgctatacaaatgtaaggaattactatgac

SEQ ID NO: 810953 - DNA, 510 bp, Homo sapiens
atttttcttatttctactttcttttcccctcctctggctgggctatttcaaaagatctgtcttcaagttcataaattctttcttctccttcatcttgtctgttgttgaagctgtcagttatgtatttttttcatttcattcattgaatatttctgctccaattccgcttggttctttttttattttatatacatctttgttgaatttctcattcggatcatgaattgttttcctgattttattgaattgtttctctgtgttctcttatatcttgctcagtttccttaaaatcataattttgaatttatttttcagatattatatgaatgtcctttttgggagtctgttactggagacattttgtgggtgccatgttaatttgctttyttatgtttcttgtgtccctacatttatatctgtgaatctaattgtgtagtcaattttttccaacattatggagtagcttttgtagggataaatgttttcctgtaaacaagtcctagtgttaaa

SEQ ID NO: 810954 - DNA, 605 bp, Homo sapiens
tcactgggtagtacctcccaactggggtctccggccacctcctacaggtgcctttgagccagcaacaggcctgtatctttctgggtcgaagctcccagaaggagggacaagctgccatttttgctgttttcagccttcactgttgatacttctaggtactggaaaatctgaggcaactagggactggagtggtcctcaagcataccacgggagccctatggaaagtggccagactgtgacctgagtcccctttcccatatcccctcactgggcaagtcctccaggtctgggcttcaagccaccccactgctaaagttatcaagccataccaactcagaaacagcctcgacagagtctctaggggcaattgaaagcctctctgctactgcatctgctgtggaactgcccctgccacccttggactaacaaaggagtgaaagataagtgccttattcacacctccaacaaagtgcagttaactcaaggagaagaggcaagtccatctctcacgggcccyacacacttcccactgcttgtcacaggacagggaacccctggtttggacccacaccacagacctttcattctgggctgattgcattgag

SEQ ID NO: 810955 - DNA, 643 bp, Homo sapiens
tgtgagttttcttcctgtttggactataagatcccagtgggtgggggagagactgtcacacactctgcaccttgtattccctcagtgttgagtacagaggctcctaacaaaagtccgttgacaaaagggcaatttccttgacataaataagggaggagaagggggcttgcatttactggagaagagaggaagattttggatttagacaggttgtcagatgtgccaggagccatatgggctccactccatgtctggccgcccccaggtctatcctgtcttcaggctccctggcatctaccatttctttacagagcagctgccattaaccacatttactggggttcctctccctcaagatgggctgtagagcagaaaccagctttattgctgtgttctctccctccaaaaacaacctatcaaaccaaagaaacaaacccagcatataggccttttcttgctttatgggttatattgctctggagtgggctgtgaagaataataatatataataatgcctttcaatgtaaggacattccaaaacttcctgagtctcagaacrttcaaatagtcattgcttctggtttacatacagttcttgtcttccttttgtaggtgataaccaaaagatcattgtaggctgggt

SEQ ID NO: 810956 - DNA, 626 bp, Homo sapiens
aaggtaagttttaaaaagctctaagaggaaattgaggtatttgtgatgcataggaattccattgagaataaaatttactattataattccttcattactcaatgttactgaaaatactygaacgaaagtaacttgatttgtctacccaattttacgcattgatttacatttgctttcagcaattgacagtaatgttttataaatgaatcatttctgcaagtgacgttgcaataaatgttagctttccccttataatgacatttgtccttttcttctttgccatgggttttgattttttcccctattattgtctctttgggggttttatttttaagagattgcatgccaccagaatctgaacaacaataacaaaaacctagtaccttctggaagtagaatttactcttttgccgttggcaggcaaatacgccatgcgagacctggtcaaccggctccccggcggcaatggccccagtgtcttgtctgatgagaccatggcagccatctgctgtgctctgcacgaggtcaccagcaaaaacatggagaacgcaaaagccctggccgactcaggaggcatagagaagctggtgaacataaccaaaggcaggggcgacaggcaagtctgc

SEQ ID NO: 810957 - DNA, 571 bp, Homo sapiens
tgcaaatgttagatcttttgctatggtcccaacagcatctaaagctctatttgtttgtttggggtttttctttccagtttgttttctctctgttgctcagaayggataatttctatttttctatcttccagttctccaatcctttcctctgtcccctccattctcttgttgagtccatcaattaggttttaaaattttgctgattgtgttttttatttctcacattttatttggttctgctttatattatcaatttcattgttgagagttttttttcactgacgctttctatttttctatttgtttctatcgtgttcataattgcttgttgaagcttttttaccacagctgcattaaaaaccttcatcaaatgattctatcatctgtcatttcagtgttgccatctatcaattgtctttttaagtatgatgacaattgaagagaaacctggacatcttcatattattttctggtttagctggctttctttgacaatgcaggggaagagggaacttgctgcctcattattgacacatggaggtagaataccagtttctccactcaggctcca

SEQ ID NO: 810958 - DNA, 642 bp, Homo sapiens
ccaggtgaaaggctggctcacatcttgtctttccttccctctgtcccccgcaacgagcaagggctctgtttgaagaaagatgcctcccactcctcggcctacgtgtcctccaagaggctscccaccttccttctcacatgcaacctgcacacacctgcgggcgacagatggatttttctaaccatgctctactcagagttttctctcctcagaatttcagcatccagaatgtgtgtgtgtatgtgtttttgtgttgacgaatttctgcccacctaaaaagcaaatcatctctaatatctttgcttacatcactgtgagacccgcaggtgaggcctcaccttaaaaggcattaaattcactgcaaggctttgtttagagagcaaatctgcattgtctaggggtaacagcaccccagagccacagcacaaagggctctctcttgaaggggagaagttgctatcattctcggtccacgcgtggaacacatgagcaccacagaaatgccagttgtctttctctggtaaccactcacatcagagatacagccttggccctcccttgtcagatcagtttaattacaggcacggatgcccactggggggtagggagcaaactgggatccttggatttcaatgaagtcca

SEQ ID NO: 810959 - DNA, 594 bp, Homo sapiens
ggatggaagctataactttctgatgtgccttgttttatagttttgataaaaatatatacaaaattaaaaataaattttacaaaaaagtaatcactataaaaaactgaataaaaacccattggtctatcaagctgtgtcataaccacacagagaattctttcacataattttgcaacagtataattgtgtacagtgtatagtgggacagtgtatacaggctgtacaatatatagtgagatatatctgaagaaaacaaatataaagaaatcttaagcagtattcagtagacttattgctggtaataatactggtattggtatttcaaaactattatatttatgtaatgggataaaaactattatatttatgtaatgggataaaataggaaccaagatcttcggtgtgttttagtccatttgtgttgctataatttataagaaaaagaaatgtgtgtgatctgtgacactcatcctctcccattcccccttcctccccactcccggttctctgacatttacactgagactgaattaccacccaccagygttcctggttctccagcttgcagatgacatattgtgggactttttgtcc

SEQ ID NO: 810960 - DNA, 455 bp, Homo sapiens
ttattaccatatggcccatggaaaagattttgcatctagaggaattgaaagtaagtatacttttcatgcttaatgatattaccagactgcttgacttggctcttctgtctaaagacttaaatgtgtctaacgtacgcataatagatgtttagtgaaggaagagtaaaataaataatctaaaaaatgtggagagatttacttaaaaaagaaggcctaaatccagatttctcccagccaagtataaccaagcctaaccctgcaaatccagatttctaccattatatcttctgttcctttgccaactttttcctgaggtttgcctttatgtgtttttgaagagtcagttttcatttcctaaaatctggaaatcactgrgaaggctggattcctgagtactatggggagatagaggaaggaaggaaggcccacttaagctgttgatagtagaaaaatta

SEQ ID NO: 810961 - DNA, 657 bp, Homo sapiens
ttggctgggttaatgactgtttatttaaagagtgytgtaaaattggatgtgtggtgtttaaaatggccatgtcctgaggaaacttaagtaacaaagtactaaatgctaagtaggcttttgcatattgtaactaaatttaagaataattcagattaagtagttctgaaatttggtatagatagcatagattgtctcatgctcatgagtgacataatgaccctggattctgttacatacttctaaagaaaattgattgttgtcttaggaggcagttaacttggctgaacaccaactccacactctgtcttgtttgtaggtggcagcagctgaaatctcttctcagttgttttagctttagctatgctgctggaagtctttcccatgcaagtgtgtagttcaggggtcaaccagagtttgggcagaaggaagtctgccccttctgtgcctcctgttttttgggggtttcccctttatgttccagctgttgtggttgccccatattctgccttctgatccttaaccaataaaacttggcttttgtttccccctcaagtgagaacccgttaaaaatgagacattgagccagtgctgttcactttttaagtgccaacttccctctactttccacttgtttatagttgtttccagtgcctttag

SEQ ID NO: 810962 - DNA, 286 bp, Homo sapiens
cttggctttctccaggaatctgtgtgtcctgttggtcagctcggcaatgatcacatcccagagagcaaagcactggtggcagggtgtgcagtcagggaagacccccgagtaccctcgcgtgcacttgtcacagcgtggaccctcaacaccctcaacgcagacacactggcccgtggactggtcacactgtggcgtctcaatgcccctggggtcacagtcacaggctagaagggaataagcaatgctagctgatctacttratcatgaacctcagtgacaagatgtg

SEQ ID NO: 810963 - DNA, 605 bp, Homo sapiens
aagtgattctcttgcttcagcctcccgagtagctgggactacaggcacccgttaccatgcccagctaagtttttatatttttagtagagatggagtttcgccatgttggccaggctggtctcgaactcctggcctcaagtggtctgcctgccttggcctcccaaaatgctgggattacaggcgtgagcacccggcccaaggcttcaatttccttaaagcaaaaggaggagaccattattttccttctagggctgttcttaaaactgaaagcagggtatacaaagggagacttcttagccttaagttcataggtagcagtctcagaagtgagttaaatattgactgttggtggaatttacaactggtccacaaaagtcagctggaacctgttggaaaatgttagtgctgccaacttttctatgactttatgtttactctgagcttatctttagaagtagcagttttccatttttatcccagtttgttttaacatagttttaaaataatctagctatcygagcttcctagaatgacatacaaggtccttcatgttttggctctggtctatctcacaagcttcttcactcctccttcacaattgcagc

SEQ ID NO: 810964 - DNA, 528 bp, Homo sapiens
gctcaacttaccctccactttatgctacataaattagcctccctaggagggtggaatttagtggatacaatagacatcaaattaccatgacatgtctaagggactaagtgacatagtggtatctgggtcatattatctgaatcacaaataaggaaatatgatttaaaaatgattttgagggactctgtatattttattacaatgtttattcacttaccattttgaggaaacatttgaatttctaggacattgtggcaattttttgaaaacaaagagacaatattttaaattagcaagacagttctggaaaaatctaaggtgtatgctcgtcctacaggacagatctagagccacttgtcctgctacctttatggcaatggtagggctagaggaaatacacaaagctctggggtaaactggattaaccaaacttatggtcattgttaactgtataggctttggagtcacaggaacttggatcccagtcttggttctgcccatctmtactagtcgtgttgggtaattttc

SEQ ID NO: 810965 - DNA, 643 bp, Homo sapiens
tacccccgaacatcacctcttcctgaactaggggaccggaggtcattttacagagattgctgtaatggttcattctgtgggcaggtgtgattgggcaggtaggggagagatggtgaattggaaagacatgttgaactgagtctgaattagtttctttcttttgcccctgatgaagatggaaatgggtttcctctttgccttttcacacaagtgctgcagacaacgtctgtgattgcaccaactcctggtgcctcacccagagcatcgcctccccagatgttattcatccttgtgttttctcctggcctgaaaggagacagctttgactctccaggagatgggaaactagttttctactaaattcccattctagcctacaaattcctatcagaacaacagccccccactaactggattgttgttacgcctccactttactctgtgacacctgcagacatctctatattgtactttttcccaatgaattaagatcacaagaggatatatgcttttcacaatttgcctctgtgtcttagtgcagtgtacatactattgtgaaaatatagatgtagctgggtgtttgtgttggctctaaacaaaycagttcttgcaatcctggccagtttccacctgtgtctacata

SEQ ID NO: 810966 - DNA, 600 bp, Homo sapiens
ctcaacctgtatgtacatgccttgaagaagcaaatgtccctgcctcctgggacgcctcccacccagggctcctctctctccttcccttccaccgcatcatccaggtggaacgtcacatggtattcacataggatataagtctagtttgcccccaagaagtaacaggcttatttgcacttaatttatttttaagtgtgctgtctttggaagactcataggccttttctagtagaatcttacctagcatcagccctcataaatttgctgatgtaattttaagttatactttctagctgctggagcacgcatgagcgagtgtctatcctatttcctcaaagttgctcaacttgcttaagaaatacataactgcatattggacatcagaagtgcttggttctagctgggggaaaaggatggttaattcccccctaaagcatcattgttttgcaatcgagtgaatcggatggattctccttcccttggatacttggcctgtctttctgctcacatctccagaacgcagccagagctgyggctgcccaaagcccagttgggttccatttctatactaagttcagaaatgtattagaaataactaac

SEQ ID NO: 810967 - DNA, 614 bp, Homo sapiens
actagcaaggagggtagacaaatgggacagttgtgtacctgagacatcaatatagtgcctgtcatgttttattaaagaaagtcccaagagtgacaggctaagactgttctagagaaagctgatggtggggtataagggtgtatattatattattccctattattttgtacatgcttgaaatatttcatttaagaagttgagattcaagataaaagatttttaaaggtttttaaaaagcgcaaggtaagtaacatgttagcttatgcatcttaacagcaaaattgaattgtctacagccagtcgaatgttttagccaattttaccactttggttcctcccccagcaggcttccatgatactcaaggcgtctgcctctcctggtggaatcctgcataatttcccaactaccaggacagacacagattatttggatcaacttgtttgcagaaggatgagctcttaaagctgaggtatttttgcaatcctccactctccaaaatagggtagtttggagatgccgttaagcagatraggtgcgggcagccccagtaagatcaaactgaactttgctcagacagtgggtaggatccaggcagacccggggactcacgaat

SEQ ID NO: 810968 - DNA, 613 bp, Homo sapiens
gaagcatacgaataagatagtagcattcctttgagattccattactataaatcggattccaattttctctccccaccactgtctgccctctcrtaaaccctcctcccatacgggggcacaccaagggccctcgcttctaatgaagggcagtacctcatcccctggatctactgtggtccttactgtgctctccctatgcattggtgtcaattaagggagtacatgttctgttccaaagctgtaggaagtgctagaaaccaggaaaatgaatgatccctgtcctcagagagattatttcctatggagggacataaaaatgtaagaggtgtcaacaggagtgaatatagaaattggagacagggcacagagacggtgtggtcgattgtaatcagggactaaaatgcagaactggaaggatttcctgagaggtgagagaggaatgtggtggcaatggtaataaaaggagaatggggtgccctctgaagacaagcaaaatagagggcatttgaagtagcagaaacaatgtaacttgaagcaggacacttaagataatttaagactactgatggcagattaaaacggggagccaatcagctgaaggtcattggtgtca

SEQ ID NO: 810969 - DNA, 609 bp, Homo sapiens
acctaatacattaatttataaagatagtttactcagattacttaagaaaactgtgatagttatcacttaaagttatttacctgttaaccatttttataacctatgaatttcaggttttcctaagtaaggaccttaagattagataattgttttttttttgtttgtttatttgtttttgccaatacctcaggacttagctgttttcattaactgaacaaaaaacctgccttatttattaagttttacataaacaaacataattctcttttgagctgcattcatagctttataaccctcatggcaaattttgacgtttaatagaaataaataagttgacaatccttaagccattgctaattctactccaccaaaatttttaaaccaacatatttattaaagatttacttaagtgacatgaacttgaaaaagcatttggcttaacatctatttttctgataaagtatttaagtgtttctaaagtcaattaattagagcattttatacatttttagtggtgaaacatcatgtacatgacagatgaacacatagacatactagacccatagawagatcttacagatctgttactggaaaagggtccccatccag

SEQ ID NO: 810970 - DNA, 608 bp, Homo sapiens
atggttaatcaatctaaatggtatttttacagtctataagaattttaaattyttctgctagaataaaaccccctaaagatttcaatcttatagacacttagaaatcccctggatcataggaaatagttttaacgatagcgtaaagtttaaaatgcacacacacacacacacacacacacccccacacacacatattctcagcaaacaaataacatgacaggtagtttgatcacatttcacagaataaaagtataaacatactaagtaaattccacactaaatctccattaccacatgtgcatacattataagtaaatatatcaaggaatctgaacacttgagaaatgccatatgtaaaaattatctgacactggctttttaaattcttcggcaaattttgagtatgcacttgacgccagaatatgtaagcaaacaatgtaagcatgtatgcacccaaattagaagcataaatagtcatctaggcagtagatgaaaatgtcattccctaggatgagtacagtttcatgggtaattgatcatatatgccaaatctgggaatgtattcccagacagtgacttgaaagaccttgaaactataaaggcaagga

SEQ ID NO: 810971 - DNA, 662 bp, Homo sapiens
tctaattgtattatttattccatagttattaattkccattcttcaaaaaatatatatttttgagataatttgtctacgctgaaatacatttccaattagaatgaaagaataaatgcttatttctttctttttaattagcaatgtatatgtctaaaaggtagtgtaatagtcacctctaccagtaacaaataaggttggtttttgtgttttctcttctctgatatcattatgtatccacgtgtttcaaagaattgtaactattattctttcagtgataaaactgtctcatctttttggccaagagagccccgcaggctggttcctgtgccgtgttgaaaaatacgtcattagtctttgaaagcttctttgctttctggcacagcaagatcttcctggctcaccttttacattcctttttacacacctggaaactgccatatctctaagaaaccttgttatttgtggagagccatatttagagaccacagtcagggtgctaaaagggttcattgctaagggtaatgcttcttcaatctccctttctagaacggtgctacaaaatataatttgttattagaaaaaaatcataggttcacatgagtattttcaatgcacgttgaacatgacagggttttcagttagattatttgttattatactga

SEQ ID NO: 810972 - DNA, 331 bp, Homo sapiens
tactacgtaaattacaaattgaaggttctttgtgaccctgtgtcaagcctattggtgccatttttccaacagcatgtgcttacttcatacctctgtgtcatattttggtaatttccacaatatttcaaacttcttcattattagtatacatgatatggtgatttgtgatcagtgagcggttgtgaccagggaatggttacagcaggccttggatgagacccagtgctgtgcaggtctcaggtctgacccagtgcagccgtagttgtggtggccacagmagtgcctgtgttactccaccctcagcattaggtggctcagaacagaaacaagg

SEQ ID NO: 810973 - DNA, 536 bp, Homo sapiens
cacagggactgtgagtgaagaaagtacatgaagaacgtgattacctacaacagccccagccaagcacagctgttcacrttgggcccattttctaggagtgtgtctaagtgggtgtgaaaggagctggcttcactcacagacggcccccgttgcccagctgccggggaacatgcgcatgtggtgagggtgggcgctggccagctaggtggggatgagtgatagagtctgtaaacacggtcgcaggagagggccggcttggctcattgtaaggcagatctggaggcccttcccagctgagcaaacacccactggggacattgctggtgctgaaaccccaggaggaaccagagtaaacatgatggccagttattaaaatatgaagtcacatcatcatttagtattacgcttcagcatccccgagtggtgtctggaaatagagatggtgactgttggtagcaacgttctcaggttgcttttgaagctgtgtctgcacggagtttcaggtgcaggcttggaaacaaattagaatctgtctc

SEQ ID NO: 810974 - DNA, 547 bp, Homo sapiens
ctatataatttgagttccagaaagttacatctgatcttccagagtttcaggatatcctgccaatctttgtcctgtagggagagttgagacctctgaaaatcagagctttgcaacagattataaccaaggaggccaaggaaatgaaataaccatgtgatcacaagcaaccaaagttccccctgatccatcctgagtggccgcatccccccttgctgacaagcagtgacatgcgtgagtgccttgatcagaatatgacataacaaacgtcactgtttcctcagagcctctagctagcttgggaagatactttctataagtctgatggtattataggagacgttcaagattcactagacatttcaagaagcaggtaaaactgtcattcacttctcaagaagaaaatctaaaaattacrctaggattaaatccgactccatttttttattcattgtccagcttttatcttattctacttcatgcttcaaaattatagcctagacatgttaaatcagtgcttgcattgtgtactcaccccttcgttcccccc

SEQ ID NO: 810975 - DNA, 612 bp, Homo sapiens
agcttatttacagatgagtgcttcttgtatactgccgacacagaaggtttgccaatctcattctccctgtgctctcctgagcacatgattcagaaacctacggctgaagcttcctccggcgatttytgaaaaatacaggttgctgacagaaaaacctgaaaatatctaattatatattttacatcagttttagttttgccttatgtatattattaaggatgccatataccaaggatgtgttatctcaaaaacgaaaaaaaaaaaaaaaaaaaaaaaaaaaagggccccagtccttttcggaaagttttaaaaactttcttaaaaatacatttcttttctttttgaaaagttaaagtgttttaggaaacaattgttatatcaaagttcctggccctttggagaaagtgttcagtagagaatttgttaaacattctagaaatatctggtatgtattttcaacatgaagaacacatttatttcctataccatgactgtgcagaattgatgtttaaggacttacaattgtacttatttctggagacaatggttaattaatgagagttaatttttattgtatcaatatcaccttatactgcagctatctttaatttt

SEQ ID NO: 810976 - DNA, 626 bp, Homo sapiens
taggagaactgggactgtcaccctcctcaattccttgtcgcctcctacctccacaaggcattgcaaaatgaaattaggtgaatggagcccttaagctggggaacgaggggtgtgacatattcagggagctgtttgtgtgagggaaggcacaaaacacctgcctagaaagagaaggtggctgtggagtctcacacggccccagaggagtgagattcactttggtcacaggatggaggctaggcaggaatttgaggttaggtaggatcaacgcgtgcagagcattaagagaaatgtaacctgcaaaaaggtagaatttccagactgctgaccactatcactgcttcagctaaaacaaaacaacattgaatgttttttcctaaatagaaatggatgacatattttacatcctgcataggaaggaaagtaaagccatctggcaacttccaataaccagctcaatgcattgcacctcccactcctacgaacagtctgtgacagccacacttatactaaaatctaaagcttctracacttccttcccaaacttccccatctgttctgacatctcctgttgacctctctccagagcctctttagatctctccctgggtcactcttcaattcca

SEQ ID NO: 810977 - DNA, 284 bp, Homo sapiens
tggttttaaagtcactgatgtcttttttaactagaatttaaacacaggtggtttgattctgttccaatctttcatttcactggtaaaaccrgtctagagaaataaaggctgccaaaaacaaaatctatgttaaaaattaaaaactataaaatttaaaaataacaaagccttaatcagagcctcaagtattaaaagagaatctgattgttgcatctagattgattaaccaaagcaagtgtcattggtgtgaactgatttacttaattcaattccctattttaaga

SEQ ID NO: 810978 - DNA, 547 bp, Homo sapiens
aaatgcctacatatttgtactatctcgcccttcatagaaacaatttgctagcttctcatataaagggtttttgtgaagattaaatgtgatcattcattaaagtgttccatataggtaascaactaataaatggcagggattattgttatttattaatagtaataagttataaaaatcattgtgatctcatttcctaaaattcagagagacaactttacatataatacctcgggagcaggctgcccatacagtaataccttgggatcagtaggctcagccccctttttttgatgaattggtcatggaggtggctgaggtggtatgatcacaggatgtgatgtgcagctgtcagtgcagggcagagagcccggtgagtcacagacagcagctgccacgagtcatccattccaagtaattgatactctgccattctgtgatggaggatctcttggtcacaggtgtataacacatgcatattcgtgattggccccactcctaactgtgtagaggagaccaaagagggagtggggagggctggaattatgct

SEQ ID NO: 810979 - DNA, 628 bp, Homo sapiens
caatgggtattaaggaaaaaaatcagtaagctaattaagatcacagtaatcaaataaaattcactcaaaatagtactattgtaagtattatttgaagttgaaatttttaccccagacattccctcaaagaaggctgtgagaatgaatttcagcagtctgacttgggtggacttgctctcaaacagtgcaggctctgttataacaggcctcaaccatgtcctgggtggatgctgagaagacccaaagggaggggccctaacaccaccccactgaagaatgcaagaaagaccctctcagtctcccataagcaatgctgaaacactgggcagagcaatgaaagtgagaatttgacaaaaaatcatgattgatactgaaaaagaatgacatttgagaaagcaaagctcctttcgtaaataattgctgtagctattgtgaattaaaatggagaatagcactggcttgttactgtccttaacttcagggttcacactgtttgttaaagactgctttgaatttccttttatcaaactggaaaggtcaccgtatttgtctctaggaaraaaaatcctaatttattatgccaagaaaataagaagaaatactacagatacaaatgaaacagcagata

SEQ ID NO: 810980 - DNA, 542 bp, Homo sapiens
agcaaacaggggataaagaatgctgagagagaatgtcacaaagattcctgaaaaagaaaaaaagtaacacaggacaatgtaaattgttttgggttaattctatttagctgagatttcatcctactatcgtacgaaaaattgacaagggggacttactatatatcaaattccatgattaattttaaccaagcattattgtacttaatgacatcaatgtctaagaaattttaagcaacttaataggaacaggtaatgaaaataggtaacataattccaattacattgcagtgtaggacagaagtctgaattacccctaaatagcaggaaacaactgtgcacacaaatcaaaaagaaaaaaaaggcacttgatcttattctactctgatgcttcatgggaatacaccgtgctctataatcacatcaacaacaggccgtggcggggaagaatytaatacagactgaaaagaacaaacaatgaagaactaagtatttgatcaaggttgacaatgtcagagaggaactcagcaatgcaattagtattt

SEQ ID NO: 810981 - DNA, 383 bp, Homo sapiens
actacattttcaaacctattttactgttattgcttcttagggtatgttcagaaatatttcattttagcacaatggagaaagttagggtttgaaatttgaagttataaacttgatgaggagatggaggctcataactttctaaatttcctaatttataaaataataatattgacatcaaagatattatcagaaagctgaagaagaccaaaaagggttgaaatcagttatctgtagaagagcccttcgaaaaaaggatgccttccaggtcaagagaagaaagctgggcgagaacaaagaagagagctagagcctaattcccatgactcawattaatgtgccctaatgagaaagttatgtgaaatccagtagggtggatccatgac

SEQ ID NO: 810982 - DNA, 525 bp, Homo sapiens
ccgagaaataattgtcaaacttaatgtcatgaagctttcccactacgtttacttctaagagttttacagtttcattttaagttttacagtttcttatactgatrtctttaacctattttgagttgatttttgtgtatggtgcagataaaagtccagttttcattcttttgcatgtggacatccaattttcccaatatcatttgttgaataaaccatcctttccccattgtgtactctttgcacccttgtcaaaggtcagttgattatatatgcatacatttatttctgggctttctattctgtcccattggcctccatgtttatttttaggcaagtactatactgttttaattactataactttgtaatgtattttgaaatcaggaagtgtgatgccttcagctttgtttttcttctcaagattgatttggatatttgatatcttttgtggtttcttattaattttagggtgagttctttatttctgtaaaatatgccattgggattttgatcaaggttatacta

SEQ ID NO: 810983 - DNA, 607 bp, Homo sapiens
gctaaaagaaatgtctcacatattaatatagctgctggtaagaatgcctgtttcactcaaaagattccgaaaagatttgaaatataagtagtaagagacaaacattaacacagtaaagaaaaaatagcaaattttgtggagtgggaattcaaatggaattatagggattgatatttctgcctggagtagtataccatggaattcctaaactcagaagttaatcagataattatattgtgctacggaggttaatgctatacccattatttgattattaagtgaaattctatccaccatcttttcatgtatgccaataaaattgaactcctcagccctattttagaatctaaatactatctaacaaaattctagaaccttgccttcaaaattaacaaaatgaatttcaggaagagatgaagatgcccactttcctctcgagctctttctccatcataaaattagctttgtaaaccaaaatgaatgcttgtgaatattcacaactgtaacccacttattctattttctgataatataaatcygatcttgccgatgtatattaaacaaagaggtcttgcaaaagttaaaaaaaaaaaacaacttagaacgg

SEQ ID NO: 810984 - DNA, 629 bp, Homo sapiens
gaattttgttaaaataattaaaagaaaactaacaaattattacttacctcttctatactcctctactccccacagctgtttaagcatgactttgatacatattatgctggtcattccatcactaattatgaatatatacaaatatcttggttatgcatattactggtcatgattacacaattctttttaacttgtataacaagtagtacagaatcatttctgatgcacacatgactctgaattgttagacattattttaactaaaatcttattttctgggggaaggaaaaactaaacctttttcttatattaaaactcaaagtgtgtgtgttttcatttcgttacttttccttatctaactatttaattctgagctcttttttctaacttattcttggtctcttctttagtcctctagttatcctattacaggtactaaatattctctatttttggttaaaaatatccagaacggaaagtcttcctttcatctttcactgagagttacctgttaaccrtgagacttacctggcctcattaatgatgtgggtcatctcagcacagctcacatatatgcacagacacatgtgtgcattgcatgtgtgcacaccacatacatacatcattta

SEQ ID NO: 810985 - DNA, 629 bp, Homo sapiens
gaattttgttaaaataattaaaagaaaactaacaaattattacttacctcttctatactcctctactccccacagctgtttaagcatgactttgatacatattatgctggtcattccatcactaattatgaatatatacaaatatcttggttatgcatattactggtcatgattacacaattctttttaacttgtataacaagtagtacagaatcatttctgatgcacacatgactctgaattgttagacattattttaactaaaatcttattttctgggggaaggaaaaactaaacctttttcttatattaaaactcaaagtgtgtgtgttttcatttcgttacttttccttatctaactatttaattctgagctcttttttctaacttattcttggtctcttctttagtcctctagttatcctattacaggtactaaatattctctatttttggttaaaaatatccagaacggaaagtcttcctttcatctttcactgagagttacctgttaaccgtgagacttacctggcctcaktaatgatgtgggtcatctcagcacagctcacatatatgcacagacacatgtgtgcattgcatgtgtgcacaccacatacatacatcattta

SEQ ID NO: 810986 - DNA, 612 bp, Homo sapiens
tttcagtcactatagattagtttgcatttttagaacattatataaatgaaatcatacattatctactccttttcagatagcttgttttgctcaacatacttattttgccatttatccatgctgyggcataaatcagcatatcatttccttttattgctgcatagcatttcactgtatagctatctcacaaattattatccatccacctgttgatataaatttgagtggttcccacttttagactattacacataaaactgctatgaacattcatatacaaggctttgtgtggacatatactttcatttctcttgagcaaatatctagaaatgaaatggctggatcatttagtaggtgaatgtttcactttttaagaaactgacaaattattttccaaagtagctttagcattttatactcccaccagctaaataagctccagttgcaccccaccatcaccaatatttggtactgtcagtctctttagatttaaccattctaacaggtgtatagtgatttctcattgtgattttttttttgcatttctgaaatgactaaccacgttgggcatctttttgtgtgcttatttccaatgtgctcatcttgtttagc

SEQ ID NO: 810987 - DNA, 618 bp, Homo sapiens
cagtgctttgaaaatattgctccattatcttcttgtttgcattgtttctgaygagaagtttgtagctttcttgtctttttcctcatctatattgtgtcaatttctctggatgctttagtagttttctccttaacattggttttaagcagtttgattatgatatacctaggtgtaggatttcttatgtttcttatgcttagaatttattgagcttcttgaatctgtggattttaagttttcatcaaattggcaaatttttaaagcattatttcttcaatgatttggacttcctttggggacatatgtacatacggaatatagatataataaatgcttaatgtctctactaactctactaagtgtgccatttccgggtctatttctattattgactgatttttctcttcattttgggtacattttttttctccttttttgcttgcctggtgatttttgaatggatgccagacattgtaaattttaaacttttggggactaggtatttctgaattctcgtaaatgttactgagccttgttctggaacacatttaaattacttggaaacagtttaatccttttgagtcttgctattaggatttgttagttaggtttagtgca

SEQ ID NO: 810988 - DNA, 618 bp, Homo sapiens
cagtgctttgaaaatattgctccattatcttcttgtttgcattgtttctgatgagaagtttgtagctttcttgtctttttcctcatctatattgtgtcaatttctctggatgctttagtagttttctccttaacattggttttaagcagtttgattatgatatacctaggtgtaggatttcttatgtttcttatgcttagaatttattgagcttcttgaatctgtggattttaagttttcatcaaattggcaaatttttaaagcattatttcttcaatgatttggacttcctttggggacatatgtacatacggaatatagatataataaatgcttaatgtctctactaactctactaagtgtgccatttccgggtctatttctattattgactgatttttctcttcattttgggtacattttttttctccttttttgcttgcctggtgatttttgaatggatgccagacattgtaaattttaaacttttggggactaggtatttctgaattctcgtaaatgttaytgagccttgttctggaacacatttaaattacttggaaacagtttaatccttttgagtcttgctattaggatttgttagttaggtttagtgca

SEQ ID NO: 810989 - DNA, 621 bp, Homo sapiens
tggaaaatcatttggcagctttttaaaaagttgaatatacacctaacataagacactgcctaccatttatcacctatcaaaacacttttggaagtgttttgatttgatacgatgaggctaaagacaaagacctgcacacaaacactatattctagctgataaatatgtatcctcacaggggcttaggttaaaaatttggaaattatttgtatacctgagaggaataaatacagtcacgcattgcataatgatgttcagacaacaatggactgcatatatgatggcagtaccatgagattataatggagctgaaaaattctcatcatcttgtgacgtcatagccattgcaatgtcagagtgcaacacattattcacgtgtttgttgtgatgctggtataaacaaacctattgcactgccagtcatacaaaagcactgcacatgcaattatgtacagtacataatacttgctaataaccatgttacttatttattatcctatactttttataattattttacagtttttttwaaaggttaattgtaaaacagcctcaggtaggtacttcaggaggtattccagaagaaggaatttttatcatgggacatcacagctctgtgtg

SEQ ID NO: 810990 - DNA, 602 bp, Homo sapiens
aatagccatagtcaaggagaagatgaagagaattaaagaatacttaattcgttaattaaacattaaggtttattatcttatttcycttatcatctctctttcctctaatatgggaagattcaagggcagatggaaaaaggcaatcatgaaattttgccttcaattatctgtcttcttttgacatttctttaggttgtctaacacacacaggacttcagttaccatccatgtgctgatgaattccacttctttatctcctgaatttcagactattactttaagatgtttattgaacacctcaacctaaacagtctggaacaacagtccctcttaaactttcaagtgcataagaattaccggggaatattcttgaaatgcggatttaggttaagtagttcaagagaggaaggttttagagtgtgcattttaaaccctcccaatttaggccaatactcctagtccatgagcaatattttgagtaataagagtctagaggcactttaaactcttcatattacaaacagattttattattttttaaaaatcaatttctcctcttgtctgtttttcttaatggtgctactatctttgaaaacatttaa

SEQ ID NO: 810991 - DNA, 614 bp, Homo sapiens
atctgaaactgaacaactaaagtaagtgawtacagacttaggagtaaacaatattgttaaaaatgattcaaatatgtctttaaaagttcatttttgcaataccaaggaaatctgtattaagaagtctccaataccaacgatatctgacgagatatcaagaacccgttaatgtctttggtgagttttaaggttatgtttaaaagttcatatttttttcaaagattcacaatgacacagaagtaaaaggacatgacttctaggatttgctctataataattcagcaagaaaagatagatggatcaattatggccagaccatgacaattattaaacttgagtgacgaatttacaacaatttactgtagtatgatctctttcttatatgtttgaaatttctcccaataagtttgtaaagaaaaacaataaaggtattttcgatcaagcactggcttatgtcagatttatcaaggagtatagaaaatgcagagtatagaaaatgcatcattttacttttccttaacttttgcaatatagataaccaggaataaaatcaagaaaaccaaaatgtttccatactcacctgacagaaagatgagcctctgcaggacaattat

SEQ ID NO: 810992 - DNA, 479 bp, Homo sapiens
accagagagctgtaagtctagaacaggaaaaggaaggaaaggctaaatcattcataccataaaatagtgagttaatgaagctgatcacaaagaatctgtcttctaactgtgccttttgtgtacaagtggtattttctccataaaatgtgatcccagatttccacccttttcaaagtccatcactattcaatacaccctccctccccattctgtttctcccattcctctctccactcatctgcccatccatcctagatactgggtcaatgacattcacaagagcctcctattaaagaatccagaattagcctgatgatagagaatataaaataaagaaaaacatgggttgctgccctcatgaaggaatccctcccatccttctccagtcctcaacctccatttatsctaccttttctttccccattactgttagatccgttgaatcggctccagaaaccaaacaagttaacccgttccta

SEQ ID NO: 810993 - DNA, 610 bp, Homo sapiens
gtatcacatatcatatgcaggatgcagaggggcccggcttacataccgagagtcagaggactcatgcggccacaagtaggttgggaacagtgtcccctaataggatgagttttgggctttaaaattwaaaaaaaaaaaaatgggggcattgatgagtctcgttggcaccttttggcttgtggaggctcgtgatctaatattggtctctgctgtatacccagcacactacctgccacttagccattccataaatatcgttaaataagtgaattaggccgagtgccatggctgacacttgtaatcccagcacttacagaggccgaggtgggaggatcgccttgagcccaggagtttgagaccagcctgggcaacatagcgagaccgcgtctctatttaaaaattaaaaaaaaaaaaaaaaaaagacaacttgagccgcacacaggttcttgccaaagcctctattagtgctgtgactcgggaaagaaaacttgtttttttcttcagttgactgggctcagccatcccaggtgtgagtgactcaggccttgagagcaggtaatggatccatagggagccctgtccccacccagggagactgtcccagcccctc

SEQ ID NO: 810994 - DNA, 312 bp, Homo sapiens
ggttgtgggcacctgtagctactcaggaagctgaggcaggagaaycacttgaacccaggaggtggaggttgcagtgagccattgcactccagcctgggcaacaacagtgaaactctgtctcaaaaaaaaaaaaaagtgacaatgatcattcctggtgttaacaacagacgtccttttttgggggggtgggggacagaatctcccgttgcccaggctggagtgcagagacacgatcttggctcactgcaagctccgcctcctgggatcacgccattctcctgcctcagcctcctgaatagctgggactacagg

SEQ ID NO: 810995 - DNA, 312 bp, Homo sapiens
ggttgtgggcacctgtagctactcaggaagctgaggcaggagaatmacttgaacccaggaggtggaggttgcagtgagccattgcactccagcctgggcaacaacagtgaaactctgtctcaaaaaaaaaaaaaagtgacaatgatcattcctggtgttaacaacagacgtccttttttgggggggtgggggacagaatctcccgttgcccaggctggagtgcagagacacgatcttggctcactgcaagctccgcctcctgggatcacgccattctcctgcctcagcctcctgaatagctgggactacagg

SEQ ID NO: 810996 - DNA, 472 bp, Homo sapiens
cgggttaacttgtttggtttctggagccgattcaacggatctaacagtaatggggaaagaaaaggtagsataaatggaggttgaggactggagaaggatgggagggattccttcatgagggcagcaacccatgtttttctttattttatattctctatcatcaggctaattctggattctttaataggaggctcttgtgaatgtcattgacccagtatctaggatggatgggcagatgagtggagagaggaatgggagaaacagaatggggagggagggtgtattgaatagtgatggactttgaaaagggtggaaatctgggatcacattttatggagaaaataccacttgtacacaaaaggcacagttagaagacagattctttgtgatcagcttcattaactcactattttatggtatgaatgatttagcctttccttccttttcctgttctagacttacagctctctgg

SEQ ID NO: 810997 - DNA, 526 bp, Homo sapiens
gggctctttgcttgagttgcagatggctgccttctcactgtgttctcacatggcagaragagagagagagaactctggttgtctccacttgttataagggtaccagctatactgaataaggatctcacccttatgacctcatttaacatttatcacttcctcacaggccttatctccagacaaaattaccctgggtgccagggcctcaatatgagaagtctggggacacacacacattcagtccacaacaaatcaaatccacagagctgtgatttttcacccctcctctcttttctagattccagatttttctctattgtctattgcttttaaggctctatgctgatgaagtttagagaaacctgagtcatcttaatcctgtctctcactttagctgaaacattcatttcccacaaattagaagaagttgaattaatattatagactacacagaaacataatacactttcattctagctctgtacatacaaatgttcttcctcgtattacacaacattgcttaagc

SEQ ID NO: 810998 - DNA, 571 bp, Homo sapiens
cttcgacatattttttttttwaaaaaagacaaaaatgcacttaacattttcaagtataatgaagttaccatgaaaacactcatattttcatatttttccccaaagcaaggctttattcatccaaatgataaaagacttttgtaattgcatttctggcctctacagttagaatgactttaacttgtctcatttattgataattttatgtgttgtgatagatttgattcatgtagatcattatccctacctctcttttttcctgaaataatatttgtatatgtctgtgttcatgtgtgtgtcttgttttctgactctgaaatgtttattatgccttagacagttaccccagggagattatgtaaaaaagcctggagatggtgactctttttatagcgacattcctcccggagtcagcacaaactcagcatctagttctaagaagaggtctgcttttctgtcgcattttcagatttctacctgttccatcacacattattccattagtcagaacatttcattattttgcagcaggtttgattacttcttccttctttcttgaatgttaaaaaat

SEQ ID NO: 810999 - DNA, 442 bp, Homo sapiens
cctggaagccccaggccggcctggtacctctaaggagaagccacacgcatgccaccctgtccctctgactggagcctcccatcaytgtgtggagccccctcctccctaagccaccagatccacctcaagccccaccttgctgcctaaaaataacaccttcgcgtcctgctggctccccaatccctccctgccccgggatccttctggtttgtattctcccagctggctgtgagctgtgagccggcgccagtgtgccaggccgaccgcaggcccggaattaggttaactccgctgcagccctggagggaggtcgcctgtttggggccgtggttgcgggtactgaaaatgctcccttcatgggctggggcctgattctgtgttgggggaaggcagtgacatgtgcctgggtgtgtatgtgtcgggggctgggtacggtaagctt

SEQ ID NO: 811000 - DNA, 442 bp, Homo sapiens
cctggaagccccaggccggcctggtacctctaaggagaagccacacgcatgccaccctgtccctctgactggagcctcccatcattgtgtggagccccctcctccctaagccaccagatccacctcaagccccaccttgctgcctaaaaataacaccttcgcgtcctgctggctccccaatccctccctgccccgggatccttctggtttgtattctcccagctggctgtgagctgtgagccggcgccagtgtgccaggccgaccgcaggcccggaattaggttaactccgctgcagccctggagggaggtcgcctgtttggggccgtggttgcgggtactgaaaatgctcccttcatgggctggggcctgattctgtgttgggggaaggcagtgacatgtgcmtgggtgtgtatgtgtcgggggctgggtacggtaagctt

SEQ ID NO: 811001 - DNA, 589 bp, Homo sapiens
cttgcactttcttcaaatgagctacaaagctatgtttcctggtttgtcatttggttttcttgactttccccgaccaacttttctagcccatctcccctccttcttcaccttccttgttccctccttcttcctctccatccctgacttccacccctaaatcctccttcacgccttctttctcattctgttgtccgaatgcatttctgtgtggtttagcattccaagtttgtgtttctttcctgaactgtatgctgcagtgaagccaatttgatttctgttgtctggagtagctgcgaagcccctcctcacccttcatccctgccagcccccgggacttcggtcaccccgctggccttcagggccctttcgggcaaaaggcagtgacagaggagccagtgcggggcctcctggccttcagatcctggaggaagttctggccaaggtcaggcacaagggaaaagccccatcccrtccttgggggcctactgggccaaacggaactctgggcttcctcaagtccttccctggctgcaggatggagctttggggtgggagctgcagggctctggaggagcaacgggcaccagga

SEQ ID NO: 811002 - DNA, 557 bp, Homo sapiens
tctggaacacactgtgttgccttctccaaaacatctgcaacctctaacgagtcyttgcagaagccctgaatgctatacatatttccctcctccaccaatttttggctgctctgctctgagccctcagtatctgccagtgcttgcttatcttcttccacagcctccttcagctgctcttctaacttgacttcttccatgagtatcttgtccatagagggagtatctgtcctccatttggtttggatccacatcctcttccaagtgctggcaactgttcttttgttttgtagctgtgtgcagaactgaggagaaggcctggagacaatgccaacaccgggagaccgcgtggcaccagcctcacgcatggagccgccgtggctgccccgggatgatgatttaagtttcccctcgcccatcactatatgcttctatgaaatgttttaaattatttttattccttcagcataattatcaaatacatcttttatctatttttttccttatgacttacagattctgagagctcagagctatttccactgcctcacttctcatcc

SEQ ID NO: 811003 - DNA, 563 bp, Homo sapiens
aacagacacaataaatgttctcaggatagccacttggtagcttaacaaattgagtgtctaatatgtgtcagggaatgtgcttagagcttttcatagggcacctcatttactcttcaaaaactataaaactctatatggattggtacaactcttcttttacaaataaggaactgaagcttagaaaggtattttaatctgcttccaggcacaaagctaacccatgtctaagccaggttcaaacagcagcggactgactcaggacctatgttcttcagccattgcagccaacctccaaaacaagtttcaaatcaactttatctgaactcccataaactgccgtcatttctcacttggcttctgaagtagcctcctcactgggctttctatttctgcatttattctgataattcatcatccactcagcagtcagggtgattttttgaaatgcacgtgaaatcctatgatatactccagagttgaaaacacttgaatggctccttgktgcctttaagattacatttcaaattttaattctatttacaaggcctctgaatctagccctg

SEQ ID NO: 811004 - DNA, 546 bp, Homo sapiens
atgacaagaattgcttttctgccagtgtcaagtaacactgaggtctcaccagaaccatctgaggtctcaccagaagcctctttaatgtccatatttccaccaacagtctcttcaatgcaatctaggcattttcttgcctgcaccttaaaactattctatccttttgtcttaccctgttccaaagtcacttccacttttttaggtatctgttaccatagcagcccacttcttagaatcaaaatctgtattaaccatgatgagataccacctcacacctgttagaaagtctgttatcaaaaagacgaaagataacaagtgttgtcaacaaaaatgagaaaatggaacctttgcacactgttggtgaaaatatcagttagtatagccattatggaaaacagtatggaggttcctcarattaaaaattgagctaccatatgatctagcaatcccacttctgggtatatatcctaaggaaacaaaattagtgagtcagagagatatctgcactcgcatgtttactgcagcactagtcacaatagccaagat

SEQ ID NO: 811005 - DNA, 546 bp, Homo sapiens
atgacaagaattgcttttctgccagtgtcaagtaacactgaggtctcaccagaaccatctgaggtctcaccagaagcctctttaatgtccatatttccaccaacagtctcttcaatgcaatctaggcattttcttgcctgcaccttaaaactattctatccttttgtcttaccctgttccaaagtcacttccacttttttaggtatctgttaccatagcagcccacttcttagaatcaaaatctgtattaaccatgatgagataccacctcacacctgttagaaagtctgttatcaaaaagacgaaagataacaagtgttgtcaacaaaaatgagaaaatggaacctttgcacactgttggtgaaaatatcagttagtatagccattatggaaaacagtatggaggttcctcaaattaaaaattgagctaccatatgrtctagcaatcccacttctgggtatatatcctaaggaaacaaaattagtgagtcagagagatatctgcactcgcatgtttactgcagcactagtcacaatagccaagat

SEQ ID NO: 811006 - DNA, 561 bp, Homo sapiens
ctctgggcagatacccagtagtgggattgctagatcaaatggagattcctttaaaaactaaaactaccatttcatttgacrttagaaatatttttatattttctataaaattcgaaaaacttattttataatttttatttttttctgaaattttgagatattttagttctgatattttatttgtattaatacttttttaaatcaacgagctgtgtgattttctttgtcaattttgtaatcataaatggaattttatgttgcctccctttcttcgtgaaaatattattttctaataagatagggcaggagtgttcaaaagagtaagataaggctaattttctgaagagtatctcaaggaatgttaaaattattctcatttattggtaattctttatttaaaggtagggttgactggttttttgttcttttaaatttgtgctctacaatttccttgtctctaaaatgggtcagatttacatactctctactctccaatcataagcttcttgaagatctattgaagttgctgataagccacagaaattacatatatatcagcat

SEQ ID NO: 811007 - DNA, 624 bp, Homo sapiens
atgttggttctatagggtttttctatttatgctatcatgtctgcaaacagataggttttttttacccattcttatgcctcgaattgatttattgtgtctaattgcattggctaatactctaatacaatttctagtaacagggattctaacaggcatccttgccttgttataatcttagtgaaaacaccttgaatgtatttccattaaataagatgtcagcgttaggattcagacacacacatatcacatataaagaaagtatttctcattttctgttctcctgagtatgttttgttttttaaatcatgaatggatgttgaattttgtcaaaggctttttcggcatatatggagataataatatgatttttccccattaggtttataaattttgtttatgatgttaactaattttctgatactgaactactcttgtgttctccagaaaggttttgaaatgtattaaaagtaatggtgaaaactgcaattactttcacaccaacctaataaaacttaaatacagtgagttaagttaaaattttatatacaaagtgaaatattgtatcctaaaaattsctcaaaaggcctgaaaagtttatgccctcatcattagatgcatcaaaaa

SEQ ID NO: 811008 - DNA, 640 bp, Homo sapiens
gattttttgttttcattcatttaacaaatatctgtataggcatactgcacctccattttctttctgtctttctctctctctctctctttctttttttagagacggagtccaggctggagtgcagtggckcaatctctgctcactgcaacttccacctcctgggttcaagcgattttcctgcctcagctttccaagtagctgggactacaggcatgcgtcaccatgcctagctaatttttgtattttttagtagagatgaggtttcactatatgatggccaggctggtcccgaactcctgacctcaggtgagctgtccgccttggcctcccaaagtgctgggattacaggcatgagccatcgcacctggcctgcacctccaatttgttatgaggatcaagatgcctacatgggaagggggtgttacatgcataggtgtgtgtgtgtgataaatggaattatccatgcaaagcacccaaaataatgcctgaatcatttttttgcctcttgacaaatgctgatactagctaacttttgcatagcacttactatgagcctggtatgattctaagggctcgacatatgttagttcatttaatcctcacaacaattctgatactatttttaatcccaattaaaaat

SEQ ID NO: 811009 - DNA, 649 bp, Homo sapiens
ataaaccatgcatcaaggtaattttgatgatgtcgggatatagagattaatagatattaaaaaataggcaattctaaaatcaaagcaaatgatccttctttctatcccccggaatatctrtgcctgagagcctgagcagaatttgggggaatcaaaaatgttctccccaggccaagctcgggacctgctgatgagcccttatattcaatgtaagctctcatttactttagctgcattttagatttgtctcccaagtgacataagggagagcttttataaacacaaaacacaaatttgatgtttgaattccagcagccggccctgctctcggactcccggatttccggactcccggactcccggttcccgtttcctaaggcctgggctctgctggtctccagcccttgaggtgccacttggaatcctttacttctttctctcctctcttcactagatttcaaggccttatgaatggcggcagctcatacttcgcaggtgctttggaggcagttaattaatgctaattaagctgaaatatttaaaatttaatttgataaacattcatcaagttccccactgcatgccaaatactcttctaaacactggtaatgagggcagaaagatctagcatggtgatttacactaaata

SEQ ID NO: 811010 - DNA, 487 bp, Homo sapiens
cgcggtggctcacgcctttaatcccagcactttgggaggcctaggtgggtggatcatgaggtcagaagatcaagaccatcctggctacggcggtgaaaccccgtctctactaaaaacagaaaaaaatcagctgggcgtggctgcgggcgcctgtagtcccagctactccgggggctgaggcaggagaatagcgtgaacctgggaggcggagctcgcagtgagccgggatcgcgccactgcactccagcctgggcgatagagttagactccgtctcaaaaaaaaaaaaaaaaaaaaaaaaaaattctcaaaactcaatagtaaaaagaaaatccaattagaaaatggcaaaaggcattgaatagtcaattaatccaaraagacagacagatggctaataacaaatgtaaagatcttcaatatcattagccatcagggaaatgcaagttaaaaaccacagtaatctatcactacatatttctcagaatg

SEQ ID NO: 811011 - DNA, 323 bp, Homo sapiens
gccttctaggagagtggatcctgggagaatgaaaggctttttgcttctgccaaattcttaaatggacttggatatgcagagtttgacctggagctaaactttggtggaagggacagaagaaactgaaattggaagaatttggttttgctcccaagaggggagacagcagaggcattgggtgaaaagctggagcctgcattatagacaaatgccaagagtttkttttttttttttttttttttgaaacagggatgtcctgaatgcaatattaagttgtgtctgttgctgtagtaacaggatgatacagaaatactgattgagat

SEQ ID NO: 811012 - DNA, 619 bp, Homo sapiens
ttttctctcttgacaccattttggggatttgtactgtcactgtggacagctgtttcaagtctttgctttatctggaaaaacaagcccttaccaaacagtggtactcttcatctgcatctgaggcacacccagggcagctggagtttgtgctaatgaattcagtctctcactgatttttttttattagcatgtatgcaaacaaattaatctaatttttttttttttgagatagagtcttactctgttgcccaagctggactgcagtggtgcgatctcagctcactgaaacctccccctctagcattcaagcaattctcatgcctcagtgccaccacttctggctaatttttgtatttttagtagaggcggggttttaccatgttggccaggctggtctcgaactcctgacctcaagtcatctgcccaccttggcctcccaaagtgcttaatctaagattttgaagtgacagtttcttaaagctgaaaaagactaagtagcagcccagtccagttacttgccttggataaagcgattttcacagtttaagatggtaaaaggctgatatccttatcaaacatttccacaaatgcagawtctatgggttctaacaatagtgat

SEQ ID NO: 811013 - DNA, 602 bp, Homo sapiens
gataatttttagacatgtgcttccagatgggtgtttaatgagaagaactgartgatcccatttattttttgctggccaaattgtttgtgcccactttcatgagtcactaatttttgaggggctaactgctaataggtaggggaggagtagttctaaagaagtgttgtcttagggcaagggtcacgtcgatcagcccagcctcactttagggcctcacaaaatctaacttcaggaacacaaagagataaaagcacaaagcctgaattaagaagttctctaacaaactaaagaattacactttttgttaacaaactattaacaaaattgcttctgattacagaggctaaaaggtatttacttttgctagaagatattatcaatggaaatgttttaacattttcttgtgactaatgcacttccaaaagaactaatggtcttagaatatattttcccctttttagaggaaactgcttataatcctatttagcaggtgccagttttagaaataaagttttccttccccaagccatcaagacacatgatatctaaagttctttctaatgcctatgactctcagaggaaaactccagactactcagact

SEQ ID NO: 811014 - DNA, 609 bp, Homo sapiens
acttttctcgctgccacatatgagtgaaaacatgcagtatttgtctttctgtgcctagcttatttcacttaacataatgtcctccaggcttatccatgatgctacaaatgacaggctttattccttttcgtggctgaataatatttcattgtgtatacgtgccaaattttctttatccatttatctattgatacatacttgattccacatcttgcctattgtgaacagcgctgcaataaatatgggagtgcagatatctctttgatacactgatttccatgggattgctgaatcctatggtagttctattttgacatttttgaagaacctccatactgtttcccatagtggctgtactaatttaacattcccaccaacagtttatgagagtttccctttttccacattcttgccagcatctattattttttgtgtttttgataacagccattctagctgggatgaggagaaatctcaatgtgattttgatttgcatttccctcctgyaatctttattgatgtcctttctctacattggcctccacctctgcaaatataatgctgttcactggggagccttattcatgctgccttctgttcaatacccaa

SEQ ID NO: 811015 - DNA, 566 bp, Homo sapiens
ctcctgatcaacctggtttgccacccaccttgggaaactctacaaaataggctttctgtccccttactgcctgcatggtgtatgctggagttgggaagaaagaagtggattcctgattgtgcaggtagtgtgcacagaaggacgttttgggacaatccaaccccttgtctctctctggaggacgagtagaggtgaaggaagttacttgcttgcaggggttgggtttctgttccaaggtggcactgtctaactggcagccagatgactacgctgtgggggttgagggaagagaactttctattctgcttcatttatttccatttcaggtaatttaatgaaccttaaacacacacattcatgaaggcagttttgaaggtctgaggagatcaggagcctgataatggattctggtccctgtgacagggatgcttatgaccaggaaggactgagagaattcatggaaggcaactgaggcctctgcagagggctttagagagaaggaaagctacatcagagctgaacacrccactgcctctggatccctcatttggttcttgtccagatca

SEQ ID NO: 811016 - DNA, 534 bp, Homo sapiens
actttaaggtttaatgactgccctattggatttcagatttgcatggtgtctctrgcccctttgttttggccaatttctctcatttggaatgggtataattacccagtgcctgtactcccattgtatctaggaagtaactaacttgcttttgattttacaggctcataggaggaagaaacttaccttgtctcagatgagactttgaacttggacttttggattaattatggaaagagctaagactttggggcactgttggaaaggcatgattgtgttttaaaatgtgaggacatgtgatttgggaggggccaggggtggaatgatatggtttggctttgtccccactcaaatctcatcttgaattgtagttcccgtaatccccatgtgttgcaggagggatgcagagagaggtaatcgaatcatcggggtggtttttcccatgctgttcttgtgatagtaagtgagttctcatgagatctggtggttttatgaggaccatcgcttataagggttttccccctttgttcagcactt

SEQ ID NO: 811017 - DNA, 610 bp, Homo sapiens
atatatgagttatggtttctgattcttggatgttcttttattagggaatttacagtggaaaatagctgtgggaaaaaaagcttggcaatgctacatttcacttctacatgttgactttacctctatgacatagctttatttattttttaacatttattttaggtctgggagtaatgtgaaggttcgttatataggtaaactgctgtcacgggggtttgttgtacaggttatctcatcaccctggtattaagccatagttattaataacttaagccaacaggtatttttttctgctccttttcctcctcccaccctcttccctcaagtagaccccagtgtctgttattgccttgagttcgtgagttctcatccttcagctcccgcttataagtgagaacatgtggtatttggttttctgttcctgcattagtttgctaaggatggtagccaccaactccatccgtattcccgcaaaagacaygatctcattcttttttatggctgcatagtattccatggcatacatgtaccacattttctttatccagtctgtcattgttgggcgattaggtcgattccatgtgtttgctattgtgaatggtgctgcagt

SEQ ID NO: 811018 - DNA, 610 bp, Homo sapiens
atatatgagttatggtttctgattcttggatgttcttttattagggaatttacagtggaaaatagctgtgggaaaaaaagcttggcaatgctacatttcacttctacatgttgactttacctctatgacatagctttatttattttttaacatttattttaggtctgggagtaatgtgaaggttcgttatataggtaaactgctgtcacgggggtttgttgtacaggttatctcatcaccctggtattaagccatagttattaataacttaagccaacaggtatttttttctgctccttttcctcctcccaccctcttccctcaagtagaccccagtgtctgttattgccttgagttcgtgagttctcatccttcagctcccgcttataagtgagaacatgtggtatttggttttctgttcctgcattagtttgctaaggatggtagccaccaactccatccgtattcccgcaaaagacatgatctcattcttttttatggctgcatagtattccatggcrtacatgtaccacattttctttatccagtctgtcattgttgggcgattaggtcgattccatgtgtttgctattgtgaatggtgctgcagt

SEQ ID NO: 811019 - DNA, 607 bp, Homo sapiens
taaaatcttatgatctctcaaaaagtacttccagatcatatatcattactggaattatctatactcctaacaaagattgttatgcagtaytgaggcaaaaaaaaatcacaagcgctcaaagtcactaccaatgacttatttcctacctttccatctattgctagctacacaagttgccaattactgccacatcaacttaagagaaagtgcaagtatgaaatgaagcctatttgttatggtatcagtatttagacgctacctaaaatactcactatatgttgggatatcatgtgcttttaaaaaatagaatccaacattgcatatgaaagcaaaaatgtttgtgtctagatttctataaatatgtccatgaaagtccttttgcatagagtaagcatcctgccagggacataactatttaagttccaatgtacccaacactttatattctattcatggaaaaacctgatccactgtgtatgtcattacagaggaagacactgaggctcagaatgctcagagaataactaatgcaaagataataagtgatagcactgggattcaaacccactctgaagccacagcctgtgtcttttcctgggatctaatt

SEQ ID NO: 811020 - DNA, 607 bp, Homo sapiens
taaaatcttatgatctctcaaaaagtacttccagatcatatatcattactggaattatctatactcctaacaaagattgttatgcagtattgaggcaaaaaaaaatcacaagygctcaaagtcactaccaatgacttatttcctacctttccatctattgctagctacacaagttgccaattactgccacatcaacttaagagaaagtgcaagtatgaaatgaagcctatttgttatggtatcagtatttagacgctacctaaaatactcactatatgttgggatatcatgtgcttttaaaaaatagaatccaacattgcatatgaaagcaaaaatgtttgtgtctagatttctataaatatgtccatgaaagtccttttgcatagagtaagcatcctgccagggacataactatttaagttccaatgtacccaacactttatattctattcatggaaaaacctgatccactgtgtatgtcattacagaggaagacactgaggctcagaatgctcagagaataactaatgcaaagataataagtgatagcactgggattcaaacccactctgaagccacagcctgtgtcttttcctgggatctaatt

SEQ ID NO: 811021 - DNA, 610 bp, Homo sapiens
atatatgagttatggtttctgattcttggatgttcttttattagggaatttacagtggaaaatagctgtgggaaaaaaagcttggcaatgctacatttcacttctacatgttgactttacctctatgacatagctttatttattttttaacatttattttaggtctgggagtaatgtgaaggttcgttatataggtaaactgctgtcacgggggtttgttgtacaggttatctcatcaccctggtattaagccatagttattaataacttaagccaacaggtatttttttctgctccttttcctcctcccaccctcttccctcaagtagaccccagtgtctgttattgccttgagttcgtgagttctcatccttcagctcccgcttataagtgagaacatgtggtatttggttttctgttcctgcattagtttgctaaggatggtagccaccaactccatccgtattcccgcaaaagacatgatctcattcttttttatggctgcatagtattccatggcatacatgtaccacattttctttatccartctgtcattgttgggcgattaggtcgattccatgtgtttgctattgtgaatggtgctgcagt

SEQ ID NO: 811022 - DNA, 610 bp, Homo sapiens
atatatgagttatggtttctgattcttggatgttcttttattagggaatttacagtggaaaatagctgtgggaaaaaaagcttggcaatgctacatttcacttctacatgttgactttacctctatgacatagctttatttattttttaacatttattttaggtctgggagtaatgtgaaggttcgttatataggtaaactgctgtcacgggggtttgttgtacaggttatctcatcaccctggtattaagccatagttattaataacttaagccaacaggtatttttttctgctccttttcctcctcccaccctcttccctcaagtagaccccagtgtctgttattgccttgagttcgtgagttctcatccttcagctcccgcttataagtgagaacatgtggtatttggttttctgttcctgcattagtttgctaaggatggtagccaccaactccatccgtattcccgcaaaagacatgatctcattcttttttatggctgcatagtattccatggcatacatgtaccacattttctttatccagtctgtcattgttgggcgattaggtcgattccatgtgtytgctattgtgaatggtgctgcagt

SEQ ID NO: 811023 - DNA, 511 bp, Homo sapiens
agataatatggagaattcccatataccccaaagacacccacttttctctattactaatatcctaatatggcacacttctgataattaataaactaatattgagccattattataaactaacgtccatactgtattcagatttccttagttttaacttaacatcctttttctattccaagatcccacccagtataccatgttacatttagccatcatgtctccttaagctccttttggctgtgactgtttatcagactttccctgttttgttttttttttttcgttttttttttcctttgagatgaagtctcgctctgttgccaggctggagtgcagtgccacgatctgcaagctctgcctcccgggttcacgccattctcctgcctcagcctccggagtagctgagactacaggcgtgcgccactacgctcagctaatttttgtatttttagkagagacggggtttcaccatattggccaggacggtctcattcttttgacctcatggtgc

SEQ ID NO: 811024 - DNA, 639 bp, Homo sapiens
tggatccagcactggggccgcaggtggagctgcctgccagtcccacgccatgtgccygcactcctcagcccttgggtggttgatgggactgggtgctgtggagtgggggcggcactcgttggggaggctcgggccacacaggagcccacggagcagcggggaggctcaggcatggcgggctgcaggtcccgagccctgccccatgggaaggcagctaaggcctggcgagaaattgagcacagcagctgctggcccaggtgctaagcccctcacttcccggggccggctgggccggccggccagccgctccgagtgtgggaccgtggagcccacgcccacccggaactcacgctggcccgcaagcactgcgcgcagcccgggttcccgcccgtgcctctccctccacacctccctgcaagctgagggagctggctccagccttggccagcccagagaggggctcccacagtgcagcagtgggctgaagggctcgtcaagtgccgccaaagtgggagcccaggcagaggaggcgccaagagcgagcgagggctatgaggactgccagcacgctgtcacctctcactacctgcttctaatatgtcttgagggcttttctcccctctttaaataagagtctta

SEQ ID NO: 811025 - DNA, 591 bp, Homo sapiens
cgtactttccacacttccccacaaaacttagcatggtggctcatgcctgtaatcccagcactatgggaggccaagaagggaggatggcttgagaccaggagttytgagaccaggctgggcaacacagtgagacctggactctaaaaacattaaaaaaaaaaaaaaaaaattagctgggcatagtggtgtggacctgtagtctcacctacttgggaggatcactagagcccagaaatttaaggttgcagtgagctacaatcaggccactgtactcgactgggtgacagagggatatgctgtctaaaaaaattttttaaattaaaaataacatattccttactattagtatctttattttctcagttcctctaatttaataataataatttaataatttaaaagttcctctgctctttcccctcccctatatgacagtacccacactcatccatcgtcattccagttaacgtccttcgtccttccaatgtttttaacagtatataatgcagggataaatgacaaattaatagcgaagtaggtagtctctaaagaacttttccatcctttagtattaacttagtcaaatatgag

SEQ ID NO: 811026 - DNA, 603 bp, Homo sapiens
ctaatttatgaatggccaatgaatgcttttttggcagtcatgggctaccatcctgatatggttcttttttcctcctgatgattgctgtcttacagacaaagaaaaatatttttttctgggctcaaatccttgttctgccacttatctgctgtgtgacattgagcatcactttttcacttgttacctcataagggttctgtaaagattaaagaaaataaataaaatttatactatttaaatgcttaataaaacacccagcacataataatgggtgaataatggtggagaataaatgttcattcattccattcacctttttctagttagtaatgcataaagataagacacagtgtggtagagggatagtgttagatgtcttaaacgcttagacagtactaagttattcatgtgccttaactgatctaatcctagaacagctcaatagtgttccttatcattttacagatgatgaaagctgaggcccaaggagataaagatacatggccaaagtcacaaaatttgaatttacrgagctagatttgaactgaaccctcaaactagaagactgttcaaacttctgaccccatttgtggtataggatcc

SEQ ID NO: 811027 - DNA, 552 bp, Homo sapiens
ctttagtatttgtagaatttgcagtgatgccacctcccacattccagatacgggtaatttgtaacttctttcttttttgactaatcaatctggctagtggttaatcaatttgattgatatcaaaaaactaggctttttaattttattgactttattgttttttcattttctatttcattaattcttgctctgatctttattatttattttcttttattttgggtttaacttgctcttctttttcttgtcacttaaggttgaagctgagatcactgatttgagatatttattcttttctaatatagacctaaactatcccctaaaaactgcaataattgttgtaaattcctctctaaatactactttaacagtagcacacaaattctagcattttgcattttcattgtcatttggttgaatacatgttctaattttttttratttcttttttcatccatgggttgtttagaagtggaatatttagtttccatatattttaagacttttctaaagatgtttatgtcttcttactcatttccactgtggtcagag

SEQ ID NO: 811028 - DNA, 572 bp, Homo sapiens
agctcttgaatatatactcttgttgatccgctgggcatggtgtttggcattcttcgactggagactaaatctctgcagccatctcacaagtgacrctggcgcccataccagaaatatattcaataatctttctaagccctgtggacttgggtattcttccactctgacggagcctgagaattccaaaggaagtatgccccaggtacccagcaggcggaatataattgcctcttaggcagcagaaagaaaactaaagatcacattgatgcggaagaacatttaaggtctctctatcctgtgttgaattcacagtaaaggcgagagccgtgagtttgtactgtaaattccaggtctgtgacttctgactttggattaaaatccagttttctggaagtgaatctgatggcagatatgaccttgaattggctgcaagaccccagcgctggcctggctgccgtgcagcgcgcgctgctctgcacttagttatcatcaggagtgtggtggcctcctggccagctggtctacgacagggccatgccgggtcaccagctgtgcctctgcaggggtctcca

SEQ ID NO: 811029 - DNA, 572 bp, Homo sapiens
agctcttgaatatatactcttgttgatccgctgggcatggtgtttggcattcttcgactggagactaaatctctgcagccatctcacaagtgacactggcgcccataccagaaatatattcaataatctttctaagccctgtggacttgggtattcttccactctgacggagcctgagaattccaaaggaagtatgccccaggtacccagcaggcggaatataattgcctcttaggcagcagaaagaaaactaaagatcacattgatgcggaagaacatttaaggtctctctatcctgtgttgaattcacagtaaaggcgagagccgtgagtttgtactgtaaattccaggtctgtgacttctgactttggattaaaatccagttttctggaagtgaatctgatggcagatatgaccttgaattggctgcaagaccccagcgctggcctggctgccgtgcagcgcgcgctgctctgcacttwgttatcatcaggagtgtggtggcctcctggccagctggtctacgacagggccatgccgggtcaccagctgtgcctctgcaggggtctcca

SEQ ID NO: 811030 - DNA, 426 bp, Homo sapiens
ataaaaatgagtcggttgtggcattgtgtgtctgtaatcctagctactcgggaggctgaggcaggagaatcgcttgaacccgggaggcggaggttgcagttaactgagatygcaccactgcactccagcctgggtgacagaatgagattccatctcaggaaattaaaaaaaaaaaaaaaaccagttgattaattagcatgaaccagaaatcacctctacagtcctggacatacaggtcaccttgccaccttcctgatggctggttctagattcagtgtggacgagagatagtgacagaggtgacctgcttgggcctagacacacccacccaggcaccacatgaattcaactgaatgtaattccaagagctcctggagaggcaaggcaggcggccaccagcaccgccctgggcggacggaactgcca

SEQ ID NO: 811031 - DNA, 546 bp, Homo sapiens
gcatcatcgctgaggtcaaggcgcagtacgagatcgccaaccgcaggcgggctgaggctgagagcatgtaccagatcaagtatgagaagctgcaggcgctggctgggaggcactgggatgacgtgcagcatacaaagactgagacctccgagataaactggaacatcagtgggctccaggctgagactgagtgcctcaaaggccagagggcttccctggaggccgccatcacagatgccgagcagcctgaggagctggcagttaagggtgccaacgccaagctgtccgagctggaggccgccctccagccggccaagcaggacatggcgcggcagctgcgtgagtactaggagctgatgaacgtcaagctggccctggacatcgagatcgagatcgccacctacaggaagctgctagagggcgaggagagccggctggagtctgggatgcagaacaggagtatccatacgaagaccaccagcagctatgcaggtgcgctgagctcggcctaygggggcctcacgagccccggcctcagctacggtc

SEQ ID NO: 811032 - DNA, 561 bp, Homo sapiens
aaatacaaaaaattagctaggcttggtggcaggcgcccgtagttccagctattcgcgaggctgaggcaggagaatggtgtgaacccgggaggcggagcttgcaggcttgcagtgagctgagattgcgccactgcacttgagcctgggcgacagagcgagactccatctaaaaaaaaaaaaaaaaattagcctggcgtggtgggcacctgtaatcccagctactcagtaggctgaggcaaaagaattgcttgaatctgggaggcggaggttgcagtgagccgagatcacgccactgtactccagcctgggcgacagatgagactctgtctcaaaaacaaataaaataaaataaacgtggtggctttacttttttttttttttttttttttgagacagggtttcatcctgtcacccagaccagagtgcagtggtgcaaacgcagctcactgmagcctcaaccttctgggctcaagtgatcctctcacttcagcccctgccaaacgctgggatcacaagcatgcaccaccaggcctggctaatttttaaatttttcgtagagac

SEQ ID NO: 811033 - DNA, 524 bp, Homo sapiens
taccagagattctcttactgtcctcctcatgtggcttgggttgggaatggagaaggaagaagcacaaaagaagcgtggtgaagagagggaactcaccacacagctaaaggatttcttgagaattatgaatgggaagtacaagcacctattttcctcagttttaggatccaatgttctcagctttggggttttcccagcaatcaagaggtgacaggaaaaatcttatttaactttcggttatatgtatatactgaacatataggtgcagaaatatatactgaacagcaaaggtgcagaaatatgtttatctcagtcatagggttgatgtgagaatcaaatgagatagtcaaaaggctaatagctgcagcctacggtatctcttaaattagtgatagcgattctagttccacaatcycttatttgaaacctgtagggccaaccatattctaagattcagaagtttttggactttagaatagtaattctatatattatagcacctccagggagtctggagcaaagtc

SEQ ID NO: 811034 - DNA, 626 bp, Homo sapiens
agcggggagataaagaaggataggttaatgggtacaaaaatacaattagaaagagtaagatgtagcgtttggtagcacaatagggtgagtataactgacaataatttactctgcatttcaaaataactgaaagaatgttgctaccacaaagaaatgataaatgcttaaggtgatggataccacaatcaccctgatttgatcattacacatcgtatacttgtatcaaaatatcacatatacccaagaaatattgtatagataataaattatctatccataataattaaaaattttaaatttcaattaaaaaaaagaaactgcctggatgtggtgtctgatttgaaactcaaatagagataccttgatggaagaatggaaaccatactattcttctcataaatatgaaacaaccttaataaataataaaaataataatagtcacaaaagtttgtagttttatttttactaattcaaaactatgattaattttaaaagttatgcttaagtaaaaccatgattaccttttatataaaattatgattaattktttaataatgataatttttttagggtgctttcaaattgacaacaaaattgagcagacagtatagagagttcccacatac

SEQ ID NO: 811035 - DNA, 594 bp, Homo sapiens
ctactccctgagttgggtcyttgcccagcctatggtgaaactgaggaagacactgagaagacactgatgcaattctggaaggattacatcatctatagctatgttaagagccttgcttggaataggggtaatgtcaccaattagtgtttgaatggcatctgggaggagacactcaacattcatcagttgcttcaaaggatttgccaaagatgaggatattgcaaaatcagtgaggctgtggttggagatgggtgtggatgaggatgatattggggctttgctgcaggtggcttctgaggaattagctaatgaggagttgttggaactggaacagaaacccacagctgaagaagaggcaagagacaaggaaactgcaagagaagaaaaaagaagaacccccaagaagattcacagtgaagggtttagcagaagcttttgcaggcctcaccaagcttcttaacagcttcttaaaaagtttaaaaacatggatcccaactccaaagtgttttcattaatagagggttgctcatggtgcattatctgcttgcaagcaaatctgtaatgaaaaaatgaaacaaaccaagcaaatcatca

SEQ ID NO: 811036 - DNA, 635 bp, Homo sapiens
ttctcacatttatattttcaaaatgctatatacttggaaacatatatatatttttacagaagtgcatagcatatttatgattgtgttacacaggttttcctgctgtctttgtcttttccttattagatcggttatcccctcttttattttcccttatcctacctaaagaagtctcctttcctttccaagtaatccatgttaacagcctacaatgcagccatctatattttctccatatttattatatacttatatacaataatatgaatgcatatattgcaggaatgacattcaaaatatgtagcaaatacgtactggctgcagtatgcacagcaccaaccaaacacagtgaacgcttgctaaaatgtccaatatggttttatcagtgtacactggctgaatgccagccctgcacacacacgtacacatatacacaacagaaatttctatcattatgttgttttacaaaaatggagcaatattatgaacacttttaccctatatttttaatgattgttttccacacagtacctcattccttaaatttcaactccaatatggctctattcattccatttaattgctgtataaagccatattgaatgggctagatstatcagtgtttattcaacagt

SEQ ID NO: 811037 - DNA, 532 bp, Homo sapiens
aaaactgatatccaaaacaggctctaaagactwtgagtattaaaatcatcagatgcaaagtatacaatagttatatgtaatatatctaaataaataaaagcaacttgaaaatatgattggaaaagagactgtaaggcatcacaaagcaaatctgcaaaagaaataaaatttctaacaataaaaaatcagtaattgaaaataaaaactccaaggatagattaaataaatcagattttagatgaagctgaggagagaactagtgaatgggaaaataaattcgaaaagttatccgtaacatagatcagagggacaaagacacaaaaacaagacaggtaacaagacatagaggatagagaagagtgtttaatagatgaccagctagagtttcagaaggagacaatgtcaatgaggtaatgttgaagagacaatggctgagaattttccaaatttgatgaaagcagatttcatcagatttagaaagcccaagaaatatcaagtagtatagatagaaataaggccgggtgcggtggct

SEQ ID NO: 811038 - DNA, 532 bp, Homo sapiens
aaaactgatatccaaaacaggctctaaagactatgagtattaaaatcatcagatgcaaagtatacaatagttatatgtaatatatctaaataaataaaagcaacttgaaaatatgattggaaaagagactgtaaggcatcacaaagcaaatctgcaaaagaaataaaatttctaacaataaaaaatcagtaattgaaaataaaaactccaaggatagattaaataaatcagattttagatgaagctgaggagagaactagtgaatgggaaaataaattcgaaaagttatccgtaacatagatcagagggacaaagacacaaaaacaagacaggtaacaagacatagaggatagagaagagtgtttaatagatgaccagctagagtttcagaaggagacaatgtcaatgaggyaatgttgaagagacaatggctgagaattttccaaatttgatgaaagcagatttcatcagatttagaaagcccaagaaatatcaagtagtatagatagaaataaggccgggtgcggtggct

SEQ ID NO: 811039 - DNA, 385 bp, Homo sapiens
tcataacagccaaaaggtggaaattacccaaatagccatcaatggatggaaaatcaaaatgctgtgtattcatatcatggatttttattcagccataaagaaggaaagaagccagacacacaaaaaacttcttgggatgattctatccacacaaaatgtccagaataggcaaatccacggagacaaaagtgattgccaggggctggggatagggacggggtggggaccggggaatgacggcctaatggggttggrgtttcttctcctcgggtgctgaaagcgttctgcaattagtggcaaaggttgcacagctctgtgcactgaattattcactcttaaaacgtgaattttacaatggatctcaacgaagctgttattaagaaac

SEQ ID NO: 811040 - DNA, 644 bp, Homo sapiens
gctgccagcatttacacccatgtgcccagcaaactgggagtgaaggcagtaaagagtgcatcgggctgagacatggaaagcccagsgttggatttggagtgtttaggccagggtgagatgccaaaccatcaggcaaccatcttccatgttcaagttttgattttcattttaagtgcacaaaatccacaagcttttttttttttcatgcagcagcaacagcttcctaaaaacgtctctcagctgagccattgcccataacagcatgctatttggcctttgtaaaaggaaaaacctctgtatttgtatctagaacacccacagctgaatgtgtcagatgctgctggctagtttgattggttgccttgcatgggtggcttcccgcaggggctggctttcctaaagttgagtgggcagtcccgagttcttcagagatttctgcctaacctgaggaatgcctggtttaagcagagatgatgcttcgtgaaggaatggattcctttgcttttctgttgggagtgactgaggttcctagagtctttctcgtgagtgaaaaggaagtagaggtgtgctccagccaactcttcagatgaggcaagtggattgataatggaacattcctagactcctagagacctggctggcag

SEQ ID NO: 811041 - DNA, 490 bp, Homo sapiens
tcttctaacccatttctccagtaaacaaaccttcagactctcaagcagtctcccctcacattacccctgccatctgaagtacacagtgccttcagctcccaggcctcccaagggttatatcccaggcggatatactcactttgcatccaaacacctttctgtagacacatagatcactgtttcctccactctgcccagtcagcaatcactcctcacctgtcttccaaaaacatgtgcttgtttgctgatatctcccatttccattgtctttgcactctttttcacttctttaccatcattttaggggtgtcttggtcaagagaaaagataaaattgaggagtaaccattaatccaccattcattcagccaatcaacagatagtggaaccaagtgggttcaaggcactgctggggatggagaagtgaacaaatcagacaataattccytccttcttaaaacttccaatatagtgtttattggaagtaccat

SEQ ID NO: 811042 - DNA, 591 bp, Homo sapiens
ggtgagcgtagatatcactgattgccaataggctgtccgactgccttcaaagtagtgtctgcttcttgcagcttctctgtacatctggtgcttcacctggaattcctgcttgcaaaagggaggaatcaagccttatttagtctctcttaaggttttcatcatttgagctctcaccagttgttgcttcataatgtcaaagtctcgagccttggaaggtatccaggggcaaattcaaaggcacgcagcatctagcttgatcctgaatccacaaaaccagctgtcttcccatcttagaaacaagtcctgtgtaaatagagaattggagatgtcaccctgccttttccttaactgtaaccattttcaaaagtgaatattggatataaactaaagtttataaacacatgactttgcttgtcaaaagtgttctctctagaaggctgtttatctggaataaaacgctgctcccatgctgccagtttctttttcagtgttgacttcaraagcactttaccaactacactgggaagtcagttagtactttacttttgtaggaaccattctgttgtcccaaactttgtgtctccttacgtc

SEQ ID NO: 811043 - DNA, 513 bp, Homo sapiens
tgtgtctcaagactggtgtatttcttgtgcaaatcaaatatgctcctttggatttggttcttattcttcaaagtagaatttgtagtgagagtaaaaattcatcagacactatcacctgagaaataagttgttgagtgaaatgctcaattcaccaacaactgcctgtccagccaatccaggagcagccccaacagggtgaggtcatctcactctgagtcacttactctcagtaggcatgctttcaagctcttgagtaaaagtgtttatatagaataaaatagttacagaagaaagataatttttcttaagataataataagtacattaacccaggaagcaacattcaagtaacattaaaaacacttcctgcttaccttgagatagagaaagatctcaattcaataattaaagtttgtatttgaatattawacttgaggtagaaactttaattattgaattgagacctttctccattctaaggtaagcatttagtgttataaattttcctctcag

SEQ ID NO: 811044 - DNA, 590 bp, Homo sapiens
agaaatttctcccttctcaagaataactatttcttcaaaataatctactttttaaattctaggaataatatgaatccactgtctgttcaggctttcatctttaagctagtaatgaaagatgctctgagctaaatttgtgctccccctccctacaccaaggtcatttataggactcaatggcacatattctgtgtatttctttctgcatgtatttccccttgtatccttcccattttgatcttatgacctgtaatttttatatcaattttggaatgcgatgggataaaaattaacaaaatgtgaaagtttcactttcatagacatatttttaaaaatcctccccccattacatttctgggggaaggaaaagcccccaccccaaccctccaggtacttccagcagcattaaggccaagtgggtacaggcagagaagagctgctgagcttgttacagggaaaagagggagagcagggcatcccaaagaagagcctggtgcctcctgagcaacacgagagtaggagccgtgtggtattcagtcttgtgttcccatcsctaacagtttctggcacatagtaagtgctcaagaaaa

SEQ ID NO: 811045 - DNA, 618 bp, Homo sapiens
actgtaattgtgcattttgcrtattgccacccctgcccccactccccatcacttggccagcacctgtccctctctgagaagagaagatgcaagccttcattacattgtcactctcccctatcctgacaccattcaggcccttgctttgaactctgcgttaccatggcaactgctcttcacgaacatcaacatcactggccacaatggcctatgctgaggtggatggctgccaagcaaatcataggcaatttctttctttttttttttttttttaagtcaagaaggccgaaatcctcagatcaagttcgaattatttggaggatgtgtatgtcagggacacttagcatcagttttgatgggaaggcagataaaagcttgatttatgatgaggataggggaggcacaggtcagttcagcttcagagcttgcagagctctttcagaagctctttgatgtgaacaagaagttggaagttgcataattcttgctaattcttgttggcggtccagacacaaaggctgctcaaacgatctggagtggccaaataggccaagggtgcttgttttgtccttccttctccactattccccctcctcttcatctttcccagcaggccag

SEQ ID NO: 811046 - DNA, 386 bp, Homo sapiens
aacccatatgtgaggtcagctgtatctttctcttcccttttccctgtttcattcttggacagttcaggacattaataggatattycatttgattttctctctttccaggcaatgcgttatgtacctatcaaatgtttggtaatcaattcttgatctctcctggaggtcagtcaatgacaccatctaaattgtcatctcatttctttcttgaaagagaatccatctatttcctttgagcacatagagatttcagatgcaggtaaggtactaaaccattcatgaacaagatgacattttttctcatcaacactgtcagatttggcttctataggagagatggacttagttattaaaagggtctctttcatttaaagttccagttaata

SEQ ID NO: 811047 - DNA, 476 bp, Homo sapiens
gctgcagtgacgttaggtccgcttcctagccgcgtgctgctctgccatcggggatgctaaagtcggggagggccaggaagcctttctttgcttggaagtttttgtttctccttcgcctgctaggttgggataatccgttgggaagtctctgagcgtctttaaacataaaatctagtttcaaaggtttaaattcccaagttgccccctaagttacatgttgcttaggcttggttgctatctgtatggtataaataattccatttagaaattaagaaattatgggctgcatttttgatgccagtggctctgtagtatcccccaaccaccaaaaaaaaaaaaaaaagaaaaaaagcatctaaaaattgtgaggttaccgcttagctctgtctttctggctgcacatgggttaccaggtgccttgccaagaycctgcctccgtgtccaccatgctttgtgtctgcaagtagatttaccca

SEQ ID NO: 811048 - DNA, 615 bp, Homo sapiens
acctgatgtgtccggcagaagccgtcttcttactgcctgccttcttttggcgggtagcatcacctcccaccttactgctcatgttctgagctttttgtttttcttgagatggggtcttgctctrtcacctgggctcaagtgcaatggtgtgatctccgcacactgcaacctctgccttctgggttcaagcgattctcgtgcctcagcctcccaagtagctgggattacaggcgtgcgccaccacacctggctaatttttgtatttttagtagagatgagttttcaccatgttggccgggctggtctcgaactcctgacctcagatgatccgcccccctcagcctccaaaagtgctgggattacaggcgtgagcaccatgcctggcctgtgttctgagcattttgtcaccaactctggccatccaacctctaggatgtctcaattccagccacttgccttcacccaaactcctgccctacagtctgcagttcacggtggcatgagtctaagtgcttacagggcggccagactcttcctggctaatcgccaccgacccctctggattaacctgttgagacgccacttcctgacagagaggtcttcctggcctcccca

SEQ ID NO: 811049 - DNA, 615 bp, Homo sapiens
acctgatgtgtccggcagaagccgtcttcttactgcctgccttcttttggcgggtagcatcacctcccaccttactgctcatgttctgagctttttgtttttcttgagatggggtcttgctctatcacctgggctcaagtgcaatggtgtgatctccgcacactgcaacctctgccttctgggttcaagcgattctcgtgcctcagcctcccaagtagctgggattacaggcgtgcgccaccacacctggctaatttttgtatttttagtagagatgagttttcaccatgttggccgggctggtctcgaactcctgacctcagatgatccgcccccctcagcctccaaaagtgctgggattacaggcgtgagcaccatgcctggcctgtgttctgagcattttgtcaccaactctggccatccaacctctaggatgtctcaattccagccacttgccttcacccaaactcctgccctacagtctgcagttcacgktggcatgagtctaagtgcttacagggcggccagactcttcctggctaatcgccaccgacccctctggattaacctgttgagacgccacttcctgacagagaggtcttcctggcctcccca

SEQ ID NO: 811050 - DNA, 595 bp, Homo sapiens
ctttgagattcagtttcttcatttgtaaaaatgaccayctcccagggttatggcatgaattattttgtttaaccaatattgagcatcttgtatgtgtcaaacacttggcaaagatttgagtacacactgcagatgaaagagatgccagtgctgcctttttcggagggggcggcagaggggatgaagtctccctctgttcctctatcacccaggctggagtgcagtggcagcgtgatctcggctcactgcaacctccgcctcccaggttcaagcgattctcctgcctcagcctctcataattctgccttgttgtggagcttgcagtcaagtaaggaagctagacaaaaagaaataagcaaatatatgaataatcacaagttgggataagggttgcaaaagaaatgaaagatcttggccttgggaaattgagtggagggaagcaccataaggcggcgccagggatggtgtctcggaagagaatgtgtttgaaagatgaggaggcacctgccaacagaagagtagagagaatgacaggcttaggcatggcgtcttcaaagcctctgtgctggagaaaaggagtcaatgaaaattcacc

SEQ ID NO: 811051 - DNA, 636 bp, Homo sapiens
ttttgtttttcccttcatgggatccaagctccctgtcttcctcagagattgcatgtttcaaaatagtmtttggattacgaataattaataagaaatatgtctttttcagaaagacactgttcatcttcctaacatccaagaaaaacattcctattcttttaatagtaaattatttctaggaactctctcatcttcattttttctatagctggaaattggccagaaatttctgggtattacacttcaagccagtgcagttggccagtactgtagaaaatggcactggaatgtcctaatactgcatttgatggtacagtgttatcacttcatttacagagccaaatacgcccctgcttcctcctcccctccctttttttcccgttaaatcaggagccatttcccatattcaaggctttctgggataatatcaggaagtgactggatgtgacagagtgctggctattcattaacatagacttccaagtcctacattgaaagttaccagcctacactagcaaagaagagctaagagagagcaatgaatatcaaatggacacaccgttgcttaccccaaaggtcccaggccattcaccatacaatacagcacttcaaaatcagtgagaaccaccatataca

SEQ ID NO: 811052 - DNA, 605 bp, Homo sapiens
acaatatgaaaggtcagatcttcctagtagcactaacttacccaacattgattaggtataattcttgggctgctggctagtgttctaaatgtacactttattatgaggcatgaaacatgttgggaagycaggcgcgctgactcacacctgtaatcccagcactttgggaggtctaagtgggcagatcaccaggggtcaagagttcgagaccagcctagagcacatggtgaaaccctgtctctactaagaaatacaaaaattagctaggcttggtggtgtgctcctgtaatcccagctactctggaggctgaggcaggagaatcgcttgaacgcaggaggcggaggttgcagtgagctgatatcgcgccattgcactccagtctgggctacaagagcaagactctttctcaaaaaacgaaaacatgttgagaaagtaatgctgttatgcaaatcctatgtttcactttcttgagttatggatgattaaatttgtaatcttaaaattgcactgccatgtgagtctaaaatttaataaactggttccacaaacaaagggaaaaggatggtattccttttaaaacatgaatcaagcagaactgtcatca

SEQ ID NO: 811053 - DNA, 649 bp, Homo sapiens
tctgtcaggccctgaagaacagctttcaaacctccaacacaagactcagacttttctccttggagttgatctacagtctccttctgttattcactcctaggttgctgccaacctcagctrgccaatcatgtttgtgggtatcaagtgatgccaagttgttttattatatggacgaatgcccattgactttaggttaagatcttgcagtcattttccttcatgacttaaaatgttttcaaacctgagttttctgagataaatggttaaagttgaaacctattaaatgttcatactcaatcagtgaacagatttgaacccagagataaatatacaaaatgataaagcacaatatctttgtataccttaagccagaggtgggcaaactatagcccacaggccaaattcagcataccacctgtttttataaggcttgcaacctaagaatagcttttacattttataaagggtcacatttgaaaaggttatagaagtaccaacataatattcttgattttgctttctttacagaaaaagtttgctgaccccagccttaaattataaaaaaaacatactttttgttgttctctgaatttgtttgctttttgccccaagattctatttttaaaattgtaattagtggtattccaca

SEQ ID NO: 811054 - DNA, 574 bp, Homo sapiens
gatctactatgagtttaaataggaagactggtaacaataataacaagacctcattatttatttatttatattaagtatcagctatatttactgtgcaaaatgctagaaaaatatcacttaataaaataaagcaggtgccagacctcatgaaacctataaaggaaggtgtaatagtagaagtgattcaaacaaagaagttggttatctttaggggcacagaataaaacagatataatcaactacaaaataactttaaaaataattccagaacaatctttttattttacctaagaatacaaacatatcattcataaggccattcttgatgaataaaatctgatgtgccttcttttttttctttttcttttttgatgtgccttcttaaattgaaaaaattctgtgcagacagtccatgaaaagcacagatccaaaagaaaattaaacttacaaatgtgctatgagtgttctgtagaaaaataactgtttaaacataaaatcccataatyagcctggatctctcattcaagcactgcaggtcaaaaccaccaacttttccaagtcaatggggaaaagc

SEQ ID NO: 811055 - DNA, 581 bp, Homo sapiens
tggatccagaacttttcatttyttagtgtagagataagtttccatatagtatgatttctgttagaatgaagatttcctttaatatttattataatgaagatctgctgattaataattatttcaaccttcatttattgaaaaaagtctttaattttttattttgagaatatgttcactcaatgtagaattctaaggtgactgttcttttctttagcactttaagggagccattgtcttatcttgtggcttccattcttcctgatgacaagtaagttatcattcttatcattttccccctatatgtactttgtcttttttctttcagctgctcttaaagggttttctctttatcttttgtttcttgcagtttgtttgtggttttatttgcatttatcttatgtggaatttactgagcttcctgaatttgtgcattgatgtttttcttcaaatttggaaaatttggaagcactaatttttcaaatattttttctaacccactcattcctcttcttctgaaaattcaattacatatatgttagtatatttgatatcgttcctaatcactgatgctctcttttctc

SEQ ID NO: 811056 - DNA, 552 bp, Homo sapiens
caaattgatacttcacaattctgtaccttgtaaaattatcttgaaggagaaataaagactttcccagacaaacaataattgaggaaattctgtagaacatggtgcctatagttaacaatacagtattgygtacattaaaatttgttaggaaggtacatgtcatgttaagtattctaaccacacacaatgaaacacaagaaaaaaagaaacaaagaacaataagaaaattctgggaagggttggctatgtctattaccttacttttggtgatgtcatgggacatttgcatatgtccaaactcatttaattgtacgttaagtatttgcagtttcttttatgtcaaatatatcccaataaagctgttaaaaataaagtacttcagtgacaatgaaaataatacatgtcagaaactcagatatgcacaaagacaagtttcagagaatatataagtaaaggtaaaataaaaaatgtaaaaaatctaacatgagtttgttcaaaataatatcaacaatgtattctattatgcatgctcatatgtatatatatacatac

SEQ ID NO: 811057 - DNA, 552 bp, Homo sapiens
caaattgatacttcacaattctgtaccttgtaaaattatcttgaaggagaaataaagactttcccagacaaacaataattgaggaaattctgtagaacatggtgcctatagttaacaatacagtattgcgtacattaaaatttgttaggaaggtacatgtcatgttaagtattctaaccacacacaatgaaacacaagaaaaaaagaaacaaagaacaataagaaaattctgggaagggttggctatgtctattaccttacttttggtgatgtcatgggacatttgcatatgtccaaactcatttaattgtacgttaagtatttgcagtttcttttatgtcaaatatatcccaataaagctgttaaaaataaagtacttcagtgacaatgaaaataatacatgtcagaaactcagatatgcacaaagacaagtytcagagaatatataagtaaaggtaaaataaaaaatgtaaaaaatctaacatgagtttgttcaaaataatatcaacaatgtattctattatgcatgctcatatgtatatatatacatac

SEQ ID NO: 811058 - DNA, 619 bp, Homo sapiens
tgccgaacattaaggtttgttacataggtatacacgtgccatgatggtttgctgcatccatcaacccgtcatctacattaggtatttctcctaatgctatccctcccactccctgayaggccccggtgcgtgtgatgttcccctccctgtgtccatttgttctcattgttcaactcccacttatgagtgagaacatgcagtgtttggttttccgtgcttttgttagtttgctgagaatgatggtttccagcttcatccatgtccctgcaaaggacatgaactcctccatttttatggctgcatagtattccatggtgtatatgtgacacattctctatccagtctatcactgatgggcatttgggttggttccaagtctttgctattgtgaacagtgccacagtaaacatatgtgtgcatgtgtctttgctcattgcatgatttataatactttgggtatataccctgtaagattcataatagaaacttaaaacaacaatatacatacagatttacccagttttgtttgtagtcatgtgtgtgtgtccctggttttctttttctattgtgataaaataagcaaaacccagagttaaccattttaaccatttttaagtgt

SEQ ID NO: 811059 - DNA, 495 bp, Homo sapiens
gtagaaaaagcgtggcctgaggtcaaaaacacagattggattttagagcaagcacctggggtctctgtcctcatgctccctgtagttgaagatctacaaggtgtgttctcatggtcacaaatgctcttcctctgtgaagtgatccacttatattttatctcctcttttggacactgcacttctttaaaggagcatcaagtcttgtttatctttgtatctatagaacctagcccatgctagataaaatgttttctaagtgaatagcttttatctaatataatcaccaagacacaatcccatcctctacttcttattgtgtctcaagagcattagtgtgaatgtgtgtgtgtgcatgtagatgcgcacatagaaattgaaaacacagtttccgaaattagagaggtagttttctcttgctcttgrcaaatgatctcgggcaattttcttaatccaaataatattttcttttccaccttcaaaactgggttaatggtt

SEQ ID NO: 811060 - DNA, 626 bp, Homo sapiens
ggcctccagctgcatccatgttgctgcaaaggacatgttttccttcttttttatggcttcgtagtattctgtggtgtatatgtaccacatattccttataaaatccaccactgataagcacttgggttaattccatggttttgctgttgtgaatagttccacaatgaacataggagtgcatctgtcttcttggtagaacaacttattcacccttggctctatatccaataatgggattgctgggctgggtggtagttctgtttttagttctttcagaattctgtaaacagctttccacagtggctaaactaatttgcattttcaccaacagtgtatgagcatttaagcatttccttttctctgtaggcttaccagcatctattgtttttttgactttttgataatagccattctgactggtgtgagatgatgttccattgtggttttgattttcatttctctgatgattggtgattatgaacatttttttcctatgtttgttggctgcttgtatgtctttttttgagaagtgyttattcatgtcctttgcccattttttaacggggttgttctttgcttgttgatttgtttaagttctctatagatactgaatattagtcttttgt

SEQ ID NO: 811061 - DNA, 589 bp, Homo sapiens
gaattgggtgccatataatagtgttgacgtttaagattcagtaggagttggtgccctttgttttttggaggggatatgtgtatccgggagtcaagccccgcaacttaaccgagtaaaggctagttaacaatayttagaattattccttgatttctctcaggaaatcttgatttgttattagagtgaaagtcaggagaatttgggggtcccacataagactgtggcccaggaatttttcactctctgctagtctgcacccagcctacagaaatttgttaaaataactgtttaaatgtttctaccagtgtctggattccaagggtttctgttgcagttaggcaaatcttggaaactctgcctctctctcaggattttgggttggcagtttgcttcataacctcaattttgtaatggctccaagaaaagttactaattttcattttgtccatatttgtttattttttgtttaatgacaggagtgaaaatttccaagctctttgcgtgatgaagttgaaaatggaggtcaatttttaagtattttcaaatgtgtattgcattttttgtgtgatattggatttatttttccttc

SEQ ID NO: 811062 - DNA, 512 bp, Homo sapiens
agagttgctacaagaaggaaaagaattaatacatctaaaaacataaacgtgagaactatcatctgcctgaaytgtaactcattcacttatcatctttttgatatattaacattttaaggaaaatatgcatagacaagaaaataaaactgacgaaaagtataatgtatacagctgaaacagaatagtgagttttaagcaaacattaaattcagttatcttaggggcatacaatggcttgtagctatatgggaaggtgcatctcccaagatgagacgggctccttgaaagagattaaatcattctggatctatagcacagtttactccccatcagaaccaagtagaaatactttctgattgaaggcacacataatttatatcttcagaattcccacagattatgtttaacaaaatatgaactatcaataaaaattatgaacacgtgatgtaacaaggcaccctaagagtgtgagcaaaacaacaaagatgacattgggatccacaaacagaaaa

SEQ ID NO: 811063 - DNA, 659 bp, Homo sapiens
tcatgagaacacactcactattacaagaacaccaaggggaaaatccacccacatgactcaatcacctcctaccatgttcctccctcaaattgggaattacaattcaacatgaaatttgtgtagggacacagagccaaaccatatcaggttgccataacaaaatactacagactggatagcttaaacaacagaaatgtatttcctcacaatcctggaggttagatgagttgtgagcagatttggtttcctttggaggcttctgtccatgccttgctttcctctcactatgtcctcacatggctgtcacttggtaaaattgtgtgttgtctgggtgctaatctcatctttttattaggacatagatcatgtttgattagggcccacctaaatgacctgattatactttatttttctctttaaaagcctatttccatatacagtgtcactctaaaatactgggggatagaactaaatatatgagtattgtaaagacacagctcggcccagatcaccatggatattctagttgctctcatccttatcaacagttactattgtaytgatttgtatttagttccattatttccagaaaacacactggatatactgcgttttaaaaatatatatattttttgccatttgatatgatttggttgtgt

SEQ ID NO: 811064 - DNA, 613 bp, Homo sapiens
gctcttacgtgcaggcagtcactacatggaaacttgtggtagggtttctcactgcaggggaaggctcactatagcagcactttctctctctatttcacagatgccatcaggagggatctttggcttggggaaacactgttttctcttcctgcctttgggtgactgtacaaacttaaaaaaaaaaaaaagaaaaaaaaaaaaagaaaccctccagcttcagcacagctccacacagggtgtctagccaaaatgcaaagttttaccacagtgcacaggcagacagtgtttttcaagtgcgggaacagagtgaggtgcctttcagcacctttttcggcacttctttaaaaaatgatttaaattggaggcaatagcaccaaatgctgaacatctgacacgcagacaagacttaatgaatcatacactttaacaacatcactcttctctagccacttgacttggcgtccatggttgttggttttttctcccccacaaaaacatttgttctgcagacyatttgctagttagagtgtcctgggcaactcttcatattcatggcagggagaactggcccaggaaaacctgcagacctgagttcctcttagagtcttctctt

SEQ ID NO: 811065 - DNA, 613 bp, Homo sapiens
gctcttacgtgcaggcagtcactacatggaaacttgtggtagggtttctcactgcaggggaaggctcactatagcagcactttctctctctatttcacagatgccatcaggagggatctttggcttggggaaacactgttttctcttcctgcctttgggtgactgtacaaacttaaaaaaaaaaaaaagaaaaaaaaaaaaagaaaccctccagcttcagcacagctccacacagggtgtctagccaaaatgcaaagttttaccacagtgcacaggcagacagtgtttttcaagtgcgggaacagagtgaggtgcctttcagcacctttttcggcacttctttaaaaaatgatttaaattggaggcaatagcaccaaatgctgaacatctgacacgcagacaagacttaatgaatcatacactttaacaacatcactcttctctagccacttgacttggcgtccatggttgttggttttttctcccccacaaaaacatttgttctgcagactatttgctwgttagagtgtcctgggcaactcttcatattcatggcagggagaactggcccaggaaaacctgcagacctgagttcctcttagagtcttctctt

SEQ ID NO: 811066 - DNA, 637 bp, Homo sapiens
gttgtttgattgtatgtcaaacaattgtatgtccagaagaagtaaaataataataattagaagactacatgaaacaaagggcttccaattaaactggaagtccactgagggcaggcagctcttccctctttatcgtgttctccaactgcctttgcacattgctatgcataactcaagatccaataaatacttgactgatgacacgttgtctgcaaaacaagaagaggacatctcccatgtctgaaagctggcacaattttgatacaaaaatatgttttaaaataattttaagctcttgaaagctaaattataaagaagtagagagtgtttttcttttctttcaaaatatttctggtcttgtattgagagtctgttgcatttgaggtaatctcttaaagaccactaaaatctactcaaccacagaacatttaggcatgctgaaccttggaattagtgatccgctgaaggaaatgtagaattaaattctcatattgaagctgacacttcggcttcatttctgggactgtacagggaaaagtctctctgtgtgggataagaaaaataatttgtgattccacrtcagcagaggaaacccccgggttgattttaattggatttttcttccataatgttgctg

SEQ ID NO: 811067 - DNA, 570 bp, Homo sapiens
ccagtgtgttaggcaagcagcagacctctccctcctggtccttatttggagcagaactgaaaaagccattgtcatcctttgtaatttttcaaatctcagctattctgggccttcgccttccccatgctctgacagttcacgccactcttttgtctggtcccctttggcagataattggactccattaatgtttcatgtttcctttagctgtcaggatgcttgcagctcaatagagggctttatcccagcaactctttctgttcccctggtgtgtttgcttttcatcccgttgctccgcagtttccctgtgtctttcattcattcgttcattcgttcattcatttgtgaaacaagtatcggttgctcgtgtaggcgataggaggcctggggcccaggcccaggggatgcagtggtgagcagtgagtcatttctgatttaatgatccacaacatatggaccgtttccrtccaaggaagtgcaaatcctttttcgaagtagcagagtacaacttagaaagaaataattctttcatttcattaagatcagtgatgaaagaatacttttaaattt

SEQ ID NO: 811068 - DNA, 581 bp, Homo sapiens
aagctgtggatccatctggtcctgggcttttttttttttttattggaagatttttataattactgattccattttattacccctrcttgtctatttaggatttctgtttcttcctgattcaatctcaggaagttgggtgtttccaggaatttatccatttcctctaggttttttagtttgtgtggatagagatgttcataataatctgtgatgatcttttgtatttctgtggtatcagttgtaatgtcacctttttcatttctgattgtgctcatgtgaatcttcttttgttcttaggtaaacttgctagctatcaattttatttatcctttcaaagaaccaacttttgatttcattgatcctttgtgggtttttttgttttgttttgttttttggggtctcaataacacttagttctgctctgatctttatttcatttcttctgctagctttgggttttgttcttgtttttttagttccttgaggtgtgacattgggttgttaatttgagaactttctgtctttttgatatagacatttaacactataaaacttatttcttagcactgcttttgctgtat

SEQ ID NO: 811069 - DNA, 581 bp, Homo sapiens
aagctgtggatccatctggtcctgggcttttttttttttttattggaagatttttataattactgattccattttattacccctacttgtctatttaggatttctktttcttcctgattcaatctcaggaagttgggtgtttccaggaatttatccatttcctctaggttttttagtttgtgtggatagagatgttcataataatctgtgatgatcttttgtatttctgtggtatcagttgtaatgtcacctttttcatttctgattgtgctcatgtgaatcttcttttgttcttaggtaaacttgctagctatcaattttatttatcctttcaaagaaccaacttttgatttcattgatcctttgtgggtttttttgttttgttttgttttttggggtctcaataacacttagttctgctctgatctttatttcatttcttctgctagctttgggttttgttcttgtttttttagttccttgaggtgtgacattgggttgttaatttgagaactttctgtctttttgatatagacatttaacactataaaacttatttcttagcactgcttttgctgtat

SEQ ID NO: 811070 - DNA, 582 bp, Homo sapiens
tatgtctctttaactttttattttgaaataattttagacttacagaacaattgcaaagatagtacaaaagttccattcatggcaacgtctcacataaccacagtrcaattatcaaaactaagaaattaacattagtatgatattatacctaaaccacagaccttattcagattccactaatgttctttttctgttccaggatttgaccatgtcctcttggtttcctctatctgtgacagtcaagtattttgttcagtgtccctcaacttggatttgtcagatgttttctcattattgcattgaggttgtggatttgggggaagaataccaaatgcccttctggttacatcatttcatgaggcacatgataggaataggacaccatcgctggtaatggtaaccttcatcacttggtgtctgatgggtttcttcactaaaaagttataaattttttccctttgcatttggtttgaaagtttgagggagatactttgagaccaaacaactatcctttctttccttaaacttttgctttcctcaatcctgtaatgccagcacttcgggaggccaaggtggaaagat

SEQ ID NO: 811071 - DNA, 615 bp, Homo sapiens
cctgctatccttgctaatttactccagcactctgtcaagttttggtaagaacattctcacttctgtgtcatcargtcttacttgctgtgttttgagcctgtttcctcccctttattcttcaaagccatcagagtacaaagtgggtgttcttagtaatcttttacatgcttgaagatacatgttagagtatctgaaccttccatattttatttcttccactgatagttttattttgattttggctgattacagcttttcctgattagcttttaaaaatggagaacaaaagactccttgcttttataagggtatgattagtactcaatacaggaaggagttctgaaatgctaactattgatgaagtcattcaccttagtggtttaatatctgtttctatcttgtttttaaatagggtgactttctacaaccatctccctgttgtgtgaatgtgtttaggatttttgtacgttgcatgttctctcttgattgatgattgttctaagtttgttcttttctaaacatcccattgattggctggattatagtttattttattagtcctttattgttgcttatttaaggcattctttttaaaaaatagactattttttagag

SEQ ID NO: 811072 - DNA, 458 bp, Homo sapiens
ttataagaacatatcttcatgcctcaaggatagaaaaattattcatttttggtttgtttgtttttaatmtcacaaattagtactttatgcaaagcttacacatatatacaactgtgtaactattacaaagatcaaactatatatagatatttgccaccccaggaagttcctttgtgctttttctcaggaagaaaagaattccagccatcattcaggcaactattagactaattttgactattcttgaacattatagaaatgtaattaggcaatatctcctcttttgagtctgacttcttttgcttaacaaatgtttttgagattcatctacgttgttgtgtgtgtctgagttctttttattgttgtgcaatattccattgcatgaatgtagcacaattgtttatcctttctccaactgacactggagttcttttcctgcttagggaccattatgaaaa

SEQ ID NO: 811073 - DNA, 495 bp, Homo sapiens
ttgatttattcttttatgacccatagctcctggaaactgatgtgattagatttcctggaaaccagaggaaagatttttgggtttatttakttatttatttattcaggcaagagtacttcataagttatgctctatactccctgctgcaaatgctctgaaggcacaacatagctgactaacccacttctactaaaataggtgtgatcattgggctctgttgatgtcagcctgatccttgtattgtgaagctctccatcaatctttcatcttatgatttcagcacccattcatggttcctgcctaaatccatggcttcattagggactgcaaaatgaagatttttgtttgtaattctactatctatatttatttactgggtaaaagtaataaaaagttatgatcaaaatgccatgttgaatcatagctactatatttattttatattttgagaactgagtaaaatttcattggaaaaaagactttttatttaaaaca

SEQ ID NO: 811074 - DNA, 620 bp, Homo sapiens
ttaccttcagtaattacttcttgtttaattaaaattaaagttttttttagagagagggtctygctttgtcacccaggctgtagtgcaatgctgtgatcatagctcactgcagcctcaaactcctgggttcaagcaatcctccctcctcagcctctcaagtagctaagacagcaggtgtgcaccaccacacttgactaattaaaaaaattttcttttgtggaactagggtcttggtgtgttgcccaggttgctctcaaactcctggcctcaaatgatcctctcatcgtgacctcacaaagtgctgggattacagtcatgagccactgttcccagacctggtaattacttttaaatgtaacttgacagaatggctgaatagattttgagaaacaagatctaactatatgctgtctacaagaaactcattttagctttaaggaggcacacaggtggaaagagaaagaatagaaaaagatattttgtgcaaatagtaaccaaaagggagcaggagtggttatatttatatatatttatatctgacaaaatagacttaaagtcaaaactgtcccaaaagacaaagaaggtcgctatataatgataaaaaggtcaattcatcaaga

SEQ ID NO: 811075 - DNA, 645 bp, Homo sapiens
gagggggttcttggagaggttaagtaacttgcccaaggtcatacagctggtacatggtagagcagggatctattccaagtctaacacagtatccattctcttaatccctatactataatgtcacttgaatatggtaacaaaagtagttagaattgccagtgtaatcaactagaaacaaaattcaagcctacttgatagtttagctcataaaatctgtctggtatcaccaaaggtgataggtgatttgggctggggagaatctataaattattttcaacaattcaaatagcctaatgcatgggttcttaatctgtttctgtgctacagtctcctatgactgtctggtgcagcctgtggactaccttctcacaataatgtttctaaatgcatgctggctgggcatggcggctcatgccgataatcctaggactttgggaggccaaggcaagaggatcacttgagctcaggagtttgaaaccaggctgaacagcatggcaagaccccatctctacaagaaaatacaaaaattagtcaggtgtggtatcatgtgcctatggtcccagatacctggkatgctgaggtgggaggatttgttgagcctgggagttcaaggctaaagtgagccatgatggtgctacagcactt

SEQ ID NO: 811076 - DNA, 645 bp, Homo sapiens
gagggggttcttggagaggttaagtaacttgcccaaggtcatacagctggtacatggtagagcagggatctattccaagtctaacacagtatccattctcttaatccctatactataatgtcacttgaatatggtaacaaaagtagttagaattgccagtgtaatcaactagaaacaaaattcaagcctacttgatagtttagctcataaaatctgtctggtatcaccaaaggtgataggtgatttgggctggggagaatctataaattattttcaacaattcaaatagcctaatgcatgggttcttaatctgtttctgtgctacagtctcctatgactgtctggtgcagcctgtggactaccttctcacaataatgtttctaaatgcatgctggctgggcatggcggctcatgccgataatcctaggactttgggaggccaaggcaagaggatcacttgagctcaggagtttgaaaccaggctgaacagcatggcaagaccccatctctacaagaaaatacaaaaattagtcaggtgtggtatcatgtgcctatggtcccagatacctgggatgctgaggtrggaggatttgttgagcctgggagttcaaggctaaagtgagccatgatggtgctacagcactt

SEQ ID NO: 811077 - DNA, 381 bp, Homo sapiens
catatgcatccacacatatacatagataatatacagtgaattaaaatcaaatcctaggctttgctaggattgcaaatgaaacactccactgaaatcatcaaaacagtaaaaaaaaattgtgagatagcacatacatacttgtatattagcacattcagtaggagaaaccagagggtctgaaaactactataattttaattttagtgataaggataaaaggttttcaacatatctataacagtgtatgtggtatttggtatgagamtgtctttgctttctattggtgacaaaagtcaaaggtactgctgtgccactgtgatttgttgcctacatttataatggaaggaaatgtgaaatttcacaattcataatgaaaggaaa

SEQ ID NO: 811078 - DNA, 381 bp, Homo sapiens
catatgcatccacacatatacatagataatatacagtgaattaaaatcaaatcctaggctttgctaggattgcaaatgaaacactccactgaaatcatcaaaacagtaaaaaaaaattgtgagatagcacatacatacttgtatattagcacattcagtaggagaaaccagagggtctgaaaactactataattttaattttagtgataaggataaaaggttttcaacatatctataacagtgtatgtggtatttggtatgagaatgtctytgctttctattggtgacaaaagtcaaaggtactgctgtgccactgtgatttgttgcctacatttataatggaaggaaatgtgaaatttcacaattcataatgaaaggaaa

SEQ ID NO: 811079 - DNA, 620 bp, Homo sapiens
gaaccctgttttgtcatattaccagaattacttttctggttccctctcatttgggtatactatttcagtggaaaaatctggaactcaagggctgctgttcagattcttttgtctcatggaatgatcccttgacrtagtgctctccccttccccttgggatgaggtttcctgagagctaaactgcagtgattgttattgctcttctgggtctagccactcggcggggctaccaggctctgagctgctgctgtggaatgtctgcaaagactcctgtgatgtcatccatctttggctctcccagctgtggatatcagcacctactctggtggaggtggcggggagtgaaagtgactctgtgagaatctttggctgtaggtatgtttagtgtactggctttcttgaatgctggttattctagtagtaaagttgtcacgtggatggactcaggacctctggttagccaggatgtttcaggcagtggtattagctgttgtgttctccttcttgggagcagggttattttgtcatgagttgctgtaatggcctgagttgattggcctccaaccaagaggtgatgctttcaagagagcaccagctgcggtagttgtaggggaatataa

SEQ ID NO: 811080 - DNA, 647 bp, Homo sapiens
ttgtacagccaacaagctatgactgyttgttacgtgtttaaatggttgagaggaaacaaaatgaatattatctgtgacccatgaaaattatgtgacatttaaatttaatatccataaataaaattttactgggatccagccacacccacttgtttacatattggccattgttacttttgcaatatagcagcagattaattttgacagagactatatggcccccaaagcctaaatatttactatctggcctatgacagaaaaggtttgctggcctgtactataaaacccaaaaccaattatgtgccctgcacaaaagacagactcaatgattcctggaggtcccaggtcccactttgattaggaaaggtgcataaataatgctgcactgtttctacatttgctaccctcagatatcaccagattggtgggaggtcacttacacacaagttatttgtttttctaatcttaccacagttataactttcttgccccaataaaactcatcatgtggtttcaaagctgggctttcctctcaatttccttccccagcattagcctgaatcgatgatacaaaaccagagagagaagacagaagggtctgatttatcctccaactggatcctcagccatgagtaattgaaagaaaa

SEQ ID NO: 811081 - DNA, 616 bp, Homo sapiens
tgttaggattgcccagagggctccaggatcatcagccttatccaatagaatgtttcctgttggcctttcacctaatggtttcacagctattaaatatggtcccctagatgtatcattttattagatattaatacattcagaatgtggcaaactctacagtgcaaataacttagttttttaaacaaataaattgcaaggaaaaaagccagcgggaaagagaagctacagattaaaatatatttaagagccacaacaaccaaatccagtgtataggtttgtcctgcttattagtaaatggacatttgctaattaactgcagaaattttaaaactgactggaaatccaatcctattttttaggtgtgatgacgcatggtaattacacattttttaaagtccttatcaagatacatactgaaggatttataaataaaatgacatgatgtctggtatttgcttcaaaacaatccagtggatgggggtggtgggccatggaagaacaggggagagggcttggggagagaggaaatcagatcagccttgagctgccgtgaaggctggatgacgggcacctgtgggttctcggtgcyctgctctctactgtggatgacttcttg

SEQ ID NO: 811082 - DNA, 580 bp, Homo sapiens
aagacttgttccttctccccatgtatttatttaaacatgtatttatatcagtatggwtttatagatatttgtttcatttgggggttataatctaatactgtcattgttgattttgcttctcagattttctaggtttggccattagaaactctttcaggttggatcgtgtgtcctttggatatgtcccatcctttccttttttttcttaaccacttctttaaattctggcaccatgagatgctccaggctcatcttatgttttcactgccccagccctagaattagccattttcccaagaacatcaggttccttttattagagaataatgtttagaaaccaaaatctggagctaagtgtattcattgctcaaggatgtcactgatcctagctctcagtgaacaacattaggttatgtgtgtatgtatactaacccatgtatatttacttctgtatctgcttagctgtatatgtattaaaataaacatgacttcatacgacatctctgactgcaatccagcaccacagagtttattctggcattactcccttatttatctgtaacttcttttcaaatagaca

SEQ ID NO: 811083 - DNA, 541 bp, Homo sapiens
taaagttcttataagatttaagtatctagggaaccaactatttggtgagctcctcgagggctggactgtgtctcattcacctgtgtatccatgcccggagtaatgcccatccytagacagtgcctcatgttcacccctgtgcatgtgaacaggacacatgagctctgtccatagctctccaacccccttccaccgcttgtctctaaccaaccccctttgcctccttcctgctacccctccttttccataccaccactttcccacaccatctccttcttcccctgaatcaagaagtgagaacatcaggaaagagagggatcaatttcatgccagagtctcaggctgtctccacggattttcccatgccagaccatttggctagtgattgctgaactagatgagaattctcagccctacccaggagtcctccagctcccactgcctcatgggcccatcacagctttctggatcaataaacctctccttcagtcaataggagctttgtgaactaaacaacagatgccacagggcctagaaggca

SEQ ID NO: 811084 - DNA, 593 bp, Homo sapiens
acttacaggcatgctcattcaatgagaattccctcacaccaaccttctactatagaactgaacactggctcaatacagtgaaatctgtgatccagattaagaggaaaggaagagaaaggaagccccccatcgtccttcctttctagctctctataaactgtggccatttctcccactcacacagctctccttctttgcttcctagcagctataaatttgactcggtagacttatttctagaatccctgaacccttgtagtcatgacccaagtatgtggttccaagaaactaaaaaaaaacccatgcctgaaagagaaatcctaccatctctttcttctctgcccctgtggtatccacctccccagctggccctactgcctagtcagacagagtttctcctttattcaggggttctcactgctgcagcttcctcagcctcagcaactgccattaacgttagtgcttctctattgaaagagagtctggcatcaaacattaaagaggctgagcagcaytctgcaaaataactggacagtacccttcaaaagtgtcaatggcataaaagacaaagatcaaggaactggcatatactg

SEQ ID NO: 811085 - DNA, 630 bp, Homo sapiens
cctgccgttccccagggccgtcaccgccgatagcggtagcgcttgaagtgaaaccacagctggaagatgccrttggcaaactggcagcggaagccgtggcggtgcgagtattcccactcgcggttgacgatcttgaaagcgatgtcctcgtagggcggccccgcgtggaagcgcaggatggcgaaatccttgttgtcggcgcaggcctccaggaagtactcgggcgtggagcgcttgtcgatgaggtcggggtagaagatgttgaacttgtatccctgcacgatcttgggcggtgggttgtcaaagtcgtagtgcgtctggttgtacttgttccactcgaagcccgtgtgcacgcggttgaagaagcgcggcttgcgtggccggtacttgtcggcccacaggtaggccttgccggtgagtggcatctccacgctgaactgcgcctcgtcctggcccatgccctccttggcccgccggaagaagatgtcctcggcgctctcgctggcgtctcctgcgggcgggacggcgttcacccgggcctcggcctccccctgggtcctggcctccctcctagcctctctggcaggggcggccgctggtgcctcccgcaaaaggaaaacaggctggggc

SEQ ID NO: 811086 - DNA, 681 bp, Homo sapiens
ataatcctttccgtatatacccactaataggatcgctgcgtcaaatggtatttctagttctagatccttgaggaatcgccacactgtcttccacaatggttgaactagtttccactcccaccaacagtgtaaaagtgttcctatttctccacatcgtctccagcatctgttgtttcctgactttttaatgattgccattctaactggtgtgagatggtatctcattgtggttttgatttgcattcctctgatgaccagtgatgatgagcattttttcatgtgtctgttggctgcataaatgtcttttctgagaagtgtctgttcatatccattgcccactttttgatggggttgtttgattttttcttgtaaatttgtttaagttatttgtagattctggatattagccctgtgtcacaagggtagattgcaaaaattttctcccattctgtaggttgcctgttcactctgatggtagtttcttttgttattcagaagctctttagtttaattagatccatttgtcaattatggcttttgttgccattgcttttagtgttttagtcatgaagtccttgcccatgcctatatcctaaaaggtattgcctaggtyttcctctatggttttagatctaacatttaagtctttaatccatcttgaattaagttttgtgtaaggtg

SEQ ID NO: 811087 - DNA, 599 bp, Homo sapiens
aaagagaaactgggccatcagtagggaatggcagtcagagttcatggaacagatatatatgcattcaatgaacataatccagtgttaatcctgtttgaaccyctgtacaagatgcagggattcaagttcatgaaatacagtcactagccatggggattttccaagctagacgggaggctgagcaaacatagaccatgtgacacagagtggtacagccttgctggaggaaacagaggaaacactagaaataatgtgagcactctctcaaatagttaatctttaacaggattgtgagtcttgggttcagttatataactagcagttttctcaggggatgttgtaggtataggagagagtagagagaaggctgaaagtttgtttggtggcatactgtctttctgaggcacttttcctcttgtaggtaataataaatggccaacaccatacatctttgcccatccacttccaccatgttctatgaagattttgcaagtgtgggaagatgtctccctgacctcaatgtctgtctgcaatttatggagatgaccacacccctcattgttgaggaatccctctttccatgtgaccataggatcccc

SEQ ID NO: 811088 - DNA, 486 bp, Homo sapiens
aatgcttccagtttttgcccattcagtatgatattggctgtgggtttgtcataaataacttattattttgagagatgttccawcaatacctagtttattgagagtttttagcataaagggatgttgaattttgtcgaaggtcttttctgcgtctgttgagataattgtgtggtttttgtcattgattctgtttatgtgatggattacgtttattcatgtgcgtatgttgaaccagccttgcatcccatgtatgaagctgacttgatggtggtgtataagctttttgatatgctgctggatttggtttgccagtattttattgaggattttcacatcgatattcatcagggatattggcctgaaattttctttttttgttgtgtctctgccaggttttggtatcaggaagatgctggcctcataaaacgagttagggaggattctctctttttctattgtttgcaatagtttcagagggaatggtgc

SEQ ID NO: 811089 - DNA, 611 bp, Homo sapiens
aaagaattttcttaccctggttcctggcaattgaagtgcagagatcctttctaccaaagtgattccataatgacagcaaccatctattagaatggtctcagagcaaaactatgttcttaaatgctttccgagtttcctcttctttccgttaaaatttctttttgtcattaaaaggcattaagtaagagcttgggcagaacttgctgaactgcagaattggttgcttttgtatcaattcttactgtacccagacattatccgtatttcattctttttttagtcactgtctgcttccagacctgttcattctcctcatctacccagtctccatcaaagcctgccacctctgggaagacttttctgagtccctcaagcagatgtgggcactttttgtaggaatgaattatacttgaggctagaatccatgatttctcccctttgcgtgctcagtacccagcagaaggcctgatgcaagggggacatwgaatatatatttggcaaaaaaaatgctgaaaggatgcttcaaaaaaccaagtaaaacattaatagattaaatgaaaagtaaattatgagaatatatattttttagtaatggttatcaaagagtctac

SEQ ID NO: 811090 - DNA, 512 bp, Homo sapiens
aatatatcatcccattctatactggcctgtaaggtttctgctaagaaatatactgatagtttaatgtaggttctcttatatgtgacttggtgttttcctcttgctgcttttaaaattctccctttgtctttaacttttgacaatttgattttgtgtcttggagaggacctctttgggctatatctatctgggaacctttgagcatcatgaatttggatgttcatatcgctctgaaaacctaagaagttttcagtaattattttattaaataagttttgtgtccctttctctgtctcttctcctgtaactcccataatgcaaatacttgtttgcttaatggtatctcataagtcccatagactgtcttcactgtttttcattcttttttcttctctgactcagtgatttcaaaagacctatcttcaggttcacagattatttcttctgcttgatcaaatstgctgttgaagctctctattgcagggatccccaacccctgggccacagaccag

SEQ ID NO: 811091 - DNA, 552 bp, Homo sapiens
catacattttcatttatttggggtcagttagcagagaattattgttttcccttggtagtatcacktttccttgctttttcttatttcttgtgtccctgcataggtgtctccacatctggtggtataatcggctctctcaaactttatagagtggctttcagaggggaagattttcatctgcagatgggcctggggcttttggttgagcaggctctggtggctttcatttcatgtgggtgaagggatgtagactccttgcaacttcttcagttgtgatcaatatcagtgatgaatgcaagtgcctcaatggtctgggctacagaagtttgtggccatgatggtggccacataggtattaggtcaaaggcgttagtgatcctcctgtttttgtcttccccacggttaggagtcataaatgaggtgatttctcttggtgttgggtcttacagggtacactggcagctgcagcaggactgggatctaatgcacaggtgcacagagcagctgtggagccagggtctgggtttaggatcttgtgaaaatactgtggca

SEQ ID NO: 811092 - DNA, 599 bp, Homo sapiens
aggttgttataccttgtgatcttgacatagtgacttcaacatattacatagttggggaaaagcatttttgttattgataatggtatagattgcacaagtaagtgataagcctacaatcctctaatatttaaagatttaaaaatcatcaataaccatttaagtcatggcagcttatatataagcccacatttgttgcttattctcaatgtacctcaatatccttttcagaataataaaattctgaccctttaaactcaaaataaagtctggccattttttctaggaactgtaaggctttaatacttccctctatgatagtgaacaagtaagattgaaaaacacaattcaatgagatgagtcattaactattgtactcagaacttgggctgctataacatcacttacaaaaacatcatgttgtggctttgatacacaatgcagaaaaagaggcgaggcatggtggcccattcctataatcccaacgctttgggaggaagagrcagccaaatcgcttgagctcaggagttcaagaccagcctgagaaacatggcaaaaccccatctttactacaaatttaaaaattagctgggtgtggtgga

SEQ ID NO: 811093 - DNA, 595 bp, Homo sapiens
cccacctcagcttcccaaagtgccrgaattacaggcatgagccgctgcatctggccactgtgtgtgtgtgtgtgtgtgtgtgtgtgtgtgtgtgtgtaaatatatatatttttaaaacctttttattttgaaataattcagatttacaaaaaaagtgcaaaagttgaagggtatgagaatttcctttacccagattctacaaatgctaacattttaccatatttgccttattgtgtttccctcatttttttttcctgaactttctgagagtaagttgcagacataatgcctatttaccccaaatgaacatttttagaattatgacagcccatttgggtctagatctcctggagaaataccttagagtatatttttttaagatacttcagtgtgtatttcctaaatatacaaggacattctctaatgtaactgcaatataatgaccaaaaccagggtattaatattgatgcaatgctatcatttaatctttccatttgtcctaataatgtattttatggcaaaaggaaaaaaaattccctgtggaccagtatcctattggggatcacacattgcatgtagtcatcatgtctcttta

SEQ ID NO: 811094 - DNA, 628 bp, Homo sapiens
cagagtccattgcacaccattccccaccaccccctacccccaaaccccggccacctccactggaacaggcactggtgtccacagctgagtgacccatagatcgttcatatcacaggactctgcagacaacccctggtaccagcccatagccaggtagacttgctgggtagctagacccagaagagagacaataatcactgcagttctgctctctggaagccacatccataggaaaagggggagagtactacatcaagggaacacccctgtgggacaaaagaatctgaacaacagccttcagctctaaaccttccctctgacagagcctactcaaatgagaaggaaccagaaaaccaaccctggtaatataaaaaaacaaggtcttggaattaacccaatccaacaaagacaaagaagaaataatacaaaaatatgaacaaagcctccaagaagtctgagattatgttaaacaaccaaacctaagaataattggtgttccygaagaagaagagaattctaaaagcttggaaaacgtgtttgggggaataatcaaggaaaactttcctggccttgctagagacctagacatccaaatacaagaaggaaaaaaagaacatcctggaaattc

SEQ ID NO: 811095 - DNA, 368 bp, Homo sapiens
gaatgcctggcaataccaagtgcgtgaggatgcagaggaactgggactcggctgcattgctggtggggttgcaaaatcatacagcaacttaaaaaaaaaacagtttgactgtttcttataaaagtaattatatacttaccacgtgaattggcaaacctgttcctaagtatttattcaagagaaatgaaaatgtatcatcatactaaaacctggacaatgaatagtgttagtggcttgactaaaatcaccatgaactggaaacaactcaaatgtccttcagcctgggaatggatwcatgaactgtagtgcatccatacaatggaatattattcagtaatgaaaaacatgaactattgatgaatgcaatg

SEQ ID NO: 811096 - DNA, 577 bp, Homo sapiens
ttttacttcttctttctttggaggcagaaattgagcataagacaatatgaggggtggtctcctcccttactcaaatatgccttaatatcacccacctttaaaagaaatttcataaactccaacatctaccttcagttactattccatttctccatttcatttgctagaaacggccatccaaagagttgtctatagtctgattcctacttcctcagcttctgtcctgtgctcagatttgccaaatggactttcattaccatcacactataaacatttctcataataatgttacagacaaaattcatcctttggaagatgatgttcattctccatgttcattctaaattaccttttaacgtcagtggcccagcagcagatgaccagtccctccttcctgaaactctttgttctctaggtttttttcaaccccaacgctcaccttgcttgattttctacctcttcttatcaccctttcttcctctcttttatttgccccttctcccttaccaaayctcaacatattagaatgtcccagagctccctcctcatgccttcctctcttttacagctttaccta

SEQ ID NO: 811097 - DNA, 505 bp, Homo sapiens
tttgataggagaaaagaaaacaaatacatctattttgttaaacattcaagcagacttcatgtgtctttaatggaatagtagttatcatggaaaccatctcccataaggataaaaggaggcttggtataaaagttagggttatggtgatcatcttttcagccatcttctataaagcaaaaagagggttagggatagggctgggtggagggctggggctggtggggctgtcttggccattctcttccataggaaaaaggagagcaagagcacagagagcatccttccctttctttccctggatgggacagcttttagaaatctcagcaactcctctgttcagtggcagaaaagagccattatcttccaattgcagctcctgtyttagggatgaccgagtgctgtcctgaaccattttttcctaaggaaaaataggcatttgataaatggctctttcacattactcaggctttttcaataatgcattcctctaataagtccagggctt

SEQ ID NO: 811098 - DNA, 641 bp, Homo sapiens
ggagcgcacttgctagatcatatgatgaaagtatgcatagctttgtaagaaacttacaaactgtcttcaaaagtggctgtatcatttttcatgtccaycagcaatgacagtgtgctcctgttgctccacatcctcatcagtatttggggttatcagggtttttgattttgaccattcttataggtatgtagtggtatcacattattgttttaatttgcaagtctctaatgatatgtgatgttgaccatcatttcatgtacgtatttgccttccatatatattatttgttgaggtgcctgtttagatcttttgtccatttttaatagggttggtcagttcttattgttcagttttaagacatttttgtatgttttggttaacagtcccttatcagatatgtcttttgaaaataattttttcccaacctgggagttatcttattctctttgtggtatctttagcagagcagaagttttaatttagcgaagtccagattatcaattattttctttcatagatgcccatcacattttataccagaactagaaaagatgaaattcttggtctgaagttgcagttatcagtcagcagaagagacagtccacaaccctgcttggagtccagatgaggatcctgagtgc

SEQ ID NO: 811099 - DNA, 583 bp, Homo sapiens
tgtcaaaaaaaaaaaaaaaaaaaaagcttttgaattcagctgtaaactggcagtccacttgcactcccctctccactgcagagagttttcttctttcacttattaaatttttgctccaaccccaagtttgtgtccaagttccttaattttcttggatttaggacacagaacccaggatactagttcagacaatgaggaactgctaggttaaggtgcattggtgagactgcaacatcaggacctgggttttcctgaaggttggagggagagaaaagccagttccctggcttaatctctgtggttggccaccacccacttaagtttcaagccacataggatcaaatccacagagacgacgttcaggaatagaagcctgagctcaaccacagcagtgtggtgataggaatgagagagtggggagatgccacaatatccagttatatgtagaaaaaggctattgtgtcagcagattttataraaagggctggaatgaacaggctgccacacactgtctctgcaggaacaagattcgcaaggatacaaacaaatgcatttataggaactcactaggcaacagcaatac

SEQ ID NO: 811100 - DNA, 539 bp, Homo sapiens
gtaactcatgcctaaaatccctgcgactctgggggctgagactggwggatcccttaagcccaggagttcaaggttagcctgggcaacacagtgagacaccttcttttaagaaaataaataaaagtagaaaacaatctgtaaatattttagtttatttctttgaaaaggacgatttttcaaacatgatcacaagaccatatcatgtctaaaatgataaaaaaatttatattatcacaggcctaataagcacttgtttttgcaagtatgtgaacctattttaaatctcttctatacatgtgggattttatattttatattcataaatcattgtatcagcctttcatttcactttgcttcctttaaacccagcaaatcccatatttagaaccaccttcactaaactgtccacagctccttctgattgggcttggtttcctgcaagatgtaagctaaattgctcagcagacagaagaagacgtagtttgtcctaaaagcggagtttagttaccatcctggtggaaaattaaagcattgactga

SEQ ID NO: 811101 - DNA, 622 bp, Homo sapiens
taggaaaataggaattgcgtatctttcaagtcttttccaatccttatgccctaaggtatggcttcagtagcaagcctctttggtactgaacaccaagaggcaaaaataaggaaacagttaagtggacaaattctgagatacagattcaaatattggttataccatctgctagctatgagactttttgaagtatataacttagtgcccagtttcctcatctgtaaaatggggaaaaatgataatacctgcattataggatttgtgaaggaattgaataataaaatctatacaattattaagcacaaagaaaatgcacaatcagtagtaattaaaataacaaaaagagcaagcacacattgctccagaacttggggcctcataccatcttttgcttgagcagacctcaaaagcaccactagcatcctccacccagacatgcttttcaaatcagattctcccaaccccttgaagccttgcactgtagagcactcaaactctctcatccaaattctagtcttcttatttgatttctcagggctggaatcatttgaaatgaatggaggctagaaaggatccwgtagtttgggggttgcaaaggaccagcaatacccttgctagtttg

SEQ ID NO: 811102 - DNA, 594 bp, Homo sapiens
tctgcttttaactataacttgaagtataccataaatggatcagaacaatcactttattttagagaatatagggaaagggttgaatgtgcaacccagtcagttccccttccattttaccttctagaaacttcctctcaacatagtaactcacagcagtttatccttcaaaaaattccccagaaaaagtgttaattggtttgggaaaatattttttgacatattatataaataggccctatatccaggggttgaagacatatatctaggggttggatatatgccctatatcgagaggtttgagttggaattcgagtagacagaaatctccttaaaacaaaggttattgaacagtcatgagactcttaaaatgacatttatttatctatatattattttggtgagagaaggaaacaaagagagagaagctagtgcttttggaatgcctactgtgtcaggacagatgctttgaaatacattttcactgatatgacaccctagaatttgagaagaaaaccttaaaggaaataaatttggaaaaagaggatatgaaaagtagggttgttctattttacygaagaaggatgaatatatcct

SEQ ID NO: 811103 - DNA, 571 bp, Homo sapiens
atcagcatatttattacctcacatagttaagatttttgtagtcaaaaactaatttttcaaatgrctctttgtatttttttatagtgttcttgttgaaaagattttcaagtgcctggaattctcaaaacactgaatatattatctaacagagaaaattggcacggaacttgtcacatcatgaaattaaaactgagatttccttgggtgccatgtgtacttgtcttgactcatcactttcataatttttggtaccattgccgttcactgaatcctgttatccaaggatttgggaatgaaatagaagcctgctattgctcagttccgcacgctgtggttatattttccaaagtgttaacaaaaacgtttctcaagaatgataaaatcaaaactaaaagagaatctcccgttctctgggtttagactataaatacctgagataatagctctttgggggaaaagcagtcattttaatatacataaacagtcaaaagctaaaagagagggtaaaactcatttagttcaattcatgtattacaaagaagaaaaaaagacccaaagatgttatttgtct

SEQ ID NO: 811104 - DNA, 609 bp, Homo sapiens
aattatgacagatgcatacctgtccttacagtgcttaccttctagagtggwacaaagaccacttatgagagggaaaaaagatgagctagagagggttccttcaggtatgggtggtggtaatgcttttgcaagtcacagaaagcctagggactctaaccaaacatccagaggcacagtttgactcagccattcaaatgacattatcaaagaactgggtgcttgctccaattattggcttagctacctcagcattggtactgttctcagttgggctccattctccctgacatgagatatcctacagcaacagctagtactgtaacttttctcattcctagctgttacctcatcaaccctacaaaccatagaatgaaatttcattgttctacttgaactgacctggcccattcctaaatcaatagttttagccaggaagatggaatacattgattggcttaagctagttatgacccattccgggaactgaacatgggattagtcctatcaaagccacttgaaaaggaaaattgtggtccatttaggaagagaagcaagaaaattgttactatgtggtggaggtggatggctaatgatcactatacgaataac

SEQ ID NO: 811105 - DNA, 627 bp, Homo sapiens
attgctttgtcaatttaggctcttttttggttccctactaattttaggattgtttttctaattctgtggaaaatgactttggtattttgataggagttgcattgtatctgtagattactttgggcagtatgtgcatgttaatgatgtcaattcttctgattcatattcatgggatgtttttctatttgcttgtgtcatctattatttctttcatcagtgttttgtagttttatttgtagagatctttcactgccttggttaaatatattccaaagtattttattttattttttattttttgtagctattgtaactgggattggcttctagatttaattctcagctaggtcattattggtgtatagaaatgctactgattcttgggccgagtgcggtggctcactcctataatcccaacactttgggaggctgaggggggtggggtggatcacgaggtcaggagttcgagacaagcctgaccaacatggtgaaaccctgtctctaaaaaaaaaatacaaaaattagctgggtgcagtggtctgtgcctgtagtcccagctrcttgggaggctgaggtaggagaattgcttggactaagcagaggttgcagtgagcagagactgcacca

SEQ ID NO: 811106 - DNA, 637 bp, Homo sapiens
gcacttgaaaagatgctcaacatcattagccatcagggaaatacgatttgaaaccataatattttcaaaaagttaggagatttttaatggtcgcaacacaaagaaaagatgaacgtttcaggtggtggacatactaattacctgatttgatcactacacattgtatacatttatcaaaatatcactctgtagtccctaaatatgtacaattattacatgtcaacgaaaaagaatgaaaacacaatgacacacacttcacacccactggaatggctagaatcagaaagacagataatgacaagtgttggcaaggagtgagaaatcaaaaccctaatacactactggtgcgaatgttaaaaagatgcacactgatgctttggaaaacagtctgaccatttcttaaaatgttaaacagagctaccatatgacccagccatttcactcctaggcacatacgcaagagaaatgaaaacatgatgtccacacaaaaacttgtaggtgaatgttcacagcagcattacacataatggccaaaaggtggaaacaatccaaacgtccactaactaatggaaaataaatcrtggtaatacccataaaagattaaccagcaataaaaaaaagtactgacacatgctat

SEQ ID NO: 811107 - DNA, 613 bp, Homo sapiens
aaaaaaattaacttattctatgagttgtcttttcactttcttgatggtgttctttgaagcacaaaagattaccaaaattgatcacattctttgttataagaaaacatttccataaaagaagtagagaatgttattaagaaactactccccaaaagcaccaggcctaaatagtttcatagaaaaattctgctgaactttcgaagaccaaatagtcccaatgttttctacattattctagaacattgaaaaggaagaaaatcttcttaactccttttataaagcaagtataacactgataccaaaccagataaagtcagtgctaagaaagaaaactacaggtcaatatcatgaatattgatgcagaaacataaatattagcaaatggaatctaacaacacattaagaaaacaatgcacaccatgaattagtggatttattccaggatgcaacattggtccaatatcaagaaaaattcacatggttctttccataaatgatgaaaaagcctttgataaattttcataccttttcattatttttwaaaaaaaaaaacctcttaagaaaaaaggaattgaaggagactttcctaatatgacaatgtttacacacatac

SEQ ID NO: 811108 - DNA, 638 bp, Homo sapiens
ttgttgtcctaatcaaaatctatactttcatatcttgttacacataggagaaaaagagctaagagaatgacacagaaatggagctggagccttaatacacctcctaactgttaatctgtttgggtggggtttctrtcacttgtggcctacagcagtcttactgtccccccaacctcccacaaagttcttcaggttgaagagagtcactactttgtagaatgggaagctcttactcaaaaaagtagaaactgaatacaaaactagactttagaaggataagataaataaatcaatgcattcataacacatcattacaagaaagtgagggggttagaggtctcatctttaaattctgctctcaaggacatggagggcccctctcacaggctttcccaaagctcctctgggtgtactggtctgactcagcaagtgaacatctgtggttttgcctagccagcatcccttctcctagcagcagcactcagcatgtccttttggggaatcactcttttctcttgtggtttatttaaagtgactgcacaatcagaccccagagtttggcttatgtcctaggccttgccagtgaaaatatggtacctcatcagtggcagttatttttccgagaaaggacatatcat

SEQ ID NO: 811109 - DNA, 612 bp, Homo sapiens
aaaatgggcaaaggacttggatagacatttttctgaagaagttattcagacggcaaacaatcatatgaaaagatgctcaataccactaatccttatagaaaatgcaaatcaaatccayagccaccgtcagtaaccaccagcatcagtcagcagccatcaacatggaagcaagaccttccttcagcaaaaagatggaggatcagatggtagcattttttgtttgtttttgttttttggttttttaagacagtctcgccctgttacctaggcttgaacgcagtggcgcaaacctccgcctcctgggttcaagtgattcttgtgcctcagccacctgagtaactgggattataggtgcacaccaccacacacagctaatttttgtatttttagcagagatggggtttcgccatgttggccaggctggtcttgaactcctggcctcaagtgatccgcctgcctgagcctcccaaagtgctggaattacaggcatgggccaacatgcccagctcaataacgtatttttaaattaaggtacgtacgttgttttcctaaacatagtgttatcacatacttaacaaactacaatatagtataaacataacttgtgtatga

SEQ ID NO: 811110 - DNA, 399 bp, Homo sapiens
tgggtttattttctcaaaatgaataaatattttttcagttctcagttttaatttctaatacagtaatagcaatagatagaacccacataaacaacagaatgtaaaggggccctgacgccaaaatatttgaraattgcctctctaaggaaccaagagacccaaggtctcaaaactcaggcctatctcaactgctctgttattactatttttgtcataaatcaagtgccataccagtatggatctgtttctaaagtcttgatatagtttgggtatttgtcccccaaaatctcatgtttaaatgtaatccccaatgttggaggtggggcttggtgggaggtgactggatgattggggtggatttctcttgaatgagttggcaccatcctcttggtgctatct

SEQ ID NO: 811111 - DNA, 426 bp, Homo sapiens
cctcaagtgatctgcccgcttcggcctcccaaagtgctaggattacaggcatgagccgccatgcctagtcaggcctccagaacttctgaccaaccagcttcaagttggggttcccacgaccccctctttgggttcgattactttgctagtgcagctcacagaactcagggaaatagttaatgtttaccagttaactacagaggatatcacaaaggatacagagaagagatgcacagggtgagctaaggggcaaggggcgtggagcttccatgccctccctggacacgccacccttcaggaacctccacatattcagccatccagaagcytcccaaaccctgtcctcctgggttgttatggaagctttgttacagaggcatgattgacaaccatgtagaaatgtgattggacaaaaagcacattatc

SEQ ID NO: 811112 - DNA, 630 bp, Homo sapiens
ctgtgagggatggtgcaccatgtgggctcctcctctggaacaatgcagccacacggactccaggcagctccctaaactgggctcagtgtctgtgaggactgtgggactctgctgtagcaaggactgcaggtgtcaatggcagtaatgagggctgctggggatcttctgtttatattttccccatgatgagaagcccatgctgtctctgagccagtctcagcaagagagacagggtcatggaggcagggtgcttcacttccctctctacactgccattctgagtttccctgctccacagggaattcaccagtcccttgctatattctggtgttctcccttagacactctagttgaagtgtagttgtttaattgttgttttcgtactttttgtggaggggatgaatgttaggtacctctcatcagccatatctcttgatgatgtcactctgagtatacatttcttgaaagcactaactggatatttcaatttgattgtgaggcatatgattagtagtcaaaaatacttagaaagttkaacagaactaaatagagttaatcatttgctgaaactctgtcatcaatgaattgttctagatagacactacttgtagctgctttatttatttgcag

SEQ ID NO: 811113 - DNA, 624 bp, Homo sapiens
aaattagctgggcctgctggcaggtgcctgtaatcccatctactcgggaggttgaggaaggagaatcacttgaactgggaggtggaggttgcagtgagccgagatcacgccattgyactccagcctggatgacaagagcaaaactctgtctgaaaaaaaaagaatggccgggcgcagtggctcacgcctgtaatcccagcgctttgggaggacgaggcgggtggatcacgaggttaggaggtcgagaccatcctggctaacatggtgaaaccctgcctctactaaaaatacaaaaaaaattagccgggcgttgtggcgggtgcctgtagtcccagctactcgggaggctgaggcaggagaatggcgtgaacccgggaggcggagcttgcagtgagccgagatcgtgccactgcactccagcctgggcgacagagcgagactccgtctcaaaaaaaaaaaaaaaaaaagaaaaaaagaaaagaaatctggatgcctcacatttgatcatatcctattgaatatcttactaaatactcatattattttgtaattgttttctttgtctaaatatgattgaaaagaattaatctagaatgaaagataagtttaaaaaaaccccaaatg

SEQ ID NO: 811114 - DNA, 609 bp, Homo sapiens
tggcattcattcatttatgagggcagagcactcatgacccaatcacttcccaaagggtcccatctcccaacactgttgcactggggaytgagtttctaacacaagaatttctggaagggacaagaacattcaaaccatagcaaggtgcttatcagtcatttgtaattttttttgtatgaaatatctgttcaagtcctttgtcagtttctttttgttgttcatttttttgtttgtttgtttaagatggggtatcactgtgttgtccaggctgatcttgaactcctgggctcaagtgaccctcccacctggtctcccaaaagtactctgtcaactccttaactaggttgtttgcctccttattcagttgtaagagttccttatatcttctggatccaagtcctttgcccaatgtatcttgtcaatatttttcccagcatgtggcttgctttttatttacttgatggaacaatttgaagagcagaaagaatctcaatggatacaattgataaatatttcttttatggttaatgctttttgtgctaccacaacagcatgaagattttctccttttctataaattttacacttaggtctacgatccacttaaaa

SEQ ID NO: 811115 - DNA, 506 bp, Homo sapiens
acattcacactgttgtacatccattaccaccatgcagccctagaactcttttcatcttataaactgaaactctgaacccattgaactctccgctcccctctgttccagtctccggcagccatgttttactttctgtctctatgaattgactactctaggaacctcgtataagaggaatcttacagtatttgtccttttgttactggcttacgcatttaacatgatgccttcaaggtccacccatgctgcagcatgtgtcaaaatttccttccttctttgggactgactaaatattttttagtattccattttatttcttctgatagcttctcagatatagtcatgcatcacttaacgacagggatatattctaagaactgcgctgttaggcaatttcgtcrttgtgcaaatatcatagagtgtatttagaaatgtgattgtactgaaatactgtaggcaattgtaacacaatggtatttgcgtatcaaaacatatctaggtcaggc

SEQ ID NO: 811116 - DNA, 636 bp, Homo sapiens
tcaattattgaggctaaataagaatccatctttccagtgcttaaaaaagcaacccctcaaaagctgtagcagaaatgtaaggagtgaaattcattgacataatgacaccaaggccctggatgcattgtctaaggaagaaattattttctgcagaagcttcaaaccagatggttataaatgagacttagtgcatgggcattacttaatgactaaatttctttaactaaaaatctaattttattatagtataaatcacactttcttgaagcagggaattaattttagatttttcattcactgctcataacctttctacgagtttgacagccaaatcatttaaaatgtcatttaaccaatacaatacaacagctttattcctcattgtgcccttcctgaatccgttatctctcactataatgtagaagaacttaaataaaaaattaccattctataaagctgtattttactatgcagttaaactacacaatccttatttttgaatcaatataatatgagtgctgagcaatatttttcataatccaaaagccgattacagwttctcagctaccaaaaaacagtttgaaggctgctgaaagagtataaatgagcactctcaaattctacccctaggtccat

SEQ ID NO: 811117 - DNA, 590 bp, Homo sapiens
gtgcagaaaaatcagctattactcatctgttcctctttcagtccggggtcgagtcagagctgggaaccaacccaggtgtycattgctagacaatatcttacttttctttgacagaaaaatagtttactgaagcaccatagtgcttctattctttttatacttgtacactgttctggagaagattaacaaccccacaacccaagtcagtgagtcagtgaattcccagacctaaaaatacttagaaccagccggcaaggtcccactccttttcttcctgccaggttgtaagcattgacgttacagcactgggctatttcaggaactctcaaacattcaactttgacagaaacaagcaagaaagacatcagtgcacaataggaagaaaaaagtttctgtgatgttagaacaaatttgctagtacaaacccacagtgtatgttcctaagtcaaccatttgcgaaggctgacacttccagcggtggagaggttacagatgaatggagtgcagcctgactacaccttcactcctcctctggacactctcattcttctgggagtttgaagtcataagttcactcagacctttttcat

SEQ ID NO: 811118 - DNA, 500 bp, Homo sapiens
cagaggctttagaagtaaattgtttacattgattcacaatcccataagcctttatagtaaactatcctctttgaatytactaccttggttaattcagcagaaaattgctttctatttctgagacccgcttagaaggcttgagcagatttttttttaaaaaaattgttctgcgatgatgatgaagggagacttgagaatccctttgaaaaatagaattgactacagaccgaacagcctgtgtttatggataactgagcttcacacctctcactgaaggtgagaaagtcctattgaagatgacaaagcccttatcacagtgcctggtacaaggtgggtacccaaatgtgtgtccctataagacagcagcaaagaaactgttactcctcaaaaactctcatctccactgaatgggtataggacatagaatcttcctgtacttaagcaacttttaaatagcactttatacactctcaaaagatcaattacatcagagtagctat

SEQ ID NO: 811119 - DNA, 500 bp, Homo sapiens
cagaggctttagaagtaaattgtttacattgattcacaatcccataagcctttatagtaaactatcctctttgaatttacwaccttggttaattcagcagaaaattgctttctatttctgagacccgcttagaaggcttgagcagatttttttttaaaaaaattgttctgcgatgatgatgaagggagacttgagaatccctttgaaaaatagaattgactacagaccgaacagcctgtgtttatggataactgagcttcacacctctcactgaaggtgagaaagtcctattgaagatgacaaagcccttatcacagtgcctggtacaaggtgggtacccaaatgtgtgtccctataagacagcagcaaagaaactgttactcctcaaaaactctcatctccactgaatgggtataggacatagaatcttcctgtacttaagcaacttttaaatagcactttatacactctcaaaagatcaattacatcagagtagctat

SEQ ID NO: 811120 - DNA, 630 bp, Homo sapiens
gtgaggaggaagaggaaaaaagaagataactattgggtactaggcttaatatctgggtgatgaaataatttatacaacaagccctgtgataggagtttacctaygtaacaaaatttcacatgtactcctgaaactaaagtaaaagttatttttaaaaatgtatagagtagaatactggctactagaggctggatagggtgagggtgttggggaaggttggtcaaggagtacaaagttacaattagatagaatgcacaatgtttcattgctgagtagaatgatgtagttaataataatatattacatatttcagaatagctagaagagaggattttgagtgatctcaccacaaagagatgataaatgttggaggagatgaatatgctaattatcctaatttgatcatcacacattgtaaacctatatgaaaacatcacactctatgccataaatatgtatagttattatatatcaactaacaataaaataaacttaaataaaaagaactaaaaataaaactaccatacaatccagcagtcccactactgggtatatacccaaaagaaaaaaaagatcattctattagaaagatgcctgcacttggatgtttatcatggcactattcacaat

SEQ ID NO: 811121 - DNA, 539 bp, Homo sapiens
tttctttttatttttctttccatgatgagcatttactctttcaacagccaaagatcatttccacgttcttctggtaatgaaactgagcaggtgtcccacagagctgatgttcgtggtttctttgaataaacatagaagttggccctcctagttttaaaacctgagaaagttgcatttgtcttatctgagttcctttccaaggaaaccagccatcaggcctcccaaatagtagcaaggagctgaaagtcaccagatcactgcatttggacaatcagatgcccgacactttatctgttaagtttgcctaactgaccacttgcttcccattgaccagctgctcttctttacccctccctaattcctgttttcccacacatggttacatttcttccctgctatatcagctcctaattttagtcagtcagggagatggatttgagacctcctggcctcttggctgcagcactctattaaaggcttcatctttggcaatacttgtttcagtgataggctttcygtgaagcaagaaacaggatcta

SEQ ID NO: 811122 - DNA, 578 bp, Homo sapiens
tagtgtttctcattcttgctattgttagattttgccttttctttttttttctgattagcccaggtatatatttcttcaaagaaaaacttttgtctttattttctttgttagttctctgttttccattttattgatttctggactgatctttattatttcattgttaatgcatattttaggtttcatttatccttcttttttttgttaataaaggtagaaactgaagttacagttttcatctcttttcatatatgtattagtgtttagttgtataaatttcactttaagtgctgttttaggtgcataccacaaatgttgatgtgctctatttgtattttaaaaatataaatagctgaaaatgtttcccattctacttttgatatcttatttgaccttgggttattgaaaagtaaggcttttttttagtttctgaatatttggagatatctttttgttactggcatcttaattctattgtggtcagtgaacatactttgcatgatttgaattcttcaragtttatggagacttgtattgaccctggatgtgaattattagtaaacgtttcatgtgttgtt

SEQ ID NO: 811123 - DNA, 627 bp, Homo sapiens
tgggattatttgagtttttagatctctggggtttgtagttttcattacatttgacattcttcagccattatttcttcatctatatgttttttctcctatttctctattctcgtttctttacatacyccaggcatatgtatattagatcacatgaagctgtccaacacctcactcacacaccgttcattttattttcagttatttttcccctatgtttcattttgtagtttttacattggttttccagttcactgatcttttttcttttcttttttttttttttttttgagatggagtttcactctgttgcctaggctggagggcagtgcagtggtgagagctcactgcaacctccgcctcccaggctcaagcaattctcctgcctcagtctcccaggtagctgggactacaggcgtgtgccatcatgcccagctaatttttttatttttagtagagactgggtttcaccatattgaccaggctggtctggaactcttgacctcgtgatccgcctgcttcggcctcccaaagtgctgggactacagatgtgagccaccgtgcccagcctccagttccctaatcttttgggaatcaatgtccaatctgccattaatcatatctaatgca

SEQ ID NO: 811124 - DNA, 616 bp, Homo sapiens
agaaaagaaatttgccactagatttagtcacaaggcaggctggcagatgcgaattaataaatccacatcttttcacagcagccattacctgatcttccacagtaatctcggtgcctagtgtattgtcggtattccatttctctgtaaacgtcaggccgtactcagtccatctgtacttggtttccagactgcccgtcactttggtggtctcagtgttggctgagcctgagcttgtaaattccttcaaaggagagagaagagtcacagcctgcaccatagcactcacttggcttcacttcactcctaaacactatacttgcctttctgcaagaggcaagaccctgaatgtgggggggccaaggctaactctacaattcaaatagatatttaaagtacagatgggagtaaaggagcctgctatgtaaagaaatcttatggggaatttgttgtcagcagacagcttccttcctccctgtaactcttcagtctggacaggaaagcatctcccttccatcctggctccagggcagtacagagaaaaagcactgagctaawgctgacacagcggtaattcaaacccaaaacttctttcttccaacaattactgcacacataa

SEQ ID NO: 811125 - DNA, 488 bp, Homo sapiens
gcaagagcacataggtgaagaggaagcggtggctgatctgggcggaagctggaggtcactgggagtcaggaatgcagcactcatcagtacgaaacccggaaacagctcctrgaaggccctctgagctttgaaatctgctgctttacaaactttcttcaggactctcctttgccttccagcaataatcagcatgtcaacgatggtggccttcatctttctttttccttgtcctgtcaccccaaatgagttttgcggggttttttttaatagagatggggtctcttcacgttgcctaggctggtctcagactcctggactcacacaatcctcctaccttggcctcctaaagtgccgggattacaggtgtgggtcaccgcacctggccccaaatgcgttttaatttcctcagtaactcctccctgctccatacacacaggactggggaaccttcttcctccggcagccaaagccgccaagacctgcaggta

SEQ ID NO: 811126 - DNA, 621 bp, Homo sapiens
tgcatcttctctgaaaatgtttctctgccacagttgtctccaccttctactgtcagtgtcttagagctcccacaaagatggcacaatgaaarcccttttcctgctacaagagctgttgtcacctatttcatgacacaaatagagaaccatttaggagaagataaacaacatattacctaaaagccaaacaatgcagattgaagagggtctcaacaaatagcctctttgtctgcagggcccgtctaaggcatcattttgatcatcctcattctcccttctcatgttccttgccacagtttgttcaactccaaccttactcatgggtatgcctcccgttttgccctcctttaacctaacatccagataccttgaggtgtcaatgcacagtaaataacactctcatgcctctctttcttgtttctttcctgtatgaactgaaattcccttcattctcactggggagtgtcaggttcttgttagacacattctcctccttatatcatccctctcacagttttattcacttctctgttttgatgatggatcacaggccccctcatcagcatggaaatcattttttggggaattagacaattcttgctctcagtggataaagacaat

SEQ ID NO: 811127 - DNA, 629 bp, Homo sapiens
tgaatgtttctccccacacagcagcacctctgatgtgaatcccatgtggcttaactggtggggatcttggggattgtgagttaccaaggacttatttcagatcacttgtgagagcagaatgtatgatcagtagatgtctcttcccagtaagagtggggaagaggaatgcagactatgggggtgatggttcctcaggtggggtctgcacagagtgaccactgtctcttgcctcccaggctcagcttgcctgtccctagcccatccagttcttcccactgtgtgacaggagggtgtgcagatactggtttgttagggaaggacattagaggccgtgatttcagagactgaatcacacaaaatatccactgtaagctctgtctgaactgagactaaacttgttctacacccatgaaagaacaagttaagtctcagttcagaaggagcttacagtggatattaatcaaccaagcagctgggttcactggcttatggctataatcccaycaattttggaggcaaagatgagaggataacgaggccagaagtttgagaccagtctgggtatcagagtgagaccctttctttaaaaaactttaaatatttgactggcagagaggcaggtacctttc

SEQ ID NO: 811128 - DNA, 621 bp, Homo sapiens
tgcatcttctctgaaaatgtttctctgccacagttgtctccaccttctactgtcagtgtcttagagctcccacaaagatggcacaatgaaaacccttttcctgctacaagagctgttgtcacctatttcatgacacaaatagagaaccatttaggagaagataaacaacatattacctaaaagccaaacaatgcagattgaagagggtctcaacaaatagcctctttgtctgcagggcccgtctaaggcatcattttgatcatcctcattctcccttctcatgttccttgccacagtttgttcaactccaaccttactcatgggtatgcctcccgttttgccctcctttaacctaacatccagataccttgaggtgtcaatgcacagtaaataacactctcatgcctctctttcttgtttctttcctgtatgaactgaaattcccttcattctcactggggagtgtcaggttcttgttagacacattctcctccttatatcatccctctcacagttttrttcacttctctgttttgatgatggatcacaggccccctcatcagcatggaaatcattttttggggaattagacaattcttgctctcagtggataaagacaat

SEQ ID NO: 811129 - DNA, 497 bp, Homo sapiens
ttttcagaaggaatgcttccagtttttgcccattcagtatgatattggctgtgggtttgtcataaataacttattattttgagagatgttccawcaatacctagtttattgagagtttttagcataaagggatgttgaattttgtcgaaggtcttttctgcgtctgttgagataattgtgtggtttttgtcattgattctgtttatgtgatggattacgtttattcatgtgcgtatgttgaaccagccttgcatcccatgtatgaagctgacttgatggtggtgtataagctttttgatatgctgctggatttggtttgccagtattttattgaggattttcacatcgatattcatcagggatattggcctgaaattttctttttttgttgtgtctctgccaggttttggtatcaggaagatgctggcctcataaaacgagttagggaggattctctctttttctattgtttgcaatagtttcagagggaatggtgc

SEQ ID NO: 811130 - DNA, 480 bp, Homo sapiens
agggaaatggttcggtttatttgcatttatttatcctacaagcattttttttggacatctattatatgcctagtctagtagggaaaccaatccaagggagcagaaagctgtggtactaattttgcagtgtgagaggatgagggattattatgcaaggtcctccccactttgggccaaatggctcgccacatcagccaggaccctcacacaggaccactggaccctcacaggcacctactttctgctgaagcaattgctcataaagcctttcatctgaaaccagtaagtggctcgtgtcctagagcggggcatggggtaggctctggagctagagcaactgagctcaaatactgatttcccttagataatctgtagaaaaggctcagcccagtgcctggcacaaagttaaggagtcaagaagatgattgttatcacgcatggcacaagtctaytttgaattgagagtgggatgaagaatat

SEQ ID NO: 811131 - DNA, 690 bp, Homo sapiens
ttaacagtctgggtgcggtggctcatgccagtaatcccagcacttcaggaggccaaagtgggtggattacctgaggtcaggagttcragaccagcctggccagcatggtgaaaccccatctctactaaaaatacaaaaattagcccggtgtggtggcacacacctgtaatcccagctactcaggaggctgaggtaggagaagtgcttgagcccaagagacggaggttgcagtgagccaagatcacgccactgcactccagcctggtggacagagcgagactctgtctcaaaaaaaaaaaaaaaaaaaaaaaaaaaaaagcattaacaaagacaaaagcagaaatataatgaaatggtaaaagacaatggatgaaataaatctaagaacttggtctttgaggagatgaacaaaattagcaaatcccttgagcaggtcaaatcaaaggagaaaaaaaaacagaagtaagcaataaaataagtgaaaaagaagttaacaacccatatgcacaagaagttttaaaaatttaagaaaatagaataaatgactgtatatcaataaatttaaagacccaaatataattagtttttcttggaaaactatagtaactgacttaagtagcagcagaagtatgagaaaactacatctgacaagagattaatgaccaggatctcaaacaactctataggaaa

SEQ ID NO: 811132 - DNA, 591 bp, Homo sapiens
gcttctggctccacatgcaaaatgcaagttagtgttaacacagaacacacagattatgcagcagggaagcacttggtaaattcytttcaaatgttcccctagataggaggtctttgaaagcaaaaactagtaaccgagattcagtccagataaatctgtgggcagacagcaagtgaggtcccctagaaggggcattttcctaaaaagacataatcataatgctgcccagaaaccatcattggtctgcattactttgtaccttttcttcaatcagaaaaaccttatctaccagtaaattcccaagtgttttctttcactgctcttggtttcctaaagcaactgaacgcactcctcttatgactatgcggttgggtcatgagatttggcttggagtaagcagcctcttgcctcatcctgccaccctgtgcttctttccttggaaatgtccaagcttgtggtttgggattctctgtgcagagttttgagacttatgtcgacacctctacatgttttgaaattcaatagattgagttgctgagcacctagcagggatggtagaaaaaacaaaaatagaatgaataaaataaacta

SEQ ID NO: 811133 - DNA, 593 bp, Homo sapiens
tttatctggacctcctatttgccagacattctaataggttctatgaaggatttagacaaagactcagccmtaggtcctatcatcgagattcttccagtctgtgaggaggcacaaacctgcataaatgtaattacattataatattgcaggtgtaaaataaaagtatgttaagagcaaagagttggcatatgattaacagctatgatatgcaggcaagacttccagatgagttgctgatgaaacttgtgtgaggcacaaaaaagatggataagagtttcacaggagtgtaaaatggcaatgtgcattatgtgtttgttaaggggtatcaagatgtggaagacatcatctgtgattcttcttgagtcttggactctgtaaaatccacattgtcaagtcataagtcaacttgaagctcagaggctgcctgtgttgggaaaaagggtgtgaatctccagggcaagacaaagattaagtaatggatgctttgatgttgtttccttgaatgcgtctatctcatgtgtgtttctccccaaatatttggtgataatgtggtttggctgaaggagagaatgtttgttgaacattatgtcagc

SEQ ID NO: 811134 - DNA, 603 bp, Homo sapiens
tcatttcctcatgactaaaattttatttaactgtattagataacagtattgagctgaagrtaagattaggccatttgcacttagaagttaaaagctaaagaaacattcagagagaaaaaactgaacaaagcaaatcacagacagacccaaacaaaaccaaacagaagcaaaatgcactttccacatgcaggaatcaagtacaatagaaatcagggcaaagtttttatgcattatatttctataggcagaatattgttcgtgtgtctctgcactattgtgtcagctcatccctgtttttgctgttgcaaacagtgggcactgtttctcgagttgtgtatggaatttggttgtgctctgttagggcagcttgtgcaacagaagcacaggggtatagagcgagcagagttaagaggtgagaaggagaagtccaaaattgtgtccttgagatgttacttgttaagagtcaccatgctctgtgtgtgtgtgtgtgtgtgtgtgtgtgtaaataagtgtctgtattaattattcacaaagtaataccatgataattgctatgccattaatacaacattgtggacctggttattttagacatgaaaataa

SEQ ID NO: 811135 - DNA, 590 bp, Homo sapiens
gaggctctcccctcttctgaagttgcccattccctgtgctttatacattggtattaacttgctgccactatctttatggagtaggtggccagaacgtcttttcacacctggayagagtgcttaagatggtagtagaaattcacctacaaagattcagttcttctacatactaggagataagtaaggtagactaaaaaaggcatttgtggatcagcagaaagaacactgggcccaaagtcaggagctgctgtcttcctattattatacatttattattattttaaagtaagtaattctccaccatcagtttcttcatctacaaaataaaaatatttccctcattcatttacacgttccctcaacaaacagttaataggtttgaacactcaaggtttgattagagaagcagaactacttggacaacatatttatctattattgagatggaatcttgctctattgtccaggctagagtgcagtggcacgatctcagctcactgcaacctccacctcccaggttcaagcaattctcttgcttcagcttctcaagtagctgggattatatatattatatatatataatatgtaaa

SEQ ID NO: 811136 - DNA, 621 bp, Homo sapiens
ggtctttgggttcctggcctggacgactttccaccacacctttctgtcctcatctgaatttccaatgaggaaaataagcatgtgatggttaaggcagcaagagagactcagctctgagcctataaagcctgcatctctgcaggcctcaggactggacagcagcaaagtttgtgcttactcacaactagctcccattttatgagcattcattgagaaagactttttcaccacacaatctttctcttaaatattactgcagctctatgaagtgggggtgttactaggtggatttttcaaatgaaaaaaaaaagaagttaacattgtttgatcaaatctacactgctcctaagtgacagaactgaagggagaagcatcaattatgctccatttatcagaagcaacccaaccttagcttctgcctggaacagtggtcttgtcccctgtacaacctgaaatgtaatactcacgacaaccctttgggatagacattgttatcccaatttaacagaggctcagagaagttactagctagtcaatgacagcrccaatggtcagggaggttaaaaaaaaaattctcgtggaatagcaaggagtttagcccagtgggaacgacgagtgata

SEQ ID NO: 811137 - DNA, 628 bp, Homo sapiens
cattctcctgcctcagcctcccgagtagctgggactacaggtgcccaccaccgcacctggctaattttttttgtatttttagtagagacggggtttcactgtgttagccaggatggtctcgatctcckgacttcgtgatccgcccgcctcggcctccaaagtgctgggattacaggcgtgagccactgcacccggtcccatattttacgtttttaaaagaaacccaatacttggcctcatatttagtttaaggcaacataggaaagaattataaaaatcttttaaaacagcataaaaattggcatgataagcctaataaccacaggatcacccccctggttccaagagtagttgaaattgactataggtacccatcagaagcctaccacagtgactctgaaaacaagaaattaaatgaggcccatgacaatctgtgttcaaaaccatgttgtaagatgtttggcagcaacagtgtcctgatataggaggttctgaagctccatttttaaagtaggggagatggagtttgggtcaccatactgatattaagaattgcaaaaacagctgttcattgaccaacctgatctttaaaagcaggttaactgctttatgataagtagctgaagta

SEQ ID NO: 811138 - DNA, 493 bp, Homo sapiens
ggtttttgccattactttaatggccggcacagtgcctcatgcctgtaatctcagcactttgggaggctgaggtggttgcatcacctgaggttagaagttcgagaccagcctgaccaacaatggtgaaacccaatttctactaaaaatacaaaattaacccggcgtggtggtacatgcctgtaatctcagctacttgggaggctgaggcaagagaatcacttgaacccaggatgcagaggttgcagtgagccaagattgcgccattgcactccagcatgggcagcaagagggaaaccccgtctcaaaaaaaaaaaaaaaaaaaaagagtaatgacacaaactgcagttacagccaggcatggtggctcacacctgtaatcccaacattttgggaggctgagacaggtgkatcacctgagctcaggagtttgagaccacctcggcccacatggtgaaaccctatctctactaaaaatacaaaattagctgggcat

SEQ ID NO: 811139 - DNA, 623 bp, Homo sapiens
aagaggagttacaaaccaaaaatgcaatattatgggcttttatatttacacatgtaggaaccttattattgttccttatttctttatatggcttcaagttactgtctagtgtcctttcatttcaggctgatggactccctttagcatttttggtaaggcaagtctactaacaatgaattacttcagctttgattgatctgggagtgtcataattttgccttcatttttgaaggatagttttgccagatatataattcttgattggcaggattttttaaagcactttaaataccattgtctctttgtatctttttggggattggttccaggacccccctgcagatatcgacattcacagatattcaagtgtcttatataaaatgatgtgggccaggcacagtggctcatgcctataattccagcctttgggaggccaaagcagaaggattgcttgagcccaggagtttgagaccaggctgggcaacatagtgagatcttatcacyacaaaaaaataaaaattaaaaaagactgcaaaaaataataataatagctacttgaggggctgaagcgatagcttcagtccaggaggtcaaggcttcagtgagccatgatcacaccactg

SEQ ID NO: 811140 - DNA, 634 bp, Homo sapiens
gagcctgccactgaattttagccagtatacatttctccactgagaagtaccaccattgcacaagcatgagrttgaacttcctttcagactatatgtccttttggactagaggaagagactgttttctaaccttcccctcaccaggtactcccattctttgagcccaacactagctggacatgctactttacctttgagcctcagtttactcatccagcaaataaaaggttctaccttgcagagtttggtgaagattatggaagtaaagttgtggaaagctcctctatcttcttttcactattccagggcactcaggataatgcctctgactaaaggctaccccaggaaaaaattattatattgatcacgaaagggcatatgaagggcaggaaacaaaaaccccaggaggtatgtcctgcctcacctgctgctagccttcaatttcaattctactccagcttgttggtatcatttattaattaattcatccattcacgtaacaaatgttgagcactttctactgccaggtgctgtggcaggcactgggagacaaatagcatacgtaagacagatatggtctctgtcttcgtgacacttgtctctaccacatttggcaatgtctgggttaatgtct

SEQ ID NO: 811141 - DNA, 633 bp, Homo sapiens
caagtaaaacttggaacaacctttctgcaaagcaattttatcacatacactaaggatgttttaaagtttgtaccctttgactcaataaccctactctagaatgagctgtcagcctgagaacccaatgaaataatcagagatgtcataaaacaatgtaaatataaggatgttcatcatggcattattttaaataaagaaagcaaaatcaatttttatgtaaagaaatggctaaaaataatttcatttctttctgaagcaatattctataggcataaaaatgatgtgtttgaagagtttttgatatcgtaaaacattcatgaagcaatgttaagtaaaaaaaaaaaactatatatggaataataccacattttaaaacccttatatttttctgtgtgtgcatacatcatatatatgttataaatatatagtaaatatattaacttttaattgttttattcattactgtatgtctaaagtctagccgagatttcttaatcttcttaatcatggcactatygacatttggggctggataattctctgtcgtgaaggctgttctatgcattgtaggatgtttaacagcatcctcaactctacctactaaatgccaactctacctactaaatgccaact

SEQ ID NO: 811142 - DNA, 609 bp, Homo sapiens
aatattctttaacccttctttaatgcctgctaacactttttaacaaaaaaagaggtgcccttgggtyggaattttttttatttcaatagttgtgagcatacaagtgatttgagattacatggattagttctttagtgtgatttctgagactttagtgcacctgtcacccgagcagtgtgcactacagccagtatgcagtcttttatccctcacccttctcccaaccttctcccctgagtccccaaagtccattatatcattttttatgcttttgcatcctcgtagcttagcccccaattatgagtgagaacatacagtatttggttttccattcctgagttacttcacttagaataatggcctccagctctatccaagttgctgcaaaagacattatttcattcctttttctggctgagtagtattccatggtgtacataagccacattttctttatccactcattggttgatgggcacttaggttggttccatatctttgcaattgtgaattgtgctgcaataaacctgtgtgtgcaggtgtctttttcagataatgacttattttcctttgggtagatacccagtagtgggattgctggatcgaata

SEQ ID NO: 811143 - DNA, 565 bp, Homo sapiens
ctcttttaatgaaaaacaagaatttcattatagtgtgactttattttcaggagtatttggagtttaatcctttgagaaagcaactctctaatttcacaggctcaacctgttaaggaattctatctagcccacaaaacaaaacaaaacaaaacccttgccaatgggaactgaggcatattagaaataattatgttagaaattgttgacaggaatcattttcttttcctgttatattctcatggagtaaaaagtgtagaatcagttgtgggcggcccatatggccaaaaccccatctatctcattggccatttgatctgcaatttggcagtgaaaatggagattaagacttgagattttttttaaaaccaatttttacatgatgccaggaaagaaaagaacatttggcctgtttccggcaactcatctaacttacaaatgggatccccaaatakctcatcataatattgagagtgatcagcttttccatttctggatggaattgagaggtacagaaaaaaaaaacagtaaatagaatgatggtctcttccaaataaccaacatgaag

SEQ ID NO: 811144 - DNA, 600 bp, Homo sapiens
tcatgtgcacccaccagccaggatgacacggtctctctttactctgcgtccacaraatttcagtctgccacatcagcacatttgctaaaagaattaatgtgggatggaatggaatcgaaccaagtgctacagctcagggaggaaatgcctccttgaccgagtgtgctcatatgagactccacatcgcgggacacttaccagcatcgaggctgcccgtggccgctgtccagcccatgacaggcgggatggccccaaccacagctccgacccatgtgttggcaatgctgatccttttcagtggtgtgtagcagcaggtatacaggaaaatgttgaagagccccagggctcctgtgagtggattcacccccaaggtcagaatggcaactcccggaacagcacaacaagtggcaaaggacacagctagcaatgggctggaaaaagagcagagaacctggagtgatcatctccaactcaactcaatcacactacctaaaatcggcactgacaaagtacaaataatccacctatccagtagaggcagtactgatctggctgattcctggatatggggaatcctctttatgaaacaaacttataata

SEQ ID NO: 811145 - DNA, 625 bp, Homo sapiens
ttgggccagggtccctgatgttggggtggagtggagggcaatattagcttcagcatgtgcaaagaaggtggcttgggggttctgagtggttggggtgctactgtgggaggggggtcaccttcagagaaggggcaacaggaggtgggaagccctggtaaagattcaattccccaagtggcccagatgctctaaaaatggcttgcctcagggactgtccaccaccaaaaaaatctcagcactctctcttggtatttaatcaggtaaagccccaggatctgaagccccaggttcagatcctgccttgccattggcttgcaggatctatgaccttggcaaatggctttgccccttgcctcaatttctttttctgcagaatgtgacaggaatgttctctacttcctgggggtgtttaaaacattaaataatgattagctctaataactaatacattgaagcctgaggcccagggctcgatgcatgattgttaattcctcccaacaagatgggattgttgttatacccattgtatagatgaggaaattgaggcctgrcgcccctgagatacacacacacacagacacacacacacatcacgaggcatttgggaagtgactgtcatgagggt

SEQ ID NO: 811146 - DNA, 625 bp, Homo sapiens
ttgggccagggtccctgatgttggggtggagtggagggcaatattagcttcagcatgtgcaaagaaggtggcttgggggttctgagtggttggggtgctactgtgggaggggggtcaccttcagagaaggggcaacaggaggtgggaagccctggtaaagattcaattccccaagtggcccagatgctctaaaaatggcttgcctcagggactgtccaccaccaaaaaaatctcagcactctctcttggtatttaatcaggtaaagccccaggatctgaagccccaggttcagatcctgccttgccattggcttgcaggatctatgaccttggcaaatggctttgccccttgcctcaatttctttttctgcagaatgtgacaggaatgttctctacttcctgggggtgtttaaaacattaaataatgattagctctaataactaatacattgaagcctgaggcccagggctcgatgcatgattgttaattcctcccaacaagatgggattgttgttatacccattgtatagatgaggaaattgaggcctgamgcccctgagatacacacacacacagacacacacacacatcacgaggcatttgggaagtgactgtcatgagggt

SEQ ID NO: 811147 - DNA, 625 bp, Homo sapiens
ttgggccagggtccctgatgttggggtggagtggagggcaatattagcttcagcatgtgcaaagaaggtggcttgggggttctgagtggttggggtgctactgtgggaggggggtcaccttcagagaaggggcaacaggaggtgggaagccctggtaaagattcaattccccaagtggcccagatgctctaaaaatggcttgcctcagggactgtccaccaccaaaaaaatctcagcactctctcttggtatttaatcaggtaaagccccaggatctgaagccccaggttcagatcctgccttgccattggcttgcaggatctatgaccttggcaaatggctttgccccttgcctcaatttctttttctgcagaatgtgacaggaatgttctctacttcctgggggtgtttaaaacattaaataatgattagctctaataactaatacattgaagcctgaggcccagggctcgatgcatgattgttaattcctcccaacaagatgggattgttgttatacccattgtatagatgaggaaattgaggcctgacgcccctgagatacacacayacacagacacacacacacatcacgaggcatttgggaagtgactgtcatgagggt

SEQ ID NO: 811148 - DNA, 532 bp, Homo sapiens
gaatgcagtggcgtgatctcagctcactgcaacctctacttcctgatatcaaacaatcctcccacctcagcctcccaagcagctgggactacaggcatgcaccaccatgcctgcctaatttttttttttttttttttttttttgtagagacagagtttcaccatgttgcccaggctggtcttgaactcctgggctcaagtgatctgcccacctcagcctcccaaagtgctgggattacaggcctgagccactgtgcccggctcatcatttttatatggtagaggtttaagtcaggaatttagttagaagggattaatcaggagtcttctttctgggctacctttacctagcaaacatcctgtgtttacttagactagggttcctcaacctcagtagtacagacattttcagcaagataattctttgttctggtggttgtcctgtgcattgkggaatgtttagcagcatctctggcctctgcctgctagatgccaatagcacctctcccttcagatatgacaaccacaaatgt

SEQ ID NO: 811149 - DNA, 575 bp, Homo sapiens
tctaagagagtcatatactatataattgcaagggaaaagataaaacaatatgacttgaaattttgtgttgtggcctggcatcttggggtgggacttggccaggccagctatgagcaactgtcccagattgcatcatctctaagagttttcagagcctcaggtcatgtgtactctaaatggggctccatgcccagcactggcattcttgtggaagtttggagacatggcaccagctgcattcctgggttgcagagtaacacaggaggtagcttcatctcagggtatcatctctctactgtagatctggttatattctactgctacaaaaccatgaattcctttagaaaaaaggtgccggaagctggcagcggtggctcacacctgtaatttcagcactttgggaggctgaggcaggaggattgtttgagctcggtaattcarggctagtctgggcaacactgggagaccccatctgtacaaaaaattaaaaattagccaggcatggtggtgtgtgcctgtgtggtctcagctgctagggaggccgaggtgggagaatagcttaaacctacgaggtt

SEQ ID NO: 811150 - DNA, 575 bp, Homo sapiens
tctaagagagtcatatactatataattgcaagggaaaagataaaacaatatgacttgaaattttgtgttgtggcctggcatcttggggtgggacttggccaggccagctatgagcaactgtcccagattgcatcatctctaagagttttcagagcctcaggtcatgtgtactctaaatggggctccatgcccagcactggcattcttgtggaagtttggagacatggcaccagctgcattcctgggttgcagagtaacacaggaggtagcttcatctcagggtatcatctctctactgtagatctggttatattctactgctacaaaaccatgaattcctttagaaaaaaggtgccggaagctggcagcggtggctcacacctgtaatttcagcactttgggaggctgaggcaggaggattgtttgagctcggtaattcaaggctagyctgggcaacactgggagaccccatctgtacaaaaaattaaaaattagccaggcatggtggtgtgtgcctgtgtggtctcagctgctagggaggccgaggtgggagaatagcttaaacctacgaggtt

SEQ ID NO: 811151 - DNA, 575 bp, Homo sapiens
tctaagagagtcatatactatataattgcaagggaaaagataaaacaatatgacttgaaattttgtgttgtggcctggcatcttggggtgggacttggccaggccagctatgagcaactgtcccagattgcatcatctctaagagttttcagagcctcaggtcatgtgtactctaaatggggctccatgcccagcactggcattcttgtggaagtttggagacatggcaccagctgcattcctgggttgcagagtaacacaggaggtagcttcatctcagggtatcatctctctactgtagatctggttatattctactgctacaaaaccatgaattcctttagaaaaaaggtgccggaagctggcagcggtggctcacacctgtaatttcagcactttgggaggctgaggcaggaggattgtttgagctcggtaattcaaggctagtctgggcaacaytgggagaccccatctgtacaaaaaattaaaaattagccaggcatggtggtgtgtgcctgtgtggtctcagctgctagggaggccgaggtgggagaatagcttaaacctacgaggtt

SEQ ID NO: 811152 - DNA, 570 bp, Homo sapiens
atgctcatacctagcatggctttcagaccacaaattcttcttgcctggattackgtaacagtttcccactggtctccttcttctatccttgtcctcccagtatcccttcatacagcctcatacggcctccaaaacggcccttagagaagaaccttgtcacttctgtgttcaaaactctccactgtcttgccacctcactcagcatgaactccagagaacttataatgacccaccacacccaacatggctccttgttgcaacctatcccagttcatcccccacccctctcctcctcacttacagggagaagcagcctccagcctctgagcacctttgcacacaccatgttctttctctcgaacacgctcttccctatatattcatagcccacgctctcccttcatgccttcggggtcctgtttaaatgtcactttatccgaaagggtttctcttataagtctagcatcctaccccagccctgtctggccccatcactctctattgcctaacttggctttactattcttcataacacgcttaccactggacctggggctagtgttgcttgct

SEQ ID NO: 811153 - DNA, 633 bp, Homo sapiens
aactagctttttaagctccccaccctgccttcctgtcttttcacaagtgcttttgttttcaatttcacaaagacaattaaggctattagttctgaacacctctaaattccaacctcatacatataaacatcttggtgcttacagccatccttgccttcttctgtcaacactgaccataactcccaagagacaaccataggtgccatgtgacattcctctctcctcaccacaggagaagacgctagatccaggaataactaaaatggacattagctgttctgcctagcccatcccgtcaatatctcctcctttgaaaaactctttcttccctttccatctggttctactaagccagacaatttgataccccaattccaagtctatcagatgataaggagctcaggctgagtcattggttgattcatccaaaatacactacatcgccctgcacaagtgattggcccacaggattggcacaggatgtaaatgaggccaaacagagcccttctccagtagggttttgcastgatggtggagaagcgagtcttatgcctcatgtgtcactctgagatataaggatgtatctccagatctgccaatggccatataaaccacaccatgaagagcatgagg

SEQ ID NO: 811154 - DNA, 633 bp, Homo sapiens
aactagctttttaagctccccaccctgccttcctgtcttttcacaagtgcttttgttttcaatttcacaaagacaattaaggctattagttctgaacacctctaaattccaacctcatacatataaacatcttggtgcttacagccatccttgccttcttctgtcaacactgaccataactcccaagagacaaccataggtgccatgtgacattcctctctcctcaccacaggagaagacgctagatccaggaataactaaaatggacattagctgttctgcctagcccatcccgtcaatatctcctcctttgaaaaactctttcttccctttccatctggttctactaagccagacaatttgataccccaattccaagtctatcagatgataaggagctcaggctgagtcattggttgattcatccaaaatacactacatcgccctgcacaagtgattggcccacaggattggcacaggatgtaaatgaggccaaacagagcccttctccagtagggttttgcagtgatkgtggagaagcgagtcttatgcctcatgtgtcactctgagatataaggatgtatctccagatctgccaatggccatataaaccacaccatgaagagcatgagg

SEQ ID NO: 811155 - DNA, 633 bp, Homo sapiens
aactagctttttaagctccccaccctgccttcctgtcttttcacaagtgcttttgttttcaatttcacaaagacaattaaggctattagttctgaacacctctaaattccaacctcatacatataaacatcttggtgcttacagccatccttgccttcttctgtcaacactgaccataactcccaagagacaaccataggtgccatgtgacattcctctctcctcaccacaggagaagacgctagatccaggaataactaaaatggacattagctgttctgcctagcccatcccgtcaatatctcctcctttgaaaaactctttcttccctttccatctggttctactaagccagacaatttgataccccaattccaagtctatcagatgataaggagctcaggctgagtcattggttgattcatccaaaatacactacatcgccctgcacaagtgattggcccacaggattggcacaggatgtaaatgaggccaaacagagcccttctccagtagggttttgcagtgatggtggagaagcsagtcttatgcctcatgtgtcactctgagatataaggatgtatctccagatctgccaatggccatataaaccacaccatgaagagcatgagg

SEQ ID NO: 811156 - DNA, 683 bp, Homo sapiens
ggaggcttgtggacttgccctggacaggtcacccttctttgatcaggactgttgtaaatcagcttggcccttcctctctctgctagaaggtgaccaatcctcagggctcctcagctattgtcttactaacgagcctactttttgttatttttttctttgttattttatattagattcagaaagtatgtgtacaggtttgttacatgggtatattgcataatggtaaggtttgggcttctagtgaacacatcacataaatagtgaacattgtacccaatagagaattttttaaccctcacttctctcccaccttcctcacttttggggtccccagtgacatgctcttatacttagagaaacccaaaagattcctgcaaaagactcctagacctgataaacgactgcaatgaagcttcaggatacaaaattaacataaaaaatcaggtgcatttctatatactaacaacactaaagctgagaaccaagtgaagaactcaacctcatttacatggacatgaagatggaaataatgagcctgctttaatgtgatccaaatrttcatgggaaactctaaagcagttttgaagaatcttagtgattcaaagaacatggctcaaaaactactcttcttcaggacatattgttaacccagtaattgcctgagtgattaactatgagggata

SEQ ID NO: 811157 - DNA, 612 bp, Homo sapiens
agtgatgactgacatgtaagccactgtgcgataagaatgacaaattcagtcctgccctcatggagcttataatcaactggaggagtttggtgttaataaacaaaatgacccacgtgcakgtctgcttgccaggtattctaaggacaaacactaacgacccccacgcaccaccctgaggacacctagcagaggagcctgatcccaccttggggctcagggtggccaacaagagggaaggagcacttgatcgagttctgaaggatgagcaggggccagctcagcagagatgtgaagaaaggggacaacccatataaaggcccgggatggacatgaccaccaaagtcagcatggatggagcttaacatatttggttacatgatacagtttggcttgtgtccccacccaaatctcattttgaactgtagttcccataattcccatgtgctgtgggaggcaaccagtgggaagtaatttaatcatggaggcgggtcttgcccatgctgttctcgtgatagtgactaagtcacagatcatgagatctgatggttttataaagagcagttcccctgcacatgcctgctgccatgtaagatgtccctttgctcttccttc

SEQ ID NO: 811158 - DNA, 612 bp, Homo sapiens
agtgatgactgacatgtaagccactgtgcgataagaatgacaaattcagtcctgccctcatggagcttataatcaactggaggagtttggtgttaataaacaaaatgacccacgtgcatgtctgctkgccaggtattctaaggacaaacactaacgacccccacgcaccaccctgaggacacctagcagaggagcctgatcccaccttggggctcagggtggccaacaagagggaaggagcacttgatcgagttctgaaggatgagcaggggccagctcagcagagatgtgaagaaaggggacaacccatataaaggcccgggatggacatgaccaccaaagtcagcatggatggagcttaacatatttggttacatgatacagtttggcttgtgtccccacccaaatctcattttgaactgtagttcccataattcccatgtgctgtgggaggcaaccagtgggaagtaatttaatcatggaggcgggtcttgcccatgctgttctcgtgatagtgactaagtcacagatcatgagatctgatggttttataaagagcagttcccctgcacatgcctgctgccatgtaagatgtccctttgctcttccttc

SEQ ID NO: 811159 - DNA, 612 bp, Homo sapiens
attcctgagcctacatcattactccacccgaagaatcaattatcaaagatgaatgtactctacaaaccaaggggaaggggagtgaaaagtctccctctctctgtagaaaaattgcttagtgattagattctgtttcacccaaagaataacagcttcttgaaagatacatgtcaatacagaacaattttactttctgtgcctggttatattgattcaaaagcggtggtggtggcagtggcagtgggggtgggcaggtggaaggtgaggaagactatcttcttgccttgggcaaaacccagaagtaggcaaaggagagagatttggagtcatttagccatgacagagtgagaccaaatagactataaatatcaccttaaagcaaaaccaccctggggcaagaaaggctcctgcctgggactccacgctttagagggctctgctctagctcctcctcctcacagggcaaggggtccaaggtagcaggagatgtgtcctagcagagccgtacttctcccttctagagcagygctgttccacagaaatgttatgggagccacaaatggaagctacacatagaactttaaacttgttagtagctatattagaaaaaaa

SEQ ID NO: 811160 - DNA, 612 bp, Homo sapiens
atctgtgtgtttttcttttctttttttttttttaagacagagtctcactctgtaacccaggctggagtgcagagtgcagtggtgcaatctcagctcactgcaacctccacctcccaggttcaagcaattctccctccctcagcctcccaagtagctaggattacaggtgcgtgccaccgcactcagctaattttttttgtattttttagtagagatggggtttcaccatgttggccaggctggtcttgaactcctaatctcaagtgatccacctgcctcggcctccaaaagtgctgggattacaggcgtgagccactgcacccggccctcctcattatttttaaggttcccttcttagctgggaaaaacaaaagcaaaatcttctgaaacaaagcaaaactatctcgtccccactgatactttttatgcaataaagtcaacaaccaaatacattaatgtagacaatgcaccagcatttcctatcttttcatttcaattatggcatttgcatgacattgaaatackgttttccactttcatggtgatgacattcatttttatatttgctgctgcacagcaaaactctatgtgtacagtacataacaggctgat

SEQ ID NO: 811161 - DNA, 610 bp, Homo sapiens
ataggtggcaggcatgcagtgagtatgttttaattttccattgtgcttttattccctgaatgctttccatgtgccrgtcactgttgtgggcacaaggaattgaagggtgaaccagtcaagattcttgttctctttatgaaaattaattctaatcaggacagccataaacacacaagtgaatagaataatttcagagaatggtaaatgcagtgatgataataaaaggtgcaatgagacagtgtccttcgaggtggggctggactactttagattgggtggccagggaagactgttcggtgaacaatgagaacatgtaagctttgcgaagacctagagcaggaacgttcttgacaggggaaatggcatatgccaaggtcttgcagagggaatgagcttggagtgactgaggagcagaaagaaggccagggtgactagaatatagtgaacaaagggcagaaaggcatgatgaggaggggaacataggcaggggctagagcatggagagccccctactgcaggataaaaagtgtggatgttgttctaagagcaacgggaaacgacggggggatttttaagcaggagaatgatctggtctgattgaagccttcac

SEQ ID NO: 811162 - DNA, 636 bp, Homo sapiens
attactgaattagaaatttttttaaaagtagctaaattaaaaagtttccaggtcaaacataagtgwgtggataattaggtagggagtttagatgactgaaaataggtcaaattcaatgtgaacacaaagatttgaacttcatataggactacgtatcccaaagggcacaattgtgtgaggtgataggtctagtaaaagactcaataactaagttgaattgctctaaagactcgttttgtaataataaaaagaactgaccttgatttatgttactaagcgtataatgtggtaatgtctcctctctaagaaacaaatgaaaggccaaagttctgagatctccctcccttatgattcagctcttttacagaggaaataaaaagaattgaaagtaggaggagagtgcctagtgtttaagcacatggaggaatcagcctaagtaatgttctttttgcctttgctggctccaaaagagtctgtagagattgtagatgtctcctgtctaggagtttcctcaccttgattttgctccacctcagaacgtttccaataatcgcaaacccaagtcagtttcaaatggctttacatgaatcagaaagtgaatgactgatatatacatgtgaggtagatacatgtata

SEQ ID NO: 811163 - DNA, 636 bp, Homo sapiens
attactgaattagaaatttttttaaaagtagctaaattaaaaagtttccaggtcaaacataagtgtgtggataattaggtagggagtttagatgactgaaaataggtcaaattcaatstgaacacaaagatttgaacttcatataggactacgtatcccaaagggcacaattgtgtgaggtgataggtctagtaaaagactcaataactaagttgaattgctctaaagactcgttttgtaataataaaaagaactgaccttgatttatgttactaagcgtataatgtggtaatgtctcctctctaagaaacaaatgaaaggccaaagttctgagatctccctcccttatgattcagctcttttacagaggaaataaaaagaattgaaagtaggaggagagtgcctagtgtttaagcacatggaggaatcagcctaagtaatgttctttttgcctttgctggctccaaaagagtctgtagagattgtagatgtctcctgtctaggagtttcctcaccttgattttgctccacctcagaacgtttccaataatcgcaaacccaagtcagtttcaaatggctttacatgaatcagaaagtgaatgactgatatatacatgtgaggtagatacatgtata

SEQ ID NO: 811164 - DNA, 583 bp, Homo sapiens
gatgcaaaaacttttgggaagtgactttgttctacaattaattgtagtcatgaccaagattcccatggtcctaatctctgtgttgttgtgttgtttttgagacagggtcttgctctgtcacygaggctggagtgcagtggcatgatcatggctcactgaagctttgaactcctgggctcaagccatccccccacctcagcctgcctaatagctgggactataggtgtgtatcaccacacctggctattttctttttttttgagacggagtttcgctcttgttgcccaggctggagtgcaatggtacgatcacggctcaccacaacctccacctcctaggttcaagcaattctcttgcctcagcctcctgagtggctgggattacaggcatgtgccatcacacccagctaattttgtatttttagtagagacggcgtttctccatgttggtcaggctggtcttgaactcctgacctcaggtgatgcgcccacctcggcctcccaaagtgctgggattacagggttgagccaccacacccggcccacacctggctattatttttataattttctagaaatgaggt

SEQ ID NO: 811165 - DNA, 655 bp, Homo sapiens
tatttaatcagtctacgaaactaacaaaatacttattatatactaattgctgtgtgtgataggtactgggtacataatgataaatgaagtacatgtgattcctgccctttacaatctgcctatattctaaaacaaagattgatcaacttcagcccagggccaaatccaagcttagaatggttttgatatttttaaggggtcatttaaaagaaagagaaaacaacaaagaagaatatgcaacagagaatgtgtatggctctcaaaccctaaaatatttactgtctggttcctaacagaataagtaggccaaccctttggctagagaaaaaataaactttaaacaataaacagtcacatgttgcataactatggggatacattctgtgacatgcgctgttaagaaatttcgttgtgcaaacatcatagaatgtacttacacaaacctagatggtacagcctgctacacattttggctatataatatagcctattgctcctaggttaaacacacctgtacagcatgttatagtactgaataatgtcactaacggtaatacaatggtaggtatctgtgtatctgaacacatctaaacacagaaayggtacagtaaaaatatggcaaaaagataaaaaatggtatatctatatagggcac

SEQ ID NO: 811166 - DNA, 620 bp, Homo sapiens
gggctgcctaagtctattgtgcaggattagactgagtccccttctgtctcaggaggttgttgaagttggggcattcttgtgtgctgtcctgtggggccctaggtgctgctgtcctctttgtttggtctgacgggagaatgggagggcaggaaggaaggtcctgtgccagggcttctggaccttgttttcaggtgcattatgctgttggtgcactgggcaccttgctgggctttgagggatgatttgcccactcagccttgtacctgcacacctgtcccagcacttggcctggggtcccccacaccaagtgctaggaagggatgttggatttgaggtataagaatgtagatgagtcagggacagacacttccagggagcttcccttgactggtcaggaaatgccccttctccatttgcatatttgcacatttgcacattttaattcgcagatatgtacatgtgcagtgtagcagctcaccagacacccagggctcttgggcacagtgattttgggtgtgcttagagttttggtggaagggsttctggctaagaaaaaagtcttgtatacttggtgaagttttcagtgatgtttgcagaaagtttaaattaacaaccttttt

SEQ ID NO: 811167 - DNA, 656 bp, Homo sapiens
tgctatatacaagtggagttaaggtatactaaatacaagtatagtatttctcacaggacatcattcattcaggaaatatacaataataggggttcacttataacaacaattctagttctgcccataaattccaagcttactaaataattcaatggtatttgtaataaagatattatctgcattttcatatcaaaataatcaaataagttaagctgtatccttttaagagattttattaacttcccataaaaatgttcagaaggtattatgcagctacttccctactcatgacttttctcccaagtttcagttcatttccaatggcataccatacaatttcactaggattatctatcaccaccctaccattcgatactgggccaagctcactgagtttggcatttggcccttggctagatttgactccagataatctttaaactcttttaaccacagcgcctatcttctaaatgcttctgttcttgtctttcttatccctgtttatgacattattattcttctagtcaactagttgcaaaaatctgtcaccttttaccttttccatatttaaccacattaacctgaaagcagtggacaaaattaattggaccatggagacacyagagccgcaaaatgaatttaaatgatttagggca

SEQ ID NO: 811168 - DNA, 584 bp, Homo sapiens
aagacattcatttgtaaataccactggtaacagacttgtatggtttgtgttgtataattagtgtgaaagaaagaaaggaattccatgaattgcctrtatttcactgcttgggcaccgaatcaactgaggtcaggtaataataagcagtcttgctaccagccttattcattgaatcatctcttaggttgccaagacaatgctcttctttatgccacatggaggcctagcctctgtgattgtaggaactcctgccaactcagctcttggcttggtgacccgagggttctcaggccacatcctcagagacagccggtgccacggacacatccgttgtcttgttgccacacgatagctattgaaaaccccaaagtggagactcactgcagaacctctattcagtccacacagagccccagggagaacagggctgacgtcagcctgggaggtgagaagcccgaacccagagaaggcaggctgtgttccaggacatgacagtttctgtggagagaagatatatgtccttctctctgctagagcatggctaaagctggaggggcagtgaagctgagccctctaaggagttc

SEQ ID NO: 811169 - DNA, 577 bp, Homo sapiens
cccttttgttggaacctttgaccaaaacaaagtcataaaaccaccactaccccacatgtctttgggaactagtctatgttagccctgcaagtctgaaagcttagctttgttttgttttgtttttatttttwaattttttttttcctacagcgtcactctcaggatatgacagcatcacttttgaaaaacaggttgttgtttttttttttaaaaaggtaagaagacaacaaggagtcggcctcacacactatggattagatttcttaatcaagtgttcaccttccacctctcgtggtcctaccatatcacccttttctcttgtgtttttccagatttaactgcctgatcaaatagttttacaagaataaactcaggaaacaggttgagaaatgagcagctgagactggagtgttcactttgcaaagaacatactacgaaaagatctgcactctaggaggtctcagctgatgaggaagatgctagcacagtgtcctatggtcagaaaagatgacctggcaagagggggagtggaggagaggcaggaaaggggatcccttcatgctgaaatcaatgcaat

SEQ ID NO: 811170 - DNA, 545 bp, Homo sapiens
acatttttacttgacaaaccttttaatttttaaaattttctgactgttataataatacttagcctgaaatacaaatgaattgtctaagtgtacaaaaatattttctctctttatttttattttatgagctcatttctatttttaattcttttaacttttcaaaattttttatcaaaaactaagactcaaacacacattagcctaggcctacagagggtcaggatcatcaacatcactgtctttcccctccatatcttctcccactggaaggtcttcaggggcaataacatgcaagaactgtcatctgtgataacaatgccttcttttggaataccccctgaaggacacacctgatgctgttttacagttaatttttttatattagtagaaggagtacactacaaaataatgatcgaaagtatagtaaatacatargccggtaacatagtcatttattttcattatcaaggactatttactatacacgattgtatgtgctagatttttatatgactgtcagcatagtaggtttgtttgcaccagaa

SEQ ID NO: 811171 - DNA, 564 bp, Homo sapiens
caagagattagtaggagaagggatcattgatgatcccttgaagccagggtcttaatgaaatttggaatgggaagsagctcagttattaaaaaaaaaaaaaaaaagatacccttgctggcacaaggacgaagggtaagttatcacttccctttttctagtgttaagtaaattacatttaacaaagatgactcttgtcaattttgtatcactttgactcttacgtacttatgcagtaagtttcttagcagcactgcttgctataacttaaactagagagttaatagcagaaatgcagctgtatctgaaatatgctacaactactcctctcaggaaggatttggaggagtaacttttaaatgcttggctcaacatcttaaagacaagtttctgttaaggtgagaagacaacagtatagaatgaaaagcttacacagctggattctaaggctgactccccaattaactaattatgtgactttaaaccaatcacttactttctccaactctctccagggttctttgtttttaatgaaatgggctggtgggtgaattggactctttcaag

SEQ ID NO: 811172 - DNA, 605 bp, Homo sapiens
gagagactagaaaaattgtggagtttctagccatggtaaaacaaaacaaaacaaaaacccagagggtatgataagcagaaatcagaaaaagaggtagagggtcaggtttaaggaacawtgaaaggccttttcctaaaatgtttttttatggtggggcaaaatgagttactcctagcagctttgagagcatgctaaacctggttgcttcttaacactcacctactgcttctgtattcctgctggcactcccttttgcctcttacagcatttaagtagcatgataccccatccctcctacttttgaactctcctcctttgcctataaaaacctaaatcagactacatgtttcgaaatgagcatgaaaaaccatttcattgacttagagaatggattctctgaggtcctaataagaaactttaccacccaggtcgggcacagtagctcacacctgtaatcccagcattttgggaggctgaggtgggtggatcacttaagatcaggagttcgagaccagcctgggcaacatggcaaagccccttctctactaaaaaaaaaaaaaaaaggaaaagaaaaaaaaaaaaacaaatgaaaagaaagaaaaaag

SEQ ID NO: 811173 - DNA, 270 bp, Homo sapiens
tagccaggtgtggcggcacaagcctgtaatccctgctactcaggatgctcaggcagagaatcacttgaacctgggaggcagaggctgcagtgagccgagatcgtgccactgcactcaagcctaggygacagggcaagactctatcttaaaaaataaataaataaaaagttgtacacagactggctaagccctgaaggactgctccagtgccccagcacagtggcaatccacaaagagggaaagagctgggtttttctttttttttctcgt

SEQ ID NO: 811174 - DNA, 270 bp, Homo sapiens
tagccaggtgtggcggcacaagcctgtaatccctgctactcaggatgctcaggcagagaatcacttgaacctgggaggcagaggctgcagtgagccgagatcgtgccactgcactcaagcctaggtgacagggcaagactctatcttaaaaaataaataaataaaaagttgtacacagactggctaagccctgaaggactgctccagtgccccagcacagtggcaatccacaaagasggaaagagctgggtttttctttttttttctcgt

SEQ ID NO: 811175 - DNA, 633 bp, Homo sapiens
ctggatttctgaggttgaaaagaatctgtgtataagtggaccctctaatgtcaaacccagttgttcaagggtcagcggtaatccgatatgctacatggcttcacttaaactacatgaagctatataagtttacttagaaaagacaagacggtcagttagctgtgtctcggatgctgtgtctcggatatcatgggcactggtgatgcactcttggggggttttctattctcttctctatgctcatatgtttataagaatatgtcacagcccccgagacagagaggaacatcaaaccagaaaacagtcaccccctactccgccccccaccacccctgagcctctggagggacaatagctcctgctcctcccagccctgtctcagaggcatggggctgtctggggctcagcagctacaggcgcattcaggaggaagaggacgtcttaccctggcccccctcagctgggtcctggccctgccacgggtccaaggttctctccccacacccactctcattgccgacrtccaggcagctggccaggtctgggagctgtaatgagctgttgtacgcaaggtccatgtagctgtagaaaccaggaatcaggaaagtgatattctagaaaacaaagcaggga

SEQ ID NO: 811176 - DNA, 643 bp, Homo sapiens
tgattaaaatgtcttatgaatgaatacaagaatctcctgtaagccttcatgctgagtgactccgcacatcatgagatttggggtgggcgctcttgtagacttgtattgggtgttgtctgtgctcctcagcgtgagccacagatcagcagcattgacatagcttgttagaaatgcaaaatcttgggccccaccatagcccagatgaaaactgagtcaaaatctttgctttacaagactccgggtgattgcagtacacacaaaggttggagaagccctgatctaggtatgggtagaacctacaattgtcatttgaccaaatggtttgcaaacctcagcagagaggcagacgcattccctacagatatattccagcacaacagaaggaaatgttggatgggtttctgcagttagtcatcttggaatttgccttgtatttgtcttgtcacaggtatggtttcaggagtagtgttgtggagtcagcaggaagagaaacagaatataagaagtttttgcarttcctctaaaggggttgggaaatgatccccgagtggaagtcttcagtgctaggattcccttagagaaatctcctaaggtttattgcctttccgctagcacgtggccctgcagagactgcggcacaggt

SEQ ID NO: 811177 - DNA, 627 bp, Homo sapiens
tcccaaagtgctggcttctttcattttttagaaccccatcctctccaggagaccccatccagtcactctgcttcctcctcctgtcctctcccaggaagttctctcctcacctgtgagcaggagccccttccatttgatgcgctgtgtgcagggaggggctgagagggttcccatggtctctgctgcttgtgtgttctcctctgtggagataagcctaggatccagaaactctctgagcacggctgtcagctgtgctgtccttcctctttctgtgctgagcctcttcccagggcaggagcaattctcaagctcatgggcagggtcaggcccaggacacctctctgtcccctcctctctaagtcctgcctccttgtccctccttctgtttctccttttgtctgtgtttcaggtccctgggaattgtggcggcctctgcctttttcagcagtgattctttcaccaaacctcaagacacactttgtgcagacacacagacacacacacacacacacacacacacacacacagaagagatacacacagacccacacagtcagacacataccctgcaggttgggcaagmacagtcctgggcctcagcctcctggtgtccccatggctctgggt

SEQ ID NO: 811178 - DNA, 562 bp, Homo sapiens
agtgctaaatcgtggtagtaatataattcacagcaytctgcgtggatcaccggctattttggggtcccaatcccctttatgtaggacttgaaataatgtacggactatggagagaaaaaaaaggaacaaaggcaagcaatgcttaaggaaagaagatagaatacagggaggagtaaactcatttctgtttaattcacttagagaagagcattgattcattttgaacccaggattaaaatgacttgtataaatttccattatactgtctggattttgaaactatggatacggcattggggactaaacctgttgggctaaatgatactttgatcaggtagatgttcagattgcttctgaaaaaaaatttaaataatatgtgcattgtcttttagtctaagggaactgcttaaattatgtgtacttagctcatgttttactgacatgttgaagctgtttagccttacagctttacagattgttctacttttcaaaaatactgagagttgccagtgtctattttgaatgtttcatattttagtgcataataaatatgtgtgtaatg

SEQ ID NO: 811179 - DNA, 578 bp, Homo sapiens
ggagatctggctcccatttgcagctttgcctcaaattaagtgacttggcttaaattattttacctctcctagactcaagcttcccatctataaaagagtgtatgatccagcaatcctgctgttaagaatatatccaaaagaaaggaaatcagcatattgaagagatgttgacacacgtactcatgtttatagtggccctattcacaagagccaaaatatggaaccaaactacctgtccatcaattgatgaatgaataaagaaaatgtggcctatacacaaaatggaatactattcagccatgaaaaagcaggaaatcctgtgacaggaaacaacatggatgaaaccagagataattatgttaaatgaaataacccaggcacagaaagacaaatattgcttgttctcactcatatgtgagagccaaaaaggcagatttaaaagaggcagagagtaaaatagtggttaccaaagcttgggaagggaggagasaggggaacgaagttagttaatgggtacaaatgtacaggttgagagaaggaatatgctctagtatttgagagtatagttgggaaattat

SEQ ID NO: 811180 - DNA, 621 bp, Homo sapiens
actggctgatttatttttttttttggtctttctgtagaggcaggtttttgccatgttgcccaggtgggtctcaaactcctgagctcaagcgatctacctgcctcagcctcgctaagagctgggatcataggcatgagccactgcacccggccctatgaaaagtcttaatcttacccatttggaaagtattccgtcactccttgttccctgttgtcactacttgtattatttttattttctccctttttctacataaaccatagtaccctataaacactgttctacctcttgcttttttttttttctttttctttttttggtatgtattcaggagatttttcaatattagcgcagagaaatctttctcattctttttaactgatgcatagtattctaagttaagagtttacttagccaggctcctatgagggttgcctccagtctttgctattacaaattattctgtagtggacaatcttacatgtctggagttaaaagcttgaggaggtctgactttgatgtctgcactccacttcaagtgaattaaatcagaaattcttagggtgggtcctaggcakccttattttatttatttatttacttttagatgaagtctcactc

SEQ ID NO: 811181 - DNA, 551 bp, Homo sapiens
cacgccgtgttttaatccaaggagagaggcatttctatcccctgcgtattttcagtgcctgtctcagtgcatgggacaaagcagagttccaaraacgtttgcagaaccaactttcttgtttaattgactttcaaatgtaaataactgtgggaccgggcttgtgttttaaaccttcacttgccatctatcctgcggcagagatgtttgaatgaatgtttggaagacaggttttatatcagggagaaggagatagtgtgtaatcactgggttctgggaatgagggtaaaatgaggagttagaaaaagtacggaccagggagacaatagcaccaaagacaaatatcgagttattttacagtttgcaccaagaccatcctgcccccagggccatggcacccatcagagaggcctctccctatggccgagccagcaccctggaggaaatcagaccacgtccttcccttcctgggtatttgttcataatctgtttcccctgttgatagatgtttcctgtctcttcctttctggctttaatctcatgactggtcattt

SEQ ID NO: 811182 - DNA, 461 bp, Homo sapiens
aaaataaccattatttcttgaacacctcatattttcttgactctgcacttttagagaaccgaagaacaaagtacaacttaatttctggattaggggaatatagccaataaatcatgaaatcttcaaaaggaacatttggcatcaacttgtcagtacttttgctcgtgtaacaggtcagaataactaggaagtctttttgcagaccaatcatctagttcatgctttgttttagctaaatggcaaataggttaattccaatagaatgcctaaaattctcttagcaattagtattgggattatttacatttaaaatattcatttaaaatttaatttccttaccattttctgttttgatcacatrgccacccttgacatctgtctttcacagtggtctacactttatgctcagagaatgcaaattcattttaataccagctttagccacatataaagatgaatca

SEQ ID NO: 811183 - DNA, 653 bp, Homo sapiens
tgaatctaatcatgagggaacaatcagatattataagaatgcgagaccttctgaaaacacttccaaaaccgccaatgtcacagaaaacaaaaagaatgatcaagccctgtatatattaaaataatgtaacaattaaaatcaatgtggaatcttttttttttttttttttttgagacggagtctcgctctgtcacccaggctggagtgcagtggcgcgatctcggctcactgcaagctccgcctcccgggttcccgccattctcctgcctcagcctcctgagtagctggtatggaatcttaatgtgaccctggattgacagctaaaagatagtttttttgacatatgggaaatctgagtatgaactatgtattagataatacagattgagtattcctcatccaaaaagcttggaacctgagtgtttcgattttggattttttcaaattttggaatatttgcatatacataataatatatcttggggatgggacccaagtctaaacgtgaaatttatttatgtttcatatacaactatatacatagcctgaaggtaattttatattatattttaaataaatytgtgcatgaaacaaagtttgtgtacactgaagcaccaaaaagcaaaagtgtcactatctcagccacccaggta

SEQ ID NO: 811184 - DNA, 541 bp, Homo sapiens
gtttttatactcacagatctgtagaagcagggggcactggatgccatgtagggccacacagggaagcaccaggtgggtcaggaggcagagggagagggggaagtataagtaagggcctttactggggtttccacagaaggaacaggtgaggcagggtgagcagggttacgatcggctagtttgcatgatttcagcaggctctggggcatggggctgtccctagttgtctgggacctggccctggggggattaagggcaggtggagtgtggcccagagtgtaagcgcccaatagaggaggtggctggggatggaggctctggattggttggttcgcatttgaaagacatgctcaacctgactcatttactgtatctaggaatgagctaaccttgggaggggcagtcccaagggtcagcaaagtcccaagaagccagagcagccaaatgcagaaaaagacacaattaataaagccaatctcmttatctcatagtgagctctggggggccaggggtgggggtggaggggttctggttgttgttg

SEQ ID NO: 811185 - DNA, 622 bp, Homo sapiens
gcggtgaacgtgagtgggcagaccatcagctgtcttttttttttttttgtgatggagtctcgctctgttgcgaggctggaatgtagtggcgcaatctcagctcactgcaacttccgcctcctgggttcaagcgattctcctgcctcagcctcactagtagctgggactacaggtgcgcaccacccatgcccagctaaatgtttttacatttttagtagagatgggatttcaccacgttggccaggatggtctcaatctcttgacctcatgatccacccacctcggcctcccaaagtgctgggattacaggtgtgagccaccgcgcccagcccatcaactgtctttcttacccactctaccagccatctcagtagatagtcctttcaaaatctattaatggatggttccaacgttcccaatgttaactttccaagaaatcttcagctttgggattttctttgtctttaacattgttttactgggaggaggagaggggccataacaggccctgccagctaggagtcagttaaaccacaagttgttctttctcctggctctrttttcctgccttttattttttccctgtccaaggatcagcaggttgcctctcccaggccacacc

SEQ ID NO: 811186 - DNA, 622 bp, Homo sapiens
gcggtgaacgtgagtgggcagaccatcagctgtcttttttttttttttgtgatggagtctcgctctgttgcgaggctggaatgtagtggcgcaatctcagctcactgcaacttccgcctcctgggttcaagcgattctcctgcctcagcctcactagtagctgggactacaggtgcgcaccacccatgcccagctaaatgtttttacatttttagtagagatgggatttcaccacgttggccaggatggtctcaatctcttgacctcatgatccacccacctcggcctcccaaagtgctgggattacaggtgtgagccaccgcgcccagcccatcaactgtctttcttacccactctaccagccatctcagtagatagtcctttcaaaatctattaatggatggttccaacgttcccaatgttaactttccaagaaatcttcagctttgggattttctttgtctttaacattgttttactgggaggaggagaggggccataacaggccctgccagctaggagtcagttaaaccacaagttgttctttctcctggctctattttcctgccttttaytttttccctgtccaaggatcagcaggttgcctctcccaggccacacc

SEQ ID NO: 811187 - DNA, 598 bp, Homo sapiens
ttctagcttctggagttaaatctttaatatatttaatttttaaaagcttacatttttataagyagtaaggttatgatttttcccctgagcactgtttaagttataaccaacaggttttgatggcagatgtctttattgctgttaacttctatgatctatacttttagtttgggtgactcttagacccaagagctgtttagaacttttttcaacttttattttaggtacaggtacatgtgtagatttgttacaagaaaacattgtgtgatgctgagtttggagtacagatccatttaccttgatagtgagcatagcacctgataaatatctttttaacccccctcccatgctatagtagtctatagtgtctgttcttcccatatttatgtctatgagtgcttaatgcttagctcctacttttaagtgagaatacgtggtatttggttttctcttcctgtgttggtttgttcaggataatggcctccagctctactcatgttgttgcaaaggacaagatctatttggtttttatggctgcaccatattccatggtttatatgtaccacattttctttatccagtctaccattgataggca

SEQ ID NO: 811188 - DNA, 587 bp, Homo sapiens
cctcatagaatgagttaaggaggatccctcctcctcaactttttggaacagtttcactaagaacaggrctaggtcttttttatacatctggtagaatttggctgtgaatttgtctggtcctggcctttttctggtttgtagactttttattactgatgcaattttggaactcattattggtttgttcagtgattcaatttcttcctggtttaatcttgggagtatccaggaatttttccatttcttctagattttctagtttgtgggtgtagtctcttagggtttttggtatttctgaggggttagtggtaatgtctcccttgtcatttctgatgtgtctatttagatcttctctctttttttctttatcagtctagctagtagtctgtcgatcttatttattctttaagaaaacaaactcctggattcattgatattttgtatttttttttgcatgtcaattttcttcagttcagctttgattttggttatttcttatcttctgctaactttggcattgctttgctcttgtttctctagttcttctaggtgtgatgttaggttgttaatatgagatctttctttct

SEQ ID NO: 811189 - DNA, 586 bp, Homo sapiens
cagtttttcatcttcataactctgactgtaaagataatatgactgttctagatacaacagtggttgtccatgaacyaatgctccaaaaagcacttccctatagatatgaatcacaagccaattgcttcaaatatgaggagtgtggtaaaacaaatgcataaactctgcatttctgatgctatttttaaaagtaatttatcacttgtgttttgttacctgaaacttagtttatataccatgccaccatgggtttattgatttggtctttttctcacattaaatggaatatgtgatattcaagatacacacacacatacacacacaaacacacacacacacacttttcttcaatgaacagcttagaactagaggaacaaaattagttaattaaagaataccatatgtaaaaatcaactcgttagattaaaggcttaaatgtaaaacctgaaactatcaaaaccctggaagataacctaggaaataccactgtggacataggccctggcaaagatttcacgacaaagatgccaaaagcaattgcaacagaaacaaaaattgacaaataggacctaattaaactaaagag

SEQ ID NO: 811190 - DNA, 542 bp, Homo sapiens
ttggttcagatgaaggagaaactacctttaaaatgtatgatattttgaaagtaagctgcytgtgctgtttgggactcagccacttgttatcagtattacctcgagcaaggttctccacctctgtaaactctagttttcttatctgtaaaatgggaacaatagtagtagcatcttcatagggctaatgtgaggaacaaatgggataattcatataacatacttaagacaatgtctggcacattttaaatactcaacaaggattattgtatgttaagtactattgcctcgaagagcagaaatgatttttttaatgaagtcttgccataaatattaactgagcacttactatgtgccaaacactattctagatgcttgagctatatctctgaataacacagactaagattcctgccttcatggaactaatattttaatagggagaggcagataataaataaaaaataaaaagttatatagtatgctataaagggttaaatcttattaattgaccataaatcagactgttagaacctatgcacaag

SEQ ID NO: 811191 - DNA, 665 bp, Homo sapiens
ttcttaagaattcattctgagaaggtcattatacattgaagatgaaatgtgattttttttttcaaagaaaaatgagcccataggggaaaaaacaacaatgaggactgaggtaagcttttctttcattgtctcctctccctttattttatcttttaccgagatttaactaggcacctttgcgagccattctccttgctttggttgatggctaatggaaaggaatccactgccatgattttctctgacaactccaaatggcttctgacactttcccgttcacgtaagtgtggacctctcccctccttacacacccatcaccatggctacctttcaatcagcccttcttcattaatattagcaggggaaaccgtttgtgtaatttgtgtccctataatagccggatagaggtaaatcatgcagttacatgtgttttcatcacaggcttctccccatcccaagttatagctgttagcttcccaaaggaggaaagtggaaaaaaaaaaaaaaaaggaacagatgaagaatttcatagatgaaattktatctgaagaccaggtgtatttatgtctctttagccatcataatgtgatccgaggctatgatgttcaaaatattgtcgagctgagtgcatatttctgaaaaagagcagatttagctatcttcat

SEQ ID NO: 811192 - DNA, 616 bp, Homo sapiens
atggctactcttcgctgacatgttcatggcacattttattatctcagtgctatttaaaaaataagagattggactgggcataatggtggctcactcctatgattccaacattttgggaggccaaggtgggaggatcacttgaggctgggagtttgaaaccagcctgggcaacgagtgagaccgactctacaaaaaaatgaagaaattagctgcgtgtggtggtatgcctctagtcctagctattgaagaggctgaggtgggaggatcacttgaacctaggagtttgaggttgcagtgagctataattgtgccattgcactccagcctgggtgaaagagcaagaccctgtctcttaaaaaatgtaaagagaaataagagagaaaaactttcatatattaacatttttctgtttatagatgtagtaaattctcaaattaaagaatctgtctgcttatagaataagtcaaattagttttttttctgtttttattacttagagatattttaaagactrtttttatactaaatgctatcaccatactggaactccgaatattatttactattcggtttggagccagtgaaaaggaagtagtctatagctatttctgtagta

SEQ ID NO: 811193 - DNA, 529 bp, Homo sapiens
ggtactcttatcctttgtttggctatcctataaaagcacatgcattatcgagaagcattaatgaaatttctatttgtcatagtactgtagaaactgcagacactggtagctcctagaaatttaaaaagcacaaactagaaatatgaataatattttggaggaactgagccactagatgacaatatttagaatattctcatatgtcttctgaaggtatacaaattaccttttcatgaccatcattattgccacctttccccttgttcaacagtaaaatttaaaaaatctggtgtgcagtataattttaaaaacaaaatctgacaagaagtataatgctataactttttatggtagaattggtaagactgcaaagccattttaaattgaatataacaggtaagtaatcatttaaacagaaaagtggtattttctaatayataaatgaaatcatcaccattgatcatcaatttgttcattcctgaaaagaaattgaaattaggaaaatgggcaaaatccaaaaaggtacaca

SEQ ID NO: 811194 - DNA, 607 bp, Homo sapiens
ccaaaaaattagaaaccattcatagtaatgcaatttaggcatgattgctctaataatttactatatatattccagtaatttttctaacatgyatatgatgtatagtctacaaaaatgtagaatagtgatgtatatataatattgcagaacaaaaattttctcttatgtactctgggtatttcctttatgtcggaaatgtttttaaaaatatgatggcaatggcattacagtattctatcatgtagacatactgtaattgatttaattcatattttatcatgtctttattggttgagaaaatactttttgaaagaagtacaatagcaagaaatattaaactattaaaagatgttggcttgcgtggtgtcgatacaatgtaagaaaatatatagttctgcaatgagaatgatgcatagatttacttgcctttttttagggaatggagagctgtgtggtatcattggaaatttttctgttaccaaatactgaggctgaattcttagcagagcagattacatggaactgtgctaagttgagaataaagcttcagtgatttgcctcatagtgatatgaactttgtaccatctaatttttgaatattaaaagc

SEQ ID NO: 811195 - DNA, 615 bp, Homo sapiens
gcatgagatagtatctcattgtggttttgatttgcatttctctgatgatcagtgatgttgagattttttcacatgttcgctggctatgtaaacgtcttcttttgagaagygtctgttcatatcctttgcccactttttgatagggttgtctttttcttgtaaatatgtttaagttccctgtaaattctggatattagacctttgtcagatgggtagattgcaaaaattttctcccattctgtaagttgcctgttcactctgatagtttcttttgctgtgcagaagctctttagtttaattagatcccatttgtcaattttggcttttgttgcaattgcttttggcgtttttgtcatgaagtctttgctcatgcctacgtcctgaatgaaactgcctaggttttcttctagggtttttatggtgtgaggttttacatttaagtctttaatccatcttgaattaatttttgtataaggtgtaaggaaggggtccagtttcaattttctgcatatagctagccagttttcccaacgccatttatttaacaggaaatcctttcctcattgcttgtttttgtcagttttgtcaaagatcagatggttgtagatgtgtggt

SEQ ID NO: 811196 - DNA, 644 bp, Homo sapiens
ctcatttacaaaacgggatttataatacctattccatagaattgctgtgaatattaaataaggtttattatatayagggccttgcacagtgactaacacattgtagacagtcaaaacctggtaaatacaattactgtaactactagcaataaacagtatttagttttttcctcctcatactaagaaggatattatgatgattctgtgagtgtgtgtgtttctttcaatatttcttacagtagctgcaggcttattcaggccctttttctaaacgctttactatatagttttaaaaatccttttaagatccataatcctattgagtcaagaataaaacgtgtacttagtttcaggcaaacaattgttcaacagaagccccttcaatttttaattatgttctcttccctttccaagttcactgtattctctgatttttaatcttaaaagtcagtcagggtacattatttatgttatattcaatacggagaaaaagaagaaaagggattttattcaggacactaactctaaccttgaaatgttattttctgaacatttgttctgctcactgagcaaattttagtcttcaagtcagatgtctaaatacagcacttgagctctgcttaaaggctaaaaatacagacttc

SEQ ID NO: 811197 - DNA, 576 bp, Homo sapiens
cctggatgactacttgataattggtcactaygcatctgtgattcccatatctgtctagcagatagaagtgagcttttcggaatataaatctgaccatgttactgttctaactgacaatactgaatgtccttccacggtccaaagagcagagttcaaattccttaatgtggcctctgggccctcagtgacctgacccctgtctacctctcaaacatcatctctcaccatacttctcgccaataagccatacccaaatgtgtaggtttcttgatatctcacacttttaaacctccatgcctttgtgcaggctgcttctttggctcacagaacacctttcttctctgggaaaagaatctctgagctaggttagctttcccctctctgtttttcacactcatcatactttgtaaccacttgccctactcctgtcttcccactagaatgtaagtactaggaagaggaatcatgtctgttttgttcattccagtattctcagcactgagcacaatgtagtcagagtaaatacttgttaactaaatgtgtagtgtgattctaactgaaaattcaccattaaga

SEQ ID NO: 811198 - DNA, 510 bp, Homo sapiens
tagtcccagctcctcggaaagctgaggcaagagaatcactttagcctgagaggcagaggttgcagtgagttgacatcctgyggctgctctccagcctgagtgatagaactagaccttgtcccctcaccaaaaaagtaaaggaataaagaatggccactccatggcagagcagcagcatgggctgctggactaaggatacttgtagttatttcttgataatatactaaacaaggggtagataagttttccaggaaaggagtgggcaattccccaaactgaaggttcttcccccttttagacccatatagggtaacttcctgacattgccatggcatttgtgaactgtcatgacgctggagggagtgcctcttagcatgctaatgttacaggaccccaccacttagcctttgggtcaggggtttctgcactctagtcccttctgtggttgccaggaagatattacaggaaaggggtcccaatccagagcccaagagagggttcttggatcca

SEQ ID NO: 811199 - DNA, 581 bp, Homo sapiens
atcagatgagcttggaagagaaccccagcttttaaatgagactgctgccctggctgacactgtgcagccttctgagactctgagcagagtgcttcatgaagctgtgcctggactcctgaccctctgtgagataaacttgtgctgtctcaagccatttactttgtgatttgttaagcaacattaaacaaaacaaaaacctaacacagatcaggcatgatggctcacacctgtaattccagtgctttgggaggctgaggcagagtcacttgagcccaggagttcaagaccagcctgagcaatatagtgaggccctgtctttgcaaaaaaaattagccaggcatggtgcctcacatctgtagtcccagctacctgggaggctgtggcaggaagatcactggagcctaggagctggaggatacagtgagctgtgttcatgctactgcactccagcctgggcaacagagcaagaccctgtctcaaaacacacacacacacacacacacacacasagagacatgcaaataaaggaatcatgtacatattacataacttgtaacatttattacatggtttaatgaatg

SEQ ID NO: 811200 - DNA, 601 bp, Homo sapiens
ccttgtctcttaaaaataaatacatagataaaattaaaagtggctttgtagttggctggaggtcctggactcctccagcgtatcctctagtgatgggcagctgggttacttccagtcttttccgagcaggtcagagtggctctctggggtggaaatggttgagaggaacaggctcattctggtctattctctggggacttctgtctgcctccccaggaagttgacctctccctctcccggtctgcacagccttctgtttttgtctgtgggcctcatttcaaagcttcgtgccctgggctgggcatggtggctcatgcctgtaatcccagcactttgggaggctgaggcaggaggatcacctgaggtcaggagctcgagatcagcctggccaacatggtgaaaccccatttctactaaaaatacatagccaggcatggtggcgggcacctgtaatcccagctacttaggaggctgaggtgagagaatcacttgaacccaggaggcggaggttgcagtgagctgagatcgtgscactacactccagcctgggcaataaagtcagactccattgcaaaaaaaaaaaaaaaaaaaaaaaaagctt

SEQ ID NO: 811201 - DNA, 601 bp, Homo sapiens
ccttgtctcttaaaaataaatacatagataaaattaaaagtggctttgtagttggctggaggtcctggactcctccagcgtatcctctagtgatgggcagctgggttacttccagtcttttccgagcaggtcagagtggctctctggggtggaaatggttgagaggaacaggctcattctggtctattctctggggacttctgtctgcctccccaggaagttgacctctccctctcccggtctgcacagccttctgtttttgtctgtgggcctcatttcaaagcttcgtgccctgggctgggcatggtggctcatgcctgtaatcccagcactttgggaggctgaggcaggaggatcacctgaggtcaggagctcgagatcagcctggccaacatggtgaaaccccatttctactaaaaatacatagccaggcatggtggcgggcacctgtaatcccagctacttaggaggctgaggtgagagaatcacttgaacccaggaggcggaggttgcagtgagctgagatcgtgccactacactccagcctgggcaataragtcagactccattgcaaaaaaaaaaaaaaaaaaaaaaaaagctt

SEQ ID NO: 811202 - DNA, 567 bp, Homo sapiens
aggagctgggagtggggagaatcagaagttgttcatgggtgggcagtttcttttatgcaagatggggagtttctagagatctgctgtagagcttgatgcctatagttcacamagatggagtatttcttatgcctacaacttaggacaaaaagtgttttgcatttctttcattttttgattctgaaatatttgtcatatacttactggttaagcatcccaaatctgatagattcaaagtctaagatgcttcagtgagcatttcttttcagcatcagattagtaggcataagtgggaggtgataagccaaagatattcttgcccttttttttctctcaccacgtttctagcttggtgattagttttcggtgaattccatactggccatgctgcacttgtatatttttgaatgccttggcatgtgagaaaggctgattgctattttctatgtcatgagaactttccaccttttcatggttgcatctttttctcagtgtttttgttgtggcagtcattaagaagagcctgtcagctcagatttaggacagagttttctaattctgcaaaaa

SEQ ID NO: 811203 - DNA, 434 bp, Homo sapiens
gcgtgagccaccatgcccagccgaaaaacatcgtttcttagttgagttataattaatattgagagcattaaatttatgtagaaaaatcatttttccttaaatcctcaaagataacaaacaagcataaaaatcatttatagatttagtatttttctgttaaaatcatttactcttctttgtttttgggtcagtgttcaattggtttatacctttgatagttgaaatttacttactgaatactgatatcatttgtgggtcctggtaaatatttcaaagttgtcgtacaaacaggacaatagattctctcaactcttcaaacgtctaacatgacagacttataagtcttttttcttcttttttttttttttttttttttttttgkagagatggggtctcgctatgttgccaaggatgatcttgagctgctgggctca

SEQ ID NO: 811204 - DNA, 661 bp, Homo sapiens
gaagtttagtttggttggatattaaattcttggttcaaatttctttcatttaaaaatgctgaatataggcccccagtctcttccagcttgtaaamtttctgaaaggtccacggttagcctgatcgggttccttttgtgggtaacctgccacttctctctagctgcctttaatgtttttcttttgtattgaccttggagaatctgatgactatgtgtcttagggatggtcatcttgtataatatcatctcacaggggttctctgaatgtcctgaatttgcatgtcaacctctctagtgtggttggggaaatgttcatggacagtatcatcaaatatgttttccaagttccttgttgtctctccatctctttctggaatgccaatgtgttataggcttggtctttttacatatcccatatttcttgtaggttttattcattttttaaaattcttttttctttatttttttctgctgtattggttcaaaggagtcgtgtttgagctctgagattattttctttttttttgtgggatagcaaacacttatttgaagaacttttaggataaaatttagtttacctctgataaagctgaagaaaaatgattgcagtttttatgcattaaatgataaacattgcctttgtattcttttcccagttctt

SEQ ID NO: 811205 - DNA, 619 bp, Homo sapiens
agagttttgctcttgtcgcccaggctggaatgcaatggcagaatctcggctcactgcaacttccacctcccaggttcaagcgattctcctgcctcagcctcccaagtagctgggattacaggcacccaacaccatgccctgctaatttttgtatttttagtagagacggggtttcaccatgttggccaggctggtcttgaactcctgacctcaagtgatccacccacctcggcctctcaaagtgctgggattacaggcatgagccactgtactcagcggtgatggtggtttttttgtgttttgtttttgtttttggagatggagtttcgttcttattgcccaggctggagtgcaatggtgcgatctccgctcaacgaaacctccgcctcccgggtccaagcaattctcccgcctcagcttcccgactagcttgggttacaggcatatgccaccaggcctggctaattttgtatttctagacacggggtttctccatgttggtcaggctggtctygaactcccaacctcaggtgatctgcccgcctcggcctcccaaagtgctgggattacaggcgtgagccgccacgcccagctggtgatgttttgatgaggacaggac

SEQ ID NO: 811206 - DNA, 572 bp, Homo sapiens
atcttccaggcccttcccagctccagctgtgcccttttcttttttttgagacggagtcttgctctgtcgcccaggctggagtgcagctgtgcaatctgggctcactgcaagctccgcctcccgggttcacgccattctcctgcctcagcctcccgagtagctgggactatagacgcccgccaccacgcctggctaattttttgtactttttagtagagatgtggtttcaccatgttagccaggatggtctcgacctcctgacctcgtgatccgcctgcctcggcctcccaaagtgctgggattacaggcgtgagccaccgcgcccggcccggctgtgccctctgtgccgggtgcagacccccgtcctgagcctactcctctgccaccattgtttctctgccagccgcctctgtccaccacacgctggcagagggccggccaggtgctgtgggatgcagctgsaggccttgaaggccggtgggatcgtcccagtgcgtgaggagaggctcctgctccctcaggtggggacaagacacggggggacccggatcccagccctgccggccgccgca

SEQ ID NO: 811207 - DNA, 625 bp, Homo sapiens
gaacctgtccgggcggcacccacacaatcctgcccgcctgtgggccgtccggagacagaacctcccaggcagctgtaagctgttgtggcagcagggactgtaggagttggcgtggcctgcagctgacggcgccagcatggagagggtgcagttctccctggtcctgaagaatgtgtggccaagaagcccgaggcggggagggttccttggggccagagggtggcgttcccagcaaaggacagtccttctggtgtcacagtctcctttttcacactggaatgttctttgttttgtgaagggatggcgatggtcacagtggtggtttctcgaagtttacgtgacaacatgtaaaaatgggcatctctaggtgggcttttgtgacatctgaacttctgatggggcagccgtgatactgcagtgagctgggaggtccacctcaccagttaccatgcttgatcattttcataaacttgcccagggaataaaaactggttggggagggctcctgggcccccatagagtaaggggtgacttcaggccccascacaagtcagcagtacagctggcctgtccctcagcatgcccctgcacacctgcggccactgtggcctgtccctcagcgtgc

SEQ ID NO: 811208 - DNA, 591 bp, Homo sapiens
aaactgagaaactgtgggtaaaaacagtgggagtctgtggcatttttacctaggttgctcccatccacctcagcaccacccccatctcccccatactgttagtccaacagttcttttgaagggggcrggaccgagtgtggctactcataaaaagaacctgtactactggaacaggctgacctgatttggggcggacagctaaaaacctacgctcagaggcactatcagtaaaagtagagaactcagtaggaaataaaaggctgggtagccttgccactatcttcctttaaccaatgtcaaaattaagaatttatgagccaatgcccttaatcaacgttacgtatttctaaaaatactaaagttacaactaagttatttctaatttgcaaataacatagtttatagcatcttttttggccctgcataattttaggctatgacagaaaatgacaataatagctttaacctgaattaataccttaactggttcatgttcccccagtgagtaaaacagattctataaacgcaggactagggttatttcacttgtcttcctgatcacgctctgcatattggctgacttacccacct

SEQ ID NO: 811209 - DNA, 620 bp, Homo sapiens
tagttaacaggaaaaaaagagattatggccaagctaaaggttggttttaaaaaacattaaggtatatgtatatttaaaacaagaaacataaactaaaaaataagaactagaaaagactagttggtttaagaaagaaattctgagatggagaggagatacataaaaatatttcataatggatggatttcattttgtcagtaaattgaaatgagataatcaagggagggaaagatgaaataaatcaagacttctggtgatatgatagcatgtttgaaatatgtgtcactggatcacagctgggaacagccacatgagactcaggagggccagaaggcctagaggaaagagaagttgaatgattagacatttcaatcattgttaagaacacattcagtgggagtaaaaaaagtgggagaggtgaaaagagagtgtgatcaggaacataaaccatttatatcattactcaactctttatttttttatatttttatgttttatgcaaatggaaactggcctytttttttaaatttgcatttaaaaaaactgctgggcatttaaagggttggttccaagtctttgctatcgtgaacagtgctgcaattggggagttgaacaatgag

SEQ ID NO: 811210 - DNA, 646 bp, Homo sapiens
aacataaaaatcctgcacaatttcacaacaaattccttggatccttatgctttctctcataattcctgacmacactctctatacaatttgttcactatgtagtatataagttttatgtagtgttagagccgttaaagtgaacatttagagggggaaaaaaaggggaaaaagttaaagaaacagggagtttctttccaaagaatgcttcatggtggctccaactgggcccctactcggaaatgctgaatctcgtgtatgaacccttcagtggcaaaggaaaacaggccacccttattagaaattttctacagctaaagatgtaacatcatagctaaattcagttggagacaggtcgagcaacagaaaccaggagccaaggcagtctagtcggctctgaaatttgattcaggcaccagattatgaatagatttaactagttcgccaaatgaaaatgtagattttggcaccgactaaattttttttttgcagggggtgggggtattctatatgtggagtcccaacacacactgagggatatgaaaaagagctttttatattatataactattcagggtatgttaaggggaaaaacacaattaactcaataaatgccaaaaaaatgttcaacctctttttactaccttat

SEQ ID NO: 811211 - DNA, 646 bp, Homo sapiens
aacataaaaatcctgcacaatttcacaacaaattccttggatccttatgctttctctcataattcctgaccacactctctatacaatttgttcactatrtagtatataagttttatgtagtgttagagccgttaaagtgaacatttagagggggaaaaaaaggggaaaaagttaaagaaacagggagtttctttccaaagaatgcttcatggtggctccaactgggcccctactcggaaatgctgaatctcgtgtatgaacccttcagtggcaaaggaaaacaggccacccttattagaaattttctacagctaaagatgtaacatcatagctaaattcagttggagacaggtcgagcaacagaaaccaggagccaaggcagtctagtcggctctgaaatttgattcaggcaccagattatgaatagatttaactagttcgccaaatgaaaatgtagattttggcaccgactaaattttttttttgcagggggtgggggtattctatatgtggagtcccaacacacactgagggatatgaaaaagagctttttatattatataactattcagggtatgttaaggggaaaaacacaattaactcaataaatgccaaaaaaatgttcaacctctttttactaccttat

SEQ ID NO: 811212 - DNA, 617 bp, Homo sapiens
agagagatttcccttgtagtgtaagtgaattaaaacctaaagtcttccattttccaaagttgaattggttggatcccaaagaacttaaaatattcatttattgattgtaaaattagttcaacaaacactcttttgtctctgcattcttttcttctgcgtttcacaaatcagtcatttgacggaagacgccttgttctgtactctacaccaaggagagaaaaataattttacacactttcccctatagcagtcaaaatgaaagggaaaaataataaatctagaaacagtattggtggcttctttttccacgttatttattctttttcttccccacgttctcccttcttcccaatctattctcttccctttctcttttctctcttaccgtctttgttactctcttctctcctttctcctcttccctctctctgtttctatttctttccatttttcctcctttttaaaagaaaagttatgtttctaatgaccacaaaaatcacattgcagacctgaacmctggagtcctgtctctctctttaggttctttgccacgaataaatgattttattacaacagaaaaaaaataagggaagtgacatttttctttcaaatattgt

SEQ ID NO: 811213 - DNA, 481 bp, Homo sapiens
caagaatagcctggggaacatgatgagaccctgtctctacaataaaatacaaaaattagctgggtgtggaggtgcacacttgtagtytcagctacttgggaggctgaggtgggaggatctctggagcctgggagttggaggttgcagtgagctgagatcacgccactgcactccagcctgagtgacagagcaagactctatctcaaaaaaaaaaaaaaaaaagacggtatttgttgacaagaaataattgaggatggaaaaaaaagtaatcagagcattgctctataaaggtctatgtttgtacttcatcttttgtccccaacccttcacagactggaaaaatataatgggggttatttaaataaattgactttcaatattaaaaaggatggcatttatttgacatgtaaagctattgaagatatattaagtgtgaaagggcaggctataaaacagtatgcatagtaaaaaaaaaaagtta

SEQ ID NO: 811214 - DNA, 630 bp, Homo sapiens
acctgtggaaataaatgaagaccaaccaaatgacagcaagcaaaggctagctgcttaaagcttgctagaagggagttagccatcatcacttstattttgacagagactcagagacaggaagaagagtgggacagttttacaatggaaaaagggaaagcttcacgtgtgccctgattggaggcagttggcgtaaggaagctgcaggtaggctaaaagtggggcatcctatgattggttaggggaacatgcttagccttctttgattggtccttatttatttatttatttatttatttatttatttatttatcgctcaagacagggtctcactctgtcacccagactagagtgcagtggtgcaatcttggcttactgcaaccgctgcctcctgggttcaagtgattctcctgcctcagcctcctaagtagctgggattacaggcatgcaccaccacacccggctaattttttgtatttttagtagagacagggtttcaccatgttggccaggctggtctcagactcctgacttcaagtgatccacccacctcggcctcccaaattgctggtattataggtgtgagccaccgtgcccggcagagtggtcctaatttagaaacaggaacaaaac

SEQ ID NO: 811215 - DNA, 580 bp, Homo sapiens
cggttccaagaaatctttttccaggaactttcaygaatattccagctcgtgttaaagaaatccataaaggtaacaacgccaaagtcccttccatgtgacttttttgggtatgcccataagctcatttcttgagtgtgtcctttttgctttgcaataaatctccatactttcactattttccaactcatccttgaattccttctcataatagtgtcaagaatctagacagcggctggagttgaggtcccactggcatttggtgacctccctcagcccaccaggatcatgattatttgctagaatgagtcacagaactcaggaaaatgctacacttactattccagtttattatcagggagaccaatgaagagccagatgaaggatagaaggtcaggtcaggaaggacccagggctcagaagcctctgtccctgtagagctggggtacatcaccctcccagtacatagatgggttcaccaaccagagaactcccctaaaccttgtagttctgtgtttcatagagcggtttcattatgtgggcataactgattaaatcactggtcattagtgattgatctcaa

SEQ ID NO: 811216 - DNA, 608 bp, Homo sapiens
tatacttatgagtgtaattcttatcccatgggccagcatttttcaaagcgtggcctgtatcagaattatctaactaaggkctatttgtgactcagcttcctgggctttccttccagatctattagatctaaatctttagacaatagaaagccaccgaaactatttaagatgagatggtcaaatttaaggtgaaactttagatcagttttatccctagtaaagaaagtagttgaaatctagatttaaacattttcttttctgttgctcaaaggctcattgactaaaataatacctggaccaggattccttctcagtaaaagtttaggaataccgtgaatttttgtaatgggagagggagtatcttccgggaagtaaagagctggagaatttcatcctaagcctcatcctgccccctccttagccagcttacctctcctatgattacaatacccttgtgggatgaattgagcccctcttcccccaaaaatttatatgtttatgtcctagctcccagtacttcaaaatgtaaccttatttgaagatagggtcttcatagaggtactaaaattcaaaggaggtagttggggtgggccctagtccaacatgac

SEQ ID NO: 811217 - DNA, 636 bp, Homo sapiens
ccacctgtgttggttaataagcaagactgcagcccagccagcaatcctccggtaactgtcatttctctgtatccaatcagttgcctgggarttatcccaataaaaagaatacagtgtgtcatttatcaggcagccaattaaagggcctctacagcactaggatagctagaagctaattctcacacgggaggcaaaatgggccaagccagtatgggccttaaggaaatttaagaaagtgagttgtggctgattcatagggggaccagatctacaaaatatgagaaggagttggcaatatgtcaatatgtctcctctacaagaatttcttgaggacaccagggtgtgaaaaggaagcaaactaatttggctgatcttaccaaaatgggacagttagcttttgtagctatgagacaattatttcatagagcatttccactgatttctaaggcctgattagcattagaagccttgaaaatgtaaaataaacataagtaaataaaatgaagtaaagacaaaaattctataagtttattgggcaatttgacctgctgtttaactgaggtagtcagcagaatgaacagagctgacaagaaccttcgtagcctcacttttggaaaataaaaacaattctatgtt

SEQ ID NO: 811218 - DNA, 579 bp, Homo sapiens
ttaaatttgtacacctgtgcatgtatctaaacaatttactgttcagtttgtgtaccygagtagcaagcacaatcctggctgtgtaaggatagggtaatgttgctacgacttacatgagatgtccacagagaaaataaactgagcagtagctctggtttcagttccctgagagtttacaaaatctctttctgggtaaatcagcgggcaagctcatgagtaaggcttgagtaacccaagactcatcaagctggtatgcctggtgcaactacagtatgagcctcgtacaaaatatctggcagaagtcttttcactgggttaatatgttccactgtctacacttacagaggcttataggtcccacttataagtcgcacttcgaaaaatttgtttttttcctgtatagtttctcttccacctctctttattcattttgaccactatcttctatgttagagtctttaaaaaaaattatctgttgatttggggctttctgctctatgaagactaatccaccaattagagtcatgctgttggaattgctcttaggtttactgtagaataatttggggagctattggt

SEQ ID NO: 811219 - DNA, 633 bp, Homo sapiens
ctggtgctaatacagaaggaaaagttgaattgtgtaagacaggatgtatttagaaktccttaatttttgcagcttttaattggcatttatacatcaaactcagtaatgtgcaatcattttcataggcataacctcactcaattgtcttcagactatgcagtgtttagtcaggtattataattattattattgttgttataattttataagctgggaaactaaagtcttcactgggaatttaatgttaacatcacttattcaagatggcactccaaaacaccttgtactgttgccctcagttgcatgtgcatgctttctggtaagtacgaaaaataaatttgaccgtttggccaacagagtatagttctacttccacatcatagttgtagtcatgttcaaccattcttttttgttatcatgcctttataagcttggttttagttatttctgtagtgaataagaggattaagcaaatgacatctagcatttgcagccaagtttcttgtcccaggagtgacctttcaggtaagtctcaccctttatagaaactgattcagtgaattctgttcacacatttctcttttgttcatttagatagctgatggaccaaaacagcatagggcttcctgaact

SEQ ID NO: 811220 - DNA, 644 bp, Homo sapiens
gttttccaattgttccttggagttccacctggaaatacctattaggggcgagacttaagtgtctgaagtccaaagacctgctggctgccctgtctgcgctgggactggcagttccaggcccggtgccgcatctggctgtgatggtgctgagcggagccccgtgccaaccccagttcttgtcctgcatcacagaagggtctcttggttgttgtgaggcagcccttgcagctcacaagggctggagtccctccgaggtgcgcgggtcagcctctctcagaaggcggccacctctgtcacagctctcctgggttttgggctggagtaccctggatgaggacagcacaagctcgtactccacccggggctccgggagtgcttggtgcttcccgaggaaggcagggtgagagggtcccggagtgccgggctccaccaggactcaccgccttcacctcctgggacgccggtacctggcagtgaactctggagggcctgcgggtcattagagtcaggaggtctgagcgtggtgcttggtcatgtcccatcccaaccagtgagagccacgcggcctccctaaggccagtcgtggkgggtgggtctggaggtttgtggtttgtgtgagagggggtgcatgtgtggcagatttg

SEQ ID NO: 811221 - DNA, 571 bp, Homo sapiens
tgtggacagttttttgtttgcctctaatgcttgtctggaagttcggcatgctttaggctagatrctcggtcttaagcaaaggccagtctcagaatgaatattagccagagatttcctgagatacctagaactggtgagtccttgatgaggagctccggtgcacgctgggccaggtggtggccactctgcctttgccctcatttcctgcttgctcagagcttcaaggtgagcaggagggagaacccagggccttcacaggcctttccgagcctgtgcgcaacatgcacggacatggccccttagaatctcagtccccatggacagctcatttcttagcttttctgtgtcagcgttctggtgagtcttttgtttgccactgctgtcactcaggcatttgtgatgttgaagtggttgacagactcattccccaaccaagtttttgccctgggagagattaggggaggtgaaatcaagacaggactttctttcttttcttttctttttttttttgagacggagttttgctcttgttgcccagtctggagtgcagtggcacgatcttggctcactg

SEQ ID NO: 811222 - DNA, 598 bp, Homo sapiens
attttcaattcactgttctttttttttctttttttagacagtctcgctctgtcacccaggttggagtgcagtggcacgatctcggctcactgcaacctctgcctcctgggttcaagccattctcctgcctcagcctcccgagtagctgggactacaggcacccaccaccacgcctggctaatttttgtatttttagtagagatggggtttcgccatgttggccaggctgttcttgaactcctgacctcaagtgatccacccgcctcggcctcccaaagtgctgggattacaggcgtgagccaccatgcccgtccaatttactgttctttactctgcaatctgctgcctctttgccaaaataaatctttgcaggtaagataggtgcggtggggagtgtgaaatttattacagaatggttattttgcttcttaaaaaatttttgttttaagaggcagagtcttgccatgttgccctggctggtatcaaactcctggcttacacgatcctcctgccttggcctcccaaagtgctgggattacaggcatacaccrtcatgcctggtctaaaatattgtgtttttttttttaatttttttaag

SEQ ID NO: 811223 - DNA, 517 bp, Homo sapiens
ctgcagtctgaagaaaggaaaagaatagatgaattgattgaaagtgggaaggaagaaggaatgaagatcgacctcatcgatggcaaaggcaggggtgtgattgccaccaagcakttctcccggggtgcctttgtggtggaataccacggggacctcatcgagatcaccgacgccaagaaacgggaggctctgtacgcacaggacccttccacgggctgctacatgtactattttcagtatctgagcaaaacctactgcgtggatgcaactagagagacaaatcgcctaggaagactgatcaatcacagcaaacgtgggaactgccaaaccaaactgcacgacatcgacggcgtacctcacctcatcctcatcgcctcccgagacatcgcggctggggaggagcccctgtatgactatggggaccgcagcaaggcttccattgaagcccacccatggctgaagcattaaccggtgggccccgcgccctccccgccccactttcccttcttcaaaggac

SEQ ID NO: 811224 - DNA, 589 bp, Homo sapiens
tttttcaggggaaagtatcagatcacccacctggtgattgtaacaaaaacaatcactcctgttgatatttaagtcttaattaattcagaaaaatttgcacacaccytaaggtcagatagtattttgtaccctacatataaaaactcctttttttttttttgtttagatggagtctcactctgttgcccaggttggagtgcactggcgtgatctctgctcactgcaaactccgcctcccataacattaatgatcactgatcacagatcaccgtaacaaatataataataaggaaatattttaaaaattgtgaagattaccaaagtgtgaaaccaagacacaaagtgagcaaaggctgtttgttaaatggcaccaatagacttgcttcaccagggttgtcacaaacatctcatttgtaaataaaagaaaaaatgttcctatctgtgaagcacaataaagagaagtgcaataaaatatgtttgtattaatttggttaactttattccaacttaatgtaaattagttttaaaacagtttataaaattctaaaatgaacctggcaaatttagagcaataataaaatgatttaaa

SEQ ID NO: 811225 - DNA, 520 bp, Homo sapiens
gttcgtcagaacttaaatactgaggaagaagtggaaaatgtagcagacattggttttgattgtaacatgtgcagaccctatatgcctgcatctaatggtaasagaataatttaaactgtgagtctgcactcttgtaccactctcttgcaccttactgtccataaccaatgaattagcttagctctactctattttgtctttgtgaaacttactttgacaagtattttatgaaaaatattattgttggttatacatgacttatcacaacttgttataaaacaatttacatgaaacaataaaaagcatatactttagatgtaaactataattttgcttccaaggaacatgatcttgtagttattgacaatatgtcaaaatccaatgtgttgattctttcttagccaggttttcctccatgacttgagtatttccttcatcacttcttgttttgttgttgctttaaaaagtgcttttaactttagtgttcaaacatttattttaataaaatgagtatagaaac

SEQ ID NO: 811226 - DNA, 539 bp, Homo sapiens
tttgtagataaggtggttatcacacatgctcaagaaagacagagactaccattcaatccagcaatcccactactgggtatttacccaaaggaaaagaagtcattatatgaaaaagacacttacacaygcatgtttatagcagcacactacacaactgcaaaaatataaaaccagcctaaatgcccatctaccaatgagtggataaagaaagtgtggtatatatacacatagaatactactcagtcataacgaggaatgaaattatgacatttacagcaatgtgaatggagttagagaccattattctaagtgaagtaactcaggaatggaaaaccaactattgtttgttctcacttataagtgggagctaagctatgaggatgcaaagggataagtaatataatggactttggggactcagggggaatgtgggagggagatgagggataaaagactacacattgagtacagcatatactgcccaggtgatgagtgtatcaaaatctcagaaatcaccactaaagaacttatccatgtaa

SEQ ID NO: 811227 - DNA, 565 bp, Homo sapiens
gacaaagggggttcctaatgggtatgagctgtggwcatttcttaccttcaagttctttcacttatgccttatcagcctctttggatatttgcttggaattacaagtattaatgtcacttcttgctgtagttgttgtttatgtgcctacagtggtgctgattgccggctgactctgacctccgctcttcagatctatctgagctattgttcagcctcagcaggaggcaaccccaggagcctggctgtgagcctccagctgatgctgttgtgggcaatctcatggcattaataatattgagtgagaagacctgggattgaatctcagctccaactctctccagcttcatgaccatgggcatgttacttcacttctctgagcctaacatccttattgcaaggagaagaactagtctctccctcccagggttattaggaagatcaaaagagataactcatgtgactggaatatggaaaacctgctctggagcagatgcttaaataattattattcctgctttacccctgttgcaatgcttgttatactttcttcacaccatagatttta

SEQ ID NO: 811228 - DNA, 626 bp, Homo sapiens
agtctttcaatgaaatccatcaaaaacagtgatgagtcaccattgcctatgcaatcacccaaagggcaaagatcttgagaaattttgcctttcacaaatgaagatgcacatagaggacatctcttcatttactgaggaagtttcaacgttattaattacaggcatgacgctgacacacaaagtcaatgttgcgatgatgcactttggtggagtcaaatttctgacgttccaggcagcagaagaaaagtctgtcccagctctcagtttgctgtctacatttttctctctggacccccagccaactgcctggtgcctgccagcactgagggcagatcttcccccacccgttccactcagattcacacactattctcctctggaaacacccttacagactcacccaaaataatgctttatctggattctaggtattccttaattcaatcaagttgacacctaaaattaggttgacaaatccaccccttgtcaacttggcgactgtatgcatctctttaaaccatacttaatttgcaaataaagacaakagcaaggtatcagttccacctaatgtgaagccactaacataatgcaactatccctaatacaactgaaagcacactaatccc

SEQ ID NO: 811229 - DNA, 621 bp, Homo sapiens
gattctgcctctgtccccaaacttcctcctcttctcagtgaaaaaggtgaaatttccatcctttcttcgtgcttctccttctgaaactgactttgcaaaaattgtatcagtgagaaaatcatggcagtaaaagagatctgatttaacccaccctccatcttgcctttcccttaatcattcttgggcttaggctaagctaactttgggagacatttggtttatagtttaaatgataataggccttcaccaaaactcagctggctttgtacagctaatcaggctaggaggaggagagaagcgattctgctaaggtgtagacataaacaattgccagccattcctgtggataacaccactactgtagattggccttttaagacatcctttcagggtttattgtttgttcgtttttttggcatgtctgacacccatggctccacctggacctgccaaccccactcctgtggacccactcagaagtgattcagctcaagaggtcagcttcagctccttataattttatytcagccccaaccaatcagcagcaagcacctattagagaggtgcttctattatacacccattacagaggtgcttctattacctaggtacatttcagcc

SEQ ID NO: 811230 - DNA, 511 bp, Homo sapiens
gcttatactggtccaagcaagcattaggtcgtagcccrttcctcttccttatttgaaggtatttttacctttctcagcattccacaagttacttcctccttcctttgttctcctctgcctttgcctcttttaaaaagttctaagttgctagccagtcgggacaaatgcagaatgtgaggtcccattccagccaatggaaaccagacacagtggtagggtggacgtgtcaggttataaacgaccctgtctcctttgtccagtgtactttagtggcaaaactgctggcaagtgtaccctttctgcagaaagtataaaaatggccttgctgaggaaattaaatttatattcaagggctatttctttacagcaccagggaacaagcatttcaaacacaagtaataagcatcttcatcctccccccaccttccaccttcaagaagtccccggtggctgttcccaatttgcatccataggtactcaatgagtaatatattcttatttatagaaaacc

SEQ ID NO: 811231 - DNA, 511 bp, Homo sapiens
gcttatactggtccaagcaagcattaggtcgtagcccattcctcttccttatttgaaggtatttttacctttctcagcattccacaagttacttcctccttcctttgttctcctctgcctttgcctcttttaaaaagttctaagttgctagccagtcgggacaaatgcagaatgtgaggtcccattccagccaatggaaaccagacacagtggtagggtggacgtgtcaggttataaacgaccctgtctcctttgtccagtgtactttagtggcaaaactgctggcaagtgtaccctttctgcagaaagtataaaaatggccttgctgaggaaattaaatttatattcaagggctatttctttacagcaccagggaacaagcatttcaaacacaagtaataagcatcttcatcctccccccaccttccaccttcaagaagtccccrgtggctgttcccaatttgcatccataggtactcaatgagtaatatattcttatttatagaaaacc

SEQ ID NO: 811232 - DNA, 632 bp, Homo sapiens
taggtttcatgtggaaaaggtaatgatttattgygatggtagttgaaaagtaaggctaacctcggccgggcatggtggctcatgcttgtaatcccagcactttgggagggtgagacgggtggatcacctgaggtcaggagttcgagatcagcctggccaacatggtgaaaccctgtctccactaaaaatacaaaaattagccaggcgggtggtgcacgcctgtaatcccagctacttggaaggctgagtcaggagaatcgcttgaacctgggaggcagaggttgcagtgagccaagatcgcagcattgcactcccgcctgggcaacagagccagactccattccaaggaaaaaaaaaaaaaaagtaaggctaacctccatgtgaggttttctcacagacagagccatggtgccattattatctccattccagagtttgaacaaagcacaaggataaagtcaggagggaaaaatgaagtctgagcagctggtgtttgcttcagcctcttccggagccgcttctgagccatcagggaataggaaggagctattgccattccctgcacggccccagtgcgagcctgggctgtgacgcacagatatggagggacattgtcgctggcttctaagtga

SEQ ID NO: 811233 - DNA, 532 bp, Homo sapiens
accaccgtgtccagctaatttttatatttttagtagagacagggtttcaccatgttggccacgctggtctcgaactcctgacctcaagcgatccacctgcatcagcctcccaaagtgctgggattataggtgtgagccaccgggcccagctgggttgaaacttgtttgtcacaataattgggaggcactactggcatttagcggctgaggtcaagagaagctagatgtactgcagtgtatgatacattcttataaacaggaatgtgtcctgacatcttgtgactttgaagtattttgccagatattcaggtgtaaaatttgtaattatttgaatctataaaataaatttattttacataaaaccacaaaatactctacataggtttagtccacatgagctttccaagaatgtagctgacatgtaatttttaaaaaatgcactttcagaactttaccaagtattcactattctggaaaatcacatcatcaacagcagttctacyggtgtacttgaattactcattcaacacgc

SEQ ID NO: 811234 - DNA, 596 bp, Homo sapiens
tataataagcatgtcaagtaatcaaaaaaaaatacatatttwaaaaaaataattgatataaagtgggaattgaaggcaactctgttttatggatatattctatagttcagaatagataatttgttttaccacttgcccaaattacaattatgggacatactaaagtgaaatgactagaggtaactaggatttctgaacagggtagtacagtttatacataaacaattagatttttatgaagtcttattttcaaaaagaaaataaggccaggcatgaagactcacgcctgtaatcccagcattttgggcggccgaggcaggcagatcacgaggtcaagaggttaagaccatcctggccaacatggtgaaaccctgtctctactaaaaatataaaaattagttgggcatggtggcgtgcgcctgtagtcccagctactcgggaggcagaggttgcggtaagccaagagcacaccattgcactccagtgtgctgacagagtgagactctgtctcaaaaaaaacaaaaaaaaagaaagaaagggcacgtgttatagcttagtgcttaaaacaggtatctggagccagattattaaccagg

SEQ ID NO: 811235 - DNA, 224 bp, Homo sapiens
tgtataaaatccattttttctctgggcattatctgagaatagttgagattgtttgtgaggtctctttcatctctctcagtgctaataattttcacagtagcagtttacagtggtaacctaagttagcaattgtcctaacttttgcctttccttccttgagtgtaatatttcctgggacctcttamcctcttgttttcttttgatttttgaagagtctaaaattg

SEQ ID NO: 811236 - DNA, 224 bp, Homo sapiens
tgtataaaatccattttttctctgggcattatctgagaatagttgagattgtttgtgaggtctctttcatctctctcagtgctaataattttcacagtagcagtttacagtggtaacctaagttagcaattgtcctaacttttgcctttccttccttgagtgtaatatttcctgggacctcttaccctcttgttttcttttgrtttttgaagagtctaaaattg

SEQ ID NO: 811237 - DNA, 580 bp, Homo sapiens
cttagagttgttacgatgatagctagcgtgagaccgagctcgaatgagactgagaatgaaaygaatacagcagaaagctgagtctaatgatggagagacagaaattcctgaaaacattagggcacttggatttagccatgtctgaagctaaccgtacctcttggactttttagttatgtgaatctatacctttaaattctctctctcccatcaatctggtttaatgtaatttcagtttggttactgtaatgtacaatgatagttgagaaaatgtaaaacagtctttgtgattagaaagaaacaggatgagtcaggcgcggtggcttatgcccgtaatctcagcactttgggaggccgagtcgggtggatcacttgaggtcaggagttcgagaccagcctggccaacatggtgaaaccccatctccactaaaaatacaaaaaattagctaggtgtggtggtgggtgcctgtaggtcccagctactcgggaggctgaggcaggagaattgcttgaaccggggaggcagaggttgcagtgagcccagatcatgctactacattccagccttggcaacaagagc

SEQ ID NO: 811238 - DNA, 610 bp, Homo sapiens
tagacaacgaaggaaggaatcaatgaacttgaaggtagaataatagaaattacctaatataaggaatggagagaaaataatctttaaaaagtgagcagagttgggtggcctgtgggattataacaaatgctctaacatccatgtcatcagagttccagaaggagagaaagaggaggatggggctgaaaaagtactcaaagaaataatggctgaaaatttcttagcaaaagacataaacctacagattcaagaagctcagtgaagccaaaataggataagcccaaagaaatccacaccaagatatatcacagtcaaacccttgaaaaccaaagtcaaagaaaatatcttgagagtagtgcaagggaaatgtcaccttgcccaggggggaaaataattcaaatgacagcatatttctcatcagaaaccaggagtattagaaagaggtagcataccattttgcaagtgcctaatgaaggaaagtgtcaaccaaattatatatccagtgcaaatattcttcacaaatgaaggggaaataaaggtattttcacasatgaaagaaaactaatagacttggtcaccaacagacctacactaaaagaatggcaaaagg

SEQ ID NO: 811239 - DNA, 517 bp, Homo sapiens
tggttacgattattccaatgacagtaagaccaggcaaagggggaaattccaggcccctaggttaagcatcgccacgagacaacccgctttagtctccactgctcttgtttgcctttgctcccacccacccttyttttcctgagccttccaaatgctacaggtgctgcttgcatatgatcatagtaatagctacactcgtttagtgcttacaagccaggcacacctacacagcacagcaccccattttatggaagagaaggctgataaaccacttgcctggatcacacagttcattaatgatagtgctgggacttgaatccaggattacaaactagttccagctgatctagagtgcattagggaacactgcctctcttacctacaagtggccttggtccagcctgctgagcccagagctaagcagcttcccagctctgatcccagtgactaataccaaggctttccccatcctgtgggactctcaagaacagctgaaaggcggttgtgtcaataagcc

SEQ ID NO: 811240 - DNA, 629 bp, Homo sapiens
aatttttgcatatggtgagaggtaggggtccagtttcattctcctgtgtagggtcagccaattttctcagaatcatctattgaatagggcatccttccccattatttatttttgttgacrttgttaaaggccagttggttgtaggtgtgtagctttatttatgggttctctattctgttccattggtctatgtgtttctttttgtctgagtaccatgctgttctggttaccgtagcattatagtatagtttgaagttgggtaatgtgatgcatctgagtttactctttttgcttaggattgctttggctatgtaggctcttcttttgattccacaagcattttagaacagttttttcttattctatgaaaaatgacataggtaatttgataggaatagccttgatctatagattgctttgggcagcatagacattttaacaatattaattcttccaatccataagcatagaatgcttttccatttgtttgtgtcatctgtgatttctttcagcattgttttgtagttctccttgtagaaatctttcacctccttggttatatgtattcttagatatcatattttttgtgtggctattgcaaatggaattgtgttcttgatggggttctc

SEQ ID NO: 811241 - DNA, 605 bp, Homo sapiens
actgattatttttatacatgaattttgtatcctgaaactttactgaagtcattgatkaggtctagaagtcttttggaggaattttaggggtttctaggtacaggattatatcatcagtaaacagagataatctgatatcctcttttcctatttggatgccttttatctctttctcttgcctaattgctctggctaggatttccattactatattgtattagtccattttcaccctgctgataatgacatacctgagactgggcaacttacaaaagaaagagatttattggacttacaattccacatggctggggaggcctcacaatcatggaggaaggcaaggaggagcaagtcatatcttacatgggtggctgcaggcaaagagagagcttgtgcagagaaacttccattcttaaaaccatcagatctcctgacaccattcactatcatgagaacagcccaggaaagacctgcccccatgattcagtcatctcccactgggtcctcccacaacacgtgggaattatgggtgctactagatgagttttgggttgggacacagagccaaaccataccatatgttgaataggagtggtgagagtgga

SEQ ID NO: 811242 - DNA, 618 bp, Homo sapiens
gggtgcaagtggttcatttgagaggcaaaggaaatatcaataagcagttagggaagtgaaacagaaaaaagcagccaataaagggtgcattatcaagccagctaccactgtgaagaaactctacaaaccaayggaaaacacatgcctcaggggtaaaggagctagggtatttacataccaactcatttattggttgaggaaggcttccagggaacattaataccctggcatatctgtttaccatataggaggcaaactgggctttaacagtcagagaaagccctcaggagaagaaatgcaggcactgatcattgaaagtccagctagcacgcattgaaaaactaggagatatggaaggacaatcaagagcatctgctgcaactaatgagctgctgttacaggcaaatacaggtattgagttaacaactataatcgctgcattcatctctaataagagacattttaaaagtaccttacagacacgtgtctccctgctaactccaagtctaagtataatcagactcctccttccccaataaatccccataaacgtgcctcaaaagtcattggctatttcttcctgaagtcaaaattgatggtaaaataaaaaaggtatgc

SEQ ID NO: 811243 - DNA, 627 bp, Homo sapiens
ttggttccctggcttcagccccctttccaaggaagtggacggttctcctgtctcactaaagttccaggcaccactggagtatgaaaaaactcttacagctcagtgcatgcytgaacagccgcccagttttgtgcttgaaatccagggccctggtggtgttggctcatgagggaacctcctaatccatggattgccaaaatctgtgggaaaagtagtactctgggcaagtagcacagtccctcactgcttcccttggctgtgggagggaggtcccctggctccatgaacttcctgggtgaagcaatgtcccacctcgcttctgctcattctccgtgggttgcacccactgcctaaccagttccagtgagatgaactgggcatctcagctggaaatgcagaaatcacctgccctctgtgttggtcttgctgggagctgcagacgggagctctttctatttggccatcttggctcctccccacccatcagttttattacccttggttttcagataagaacattgagacacagagtggttaactagtactaaattttaagtcacagggtcagaattacaccattccaaaactttctttttctttttatgaaataatgttaaaatttattag

SEQ ID NO: 811244 - DNA, 559 bp, Homo sapiens
gaccttttgtcatagaggatcagggaaggtctgagacctgagaaagagccaagtatggaaacagtcttycacacagaaggaacagcagcaggtaggaagacccctgaggtggaaaagagcttgtcacattggaggaagcaaaagaacatccatatggcaggacaagaggaacggtggtatgaaataaacctgtaaataagcatgggcttaaccgtgcagagcctcgtaaaccatggtgaaggtttgggttgaattccaagggcaactggaggccatgggaagactttgggctggagtatgatcccatcactgtagcagtgatttggagaaaaattagaaggggattagaagggaagctgaaagatcattgggtttgcagaggcttggatttgagtactggaagctgagatgggaacaagtgaaaggattggggatgaatttttggtggagaattgagaaaatttggagataaactggatgtggaagataaagaaggaagaggtgccaggaattactctcagggctgttttgaacaatgagccatttaccatttttggtg

SEQ ID NO: 811245 - DNA, 626 bp, Homo sapiens
aaggtttattgtgaagataaatgatagagctttagtttctaayttctaaacagggcataataatagtatagacctcataggtctattgtaagaaatacatgacatgaatcagataaactatgtctgccacatggtaactaccctgtaggtatgaattgttttttctaaaagagaataaaatgcaaatatcagtgaggtttcaaaaaacctcttctctaattttattaatacatccaactaacaagggttgcactgaggaaatacagagtacgcacatctaacacaggctggcaagaggtggtggtgaggatagcaagggaaggcttcctgagtatcctgctgtcacacctcagctccatcactaggcatggcttatgagcaaggttaaaaaaacaagaccagggagattaaacgataaggaaatttacacaaatggacctggggagaagatatgatcaggtatataaacctcactctccaaagtaaacttttacattgaatggggttgttatggggtggagatggggcacggttgggatgggacaaataagggtcatcttcagagactaggaaacctctgagttagagagaagaccggtgattctgatttattttttccattggga

SEQ ID NO: 811246 - DNA, 594 bp, Homo sapiens
cagccttgggtctggagatttttatattgacacgttcatgacaatgaagtcaactttgataaagaattcagtaatgttattcagatgtcctaatcctcttttatatgttttattagctttgtttttcaaagaattcatccattttatttgagttagtgagtgtattagtataaaattactcaaaatattttcttatacttcctgttgattttctttatacatgattttataatttatgaaattgtgcctacgtatttttttttttttgagacagggtctgggtctcttgcccaggttggagtgcagtgcacaatgatggctcactgcaacctccacctcctgggctcaagccatcctcccacctcagccttccaagtagccagtactataggcatgtgccatcacatctggctaatttttgtgttttttgtagagatgtggtttggccatgttgcccaggatggtctggaacccctgggctcaagccatcttcctgccytggcctcccaaagtgctaggattacaggcatgagccaccacacccagccatgtctatctatctatctgtctgtctatctatctatctacctatct

SEQ ID NO: 811247 - DNA, 566 bp, Homo sapiens
ggagggtaagctatttttaggatgactgctatttaaagtaacatactggcctggcaaggtggctctggcctgtaatcccagtgccttgggagatacaggcaggagaatcacgtgaggccatgagttcaatactatcctgggcaacaaaaggagacccccatctctattaaacagccgggcgtggtggtgcgcgtctgtcgtcccaactactggagaggcaggctgaggcgggagggtcccttgagcccaggagttcaagattatagtgagctatgatcacagcactgccctccaggctgggcagtgagaccctgtctcaaaacaataaattaagtaacctagactatgtatgtgaaaataatatttccaaccctagcatgctgacttcatctgagcttacagatgcattttcatacagtcctccccaagggatcarttcctgtgagagccaaggatggcaccactcattgaaatcctgaccatgggaaggcgtcatttgggattccggaatgggtggctgaagcagtttacagaatcgcgttctggtgagctttaagaatggaaca

SEQ ID NO: 811248 - DNA, 566 bp, Homo sapiens
ggagggtaagctatttttaggatgactgctatttaaagtaacatactggcctggcaaggtggctctggcctgtaatcccagtgccttgggagatacaggcaggagaatcacgtgaggccatgagttcaatactatcctgggcaacaaaaggagacccccatctctattaaacagccgggcgtggtggtgcgcgtctgtcgtcccaactactggagaggcaggctgaggcgggagggtcccttgagcccaggagttcaagattatagtgagctatgatcacagcactgccctccaggctgggcagtgagaccctgtctcaaaacaataaattaagtaacctagactatgtatgtgaaaataatatttccaaccctagcatgctgacttcatctgagcttacagatgcattttcatacagtcctccccaagggatcagttcctgtgagagccaaggatggcaccastcattgaaatcctgaccatgggaaggcgtcatttgggattccggaatgggtggctgaagcagtttacagaatcgcgttctggtgagctttaagaatggaaca

SEQ ID NO: 811249 - DNA, 593 bp, Homo sapiens
atcataaatttgtttgtttgttttgggtttggttttgaaatggagtttcrctcttgttgtccaggctggagtgcaatggcaccatctcggctcactgcaacctccgcctcccgggttcaagctattctcctgcctcagcctcccaagtagctaggattacaggcgtgcgccaccatgcctggctaatcttgtatttttagtagagacggggtttccccatgttggtcaggctggtctcaaacttctgacctcaggtgatccgcccgcctcggcctcccaaagtgctgggattaaagatgtgagccaccacgcctggccccataaatttttatttttgtttcaaaccactacgttttgggataatttgctacacagcaataaacggaacagcaaccatgatagtaatagcagatttagacaaaagtcctcagtggatgcaagcactaatgggtaaagttttaaggaggagtgaagacttttacataaagtgtctcctctccaaatatgtgttaattactaagggaaaaatggtaacttcgcaatggcaaattctggcagaaatcaacttaagcgatcaaagtcagtatcatatt

SEQ ID NO: 811250 - DNA, 593 bp, Homo sapiens
atcataaatttgtttgtttgttttgggtttggttttgaaatggagtttcactcttgttgtccaggctggagtgcaatggcaccatctcggctcactgcaacctccrcctcccgggttcaagctattctcctgcctcagcctcccaagtagctaggattacaggcgtgcgccaccatgcctggctaatcttgtatttttagtagagacggggtttccccatgttggtcaggctggtctcaaacttctgacctcaggtgatccgcccgcctcggcctcccaaagtgctgggattaaagatgtgagccaccacgcctggccccataaatttttatttttgtttcaaaccactacgttttgggataatttgctacacagcaataaacggaacagcaaccatgatagtaatagcagatttagacaaaagtcctcagtggatgcaagcactaatgggtaaagttttaaggaggagtgaagacttttacataaagtgtctcctctccaaatatgtgttaattactaagggaaaaatggtaacttcgcaatggcaaattctggcagaaatcaacttaagcgatcaaagtcagtatcatatt

SEQ ID NO: 811251 - DNA, 634 bp, Homo sapiens
agggactaaaagatacaataagaatttgttcctttaattgtcctgttgatgcacaaaatacttaatgcttctacataggtctgctcttgtgccccacagagcactaagggaaagtccccacaataaaagtgcttttcacctgagctgctacgtgtgacagtaaagcagctgaaggttaaaaaaatcaaagctccccaaatatgggtatgacagctggtccaacctcacggtctgtactttccctctgtaacagcatggataaatacagagataactagcaactgataccctagtgtgccaagcaatcgatgtatccgtgtgattaaaaaccagcatttaaccatactctagatacactaaatatcaaccccacactcatagcctgtaattccactttgcttccagatggcagttacaattggaaaggaaatacctagtttacagaaggcattaatacttcattgttgcagaaaccaaacccttaaaaaaatgtatcctggactttctgacctggataataacaaacagtgaaaaatatgtatctaagaatacacttggaacagaaatgtgaaaaaccaaaagtaagagatattatgaaggatcaaatataaaatsacccactgctaaagaggca

SEQ ID NO: 811252 - DNA, 570 bp, Homo sapiens
cctcatttggtttataatgctgtttaagacatttgttttcttattgaacctctgtttggttgtttcatccactgttgaaagtgggatgttgaaatcaccaactattattgcagaactgtccacytcttcaaatctgtttgtctttgtttcatatatcctgcggatcttttattaggtaaatatgtaaggataatatctttttgatgaattaaacattcttgatatttgcatagtacctctagctctattttggttactgtttgaattaattttcccgtcccttttaaaacatgtaaaaagtcattctgtcaatctttgacttttaactggagtttaatttatctgcatttaaggtaattactgataagaaagattttgctatttttgtccttgttttctacaaatttgttgttgttgtggttgttattcaattcctccaaaaactgctcatttttacatttgattgtttttctagggtaccattttgactgtctcatttctctttagtatattttaacagttattttcttagtggtcattaagggtattataactaatatcttaaattta

SEQ ID NO: 811253 - DNA, 637 bp, Homo sapiens
gagaaagagttcagtcaactgagaaaaaacatttttccagcaaaacaagatccaagaagagaaaaacataaaggccttttaaatatacctataggttggatatccacttttaattaagctgagcactctttaagaaaatccttttaaatcccttattacccaactttagctgcaccaagtagccaatatttccatctttcaaattttacaaaggtaagcttccaggtgctcagagaaagaaaagttcaaggcagttcatggaggggaagagaatcaagaaatggcaaaggtcacaaagatatctaactagaaagaactcattccctaagccaagattgaacccaggctgcctttgtaaaatggtggaggctaaaacaaagcactgccacgtggttctcccaaggacataaaacaagatagagggctgcagcaaaatttgctactgatcagtctgccaggctggcttaaacagtaggaacatggagtcctaggctggcgccccaacctaaggtacccctctttctggcagaaccatacagaaagacatgcaaagcacaccagattggctacakcttaagactaacctcataaatcccttttcataatcaaaactttacagagaatataaacagtgata

SEQ ID NO: 811254 - DNA, 514 bp, Homo sapiens
ctcagctcactgtaatctccgtctcccaggttcaagtgattctcctgcttcagcctcctcggtagctgggatcacaggcacccaacaccacgcctggctaattacttgtaattttagtagagacggggtttgaccatattggccaggctggtctcgaactcctgaccttgtgatccgcccgcctcagcctcccaaagtgctgggattataggtgtgaaccaccacaccctacatcaacctgcctttcaatgcccactgcctattattcaaaagtttagagcaaaacagaaaagtccagcagtttctctacatataaagcacatcatagagtcgaaggcaactgtcactaccccaagttctcaccccttcaggaacaatattgtaagttccttcaatcatttcataaacaaaaaaaaacaaamaaacaatgactgcctgcactaccattgctatagccgtcaaacccacagctgcagttgtcaccatcactaactcttcaggggtgaagaaaaaa

SEQ ID NO: 811255 - DNA, 608 bp, Homo sapiens
gcctcaggcggggcctctgggcagtgtcccctcgggatgtttgccgtgctggatctcacacccggctctgacacgctgccgtgtcccccgtgtgcctgcgcctggggtctccgtgtgtgtgtctgtgtacacgcatgtggttttgctttcttgtgggctggaaaatctaatagtagtcagggcgtggtggttgacacctataatcccagcactttgggaggctaaggtgggtggatcacttgaagtcgggagtttgagaccagcctggccaacgtggcaaaaccttgtctctaccagaaatatcaaaaattaaccgggcatggtggcacatgcctctaatcacagctacctgggaggccgaggtaggacaatcacttgaacccgggaggcggaggctgcggtgagccgagatcgcaccactacactccagcctgggcgacagagcgagactctgtctcaaaacaaaacaaaatgcaggcacggacgtttcagccccctcttcctgtggatgctgagagggtttccagaagaaggagaatgtccccgtgctggtggctcatccaggtgtgggccggtktgcggcggggcgtgggcagaggagaggcttc

SEQ ID NO: 811256 - DNA, 604 bp, Homo sapiens
gtctttaatgacctctaattttctgactctaaaaaatcttttttaaagaaaaggatcagattaatgtcactctacatttaattttttaaaaggcattttcaaatgaaagaagccagacatagtttaggatttamgcttgacaaaaccaagcccaactcaagagaactgaaagcagagactcaaacctgtgtttgcacaccggcatttacagcagcattattcattgcaggcaaaaggtggaaacagcccaaattgatggaagaatggataatcagaatgtggtacacgaatacgacagaatattattcacctaaaacaggaatgaaattttgacacatgctacaaaatggatgagcctggaaaacattatactaagtgaaatgtcagacacggaaaaatactgtatcattgcattcacatgacctacctaaatagtctaataaaaaacacagaaaggagtggggtggttgccaggggctggggcaaaggaaataaggagctattgtttaatggcatggacttccagttgggatgatgaaaaggttctatagatgggtaatactggtggttgtacgacaatgtgagtatacttaatgccatagaa

SEQ ID NO: 811257 - DNA, 596 bp, Homo sapiens
gagttagaggcttccgtccaagtcctttccaaaggcaaattaccatgcctctccttgaggcctgtgttcttgtcaagcccaggagccctgcaggatgtgatcccccaaagcaggccacctgycaccatgcacgcccacctccagagtccctgcttttcctagaaaggcatccaggacttctgtacatgaacctcagcctgcctggctcacagcatccctcctctcccctcctatcaacaaggctgttatcaaaataatttttttgtttttgaggctgagtctctctctgttgctcagactggagtacagtggagctatctcggctcactgcaacctccgcctcccgggttcaatctattctcctgcctcaacctcccgagtagctgggactacaggtgcccaccaccatgcctggctaatttttatatttttagtggagatggggttttgccatggtggccaggctggtctcgaatttctggcctcaagtgatctgcccacctcggcctcccaaaatgctgggattacaggcgtgagccaccgtgtctggcccaaaataaatttttaaaaaattttcatcaattatttatttatcc

SEQ ID NO: 811258 - DNA, 633 bp, Homo sapiens
tcacaacctccaaaggcccctgcctctctggagcaaaagccaaaaccccacccaaccagtggccaacatgacccacgtgtctctcygcgggctctcccggggctctccctgggctgcctcctgcctggctggctccaccacactggcctccagctgctccttggggcctgtgctctggccactgcctcttcctggaatgctctcccctccggatgtcttcatggttcactgcctctcttcctcacctctgtgttcatgtgtcatattccgggctatgggttggacaggaccagggtgtacatggggaggctggatgggagggccctagtcgcctctgctccccattttcttaaaccagagcagcttcacttttgtgggcctcatatactggagtttcacatacgattttatttgagcaaaggatactaactactgtctcaacagaaagcttgaaaaaccaccagatcgaaaggggcatggcaggtggttgggagtcttgttagatattgttgatgtatttgtgggaaatgataatgtgtggcccaggatagtgggggaaatgaaacagatggccttgggaaacactgttgagggtgaatttaccaagcatgtttattgattggctgtggaaac

SEQ ID NO: 811259 - DNA, 633 bp, Homo sapiens
tcacaacctccaaaggcccctgcctctctggagcaaaagccaaaaccccacccaaccagtggccaacatgacccacgtgtctctctgcgggctctcccggggctctccctgggctgcctcctgcctggctggctccaccacactggcctccagctgctccttggggcctgtgctctggccactgcctcttcctggaatgctctcccctccggatgtcttcatggttcactgcctctcttcctcacctctgtgttcatgtgtcatattccgggctatgggttggacaggaccagggtgtacatggggaggctggatgggagggccctagtcgcctctgctccccattttcttaaaccagagcagcttcacttttgtgggcctcatatactggagtttcacatacgattttatttgagcaaaggatactaactactgtctcaacagaaagcttgaaaaaccaccagatcgaaaggggcatggcaggtggttgggagtcttgttagayattgttgatgtatttgtgggaaatgataatgtgtggcccaggatagtgggggaaatgaaacagatggccttgggaaacactgttgagggtgaatttaccaagcatgtttattgattggctgtggaaac

SEQ ID NO: 811260 - DNA, 633 bp, Homo sapiens
tcacaacctccaaaggcccctgcctctctggagcaaaagccaaaaccccacccaaccagtggccaacatgacccacgtgtctctctgcgggctctcccggggctctccctgggctgcctcctgcctggctggctccaccacactggcctccagctgctccttggggcctgtgctctggccactgcctcttcctggaatgctctcccctccggatgtcttcatggttcactgcctctcttcctcacctctgtgttcatgtgtcatattccgggctatgggttggacaggaccagggtgtacatggggaggctggatgggagggccctagtcgcctctgctccccattttcttaaaccagagcagcttcacttttgtgggcctcatatactggagtttcacatacgattttatttgagcaaaggatactaactactgtctcaacagaaagcttgaaaaaccaccagatcgaaaggggcatggcaggtggttgggagtcttgttagatattgttgatgtatttgtgggaaatgataatgtgtggcccaggatagtgggggaaatgaaacagatggccttgggaaacactgktgagggtgaatttaccaagcatgtttattgattggctgtggaaac

SEQ ID NO: 811261 - DNA, 501 bp, Homo sapiens
ttaaggtgccttatatagagattcttcatgcccgctgagacgtatttgttttcttgtcttgaacaagggctagtttaaattgttgcakattgtgatttatagtggttttataaattctggtaggataaaattttacaaggcaaaaattaaaagtgtctttggactcttaattaggtatgttaacttggtttatttttcttcccccaagtaaattagatctctgctgcaagggtacaaaaacacatcttcctattcatgaaagaactttcaagattggttgagtcaacctgtatggaaacttgctaaatattttatagaaatatcagagaaaaggaaataattaaagatcaatagcaactgcctacgtacactactactaaatggaagagcaattctatggcttttagtatattcagagttgtgtatccattaccacaattgattttaaaacaatttccttacccctgaaagaaggtttgcatctcttagatgtcacctctc

SEQ ID NO: 811262 - DNA, 656 bp, Homo sapiens
gtattagaaagaaatctataggatcatagttcragatagtattcaaaatccttttcccaacaacatttcacagaaggttttcgttttcccatctattgatgattcttggcctaaatcagtaattataccaggaattcaaattttatatcttattttttttttcttttttttgtcctcacaatctgttcccaaggaattctaattttaattagaaaattttaattgcatctttctttcggcattattagctggcattcttctgtaaaaagagcctctcctttccctattgttttgaatatcattatgcactcatgaacctttttaaattcaatgtacttattattcattactgtcattatttgttttgagcacaaaattacccaaatttagccagttggatccttcaagtcagcttatgtgttcttttgatgtgaccccatttagtctttgagcttgtggcatgatatgcccaaggctcaccatagtactttctttgccccatcctgatgctagccatgtctctaaaaagccctgggtcccttctgtaggaaaggatatttaaagaccataatctgagtaggctttaaaacttctttatcttctctgtatctgttcactctttttttaaatttaggttcgtagtaactatattgctg

SEQ ID NO: 811263 - DNA, 593 bp, Homo sapiens
tataagcattgctgggtttggtgccttttctaagcctgagatcaatggataggctccagggagctgtgagccaccagaaattgggtacatagttcattatctacattttgcatggggttggaacggaaagagtcagttttcaggagcattctcagagaggtttatggtcaaaaacagcttaggaaactactgctcaattcaggtgtattttcagattttatcctcttagaattttggtagctttgaattctttctgtcctagtcttaggagtctctgactagatgcctcttcttcctgataggaacgtgtctgctaacattgcttgctgtgtgtgccttcctttctcagaggtccttgttgaatttacttagcagtcaagaggaagattttaatagcaaagaagccctcctgctagtcacggttcttaccagtttgtccaagttactggagccctcctctcctcaggtactagtaccgctmacttaatcccatttagcattcctcagaaggcaaggattattgcatcataaaagtgtatatctaaatgtcctcttgaaattgagcttattttacataatgtgtttaattatac

SEQ ID NO: 811264 - DNA, 494 bp, Homo sapiens
aaggtatgtttaaactgcagcatgagatatacaggtgaggcaaaaagattctttgaataacgataaggactgtttggcattagactggatcaatagggaggtgtttttaaactttcccrtgtgtttcaaattttttcatcagatttttaataactggttatactcattggtaaaacgaaagacaccatgaagagtacagaaaaaaatatgaatgtatttgaagagcctggagaggtgtgtgtatagtgtgagtgtgtgcatgtgtgtgtgaacgtgtgagtgtggtgactcttgagagacctgggacagcagtgatcttcaggggaatcggggcagatgaccacgccctcctgggactcatcctgtggggcatctactggcaagagactaaggggtgggagaaagcttgacccagtagatcagctcctttgtgatgatgcctgggatgcctgacagagacaaatacttaaaggtgaggacactgattaaatgat

SEQ ID NO: 811265 - DNA, 608 bp, Homo sapiens
tttgtcaattattctatggaaacaattgtttttttctacccctcaacacctccacccctactttttaagactttttttttttttttgagacagagtcgctctgttgcccaggstggagggcaatggcacaacctcggctcactgcaacctccgcctcccggtttaagcatttctcttgcctcagcctcccacgtagctgggattacaggcatctgccaccatgcctgactaatttttgtatttttcagtagagaaggtgtttcaccatgttggccaggctggtctcaaactcctgacctcaagtgatccacccgcctcagcctcccaaagtgctggaattataggcatgagcgcctggctcaagactttcaaatctaacacattttattttttaatagaatgtattctttaaaagttttagattgtaagaaaaacagaagatagtacagagaattcccatataccctgcatctagtttatctctatcacccaggctggagttgagtggcacggtcacagctcactacagcctcaactcctgggctcaagcaatcctcccgcctcaggctgctgaggaccacaggtgcacaccaccatgccttgtattg

SEQ ID NO: 811266 - DNA, 588 bp, Homo sapiens
tcttattgcatgtatataccacattttgcttatccattcatctgttgatggacacttgggttgcttccatgtttttgctattgtaaataatgctgctattaacatagttgtacaaatgtctcttccagaccctgcttccagttcttttggggatatactcagaagtagaattgtgggatcatactgtaattctatttctaatttgttgaggaactaccatactgtttccacagtggctgatcattttacatgatcactaacagtgtacaagagttctaatttctccagttcttgtcaaaacttgttattttctgattttttgatagtaaacatcctaacgagtgtaaggtacatatttgattaatttttaaaacatttattatggaaaattcaaacatatacagaagtagagacaataatataatgaatccccatgtgcccatcatacagatgcaatggttattaatatttggccaattttatatcatctatacctcatcccaatctcactgaattattttaaagaaaatcccagaatcttrtaattgtatttataaatacttcaattagaattacagaattttgaag

SEQ ID NO: 811267 - DNA, 617 bp, Homo sapiens
ctctcctctgagcaactgtaagatacctagtagtagcyctgccctatcctggaattagccagaacgtcctcatgtagcctaccaagaccgcttctggccctgtaatcaccagtgtgcatttgaattctgactccactatatatcagatgtatgggtttgggtcagttacccaatctcattaagttactgttttcttatctgtaaaaccctgtatctcatgtagataatgtattccctgcttagcacagtccctgcacagaatgtgtagtcagctatgatggtgctggtggtggcagcagcagtggcagctttcaaaggctgatctgctctcaagctcgagacaacacatgaatgaaaataatagctttgtgctagaaatgctctttgggagttgaggctggcatgttctgcgggtccaactacaggaaagatgaaatttaagaatggaaaaccaggagattcaaaatagaatgtgtgcattgtgtgtaaatagtagaagaaatgggtgagtatcaactaagaagtttaaagaaagcccagtgaagttgtgttaaggaatctgggactcaagaaaactggagggactcaggagcagccacttcctatcccaggatcca

SEQ ID NO: 811268 - DNA, 469 bp, Homo sapiens
cggccaagctttttaaaattcaacttccaaccagtgtaataccacatgatgggaaggcgagagatgagatatcacactttttccacactccctaatgatactaataatamttgttagctcctcacatggtgtaaaagtctactcatttgaccccgacagccacctatgagctaggtaggaccgtggtctctacttcatggaagaggagcaggctgagactagcaagtgaattattcaggcatatgaagctgctccgtggcagagcccagttcattccttgccctcctactctgaaacctgtgtgctttcccgagtccctgctggctggccaggccaggtggcagtaggggaaggcaaaggggctgggctggagccagcagaggctcaggtcctctggtgcagtgtcaagtgtgacatcagagccggatgggtgtgacacattgtcctctatctggcccagcagcggccg

SEQ ID NO: 811269 - DNA, 587 bp, Homo sapiens
cacctagattaaatagtcattaatgttttgccatagttgcttgatttttctttctacacacacrcacacacacacacacatgtttttgctgaatcatttgagagtacagtgcagatattatgacactcctaaatatataagcatttatctcctaagaataaggacattcttctacataacatcaatgccattattaaacctaagagtccataataccacctaatatccagttaatacttaaatgaaatttccctaagtgtcccaagaatatttttatttatttatttattttgagacagagtctcattctgtcacccaggctggagtgcagtggtgcgatctcggcttactgcaacctctgcctcccaggttcaagcaattctcctgcctcagcctcccaagtagctgggactacaggcacctgccaccatgcccagctaattttttgtattttagtaaagacagggtttcaccatgttgcccagggtggtctggaactcctgagctcaggtaatctgcccaccttgacctctcaaagtgctaccaagaatatctttatagctggttcttgtttgttttgagccaga

SEQ ID NO: 811270 - DNA, 606 bp, Homo sapiens
caatagaggcacacttgctgtagcatgactgaaatccttcccgttaagatccacaaatttccttccaaccaaatkaaagctttccataggacttacacttttttttgaaatcacagaagtaatccatgctcattgtataaaacccccgaaataaatataaacaaagagaagaaagaaaaacataattaatctcagcctcaataaccaatagcattttagggaatgtcctttattaccaatttatttatacatgtgattgacttggtatactcttagtacatactctgttccaggcaccatgccaggttttgagtttgcaaagaagaacaagattttctctacaagacaaatatagccccctctctctgattatataaacacatgcatatataagttttataaaaaggtcatattttacaaacagtgggccctctgtgtctgccattctgcattcatgagttcaaccaaccacagatcaaaaatgtttggaaaaaatttttacagtacaatagaaagtaatacaaataaaaaccaatgtagtataacaactacttacatagcgattgcaatgtattaggtattatgagtaatttagagaagatctga

SEQ ID NO: 811271 - DNA, 606 bp, Homo sapiens
caatagaggcacacttgctgtagcatgactgaaatccttcccgttaagatccacaaatttccttccaaccaaattaaagctttccataggacttacacttttttttgaaatcacagaagtaatccatgctcattgtataaaacccccgaaataaatataaacaaagagaagaaagaaaaacataattaatctcagcctcaataaccaatagcattttagggaatgtcctttattaccaatttatttatacatgtgattgacttggtatactcttagtacatactctgttccaggcaccatgccaggttttgagtttgcaaagaagaacaagattttctctacaagacaaatatagccccctctctctgattatataaacacatgcatatataagttttataaaaaggtcatattttacaaacagtgggccctctgtgtctgccattctgcattcatgagttcaaccaaccacagatcaaaaatgtttggaaaaaatttttacagtacaatagaaagtaatacaaataaaaaccaatgtagtataacaactacttacatagcrattgcaatgtattaggtattatgagtaatttagagaagatctga

SEQ ID NO: 811272 - DNA, 419 bp, Homo sapiens
ggtcctggcgcccccgccgccgcttcccggcttcccgtcctgggggatcctgaaggagagcctgaggggtccggggggccccgccgccgcctccrgacttcctggtcgggggaaccccgaacggcaacctgggggggtgtcctggggcgcccgtgccgccgcttcccgactgcgcgtcctgagggaccccgaatgggagccagaggggttcaggggcccccgccgccgcttcctggttgtggcggccccgaacgggaacttgggggggtctggagcgtccccgttgccgcctgtagggcttcctggcctgggggaccccgaatgagaacctgagggagtctgcggggagtccagggcgccgtcgccgccgcctcccggcttcctggccagggggaccccaaactgtggcgtggggggtg

SEQ ID NO: 811273 - DNA, 629 bp, Homo sapiens
actcaactctacttgctgtgtgaccctgcacaagtcacatcccctctctgagcctcrgtttccttatctgcgaaagtggggcagtggttgcaggcttctcacagggctgtgcagattcaacaggaccacgaggcactcagctagaggtgggatccgtgtcagcacccatcatgcttggtcgttcaccatcatccccatcctcacactgtttgcaaaacttcgagtctggggtctctggagcacaggggcaagaagagccacatccccaggagagccacatccccagaaggtgtcccaaggttcatgttctgccaccgtttggatccagttgaattgcaaatgccagaaaaagcacaaataaggaatgatttctcttttcacctaagggaagctgccaggttggccattcagggttattttcccctccccgacaatcactggggcccaggccccttccacctctttgatcccccattcttatctatgacacctgcctcatggtccaaaatggctgcctgagcacctgccatcatctccatattccagctgacaggtagagaggagcatgtgccacttctcttgaaaggcatttccagaaaatcctgcttatttacgccatgggtcagcat

SEQ ID NO: 811274 - DNA, 619 bp, Homo sapiens
atgcttgtcaaccgatcactttcctgagtgcccatcaaatgactgctgttaaacccccaaatcccccccaaactcccccctttggtgatcactcgggcccaccaggggctctggaagttgggagccacatgtggagtccctggagtgcctggagctcccaaggcagccacgtgtcctccctgtccaccatccaggccccctgtggttcagctcccgccagtcgcccagtcctgccgcagaagtggggcggccttgattaagcagccagtgaaggggaacgccccagtttgcagtggctgagtcatcctgacatctccctggtgctggaccccatcggggggctgagggcggggtagcggggcgcgggtggacactggagagcccctcttgggcaggtccttcaacatatcagtgtagctcccatgttgtcaaaaataataacaaaaacagaatagaggtggcagctacattctaggtgccgttctgaatctgtgcttacamacgttaactcatttcttcctcctaacaatccctcaaggtgggcactgttactcttctccatagacagatgaggaagacggaagcacagagaggttgagcaacttgccccaggtcacac

SEQ ID NO: 811275 - DNA, 619 bp, Homo sapiens
atgcttgtcaaccgatcactttcctgagtgcccatcaaatgactgctgttaaacccccaaatcccccccaaactcccccctttggtgatcactcgggcccaccaggggctctggaagttgggagccacatgtggagtccctggagtgcctggagctcccaaggcagccacgtgtcctccctgtccaccatccaggccccctgtggttcagctcccgccagtcgcccagtcctgccgcagaagtggggcggccttgattaagcagccagtgaaggggaacgccccagtttgcagtggctgagtcatcctgacatctccctggtgctggaccccatcggggggctgagggcggggtagcggggcgcgggtggacactggagagcccctcttgggcaggtccttcaacatatcagtgtagctcccatgttgtcaaaaataataacaaaaacagaatagaggtggcagctacattctaggtgccgttctgaatctgtgcttacacacrttaactcatttcttcctcctaacaatccctcaaggtgggcactgttactcttctccatagacagatgaggaagacggaagcacagagaggttgagcaacttgccccaggtcacac

SEQ ID NO: 811276 - DNA, 649 bp, Homo sapiens
atgcagcctcagtccagcatccttgctcttaacctctgagaaaaggcagtcaagagccctggggtgtgtgtgtgcggggggtgtctctgtagcgattcaggtggccccygcagcagatggactgctgtccaaacaaacatccctgacaatcgggcagagctccttccaggcgttaggaatccaggttgtggcagccaacagcttgtgggctgtgtgaagtgacctcaggccagtgaaggcccctccctgtgcctcagtttccctctctgcaaaatagggctcagatcacagcaactccgctgacaggggacggcaggttggaggagacaaggatgctactgacttgcttacttagcagagggcctggcacggggcgccaactctaaatagtcggagcagctgttattatccccccgacatcccctcatttgctgatcacgggggttaattataagcggcattaaattatacacacacagacgcgccaacctcgcttccccagaacccctgaatttccgcaaactctcaattacccacgtgacagcgcgacgatgggccatcctcccagcctctctccccacagcctgcctcatccgagggtcccaggcttccagagccatggcttctccgcccgccggatacccctctg

SEQ ID NO: 811277 - DNA, 583 bp, Homo sapiens
tatgttgcatgtattttctgaattcaggtgccctgtggttttccttctatgtggtaatgtgttatggatgcttgtgaatgagcactgtgtgagacrctaaattaaatatgtctaataaacacgaattctgctttctcaaggcctataataaaaatgactgtcatttatgtgcacttccacacaagagtaaattattacagccagttatagagatgcttggttctcagaaaggccaattgcagatacataagaattaatcctctttctccttctcttctaccatctctgaagtgatagagaaaattttctttgattttgaaatacatctgaaaaaaaaaagtatagtttgaattgcttttaaacttcccccgaattgattaaagataaggagagaaattctacaattagggcagtaaaacgaatgtgagtatcttaccctaggaggcagtagttatttggaaatagttgcctagtaccatttattttgctgagggttgcctccatagcatttggaagcctgcccctaccaggagaaaaggggtcttaaagctgccatcagttgtgaattaggttacaggggcat

SEQ ID NO: 811278 - DNA, 606 bp, Homo sapiens
tgtaattctcccactataattttgtggttatttaagtgtcttcayaggtctctaagaacttgttttatgaatctggatgctctagtgtcaggtatatatgtatgtatatgtgtatttaggatagaaaactcttattttttcatagttctctttaccattatgtaatgcccctctttgtcttttttgatcattgttggattaaagtctgttttgtctaaaattaaaatagcaatctctgctttttttccatttgcttggtatatattttttcatccctttactttgagcctatggatgtcattgcaggtcaggtgggtctcttgaagacagcatagtgtagagtcttgtttgttaattcaacttgccactcggtgccttttaagtggggcatttagcccatttacatactgttttatgcagatttgatcctgtctttgtgatgcccgctggttattatgcagacttgattgcgaagttgctctatagtgtctatggtctatgtatttaagtgtgtttttgtggtggccagtcttttgtttccatatttagtactcccttacagacctcttataaggcaggtctgctggtaatgaattcccatagcat

SEQ ID NO: 811279 - DNA, 606 bp, Homo sapiens
tgtaattctcccactataattttgtggttatttaagtgtcttcacaggtctctaagaacttgttttatgaatctggatgctctagtgtcaggtatatatgtatgtatatgtgtatttaggatagmaaactcttattttttcatagttctctttaccattatgtaatgcccctctttgtcttttttgatcattgttggattaaagtctgttttgtctaaaattaaaatagcaatctctgctttttttccatttgcttggtatatattttttcatccctttactttgagcctatggatgtcattgcaggtcaggtgggtctcttgaagacagcatagtgtagagtcttgtttgttaattcaacttgccactcggtgccttttaagtggggcatttagcccatttacatactgttttatgcagatttgatcctgtctttgtgatgcccgctggttattatgcagacttgattgcgaagttgctctatagtgtctatggtctatgtatttaagtgtgtttttgtggtggccagtcttttgtttccatatttagtactcccttacagacctcttataaggcaggtctgctggtaatgaattcccatagcat

SEQ ID NO: 811280 - DNA, 497 bp, Homo sapiens
atttgcagtctgactgagaacatatgtttatatatttatacctgatattaactagaataaatgtttcaatactaagtatacagacattttttaaaatgctatttgtgactttgtaaattggtttcatgaccaactaatggattgtgacctgtagtttgaaaaacatagggctgcagcaactgagcaaccacacaaagctgactagacaactttccatgttagttcactacctttttccagtgttactgacctctttgctcttaatcacatatgtgcttctaaaaacaagtttaatctgtaatatgggcaatggagaattttgtgattaattcttgaactagtcacactctctcacttgattagctgttctaattttgatttttcagcatgaacccacagattctactttgcatttcccwcgtacatataatgaggcattgtttttcttttgtctgttaagttccatgatccttacacagatcattgtcctcataatt

SEQ ID NO: 811281 - DNA, 509 bp, Homo sapiens
gaggctttggaaaaatacttggcttggtcaggagctagaactctaatagtggggactagsgggtagagggatgaaggggaggtatagtatctacttctataatgctgagatttaagaatatttccttacccggtccctcaagcctatcataaatattctatattgggttgacaaattacagctcacaggctaaatctggccctctgcctgtcgtgtaaataaaattttgtttgaacacagccatgctcactggattgtctatggctgtttgcaccttgcaacagcagagttgagtagttgcaacagagaccatgtgatctgcaaagcctaaaatatttactatctagtcctttacagaaaaaggcttttggcctgtattatttaaacaaatccatacgtgagttatactgaggactctctacatgctcagtaggcacccagtttgtgcacattgtaaatacacaatagattggaagcccagtttctattctcaaggaatttaaaatcta

SEQ ID NO: 811282 - DNA, 537 bp, Homo sapiens
aactaaaagagtataattggattgtttgtaacacaaaggataaatgcttgaggcaatggtatcccatttgccctgatatgattattacacattgtatgcctatatcaaaatatctcatataccccataaatatatatacacatactatatacccacaaaaattaaaaattaaaaaaacagaattattagtttgtggttttgggcaccacaatgtataaagaaggaattttgtgacatcaacaaccaaagtgggtagataaggagctgtaaaggagctgagtttttgtatgttattgaagttaagctgttataaatccaaattagaatgttataattttaagatgtgaaatgtaatccctctggtaaccagaaataaaataactatagaatacatataaaaggaaatgagaaagaaatttaaatgtttccctataaaaaatcagctaaacataaaagaagacagtaatgcagaaaatgatggacaaaaaagcttaaggcttatagaaaacaratagcaaaatgatggaaataagtccc

SEQ ID NO: 811283 - DNA, 601 bp, Homo sapiens
cccccttattttgtcaactcttacmcaccctttgagaaccaggagaggcatcacctcttcctggaagccttccctggcctcccatttgcacgttaagtgatggccctcacaacgtcatctacagtaactctccttcccactggtctgtgagatcctcggggcctgggcagggtcttactcatccctgtgtctccagcgtggcatccgatgggtggcggccatccacacacaggctgggcgctgcaccgccgggcagagctccttgtcctttcaggacccgttatctcaagatttcctatcaagccacagtttcccagcctctgtgcatgctgggaaacctctgtctatgcaggagggaataaaatctaaggaacaagtgaccctggagaagtgctatgggcagaaaatataacaacaccaaaaataattttggaccgacttatgacggagccgtaagtggcgataagaaaagctgggacacacctgacccgtgaggctgatgggggaagggccagttttgcctggcacatcccacagggctgccatccaacgtagaaaacgccagtgtggagcatgcgcggctctggcccaaagcaaccat

SEQ ID NO: 811284 - DNA, 427 bp, Homo sapiens
ctcattcttataagagttatggatgacaagattgcaaccctcgatgtggggcctagaaagagaagcagacagctggggacaggyaatgacagtggctttgtggagctttgtaatatttatagtggatctgtcaccctgaatctggggactccgattcctgtcatttgcttctgggcggcacccacccatggaagcttcaaagtggatcttcaaggggcagcaactgcagcctagaaaatccgaggccccatcccagcacctttccctgagggacctggatctctcagagcacagcaccctgctccctccacaccccagcccagtgagccggaccaggcaggccctcagagcagggcatccctctctgtcgtcagggggcatcaggcatgcctttctgggcctcggctcctgtttctctgaatccctc

SEQ ID NO: 811285 - DNA, 293 bp, Homo sapiens
ttgagttttggtagataagcacatctgagtcttgctgtgttaatgtgtctgtattttggtgtatctgcttgcttgtcgtgtggggcatatgccaagtccagtagtggatgggctggggaagaccagaccttatcacatggtgcccttggggggaaatcttaattccaatgtgtgaaaccagtgaaagtatgattttctgggtcaattttaaaaatataygttcaagcaaaaagcaacctgttatctcttctctttctgcctctgcacacagcagcctccattgcctagggtat

SEQ ID NO: 811286 - DNA, 710 bp, Homo sapiens
gtgtatttttaaaggatcctgtgttatttatctcagcatctctgcccccctgcgctccacgctcctatccatgcagtaatgacatccaaacacccacactgtatcttaacaatctgatgagataaatgcctcatcgttgggctccgtggacacagagtagcaattctattctgctatcaaagagctcagaaactcaggcaaccaaggcaggatgagcaggcatgtggcttgccatgtgcccatcattgggcaaaaacacattctccctgccccaaagcccctgtttttccccaaagcagcctcactttttcccttcctccacctccagaacaatgccttcgagcctgctggcatttgagaatgggccgggcgggcagtactgggggcatatggccttgttattttgatggagctcctagtgggatgcaccagccactggccaggtcctggaaataattaagctgagcatattgacctgggggttgcagggccttgggcatgctgcaacctccaacacctgttctcatgctccttctgcagtgaccctctcgtgctctaggcacacctgttagatggaacctgggactttcaaggttgtcactgccagggctggcatgatgtgcttgcacycctgctccctttatggacctgggagttgggaaggtgcattgggttccaagagaagcaggaactgatttggtcttgtagtg

SEQ ID NO: 811287 - DNA, 648 bp, Homo sapiens
atgaatgtttgatgacttggaatccagtcttttataaaactctcagtgttctgtgattccaggcactcatggctgtggcaggcatcctgccaggtggagctgggagttcagcacagaagtaagtcggggaggaggtatgcattgccacagacttaggaagtgttccctggacctgctgatgataggttggtcttagccatgttcctgaacaagtaagttgtctaatgaaaggaaaacataccaacctgttagtggagttagcaccctagacccatagactctaaggttggaaggacttttgaagtcatctagccccttgccccactcgatgcgtgattaatacgcaccacagaaactccgggctctgaatactgaacattgacccagacccctattgcgttagaaaatattattgcaattagtggaatgctgctagaatattggctccagacctgagtctcaaagttggaagagatttagaaagaaggatgtccagaggaaggaacagacatgagtgaagttggaaaatggagactggcaaagagtagctcgaaaaagaacaaagtttcctaataatgaccacaaatgagtatttggctgttcaatggawatatgcttgctccacgctcattggatgctagcctgctc

SEQ ID NO: 811288 - DNA, 562 bp, Homo sapiens
gaccagccctgtgtaagccataataacccagcctgcatgaggataccataaagcggaagccgggcggctctttgaagggatgacgtgggaagggtatcctctcctttccagcattccttcatttggggagcactgcctccttgggacaagactctgtattggggaggcagcactgaatggggaagtccctggtctggtgggggacagccaccacctggcacgtgatggtggcaagaatgcctaatgcttatgagtgccgcagtgtgcagctctgtgccttacacacgtcacctcccaccatctcccaaggaccgtgtggggtggatcatacagtcaggcactgcataacaagagtctgatcaaggacagagcacatgtacgatggtagtcccataaaactatcacggagccgaaacctccctatctttctgccgtcgtaatggtgcagtggcactcattacttacstgtgtgtggtggtgtggtgctgttgtaaacaaacctactgggctgacagtcttatcaaagtctagcacagacagttctgtacagtactgtacagta

SEQ ID NO: 811289 - DNA, 538 bp, Homo sapiens
agtaaaaacgttaatgttgtatatttatttcatcaagatacacattattgaatgacctgatcattcaatattaggtgattctcctgtgacgttatcccatcatatgaaaatattcagacacccacattcccaakgaacaaaattgttctctgtgttaaatataattggatttactttaacttctgagaaacaaagagttaattaataagagtgaaaatcacttttttctttttatataatgagaattactataacctattcatactaattaaaatttgcacattagcatagcaatggcgaatttttaacctaataagaaaaaagtaagtttgagatatgtatgctggattttaataaatactttttcagcatcttttgagagaagaacattttcttttctaatgtaatggtgtaataaatttctttagtagagttataagatttgaattacataaattatataatcaaatattttcattaattaagatatttaatcatagctgtacaatttattacgtctttatgtgggaagagaaat

SEQ ID NO: 811290 - DNA, 659 bp, Homo sapiens
ttgcagcatgcatcagtactttattcctttttatggttgaataattccattgttttcatataccaccatgtgtttatccattcatccagtgatgaacatttgggctgtttttttaccttttatttatrgtgaatattgttactaaaaacatgcatgcacatgtacttatgtcagtaatttcttttaattattttggatatatagctagggatggaatcccttagccgtatggtaattctatgcttaactttttgaggaactgccaaactgttttacacattggttgaaccactttacattattaccagtaatacacaagtgttttgatatctctgtatctttgccaacacttatttttgtgtgttttgatagtagtccttctaatgtatgtgaagtgatatctcattgtgattttgatttacacttccctgatgactaatgatgttgaacatcttttcatgtgcttgttcaccatttgtatatcttctttggagaaatgcctattaaattcctttgctcatttttttacatgaattgtctatctttttgttgttgaattgtgagttattttatattctaaatactagaactctatcagaggtatggtgtgcaaatagttttctcatttggaaggctgtcttcactttcttgataatcct

SEQ ID NO: 811291 - DNA, 626 bp, Homo sapiens
atttagctcttagatttaggtcattgatccatattgaagctaacatttttgagcctggtacttattatgtagcagaaacttgacctaaattttctcatttaattctctcaaaaacactttgagtgaggtacttttatgatccccattgtatagacaaagaaactgtgatctgcatttgaccttaggcccaggacagagtccagctgagaaaagaactgtacagctaagcctagcctgaattactcacctacaatattatgaactaattaatttaaatggtggttgtctcaagtgactaagttttggagtgttatttttgcagcccaagctgatacaaagaaacaggtacttgcagacataactggtaggagtataaaacttttctctgaaggaaatctggcaatatctaacaaaattagaccagcagtaccacttctagaaatctatactaaaggtatacctgtaaaagtattaaatgaattatgtttgggttatttttttgtgacattataayagcaagtgactgaaaacaaacaaatgcttatcaatttgttagcacagatcagaattttatgcagttgtaaaaagaacgaggaagatttctatgtactgacagagtgaactct

SEQ ID NO: 811292 - DNA, 599 bp, Homo sapiens
tttcagagcaattcactcattcattcatcaagcgtttcttaaacacctacttgtgtacagtgttcaaagatagagaggcagagatgcttcagacacaaatcctgaattctccagcagcagataacttagcctgggaaatgatacataacttgagtcaaaggccaggatggttttggttttgggctgcattctccagtgatgggcaatctcatgaccagctcagggaagtaaaccattgataagccattagctcagcatattgatgttggtcccacctgatgcgaggagtagagagaaccaggccaacctttctaaattggtgggaagcattgccagggtgtgtcaaagagcttattacacagtagcaggttgagttctcatctcagctctgctttttcccttgtatgtgtcactgtggttgattctactccacttacattccttttcttttaccctgttatcagcctttacctccctttatttttaaaattggaaataaactcarggctcactggcagctgaacgtcctgctgtttctgaattttgctatttggatattacatttttatgaagttggttgtttctgggtttcaaatatg

SEQ ID NO: 811293 - DNA, 632 bp, Homo sapiens
gcagggtattcttgcaaccaagttatggttacctaattctactcatttacattctatcttgttgtaaacatctcattcaaaacactccagacacacacaataacataatcgtgyctttctacataaataacctcttacaagatatatttttcaaacattaattaccctaagatttcttgtgcctctctttttcattagatgattccccaccatttgcaattaatgacagttgtactaaagtctacactactttaactatctgtattcagtatttgttattccataaacattcacatctctcatagaaaccacagttggagttattttcattcttgactactcgtgataagtagatcaaatgtaagtataaaaagtggcactgctacaatagcttaggcaaggtgtttcgttttacaaaatgtttttattccaccactaccagaaaggagatttacttcaggttttctcaaactagacaacctctctgccctccatattttgagataatgatctttattattgccgtggaacctcagagcgagactcctaaggaaggtcattctacagcccaaacagcaaagtgtagacctagactacagctagaggaaagtcagttcaattccacaaatatt

SEQ ID NO: 811294 - DNA, 632 bp, Homo sapiens
gcagggtattcttgcaaccaagttatggttacctaattctactcatttacattctatcttgttgtaaacatctcattcaaaacactccagacacacacaataacataatcgtgcctttctacataaataacctcttacaagatatatttttcaaacattaattaccctaagatttcttgtgcctctctttttcattagatgattccccaccatttgcaattaatgacagttgtactaaagtctacactactttaactatctgtattcagtatttgttattccataaacattcacatctctcatagaaaccacagttggagttattttcattcttgactactcgtgataagtagatcaaatgtaagtataaaaagtggcactgctacaatagcttaggcaaggtgtttcgttttacaaaatgtttttattccaccactaccagaaaggagatttacttcaggttttctcaaactagacaacctctctgccctccatattttgagataatgatctttattattgccgtggaacctcagagcgagactcctaaggaaggtcattctacagcccaaacagcaaagtgtagacytagactacagctagaggaaagtcagttcaattccacaaatatt

SEQ ID NO: 811295 - DNA, 615 bp, Homo sapiens
aaagaagaatacatattcttctttcttttttttttttgagaaggggcctcgctctgtcgcccaggctggagtgcagtggcgcaatctcagctcattgcaacctccgcctcccgcgttcaagcrattctcctgcctcagcctcctgagtagctggaaatagaggcgcacgccatcacgcccagctaatttttgtatttttagtagagacaggtttcaccatgttggccaggatggtcttcatcttttgacctcatgatccacctatcttggcctcccgaagtgctgggattacaggcgtgagccactgcacctggccataatacacattcttcttatgtgcccatggaacatataccaagataaaccacattttgggccataaaacaattgcaaaaaatttaaaagaactgaaatcatatagatagtgttctctgaccactatgggattaaactagaaatcaattaaagaacaataataggaaaatctccaacttggaagctaaacaatatacataagccatgggataaagaagtcccaagaaaaattttaaaagtacattgaactaaatgaaaatgaaaatactactattaaaatttgtgggacatttctatagc

SEQ ID NO: 811296 - DNA, 640 bp, Homo sapiens
acgcagatatagttgcatacatcaagtagctgtatttcttgcaacatatccaaagatcccagactaacaacctcttgaaagatagtaatatatatttctttttttttttttaccttttttttttttttttttgagatggagtcttgctcttgtcacccaggctggagtgcaatggcacaatctcggctcactgcaacctctgcctcccagttcaagcaattctcctgcctcagcctcccgagtagctgggaccacaggcgcccaccaccaggcctggctaatttttttgtatttttagtagagacggggttttgtcatgttggccaggctggtcttggactcctgacctcgtgatccactcaccttggcctcccaaaatgctgggattacaggcgtgagccaccacaaccagtcaataagcatatatttctatcctccttcatgtccccaaactcttctaattctttttgttcaaagtgtttttaatattttcgtcttttgtttccatttccactgcctttgtccagctcaatmtaagtcaaaatggcttaatatctagagaactgaaagagtcttctaattggctaactctagcaatgggagaatttttttttttttttttttttttttttttgagatg

SEQ ID NO: 811297 - DNA, 499 bp, Homo sapiens
tataaattacacatgccattcctacaaagtcccaggggttttaataaaacttgactttttaaacttcagtttatttgagaaaaaaaaattaagaaatttttgaaaggcaacaagaagaagagatttgctctaagacattaaacatagttatataagaaatatctaggagttagtaccagaagtaaaacagacaattattatcagtggatgagaattgtgtatatgtgcatgcatacacatatatacacttatgtatatacgcatagatttaacctctgataacagtggctgtccactgtttatctacaataaaatatgtaatgggtttgttgagaaaattgactatctctttggaaataagtaaattgagatattttatgatataccttaaaataaattccrtatggattaaagagctaaggaaacctataaaatatttgaagaaaacagaggagaataatcttttcatctcagtgtaggacaagccttcccaagctta

SEQ ID NO: 811298 - DNA, 434 bp, Homo sapiens
tcaggcttcacattagaatcaactgagaagcttttgaaactatagattcctggcccctttccagataaattaagtcagaatctgggagcagcccctgaggatccagggtgcacgtatttccagttatttcctctgaggaactttgtccctggtgccaagtttttaaagaaaacatggagtttgagcttaggagagggcagcgtggttcccacccagcatgctgagcagggacgacagtccttggagcaggctggttataaacatgggaggctctcatctcctcgggggcagagatggacacrgtcacgcagcaccaatagtgtgtctggcttgtccagttggtgtgcatttttggtgggaacgccattcctggcagaggcctagagatgggctgtttcactgcccgggaccaaaccagccctacccctgggagg

SEQ ID NO: 811299 - DNA, 557 bp, Homo sapiens
tctgcttccagacatttagctcaaggaagcagtcagatggcaggaaggtctgcacataggctcttccctggagcactgtgcacagccatgaycgctgaggggctctgcacccttccaggggctggactgaggtcccctgaacgtggggttgtgtgttgtgccctcccaggggctggactgaggtcccctgaacgtggggttgtgtgttgtgccctcccaagggctggactgaggtcccctaaacgtggggttgtgtgttgtgccctcccaggggctggactgaggtcccctgaacgtggggtcgtgtattgcgccctcccaggggctggactgaggtcctctgaatgtggggttgtgtgtgtgggctgttgatggtctgtttccacctgagcatttgctcagccactcacagtgaaacttgcgcaatgaagaaacggccgggtcactctctgtttcagtttcagttcctcatgttcagattgttctcagaggcccgacagcctctttctgaggaggacgtagccagcctttcctggagacccttgcaccttccttct

SEQ ID NO: 811300 - DNA, 557 bp, Homo sapiens
tctgcttccagacatttagctcaaggaagcagtcagatggcaggaaggtctgcacataggctcttccctggagcactgtgcacagccatgatcgctgaggggctctgcaccctyccaggggctggactgaggtcccctgaacgtggggttgtgtgttgtgccctcccaggggctggactgaggtcccctgaacgtggggttgtgtgttgtgccctcccaagggctggactgaggtcccctaaacgtggggttgtgtgttgtgccctcccaggggctggactgaggtcccctgaacgtggggtcgtgtattgcgccctcccaggggctggactgaggtcctctgaatgtggggttgtgtgtgtgggctgttgatggtctgtttccacctgagcatttgctcagccactcacagtgaaacttgcgcaatgaagaaacggccgggtcactctctgtttcagtttcagttcctcatgttcagattgttctcagaggcccgacagcctctttctgaggaggacgtagccagcctttcctggagacccttgcaccttccttct

SEQ ID NO: 811301 - DNA, 557 bp, Homo sapiens
tctgcttccagacatttagctcaaggaagcagtcagatggcaggaaggtctgcacataggctcttccctggagcactgtgcacagccatgatcgctgaggggctctgcacccttccaggggctggactgaggtcccctgaacgtggggttgtgtgttgtgccctcccaggggctggactgaggtcccctgaacgtggggttgtgtgttgtgccctcccaagggctggactgaggtcccctaaacgtggggttgtgtgttgtgccctcccaggggctggactgaggtcccctgaacgtggggtcgtgtattgcgccctcccaggggctggactgaggtcctctgaatgtggggttgtgtgtgtgggctgttgatggtctgtttccacctgagcatttgctcagccactcacagtgaaacttgckcaatgaagaaacggccgggtcactctctgtttcagtttcagttcctcatgttcagattgttctcagaggcccgacagcctctttctgaggaggacgtagccagcctttcctggagacccttgcaccttccttct

SEQ ID NO: 811302 - DNA, 605 bp, Homo sapiens
tagttctcattcttaggggataaaatacatytttttcctgcccctggaggcagggtctcactctgtcgcccagactggaaagcagtggtgcaatcacagctcactgcagccttgacctcccaggctcaagcgaacctcccacatcagcctcccaagtagctgggataacaggtgtgcaccattatggtggctaatttttttgtggagatgggggtctcgctatgttgcccaagctggtctcaaactcctgggctcaggtgatccttggcctcccaaagtgctggaattacaggcatgagccaccactcccacctaaaatacatcttaagctagttgatatctgccaactcattattttccaggtaacagtgatttacagagtaatttttaaactcttgtaggatatctacacttggtgtcaactaagcaaaatgtatatatattattctcaaagaaatagtaattctgttttgaaattgtcttttgtagttttttcattgttttattattgtttaattctgacttaatttgtgagaaagatggcttccataacagtatttgggtgtggtttttttctttgaattcgaataggaaaatgctgactt

SEQ ID NO: 811303 - DNA, 609 bp, Homo sapiens
atattcagcttgttcttcactgcatcaaattgctcttaatgtcttcaaacttgtaygtgaacttaagggacctccttcacacccatttgttgccctttccccagatcctttgttgggctgatatggacttagactgcagaatgagaaatcaatgagagacttgacagccagagaaagcaaacaaactcagtgatgtgaaaactgctgtcaggtcagtgtaacaagcagctctttctagatttcactgcactgcagtgatcagaaactggggtgggggggagattataccttagttctatgtctatagacaactacagattcaataatcagagagattatctcctgtacataacaatattctacaataagcactggcataagttcatttcttacaagtagaagtcaacataatgtaagctcacatttaaggagcatgttctgtgttgctaagaactgctcttatgccttcctcacttaatgttcatcacattcccatcagggtggtgccataaatattccattttatagatgtaacatttgcagtatagagagcttcagccacttgctaggagtctcagagatgatcaggtgatggaggcagaattaacc

SEQ ID NO: 811304 - DNA, 622 bp, Homo sapiens
atacaaatgactatttgtgcagttaagtggcaaccactggtatataattattgtctcctgtaccaaatgaaktacataacttaggaagtgcttggaaaaaataaatgaaagaaaaaaatcattacctcttagttgtattttaaggaaggggaatctggtgatggttgagtgctaatagagaggtgagggataaagatatccacactgggaagagctaaattgctttacattagaagtggatccagaagggagtggagtgaggagttagagtgagaggctgggtggagagaggagtgagtggagagacaggaagagacagagggacagagagtaagagagccagaggtggacacagaaggacttagaggcttatggataagaaagtaaggtttggaagagacagtgaggatggagagagattgtactatgcaaggtaaactctgcaatcctctctgtgaaattgacataaataaaattacatatatgtggtattatatttattttctgtctgttgctgtattatgtgaaaagaattaatcgaagtttcaccatatgggatggaggggacatttgggatgatctgactttaaatatagtttatatggtatttgcgaaattctct

SEQ ID NO: 811305 - DNA, 608 bp, Homo sapiens
atatctgttatttttttatttttaattatagctgttatgactggtgtaagatggtatctcattgtggttttaatttgcactttgttgatgattagtggtattgagcattattttaatatgttttctggctgcttgtatgtgttcttttgagaaatgtctgttcttttgtccactatttaaattgggttatttgttgttttcttgttaagttgttggaattacttgcatatcctggatattagttctttgccggatgcacagtttgctgtattttctttctttttctaacacctttgtaaaaaaaataaaaagaaaagaaatgtgccacatacacactatggaatactaagcagccataaaaaagaatgagttcatgtcctttgcagggacgtggatgaagcagtttgcagtattttctcccattctgtagtttctctgtttactctgttgctagtttctttcatgtgcggaagctttttagtttaattaagtcccatttgtttattttgttttgctatatttcctcttgaggttttggtcatmaattctttgcctagagcaatgttcagaagtttttcctagttttatttcaggattttatagtttca

SEQ ID NO: 811306 - DNA, 607 bp, Homo sapiens
ttgattgttttctattttgtagttccaacttcctctcttactgtcttcctttgtgatttgataatttgttttgtagtgatattattttatatacttaaatatatatatttatattttgactcctttctctttgccttttgtgttctaccatttttaaaaatttgttattacaagtaggcttacttaaaacatcttatagttctgacagtcaattttttaagttgataacaaatgaacttaaattatatacaaaaatgctacactttaactttccctcttctcacatttatgttattgatgttacaacttacatgttttctgtatcatatatccattaacaaattattgaagctatagttacttttaatgctaggcttaaattgatttatgtaccactcttactgtattagagtcttctgatttgtactagatccttacatttacaatgagttttatatcttcatgttttcatgttgttggttataatccttttgtttcatcttcaagaatgctttttagtatttcttatatgtctagccatgatgaactctctcaggttttgtttttctgggaaaayatttttttctctttcatttctgaaggacat

SEQ ID NO: 811307 - DNA, 665 bp, Homo sapiens
taccagctgaaaatggcagaaaatagccacaatttatcttccaggcttttctcaggaagttgcaaaccttctgtaggctccagagttccraagtggttacatcagacagattctatcagcacaattgttgtctaggtgtggatacagattcctggtgattcctgttctgccaacttcccagaatcctcctctttttgtctgtttttgttgcatattcctagtacttagaacagtacctggttcaaaatgggtctttaataaaaatgtgttgaataaatgaaggaaaacagtggtagttggttgtatcctagatataatttgaagatagaccactatatttgttgatggattggttgtaagatgagtgacagagattaatcaaagatgtctcctagatttttgtcctaagcatgtgtggagttgtcatttcttgagattgggagactgtgggagtggcaaaactgagacagttgttctcaaaagttccttttacttggttttaacattgcataagctttgaagaccatatttaccatatttatttgtaatgttttctttttctcaggtcatgcgcatcgtggataatgttcgtcctgatcgacagacggttatgttttcagctactttccccagagctatggaggctttggctcgcaggatcctca

SEQ ID NO: 811308 - DNA, 564 bp, Homo sapiens
gatcctgttaacagtttgtcttcccttttaggtttttcccctcatgcctaaacgtttctatacagatgttccttgatttatgatggggttacaatgtcccgataaacccatcgtaagttgaaaatgcatttaatatacctgacgtactaaacatcatagtagcctagcctacctttagcatgctcagaacacttacattaggttatacttgggcatcatcatctaacacaaagcctattttataataaagtattgaatatctcatgtaatttactgaatactgtactggaagtgaaaaactggttgtataggtactcaaagtacaatttctactgaatgcatatcacttttgcaccatggtaaagttgaaaaattataaattgaatcattgtaagtcggggaccatctgtatacacatacacataaatgtttatrcttcaggatctttttttaaaaaaaaacatgggatcataaaatatacccatctccacacctaccaatttctcctactcccctctttacctccctatcattcatacatacatatgttacttgcttttttga

SEQ ID NO: 811309 - DNA, 633 bp, Homo sapiens
tagcacaaatgcactaagacgtaacagaactcctgggagatgaaaatactaaatttataaaaagagagtacattctcttcaattatttaatgacaacaataacgaagaaaggttctcaagaggaatgaagatggaaatttagggaaaaagcaagaagagagatataaaactatgacacaaatatatatctgagatgtcacaacaacgaaaaatcagatgaagaacattctagtacagtgacagtttcactactgaaatgcatccaattttgtgaacctttatgacaatcagtgtagaactataaatgaaagttgggctccaaaagttgaagacaaaaggcttatttgtttatgctgagagtcctttatttttttcttcattttcagctactctccccacccccaaaatcaaatacctgattgagattcaggcgagtagacatatattcacaaaattattgcttagattacatgcatacaataaaaaactgtaaagtttatcttcagttttaaaatggtaagaaaataaatttaaaaatcaaaaaatagacatagccatttaatatagaagrccaaattctactgctgaatcttaacagatattaaaatgcaagaaagaaaagaatgctaaaag

SEQ ID NO: 811310 - DNA, 440 bp, Homo sapiens; identical to SEQ ID NO: 809939

SEQ ID NO: 811311 - DNA, 519 bp, Homo sapiens
ggaccaacacaacactgtacattgtaatggaatattgtgaagaaggagacctggctagtgtaattacaaagggaaccaaggaaaggcaatacttagatgaagagtttgttcttcgagtgacgactcagttgactctggccctgaagtaatgccacagacgaagtggtggtgatcatactgtagtgcgtcgggatctgaaaccagccagtgttttcctggatggcaagcaaaacgtcaagcttggagatttggggctagccagaatattaaaccacgacacgagttttgcaaaaacatttgttggcataccttattacatgtctcctgaacaaacgaatcacatgtcctacaatgagaaaccagatatctggtcattgggctgcttgccgtatgagtcgcgtgcattaatgcctccatttacagcttttagccagaaagaactcgctgggaaaatcagagaaggcaaattcaggcgaattctataccrttactctgatgaattgaatgaaattattatga

SEQ ID NO: 811312 - DNA, 583 bp, Homo sapiens
cgagctaagacttcgtggttggtattttggtctcatgataacagctgattcaacatcagtataaaacttgggttgagaattggtgaagaggcatgtatttccactcccaccagacattgtggagacacggagatgctggggattggccagaatggccgtgtgtgttaagtgtgagcttgtgagtagatgcttgggtactgctgagcccctgagtgtctgaatccccagaacacactcctgaggccatctccccatgtccactcccaaggtgctgatccagtccccaaaggtcaggaagccacctgcactcccagcttggaaaggagagtgatgctggcagaagacaatgaagattgggaagggttggctggtttctattcagttacatgttgcaagatcactctggaagggaggcgagtacatgagtaagagtgagtaggagtctttgttatgtamatggtgtaatatttgctccacaacctcagaacagatagatcattcgcgactcctccagtgtgggaagatcagagtatcagaatctcagattactcaaagcacatctggaaggttttactgcatgggt

SEQ ID NO: 811313 - DNA, 600 bp, Homo sapiens
gtttccttttccataagtgatgttcacaagggacggaccacaaaatgttgttgggaatactaaggaaatcaatacattaacttagaatwgtacttaaaccatcacaagaacccaatagatattagacaggactacctatcaacttctctttgctgaacgcttaccttggtctttatcagatatcatcctctggcatccagaccaaagccaacacatgttcatgcttctggaatatacctgtagtgttgtgttccctgctgcttgtcagagatgtggtcttaattaagcccatttcagtctgtgaactccctgtcagagtctttcttgggtggctttccagagtctttaagttctcctgaatggctctggatcctccccagcctgcccttttctgtccgtctcatgccaggccgagcgctgtccctggaaggatgtgaagatggagtgggaaagcacttggcaatggattgttcagcagcagcataaagccttctttcctcctggaactcgcttccctcattgtctaactgggccctttaaagtggccaggtctttttaaaaattttaactttcttagatcaccaccaacttctttaactg

SEQ ID NO: 811314 - DNA, 461 bp, Homo sapiens
tgactatactgcccaagcaatttacagattcagtgctattcctaccaaactaccaacaacatttcttcagagaagtagaaaaaactattccaaaattcatatggaaccaaaaaaaaaaaaaaaaaaaaaaaagcccaagtccccaaagcaatcctaagcaaaagcaacaaagccagaggcatcacattattcaacttcaaactatactacaaggctgcagtaaccaaaacagcatggtactggtataaaaacagacacatagaccataatggaacagattagataacccagaaataaagctgcacacctacaaccacctgatcttcaacaatgttgacaaaaacaagcaatggggaaaggacttataattcaataaatgatgctgggataactgactagtcatatgaagacaactgaaactggaccccttccwttcaccatatacaaaaatcaactgaagg

SEQ ID NO: 811315 - DNA, 542 bp, Homo sapiens
caaatatgtaatttttaagtgcttagtgatgtggtaggcatattaacagttayacacctttatttttctcttcaaaaaataatctaattctgaaaatgagatatacatgatttaagaaagttaaggttcatcacaatacatgttactttcaaatttatgtatgcagaaaacattattatggctgtggaactcatttttgtcaaataacaccaaagttttttttcacagaaaaattactcttatttttgcaataaagaacttaagaaattcagaaattacagaaaacaaagtaataaaagtgatctccaatctcactgcctcaaaacaaccatcatattaagtgaacattttcccattatctttttatgtacatatgcaaatacaggctagaaagaaatctttgaagtattttttatgaaataggatcatattataagtgatattttgaaaacaaaataaatttcattttatacaaattagcaggaacaaacaaaaatgaggtaagatagaggaaactgctgaaactcaaaatgttttttcac

SEQ ID NO: 811316 - DNA, 592 bp, Homo sapiens
tctgaatggaaccaatttcctgattctcctaccagcacccttcctcgacaggactgagctctttatcctctttctaccttatcctgtttaggtactgacagcctgcttcatgctccctctgccagagccccctgtactgatggcctccttgccttgtgcagcacaatgcacaggtgtgtcaccccaccccaaccctgcataaatgactaccttgctgggcctttgaactaaattatttaggaaggcaggaagaatatgaagttaacaattttaaatggaatgctagggtaacaccttgctaagatgacatttgagattatagatctgaaaatacgaagttgatgcaggcatgggtgggtcatgtggatatttagggaagagtattctggcagagagagtaacatgtgcaagagctgtgaggcaaaaagttgcctgcatgtataaagtagagaggccaccatcattggagtaccgtgagcaaggaagaaagtagtagatgaagtcagagaagtgctgggggaccaagtagtagatgaggtcagagaagtgctggsggatcagactttgtagggtcttgtagaccattgtacag

SEQ ID NO: 811317 - DNA, 573 bp, Homo sapiens
tatattggacatcaaaagggacatatttaataggtaattaaatatatgtgtctggaggctgggggagagacttgggttggaggtaaaactttgggaagtttcatcatatagagagtattcaaagccttgtggtagatgaaagggtgtaaaatatgaatagaagagaactaaggaatgaaccctggggcatggcaacaatatgaaaaaaaaaaaaccaacaaagcataaaagatggttagaagtaactagtgaggtaggggaagcccggggacatgttctggaagcagaataaacaaaatattcaaggagaagggaaataccaagtaaggtaaggaccgagatataggaacatagaggccattcctgaagagagctgtttcagtggagtgatgagaacaaaagcctgattgaaataggtgcaagagagaacggaaacactagaactggattaagcaagtcacyggcaaccttttagggagttctgatataaagagagcagagaagtggggaagtaactggtaaaggaagttgaaacaagagagtttattttgccaagatgagaaatattatagt

SEQ ID NO: 811318 - DNA, 573 bp, Homo sapiens
tatattggacatcaaaagggacatatttaataggtaattaaatatatgtgtctggaggctgggggagagacttgggttggaggtaaaactttgggaagtttcatcatatagagagtattcaaagccttgtggtagatgaaagggtgtaaaatatgaatagaagagaactaaggaatgaaccctggggcatggcaacaatatgaaaaaaaaaaaaccaacaaagcataaaagatggttagaagtaactagtgaggtaggggaagcccggggacatgttctggaagcagaataaacaaaatattcaaggagaagggaaataccaagtaaggtaaggaccgagatataggaacatagaggccattcctgaagagagctgtttcagtggagtgatgagaacaaaagcctgattgaaataggtgcaagagagaacggaaacactagaactggattaagcaagtcaccggcaaccttttagggagttctgatataaagagagcagagaagtggggaagtaactggtaaaggaagttgaaasaagagagtttattttgccaagatgagaaatattatagt

SEQ ID NO: 811319 - DNA, 607 bp, Homo sapiens
cactttaggaatttgtaagggggtaataattcaaaacagttaagaatattaactgcctagtgaattttctatttctttccctattayaaacgtaagaatcagttgtgttaaatttaggtatttctctaagataaaacaaattttaagcccggtaaaggcaaatagatcccgaagtccatctgcaagtcggcagactatcttctgtcatccataggacctaatccaacttcagaaacaattcacatttgttggtcttctgttggagaagttaaggtaaatcttccaacagaagcaggtcaccttagtctaaagcaagctctggctactggatggcaccagttaaatgtaaaaagaatttagaagtacttatttggtacaatgaaatgtgtacacaccaggcaaacaggtttatgttatgattcagggagaacattgctacatactccgttttctaacactaatttattcctgggctatggacttccaagattatccgggataatgatgaaaagcaggtagagccctttttcctcctcttctcttggaaatatggcaaccaaaaagggagattccagattctttcaacacatgtgatttaatcctttct

SEQ ID NO: 811320 - DNA, 516 bp, Homo sapiens
tccccagagggaacggatggatgaggccgtccccagagggaacggatggatgaggccgtccccagagggaacggatggatgaggccgtccccagagggaacggatggatgaggccgtccccagagkgaatggatggatgaggccgtccccagagtgaatggatgagcacccagcctgagcccgggaaggtgctgagggttagcacaggccgcctgctgctgcaggagtgagaggggcccactcagggaaagaggggttcagggggagcagccaggtgtgtacagatggctgtagccatgtggaggcgcgcgtggggaccggcaggcaggcagggagttgggctttcttctgggagcagtagggagccacggttgaccgtggagcaggggagagacctggtttgatcttggtcttgacttccaagccccttggtccctccgaccttggaggctgctggaaggagagggcatctcatttaccatcctggctgcttcatggggatttgggagataaaaa

SEQ ID NO: 811321 - DNA, 516 bp, Homo sapiens
tccccagagggaacggatggatgaggccgtccccagagggaacggatggatgaggccgtccccagagggaacggatggatgaggccgtccccagagggaacggatggatgaggccgtccccagagggaayggatggatgaggccgtccccagagtgaatggatgagcacccagcctgagcccgggaaggtgctgagggttagcacaggccgcctgctgctgcaggagtgagaggggcccactcagggaaagaggggttcagggggagcagccaggtgtgtacagatggctgtagccatgtggaggcgcgcgtggggaccggcaggcaggcagggagttgggctttcttctgggagcagtagggagccacggttgaccgtggagcaggggagagacctggtttgatcttggtcttgacttccaagccccttggtccctccgaccttggaggctgctggaaggagagggcatctcatttaccatcctggctgcttcatggggatttgggagataaaaa

SEQ ID NO: 811322 - DNA, 516 bp, Homo sapiens
tccccagagggaacggatggatgaggccgtccccagagggaacggatggatgaggccgtccccagagggaacggatggatgaggccgtccccagagggaacggatggatgaggccgtccccagagggaatggatggatgaggccgtccccagagtgaatggatgagcacccagcctgagcccgggaaggtgctgagggttagcacaggccgcctgctgctgcaggagtgagaggggcccactcagggaaagaggggttcagggggagcagccaggtgtgtacagatggctgtagccatgtggaggcgcgcgtggggaccggcaggcaggcagggagttgggctttcttctgggagcagtagggagccacggttgaccgtggagcaggggagagacctggtttgatcttggtcttgacttccaagccccttggtccctccraccttggaggctgctggaaggagagggcatctcatttaccatcctggctgcttcatggggatttgggagataaaaa

SEQ ID NO: 811323 - DNA, 524 bp, Homo sapiens
acacacacaacctcctcactatcaaaattcyccaccataggggtgcatctgtgttaattgatggacctacactgacacatcattatcacctaaagtccatgtttacattagggtttctcttggtggtgtacattctgtgggttttgacaaaagtatgatgacatgtatccaccactgtagtatcacacagaatagttacactgccctaaaaatcctgggttcgtctattcattcttccctccctcctaactcctggatatcactgatctttttactgactccagagttttttctttttcagaatatcatatagttaagtgatgcagtatgttgccttttcagatttgcctttttcatttagtaatgtgcattctcttagtaatattcacttagtaatatccacgccttttcatggtctgatagctcatttcattttggcaccgaataatattccattttctgaatgtaccacacagtttatttgtccattcacctactgaaggacattcttgattgcttccatg

SEQ ID NO: 811324 - DNA, 641 bp, Homo sapiens
gaatgttgctaagaaaaaaaaaagcagaacaaattcctgctctgggcaggaggatgctgtgggtcagggatgaacgggcctcctccctgtttttcttccgcyctctcctcggttcccagcactcccctgcccccaccaccctgacccagccttcctgtctcatggtccagagatggctgcgtggttaaatggctcatcactgaatagaggtaaagaagtatcaaaggcatgagtacctgtatgtcagaagaactcagaaacagatgatgggcgagttgccgggagatagctgagccttgtactgagatcgtgaatggagatacatcttcctgctcccatctacagctcggaagacccaaccttacatcccagtccagtcctggctcctcaagactccagacccacggagaggtggcgctgatggtgagacagccaggaggatggtttctacagtaataacccacagagtgctcagaactcattccccaaatcagccactttcaaatcagaaactagaaagagggagatggaataaaaaataaaggaaggttgagataatcacacagctggaccctgggaggcagtccatgggctgggcagtatctcagtaaggtttaggatccagggtcacatctgtgagg

SEQ ID NO: 811325 - DNA, 568 bp, Homo sapiens
tgaatcagagggcccctgaaaacatccagaaagaaggtatacaggattatttgacttgtttacgyacatgggattgccaaaatgatgttcaatcttctttaggttgtatttttgtgaataatactaatgtatgttccaaaaaaatatatgggatttctaaaattctaatgtctaagtatatgctatcaatgataattatggttattatgttaagttattataaatcatagaaataacttgtcagtgctacgtacctaatttggaaaataaactggtatcaaagaggatataagtctaatgttaattaaacatggactcatgaaaaccaggatgtccaccttgtccttcgtgaatccttaaagcttttgtttctaaaagttatgcattccatgactcatcacggaaaagataaaataatccaaattaaatacattggtgcaatgacttacaaattgtttaaaataatttataaccagtgcttaatcccatattactgggaaaacaattaaagcttcaggtacatttggtcacctgatgggccatttagacattttataaaggggtttca

SEQ ID NO: 811326 - DNA, 504 bp, Homo sapiens
tcccaacagaagtaagcaggaaacagggccagtcaaaagggcccggagccaatgcaaatccagctgcagtggtacttacaacyagagctgcgatacagaaacagagcagacacactgttaccaacaggagtcccaactgtaaaggccagaacgacaaaaaacaagccatccttcatataaactaattgattatattaataacacaaagtacaggctgatctttggcttaaaaaagatccacatttttctgattataaaaactacatgtactaattatataaaaatgttaattttcttttaattccatactcaagagaaaaaaaataaggtcagtcttccagattcaatcattcacttattcattcaacagacatttactaaataccaaatttgtaatcagtacgcactgccagggataaagatgtatatggtcttattcttgctcttgactaatttgaaagggagacggcagatatgccttaataactgtaacacaagacagca

SEQ ID NO: 811327 - DNA, 417 bp, Homo sapiens
ctctcccagggctccttggcctcctccgcggtgacctrgggacacagggccgcatgagcctgggcggggtcagggccggcaacccgagcgaaagctgcgcccggcggccgcctacccggtggaacttgcggcggaggctgtccagggcctccagctggctctgccggccgatgttgggcttgtacaccgtgaagaactggccgcggttctgctccgccagcaggcagctgggcttgttaccgcggacctgcggaggggggcgttgaggccgcgccccggtccgccccccgcgggccctcctctgggggggtaaccccgcccgaccccaccttgtaggagaggtagaagccgtcataggggcccgtcagcgccagcgacttggcaaaggcgtcctcccacttcaggccgcggtccacg

SEQ ID NO: 811328 - DNA, 322 bp, Homo sapiens
actttagcatgagttgacttcacttygggcatgctgtctttagcagtcacaaaaaaatgaataggcgggtgaactattgtagaatgtaagagatataataaccaaatataaggcataagtcttgattggattccagttttaaaaatacacatggatagccaggcgtggtggcacacacctatagtcccagctactctaaagactgaggcaggaagatcagttgagcctgggaggtggaggttgcagtaagctgagatcctgtcactgcactccagcctggatgacagaacaagattctgtctcaaaataaattaaataaata

SEQ ID NO: 811329 - DNA, 516 bp, Homo sapiens
atgatttgtcctttctttattgagttgtagctagttcttgatattatctggacatgaaaactgcctatatgtggtttgcaagtattttctctcattcggtgtctattaaatattttcttgataatttcctttgatgcacaaaaggctcacatcttgataaagcccaatttatctttttttcttgttactcatgcttttgtatcatatctaagaatccatggcacatttgaggtcatcagtatgtacctctgtgtctattttaagatgtttttatggttataggtcttatatttaactcactgatcaattttttagagaattgtttcatatggtgggaggtagagttatttaaattaactgttttgcatgtggttatctagtttctgcactatcatttgaaagaagaattgttaatccattaaattgtcttgacamcctcttcaaagagtaattgatcataagtgtgagggtttatttctagactctcaattctatcccatttgtctttatgtccat

SEQ ID NO: 811330 - DNA, 656 bp, Homo sapiens
atgtgtttggagtttcttccttctggtcggttcgtggtcttgctggttcaggagtgaagctgcagaccttcgtggtgagtgttacagctcttaaggcggcgtgtctggagttgttcattcctcccrgtgggcttgtggtctcatggtctcgctggcttcaggagtgaagctgcagaccttcacagtgagtgttacagctcataaaagcagtgtagacccagagtgagcagtagcaagatttattgcgaagagcaaaagaacaaagcttccactatgtggaaggggaccccagcaggttgccactgctggctcaggcagcctgcttttattctcttatctggccccacccacatcctgctgattggtagagccgagtggtctgttttgacagggtgctgattggtgcatttacaatccctggagctagacataaaagttctccacctccccaccggattagatacagagtatccacacaaaggttctccaagtccccaccagagtagctagatacagagtgtccattggtgcattcaccaaccctgagctagacacagggtgctgattggtgtgtttacaaaccttgagctagatagagtgcccattggtgtatttacaatccctgagccagacataaaagttctccaaggccctag

SEQ ID NO: 811331 - DNA, 627 bp, Homo sapiens
agccctgcctctggctttattcctgattccaagcccctcccaggaaggtttcctcacacagtgagaaggggtggggtgtcagaaacagactcagtcacaaccacacctgtttggaggcctgtgyctgtgatgcagcagaaacgacagtgagggaggtactggaggaggaaggggtcaccagggaaatgcacagataaagacgatggagtgaggatgagtggtgtgagttccagcctccatgcttctcatgaagccttttctccactgtgcagaatctaccaggaaggtgtgcattctcctaacctgtgcaatggtaaaaagctggagatcctgggggcaaggcacttggccttgaaagaaaatcctcctcctccttctccagtggttctgggagagcatagatcttgatcattcgcaggacctggggacagaagtagagaaaacacttgtgtcttctttacccaccctcagatcccttggctctgccaggtgagagccactcccactctgtctctcagacacctgggctttaggtacgccctcttatttccctatttcttttcatgtgaatcaaaatctgaggctgtcgttctcctgcagattcttggagaaaggtgagatttctca

SEQ ID NO: 811332 - DNA, 574 bp, Homo sapiens
gacaattcatttccaagcatgcactccaagattctgctcatataaatcagcacaatcacacagttcttttggtatataacgtatttccttaagattaatttgtaatgtcatcccactgcattccttgggttttgactctgggtatggacatggaagcaatgaaaagggtcagaggccacaattaaggagctttggaaaccccgttctaggcaaccaccctcacaccctgcccagtactgtagcttgtaagaaattaccacagaagggaaagaggaactgcttttccttgcaacagatatgcaatagaattttgagtaatatcccagctattcatctgaactggggaagaaatatcagttcagggcgtctggccacctagtaagctgtggataaagatgttgatgttatttacttctcaggcattccagcaatcctttcagtgatgcagagagattgatcttctttaacttccatatcctctgcacaatagyccatacttctgctggttgcaactatttcttcagaaatccattatgccctacgacttgctttcagtctttcttttcaactacat

SEQ ID NO: 811333 - DNA, 644 bp, Homo sapiens
gtccagaaatcccttatagttcatgtccttgggactctgttgaaggggagaaggaggaaagtcctccctactgtttctcatgccttcttgagctctgtgtcctgcatctgtagtgcatgctattaactttgctcccagatcttcttacccatcagggcactcatccctcagatgctgtcacgagaagctggctccccccgctctggagaattgtccttggtcaaacagaagtcacttcacttcggaggtgaaggtccccctcacttcctccaacttgttgtagaaccccaaaatttaggttcacattcccaacgtgcagtcagccaaacattgacacttcagtgcttaggagtagagaggattatcccatttggccaaagtgagagggtaggagagaaagtctctcagatctaacctgcctgtgaacataatagggcttttatgaggaaggtaggtgtgtgggaggtgagatgccctaataatcaaaactgattgcattcttgggcctgatcaaacttctggatgccgtgaaggaggtctgtgtgacctaagaatcagkttcttttttgtttgttggtttttgagacaggatcttgttctgttgtccaggctggagtgcagtgaggggcatgatcatagctcac

SEQ ID NO: 811334 - DNA, 621 bp, Homo sapiens
gtaattgtccgtcatgtgagatatactraaatttatcaattctcctttaaatggacatcagatgtgtttctttttgctatcagataaatgctttacaaaagcatacaaaagttgacagatgaactttgtatacttgatcttagccaaaggctgagaagagatactatgaactttaacatctcaatcgatgcatgtggtcaaatatctcttcttgggtaaggacctaggagtgccaagcatatgggattcagattttcaatttggttcagtttttcaaaataacaacaaactacttcccagagggttgtactaatttgaactcccatcagcaacatatgagatgtcctgtgaatccccatcctcacctacagccatcttaacttttgtcaatttgaggctgtgaaacagaattttagtgtggcctttttttctttagatgttccatataattaggggctggcttttagtcagatggctgggaccaaacgattgaggaggaagggaatttagagggtgactgtaatgatgaatctataattggtaggggacagtgggcagggtgggatggaaaaaggagagccatgatggacagggagagtgtgggaacgtggcctggaggtt

SEQ ID NO: 811335 - DNA, 605 bp, Homo sapiens; identical to SEQ ID NO: 810082

SEQ ID NO: 811336 - DNA, 525 bp, Homo sapiens
cactcaatccatcactcacccattctccctacatgttgtagttattatcaatttccttatttgtcacatatgaaatttaaatattttaaaaacctctatgtcttattctgtcaacttttgacatgatctagtgacttctcagtgtgttcagtgatgaagatattagcacacctgccctttcctccacttttcctgccccctgttctcttctaaattccattatctaaacctctaattttataatttatcttctgtactataaccataattatctttaatgtttggtgcataaatcaattctaaaaatttaaaaaccaataaacaccattcatgcctttatgactatttaaatgttatttactgcaaagccaagaaatgtactggtttacctgtccttctcgatagtgtcatgtcaccacactgggcagcacaaggaagcactcctgtcatcccagacaaagggattctcttctatcatgtggcctcaattgttctatatcrcgtcacatttttgttagcttccta

SEQ ID NO: 811337 - DNA, 581 bp, Homo sapiens
ctatcaaacgtcttcctgaaatccagacacattttgtctgtggaatttcccctccccagcagtctccccactytatcaaaaaaggaagcaaagttcgttgggcatatcttgtttttaagcaaacccacatttcgtgaatccatatttatacataccaccaggctcaaggggatgtttatttcagaaaatgaaagcttttccaagaaacctaattttaaatagaatagagaaataacattttagctacattttttcacttgtaaaagcacttgaaaaaacatatattttcaggtccatcaataccaccatgggactcagcatttatgatagtatttaagtgatagatgtcacttaaatactacatttccaaaatataattaaactttgaccacaactgcattaatcaggattggaactttacctgcatcatactttaaccagagaagtaaatctcaccaaggcaatttgatatctggattgagttctgtattcagaatacattaaattccaccttctaaaactttctggacaatgaccagaatgtctgccattctggacaatgagctgccattgaaagtctt

SEQ ID NO: 811338 - DNA, 624 bp, Homo sapiens
tacaggcaacttggagtcctcctcttcaacccataagacgtgtttatctcattcccactgcactccaggccatcttactaatattgttaaatgttgattttataacacctaaccaaaacattaaagaaatattcttaagcctctaggatcaagagcatctagcctggaattaatggttctccataagactacttgtctccacccattcactttattccttccttcttcataacctgccatctcaagttccacatttgccatggtgctttacctgctatctaacacacgccgaccttccatctcctccaaataccacttgtatgtattatgatcttttctctcttagtacccatggttaatttctaccatgtccctaacattgttgcctccatcattggtgaaaactggctggtcacatttgccatgtctatcacaaaacaaaatgcctaatacaagatgtaattaagtcaaaggagagtagacaattctaaaggaggaggaggaggaggaggagaaggagaaggagaagcccagacacaactcactttccccsactacctagtcagatctgtcttcctctccagagtcagaagactgcatgccagctcaacaaagagaaaaatc

SEQ ID NO: 811339 - DNA, 596 bp, Homo sapiens
gcaggtgcaggttgaaaaaggatcctgctcaccrgggactggctgagaagaaatcaaccatgcagcatctcacttttctctccagcctgagttacttgcctttcaacagaacacctgtttaaccccaggccagatggcaagagcttcaagtcggtgtcctgtagtacaagtcctctaagcaccagggactttggccttgggaagaaaatgcatttctttcttcactgggcttttattatattttttctgctggatgatatcccagctgtttagctgaaaaaaagctgagtggtggaggatgacaggataatatgaaaaagatttgaggggaggtaagagattaaatggggcagggaaaactagcttctattttaaggccctcatagaccccaagagctctcagttttggaaaccacacccaccttacataacaacaaatgttttcaaatgcagctatgccccacattaaaagaaatttatatatagtgatgaaagaagacttatggactgttaattcaagatttattatttcttactttgaaggttttgtttgtttagtcagtttttttcatggtgtattttggaggcaataggat

SEQ ID NO: 811340 - DNA, 635 bp, Homo sapiens
agtaacacagccagaataaggaaaatttttacccagggattctttyatagcagagacttcatcccttttcatgttcatttcttctcctgcccacactggtaactaccagaaaaaaactggggagagatgggaagagggaggatgctgatgaattttatctgggaagtgtcattatgagtgaagtgtactaggtggaagtagagaaggattgtagtaacagtatagtgctgcccagtatagacttaggattgtatttttatattgctgttatcagtccagaatacagtattagagaccaagaaaattggagagaggagaatttaccatgggagcagtgagtgctctgatttgtaatatactaagccttagatatctcaaatctgcctttgaaccataggcatgtaatgggcaaatccgtatcagacaagtagagtgcagcccaaggataatcttctttttctttctctccttctctcagcagttttattgaggtataattggcatagaataaactgtacatatttaaagcgtataatttgctaggttttgacatatgtgtacatctgtgatgccatcaccatagtcaagttaacatatccgtcattcccagaatttcttccttctcgttgtagatt

SEQ ID NO: 811341 - DNA, 649 bp, Homo sapiens
gtacagtcacatttggggttagggccttaacatgtggattttgagaggaaacacagttcagttcatagtagttgggaaatgtagccttttagctgggtgcattgctgccacacataaatgaggatcctgttagggaggatgaagaggagaatggatgttgggtgacagctgatagttactgccacagcggctgttgtctgagtttcccaggttggtaatgagaaccttggggttggaaccttatgtagtgttcattggaggcaggtaagggtgatctgtataaaataatgcacagaaaattatgaagggaaagatgagggatatttaggaattatttttattttggggggtacatggtgtatatatttatggagtatgtgagatgttttgatatgggcatgcaatgtgtaataatcacatcgtgggaaattgggtgtccatcttctcaagcacttttcctttgtgttacaaacaatccaattgtactaggaattatttttgataaaatatagtccccattctgaagaaagtgatatcccaaggaaaagtcagggaactttttttttctttaagagtataattgtaggcaaatatttatsaacaagtaagggcaactttacatctttattggtttgtatttttcaccaat

SEQ ID NO: 811342 - DNA, 670 bp, Homo sapiens
ccttattctcccatcccattcagagagattatttcatatatttgtaatacagctttgttttttgtttgtttgtttttttgagaaagagtctcactctgtcacccaggctggagygcaatggcacaatcttggctcactgcagccttgacctcctagacacaggcaatcctcccacctcagcctcccaagcagttgggactacaggcacatgccaccatacccagctaattttttgtatttttagtagaccatgttgaccagggtggtctcaaactcctggcttcaagtgatccacccacctcagcctcccaaaatgctggaattacaggtgtgagtcactgcgcctcgccattgtaatacaatttttcttcttcttctttttttttaattgaacttcattttattgtactttgcagaaactgcatttttacatattaaaagttggcctagaccgaagcccagaataatttgctctaggttttattctagtatttttatagttttgggtcttaatttaagtatttaatcaatctggaattccaggagctgccggagtatgtaaaaactcttgcagctcagtgcctgcctgaacagctgctgactggagcagctgccatgggtcttcccagttttgtgctagggatccaaggccctggtagtgtaggcacac

SEQ ID NO: 811343 - DNA, 535 bp, Homo sapiens
aagctagggttgctggatcacagcttgtgaacccctgtagtgtgattacacctgtgggctcacctgtgttcaaatcgccacacaattatctagcacctgtgacaccttgggcatattactctaagcctcgtcatctctaaaatggacatgatgttaataatgccatagaagaggccaggcgcggtggctcacgcctgtaatcccagcactttgggaggctgaggcgggtggatcacaaggtcaagagatcgagaccatcctggccaacatggtggaaccccgtctctactaaaaatacaaaaattagctgggcatggtggagtgcacctgtattcccagctactcaggaagctgaggcaggagaatcacttgaatccaggacgcagaggttgcagtgagctgagatcatgccactgcattccaccctggtgacagagtgagactctgtctcaaaaaaaaaaaaaaaaaaaaaawatatatatatatatatatatatatatatatatatacacacacacacatatatcatagaaga

SEQ ID NO: 811344 - DNA, 623 bp, Homo sapiens
ctcaaaagcagtcatagatgrtacatatacagtggatgtggctgtgttcaattaaaactttttttgttgttttttaagacacggttgtctcactttattgcccaggctggagtgcagtggcatgattatagctcattgcctccttgaattcttggactcgagcaatcctcttgcttcagcctcctgagtagctgagactacaggcatgtgctgttagcacacccagctagtttttaaatgttttgtagacatagggtctcaccatcttgctaaggctggtctcaagtgatcctcccacctctgcctcccagagtgctgcaattacaggtgtgaaccaccacaggccctcattaaaactttatttgcaaaaacagatggtggatagtaattgtttgttcacccctgctcaaacacaccttgttaaagcacacacataccaccgacctttgttcattgctgatgctcttactgataacccaccctcccagtgaagttgcttactagagtaagctcacagagggcagactctttggttttgcatctataccctgagctggtgagtagtatttttttttcataccctgagctggtgagtagtatttttttttcaatcaacttggaat

SEQ ID NO: 811345 - DNA, 575 bp, Homo sapiens
cctcctttttatggtttccagcagtgtgaataacacagaagcaaaggtaatttattttcacctttctttcccttgctaagyaagaagtaactgtgtcttcaggttgcatttttaaagacaatctcaagtttttcttgttctttgtcatggacctgagggaaggttcccacaggtcctagtctatgcctatttgatgcttcttggatatttgcccagtcgcacaattaggtattgaacttcgttttgtcataacacataaccactgcaggagaaaaataatcccctgaatggaatgacctgtgcttatagtatagattttgctggaacaaggtcaacaaactgcagtagctattagtcattgcctagttcttagaaccctgctaagacagaaattgcccacacaagaaaatcttgaggttcacctcggccttttaaaatgactaagaaaattgggtaagggcagggctgaagtggtcattacagagtatggggaaacttgatgggatttggtaagttggcccttgaaagaggtacgatctcatgttgtggagaaacacaggggcgctcttatcaac

SEQ ID NO: 811346 - DNA, 596 bp, Homo sapiens
gtcttctggggcattcatgccaaaaccatactatgccccagccagtgattgagcacagcagaggtactagagccaggccattcttcrctgatgtggaactcctctcatgggtattctttactccagagattctgattggctggaaaagattttctcagagctgcactgcagtaagacttctacacaatcttccttccttccctttcacttttcagatgtcagacttacattgccatctgaggttctccctattcctccttccacttccttttatccttcacaggctttccctcagtaaatctcatgcacatctaggtccatcttggcatctgccttttggaggacctgaaatgatgtaagtctgttatacatattcatatatttactatttctggtgctcttccagcatgtgttttttgtttgtttgttttttatagtctgaagaaatacctttctcatagtgcaggtctgttgttaacaacttttctcattaaaaacaaatctgaatgtcttcagaattcacctccatttttgaaggatatttttgctggatataaaattctgggttggcagtagatttttttttttcttccttc

SEQ ID NO: 811347 - DNA, 567 bp, Homo sapiens
acagatgatatacataggacaatttaaggaaaatgtatttccaaaaggaccaagtttaaaggagttctagggtacagggaaattataaaaaaaaaacactcagaaacccctggctagtagaagtagagctgtgtggtagatggcttccaaaatggcccacaaagattttctgaattctggatcttggtattcacatctttgtgtaaatccctcaccttgagtgaggggtggacctagtgacttcttactatcaaaagggatgggataatatgtccaaaattgggctgggggagggatagcattaggagaaatacctaatgtaaatgacaagttgatgggtacagcaaaacaacatggcacatgtatacctatgtaacaaacctgcacgttgtgcacatgtaccctagaacttaaagtataataaagaaaaaaatgtccaaaattaggttataaaacactaagactactaccacccatcttccttctctgcctgttgtcactctgatwaaaaaaaaaaaaaaaaaaaaaaaaaaacctgccatattatgagctgcgatatggagagac

SEQ ID NO: 811348 - DNA, 601 bp, Homo sapiens
atgttaaaagaggttattcatagagaaggaatatagtatagtcagaaatttgtatatatatagaaaatttaaaatctaggtgattaatatctggatggtgtgtgactgcaggcacaacagcaaaggaaaaaagttactaaagaaagttgtacaaatttgactaaataaaagtttcaacccacaataacataagacaattaaaagctatgcagactacgaatcaggggaaaatatttaccacaaatctaaaaaaagtattaacacccttaataaataaagagtaaaaactaattgaaagggacatttccaatatcacaataaagaaaagggcaaaggggataagaataaacaagccacagaagcagaattaatgttcaaagaaatacaaataaaattacctatcaagttagctaaaatttttaaaagatagtattcatgagaaacaaaagcaatgtaacactctcacactttttcaaaggtaactggcaaaggtagaaaaagttctaaaatcatttatgtccacattmttctttgacctagaaattccatctccagcaatctacttgaagaaaacaggatattttaaaagcatatagaatat

SEQ ID NO: 811349 - DNA, 602 bp, Homo sapiens
aaatagtccagaatgtcccaggtccagggcagaggaccaacatgggcagttttggttatgagcaaggtgggtctcagaggtgatcagcgatcagagggcggtgaagttctggatccattgagacaagctctacacaatagcatgcagtcccacaacttgtaccagcatccccagcatctggcattccatgtttctgctcctgtgtggcctccacggtgcaacaagctagcggtttacttggacctctgcctcatctttcttcttttgtgcttcagactgcacattcgctttttcctccacttagctctcatgatgcagaggtttccaagaaaatggcgctaaggctgagagaaaccctagcccatttctattgtcagtttttattgaattccaccttggacgctcttctaggttcttgggttacaccagtaaacaaaaagatttctgctcttgaggagcttatattctatcagaggaacacagacaataaatatmagtaagctttccagtatgttagaatgtgataagtggtgtggaaaaaagaaaagtggatcagagtaaggggagttgagaaagcaggtagaggtgggagcatgtgaagg

SEQ ID NO: 811350 - DNA, 546 bp, Homo sapiens
atccagcgtgcactgaactcggtgggtcggacccatccagcgtgcactgaactcggtgggtcagaccctttcactgtgcactgaactcggtgggtcagacccatccagcatgcactgaactcggtgggtcggacccatccagcgtgcactgaactcggtgggttggacccatccagcatgcactgaactcggtgggtcagaccctttcactgtgcactgaactcggtgggtcagacccattcactgtgcactgaactcggtgggtcggacccatccagtgtgcactgaactcggtgggtcggacccattcactgtgcactgaactcggtgggtcagacccatccagcgtgcactgaactcggtgggtcggacccatccagcgtgcactgaactcggtgggtcggacccatccagcgtgcactgaactcggtgggtkggaccctttcactgtgcactgaacttggtgggtcagacccatccagtgtgcactgaactcggtgggtcggacccatccactgtgcactgaactcggtgggtcggatccat

SEQ ID NO: 811351 - DNA, 640 bp, Homo sapiens
cattgccaagattcttgaaagaattgtttgaactaattatctaccctttcttcttttcttatatgttaattttaattttaattttaatttttatttttgagttgaagtcttgttctgtggccaaggctgcartgcagtggcacaatctcagctcactgcaaactctgcctcctatgttcaagtgattctcctgcctcagcctggattcttgaacacaggcaatcatctctaaagcctatgctcgagtagctggcattacaggcatccaccaccacacccagctaatttttgtatttttagtacagatggggtttctccatattgaccaggctggtctcaaactcctgacctcaagtgatccacccacctcagcctcccaaagtctgggattacagatgggagccaccacgctgggcctccttttcttttcaagtcactgcaatctggtttgcaccctgacacccaggagaaactgcactagccaacagcacgaatggctggcttcatgctaaatccaatgggtccttctcagtctttcttcatggaactttcagaagcatttgacactgtgaactactccatcctacctggaacagcctgttcctgtgtttcctgttgatggctgtagttacatagcatg

SEQ ID NO: 811352 - DNA, 604 bp, Homo sapiens
tggcataagcaaagaagggcaatcaatagaaggtccccaaggaaggaagaatcagaactgtgagttgtggttattggttgcactagagagaagtccaaggcagggatgagctggaaattggtggttrtcaaatctggaggtcatgactacagacctggaaggactgagtacagctgcaatgccagcaacttatacctgtactttcaggcattgaatttcagaaagtgagcagtgggaacagctcaatctatttacaaatcctaactgaccagtaagccaccccctcctgcttctgcctgcttgtgaaaaatgctattttaacaaggggcagccgatcagtgcaggatattttggtaatggcttgatatccatcttagtctgttttctgttgctataactgaacacctgagactagctaatttatgaagaaaataaatttctttcttcctttttttttttttttttgagatgcagtctttctctgtagcccaggctagagtgcagtggtgtgatcatagctctctccacccttgaacttctgggctcaagcgatcctcctgcctcagcctgccaagtagctgggagtacagatttatgccaccat

SEQ ID NO: 811353 - DNA, 596 bp, Homo sapiens
ttattttccttttttaggaagatcaggggtgtctcctagaactcttctatacctgctgttctcagaaattctggtccatcacaggtctcccctccttccccaacccgtctaaacctaattaaccaggctgttttcccaatagactccactgagagggtaggaaagaatgaggtccagcatgtgattcagacacatcatcttcattcactgggaaagaaaaggcctgggtcttaatgagaaataaagaattctatggatgaatccttcagtttcctgtcaaaagcccagattgagaaatttagagttgcccagctcgtggtcttttattttaagtaacagtgggataaatgggctctggtagcaatcgaatacactagttatcttcctaaattgatgatacatctggctacttcaccccttttcaatttcaaatgcaatttgtctgaagcctccaatttaaaccacagagatcttctctaaactaaataataggctacacaactcgctggcttcccatgaaaagacaaaggcgtgtgtgtgtgtgtgtgtgygcgcgcgcgcacatgtgcacttgcactcactcgcatggtggggaa

SEQ ID NO: 811354 - DNA, 652 bp, Homo sapiens
gggttttccttcctgtccctccagtgcctgtcctagcatttgttccctgccggtccttgggaaatactggaccgaaaagcaaaacagatcatccgggcatttgctggattgacttggttcccccgccaatgaatcctgctctcttctttttaccatttcctccaacaaagacatcaaaagctcaaagaaagaagatcagggaacttggaaagcctcatctgacaagtgtgagctgactcccagggccctgtgctgagcagggcccactgggcatttcccatctctggagaggcacccagcctctcctctgagctccgtcagtcagcctaacatcccacactgccatcgatttttctgtctttctacactaattagacatgttattactaatctttggtaatcaccacaaggggcctgtggaaagtctccgagatttcaatctagattaaaaataagaaacattatcacctctgggacaatgcagagaaagcacatgttattttaatgtttaaatcaataaagctgtcccgcttctgttttgtgcgagtattgatgaaatttataaaaatcccatttaaacttctccctgtccatctcatccctcyccgcatccctccccgcaggggcacgtgattgatttctcagagggcat

SEQ ID NO: 811355 - DNA, 547 bp, Homo sapiens
tgcaaatcaaaaccacagtgtgataccaccttactcctgcaagaatggccacaatcaaaaaataagaaaaaaaatagatgttggcatgrgtgtggttaacagggaacacttccacactgctggtaggaatgtaaaccagtacaaccactatggaaaacagtgtagagattccttaaagaactaaaagtagaactaccatttgatccagcagtcccactactgggtatctacccagaggaaaagaagtcattacacggaaaagatacttgcacacgcatgtttatggtagcacaattcgtgattgcataaacgtggaaccaccccaaatacccgtcaatcaacgagtggataaagaaactgtggttatatatatatgatggaatactactcagccataaaaaggaaagaattaatggcatttgcagtgacctggatgaaactggaggctattattctaagtaaagtaactcaggaatggaaaagcaaacatggtatgttctcgctcataagtggaagctaagctatgaggatccataggcataagaat

SEQ ID NO: 811356 - DNA, 538 bp, Homo sapiens
tactatataatctagcaatcccactattagatgtatatacaaagacaaatcaatatagtcaaagagacatctgtaccctcatgtttactgcagcactattcacaacagccaagatatggaatcaacctaagtgtccagcaactgtgaatggataaagaaaatgtggtacatatccataacggaatactgtttagccataaaatgaatgaaattctgtcatttgcagcaacataaatgaaccccgaggacattatgttaagtgagataaaccagacacaaaaagacaaataccacatgatctcactcatatgtggcatctaaaaaagaaaagccatagaagcagagagtagaacagtgtttaccagagagtggggaagggtcaggggaggagaggcaaagcttggtcaatgggtacagacttaaaattagataggaggagtaagttctggtgttctgttgcacagtagggtgactgggtaacagtaaggtattgtacattacaaagtagctasaagagaaaatgataaatgcacgaaat

SEQ ID NO: 811357 - DNA, 643 bp, Homo sapiens
ggatgctagatcaccacactctgggtttctcttttagttacccaaccatttcttctctcatttttcctcttccattccttaaatgctgatgtttcccaagagggactcttagtcttccttcccttgcttctcatatttttttctgattttttttcttcccttgctcctcttgctttctctggtgtctcaattgttttcagctacaacaaatgtactcatgacttgactcccatgtactcaactccaagtacatgctctcattaattcttctttgtgttttgctatagactcctaaatggtttgctcacagtagatggtttacttcagttcaacctctgtagtgctatcagagttattttcttgaaaaaaaaaaaaaagctaagctttaaaaataccttttacacgtttaacaggtcctgttccccatgccacccaactgagtgagtccctccaacaggggttgtcagacaccctatataggagtgatcctactggcatcaggttggtgccccttgaggtcagaggtcccagaagaaggaggaggcacccattttttctgttctccagacttcttgaatgacatatccaggcacgggagtgaatyggatgagtagggcctgaagtgaacctcccagcaaactgc

SEQ ID NO: 811358 - DNA, 642 bp, Homo sapiens
gtaaaaaatgaataagacatggtctctgccaccacagagttgagcccatggacatataaacaaattacttaaaggatgctggatgtcatgatttatgaattgtctagtttttatattcagaggttacaaaccagtagtgtttagatagattttcttctgtttatttaaatttaaaaaactgttgccaatatttataaattaggagaattcacacaaaaataaagattttcagcctctctgggaaaactaaaaggtctgacagcactggctctaccttcccacacagcaacaataggtcagagctgagccacggctatgtcctttcgataaggcatgcattctcctgttcactacattctccaccactccctattgtctctgacattgaggccaagtgtcaggtactttttatccttgtgtttatagtgttctcctgggtccatttttctcatatacattactttccagccttgtgagcgtttgagtttataatcactattaaactttacttttcacaaaaagcaatatataaataagagtcaaatgagtaacatgttactygagtaacataaaatactcataaataattataaatactgataaatcataaatttatttttattaattaaacaatcaattaat

SEQ ID NO: 811359 - DNA, 206 bp, Homo sapiens
gcgagactagtctcaaaaaatatatatatatatgttttggaagagagagagwcaacattaacaagactttaaaaattagtatcaacatacaagtttatagaaatatgtactatcctactatcccattgtatgtggagatggatttttcatctaccattagactccctcaaaaatctataaattaataaagctttcaaaaggtaagt

SEQ ID NO: 811360 - DNA, 655 bp, Homo sapiens
acttttaaaactataaatgccttggccacactccagacataatgatttagaatatgaggggtagggaagggtccagtggaaaaagtagagcaagggactcctcatatgtgcttttctttttttatatttaattaatttttttcttggtgctcatttgttacagtgcatttttcaagagctccatagctgcatgttgatgattctgtcatgcacaaaaggtagggttgagaaacattatttcagctttgcgtctttctctttttttaattaaaatgtactcagaacctattatgtgacaagcaaaacactttacatgcatcaagtcatttacctccaaatcaactctataaagtaggtatttttttcacattaaaaaaaacaaaaaaacaaaaacacatacattggctcacacctgtaatcctaatgctatgggaggctggagcaggaggatcacttgaacccaggagttcaagaccagcctgggaaatatagtgagacctcttctccacaaaaaattttaaaaggccaggcrcggtggctcacacctgtaatcccagcactttgggaggctgaggtaggtggatcacttgaggtcaggagtttgagaccagcctgaccaagatggtgaaccccgtctctactaaaaatacaaaaa

SEQ ID NO: 811361 - DNA, 588 bp, Homo sapiens
cctcattgcattttttaaaagatcactctggccatgcygtagagagagacagaatggagaaatgggacgatcagtgcagaagaaagatggtgccggcctggtccagggtgatgacagaaaaaaatgcagagaccagtgggcctgagagatcagaaaatggtgaaaccaataaaatttgcctatggattaaataggagggccaagggagaagaagatgttcataataacaaccatggaacagcatggaaaatggccagaccctggagctgggctgagggaattggatggcttgaaagatatggcgatgtagatgggcaggattgaggtttggagggataagagggacattctccaaggtggaacctggggagggcaaagacagggctttgaggctggtgaggaggcccccttggtgaaagtggtagggccttggtggacacatggacatcctgcctctctctccccaacctccccagctgccttccaggtttgaagttgtggttacagcttcggccttgatttagatccctcagaacaccccttggcatttttttaattaaaaaaaaaacatttagcaggagtgtctgg

SEQ ID NO: 811362 - DNA, 632 bp, Homo sapiens
atttgctgcgacctggtgtggcccccaaggccagcgcctcatcgttatgccccacagcacttggaaggaagacttaaaggacgatttgaggggcggggaaagggtggcacaggaacccatgtggcaccctggcagagatggcagcgtgggaagcaggaaggtcagggcagtgggtgcaggaggcaggcaagctgggcagatggagccacagctggagaggaagcggtcgggacacccttcccaggaccctgccctggacaccttccccaggacccctgttctacaggacccctgttccttcctgtttcggggtaaaacaccaagctggggaaggggttagggacgcagacctgggaggcagatggaacggcctgcgccaggccagaggaagcttcttccccgagaccacgcatgaaggccctgggacccctcctggacttgtcccctgcccaccccctcctacacccaaagaggacttgtaattcagataaaaagtaagaacagaaagagctgcattagccttttcataatgatagcatttataagcagaaaattagcgctatttctgttcattatttagtttttctttgtygctgacttcctattttctacataggataggtactctgcaa

SEQ ID NO: 811363 - DNA, 542 bp, Homo sapiens
tcctcggccctgcttgagagcactcagcggactgccctctgacctctactggaacaggaaaaggatgaagccttctgtgctgtrtcctcctgcacaggcttctaggaaacttgggaatcctttattccccattatttctcaacgttcacacgctagaaaggatcagaatgtgacatacagctctgtggcattttagaagcccaagagggtctctaaaagcctaccttgggaatgttccagtttaagaatttgtaacattgactttcaagctgataaattgttcaatatgtaaagtcacttaaaagaattctgactttggattgtaactttccaaacaacaacaatttatttgacctcatcactaactggacattagtgcctactcaaatttagggaaattactcactttttttagtcttggtggtaaaaacacctcgattgtagcaattcccgttgttctataattgtcatttcctgttccacgctcaattgccttgcaacgtatttcttctattaccttttctacttcattttcacagcat

SEQ ID NO: 811364 - DNA, 621 bp, Homo sapiens
tgagtgactccattttgcttgtctgttggggtctagcacagaagttcagtccaaactgacggcctcccataaattttttttaatgccctgcagtgtctgaaggctagtcatcaataactgaatcatgttacattcagctcaagcaattaaggtggtggtcaggtgcatttagcaaaacctaacaactatcatttcagaaaatacaggtttttttgtttgtttgtttttgtttctttcccagaggtgtgcagtccctctggagaaagcatgtgtgctgcagggaaaaccatgcacggtggacagcatggccttccacctgcatcacagtcacattctgattccaggcagctgtttcacaattctgtaaccaacggtaggaaaaataggcttaccctctacctgccactcatttcaacattccttcacaccacatgactccacatgaatttgtgcttcttgactcctctctgtttgttttttgtttttgttttttgagacacggtctcactctctcactcaagctggagtgcagtggtgtgatcttgctcactgcaaccgccatctcctgggctcargtgattctcatgccttagcctctgagtagctgagaccacaggtgca

SEQ ID NO: 811365 - DNA, 266 bp, Homo sapiens
aaaacgagaaaaaaaaagaaaaacccagctctttccstctttgtggattgccactgtgctggggcactggagcagtccttcagggcttagccagtctgtgtacaactttttatttatttattttttaagatagagtcttgccctgtcacctaggcttgagtgcagtggcacgatctcggctcactgcagcctctgcctcccaggttcaagtgattctctgcctgagcatcctgagtagcagggattacaggcttgtgccgccacac

SEQ ID NO: 811366 - DNA, 266 bp, Homo sapiens
aaaacgagaaaaaaaaagaaaaacccagctctttccctctttgtggattgccactgtgctggggcactggagcagtccttcagggcttagccagtctgtgtacaactttttatttatttattttttaagatagagtcttgccctgtcrcctaggcttgagtgcagtggcacgatctcggctcactgcagcctctgcctcccaggttcaagtgattctctgcctgagcatcctgagtagcagggattacaggcttgtgccgccacac

SEQ ID NO: 811367 - DNA, 527 bp, Homo sapiens
acagccaaagcctgctttgataagataggggagggaggttattacctaagaaaaattgctactccacattccagtgactttgcatcctaaagwaaaagccatctttagcacaacagatgtcctttttaaaattttatcagccagaaaaattgagggggagaatgcaaaccagaccattaaaaagcaatgtagagtctacacaaattaatacaatgatagcataatcaggttgaaaatgacataaaatcaaatgatatgtagctgtccttatggtgtatcacagctcctgaaatcttaaagagtaagtgaaaatacggggcctcctgcagcgtggtgaacatagcaacctttcccagtgactccctatacagctttagcagcctttctgaaagccactaagtcagtcagagaaacattgcagataatgcgtatttgcaaaagcagccccactggaggactgcacgagtccacacctgatcatgatctccaaattgaaccacttttgctgtcaagtagagacgtagaac

SEQ ID NO: 811368 - DNA, 439 bp, Homo sapiens
aaaacgaatgcaagagcatctcattcacatatctggtggctggaagattkgttgatcagggaacttcaactctcatggcccctcaactccaacaagcaggtctgagcttcttcccgtaataggctcaaggatccaaaatccagaaatagaggacacattttcatttccaaatgcttttacatctcctctttagccatgtttattactgtttgactgctcaaaggcggtcttaaggctagtctagattcaggagaggaaaaatagactccacctcttgatgagagaagctgcaatctaacaagcaagggcaagggagtgggaggagaaatatttgtggtcatcttgtaatctactgcatgatctgagaaggagcccagtgtgtgaaccaaaaacacctgctagggaaaggcatcattccagtttctgcatctagggtgga

SEQ ID NO: 811369 - DNA, 467 bp, Homo sapiens
gaaagtttccaatttaacatcatatgaaatcacatactttgagctagtttaatgagatagaactgttttttcttcctgcagatcattcatctcttcttgagactagttaattgtgaagacttacatttttaaggccaggatctggacttttattagttagcatcgtaataaaaaaaaaggaggtatgtagagatagagatgaaattttttctagatgaaatggacaaggagtgaaaaagagttgacttaaagctgaaataaggatcatatggcagttttcttctatagcctccactttctctttatattagacattttattttacatttaagtctttgtgagctcccttatctcttgatttttaattgctttttccagtcttctgctaaaaacataatgtgaactcttattcaacttttagstgggaaaggtcttattgtggcctttaggactatggctacacaaat

SEQ ID NO: 811370 - DNA, 628 bp, Homo sapiens
tgaataggtggttttcccctcacagcgtaaacaaagccatggggaagttccagctgagcagagccctccacagctcagcaaagcctctgtagccagactgcctctctagattcctcctctctgggcagcgcatctttgaaaaaagtgcagataaaaccctcatctccctgggacaaagcacgtgggggaaaggggtggctgtgggcacagcttcagcagacttaaacattcctgcctgccagctctgaagagagcagcagttcttccagcacagcgcttgagctctgctaagggacagactgcctcctcaagtgggtccctgacccccatgcctcctgacggggagacacctcccagcaggggtccacagacacctcatacaggagagctctggctggcatctggtgggtgcccctctgggacaaagcttccagaggaaggaacaggcagcaatctttgctgttctgcagcctccaccggtgatacccaggcagayatggtctggagtggacctccagcaaactccagcagacctgcagccgaggggcctcactgttagaaggaaaactaacaggaatataatcaacatcaacaaaggacatccacacagaaaccccatctgaaggtt

SEQ ID NO: 811371 - DNA, 628 bp, Homo sapiens
tgaataggtggttttcccctcacagcgtaaacaaagccatggggaagttccagctgagcagagccctccacagctcagcaaagcctctgtagccagactgcctctctagattcctcctctctgggcagcgcatctttgaaaaaagtgcagataaaaccctcatctccctgggacaaagcacgtgggggaaaggggtggctgtgggcacagcttcagcagacttaaacattcctgcctgccagctctgaagagagcagcagttcttccagcacagcgcttgagctctgctaagggacagactgcctcctcaagtgggtccctgacccccatgcctcctgacggggagacacctcccagcaggggtccacagacacctcatacaggagagctctggctggcatctggtgggtgcccctctgggacaaagcttccagaggaaggaacaggcagcaatctttgctgttctgcagcctccaccggtgatacccaggcagatakggtctggagtggacctccagcaaactccagcagacctgcagccgaggggcctcactgttagaaggaaaactaacaggaatataatcaacatcaacaaaggacatccacacagaaaccccatctgaaggtt

SEQ ID NO: 811372 - DNA, 527 bp, Homo sapiens
acattctaagctttttttttttttttttkgagacaagatcttgctctgtggcccaggttagagtgcagtggtacgatgatagctcactgcagccttgacctcccagggtcaaacgatcctcccactgtagccttctgagtagctgggactacaggcacacaccaccacgcctgactgatttttatattttttgtagagatgaggtttcaccatgttgcccagactggtcttgaactcctgggttcagatgatcctccctactagccttccaaagcactgggattacagatgtgagctactatgcctggcccctgagctctttctttttaaccaatttattatcaagtgtttaaggtattgaaaaatgagtagactcctccccaccactgtattcatgactagctccttcttttaggtgtctgctcagtatcagatactcagaggatccttccctgcttgatctaaagttggtcaccgcctctgatatgttttatctcagccctttttagtttcccataggacctcat

SEQ ID NO: 811373 - DNA, 584 bp, Homo sapiens
aagaaaacctaggcaatacctttcaggacayaggcatgggcaaagactttatgactataacaccaaaagcaatggcaacaaaaggcaaaatagacaaatgggatctaattaaactaaagagcttctgcacaacaaaagaaactaccatcagagtgaacaggcaacctacagaatgggagaaagtttttgcaatctacccatgtgacaaagggctaatatctagaatctacaaagaactcaaacaaatttacaagaaaaaaaacaacccccccaaaaatgggcaaaggaaaccaacagacacttctcaaaagaagacatttatgcagccaatagacacaagaaaaaatgctcatcatcactgatcatcagagaaatgtaaatcaaaaccacaatgagataccatctcacaccagttagaatggtgataattaaaaagtcaggaaacagatgctggagaggatgtggagaaataggaacacttttacactgttggtgggagtgtacattagttcaaccattgtggaacacagtgtggcgattcctcaaggatctagaactagaaatactatttgacccagcaatct

SEQ ID NO: 811374 - DNA, 632 bp, Homo sapiens
tttgatagtgaagatgacacatattggtcataataaatcaacttatctattacaagaataagatgctcaatttagttcacaaaatgtaccccaactctgtgstgtattcaagagacacaaagtaattcagaaaagctaaaaataaagaaacagactcatttataccaggcaaatggaaacaaaaagagcaggttagcaatcctaatgtcagaaaaataattaaatcccaaagacattagatgtgacaaagaaggtgtttttttttttctaacactaaaggctacagttcacagtgaagataaaatacctgtggctatctatatgcacaaataaaatagcaatcatctttatgaaacaaaactacagggaggacaaggagacttacttagaaatacactaataataggagactttaatatacctctcacagtataagatagataaagttgacaaaaaaatgagatagacaatttaaacaacataatcgattgagcagatcttgtggatgtacatcaaaccgtacaacatgataatagagtatatgtattcttctcaggtgcacatgacatggatcacgtgttaggaaatgaagaacatgtcagtaactcttaaaaaccagaaatattgtaagg

SEQ ID NO: 811375 - DNA, 618 bp, Homo sapiens
gaattttcagaaagcctaaagacatgcttctgttttaagtttctgrtattaaaaattatccctgtccttgcaagctctataaagctgtgaattcaattctattgcagaataaccttgttaactgcttgagagagttgggtcagaatcctcacccattccactattaactttcgccctcaccatgacaacttagtgctggttaaaagggctcaaaagacttgttaccagaaaattaagctaatgaattcttcattttccaggttgaagtagttcctaatcagtcctctcaactatgtccactcaatcataatattgttttaaatagattgtctgtctcaggagcaaacgggagttcaaatgaactatattcctgttcagatcattaataacaataaatccactgcaatatcagcaacttgatatagattcttttagtggagaagcacctcacttttgacgaaacacatatcagcaaaagatttgttcagaggtagccaaaaaaccaatatcatcaacattgcattgctcaatgtgtttattttatatatacaccctctctatcttacctatctcatttagtgccttaattttaagcatggcaaatatattcttagcatc

SEQ ID NO: 811376 - DNA, 618 bp, Homo sapiens
gaattttcagaaagcctaaagacatgcttctgttttaagtttctggtattaaaaattatccctgtccttgcaagctctataaagctgtgaattcaattctattgcagaataaccttgttaactgcttgagagagttgggtcagaatcctcacccattccactattaactttcgccctcaccatgacaacttagtgctggttaaaagggctcaaaagacttgttaccagaaaattaagctaatgaattcttcattttccaggttgaagtagttcctaatcagtcctctcaactatgtccactcaatcataatattgttttaaatagattgtctgtctcaggagcaaacgggagttcaaatgaactatattcctgttcagatcattaataacaataaatccactgcaatatcagcaacttgatatagattcttttagtggagaagcacctcacttttgacgaaacacatatcagcaaaagatttgttcagaggtagccaaaaarccaatatcatcaacattgcattgctcaatgtgtttattttatatatacaccctctctatcttacctatctcatttagtgccttaattttaagcatggcaaatatattcttagcatc

SEQ ID NO: 811377 - DNA, 633 bp, Homo sapiens
ctagatgactttgctgaataatttaccaaaaatttaaagatgaattaacaccaatttttctcttccaaaaatagaagggtgagcaaacacttctaagaaaatactgacaaactgtattcagcagaaaagtaaaagccttatgcacactgatcaagtaggatttatcccaggaatgcgacagtggttcaacatacaacaatcaaccgatgtaataaactttattaatgatttacaggaaaaaacaaacacaatcatctcaatggacaccgaaaaaaatagcaaaatgataaaaacactaaacaagctaggaatacaaaggaactttctcaaagtgatgagggcatatgtgaaaattccacagctaacatcagacttaatggtgaaacactaagtgtttcccctgagatgagaaataacaatgatgtccaggatcaccacttctattcaatattgtactggaattctagccaggataattagataaaaaataaataaaggtattcagactgaaaattgatagattacatgatyttataggaaaaaaattttattcacaaaaataaatttatagttaatgaacaaattatcaaaatgcagaatacaaggtcaatatagaaaatcagttgtattttc

SEQ ID NO: 811378 - DNA, 521 bp, Homo sapiens
aatatgtgggtgatctgtacagctggatattgttcatcaataaaaagaaataaaggaaatactgatacatgctatatgatatggataaactttcaaaagattatgtgcagtaaacaaactagacacaaaagaccacatattatatgattccatttatgtgaaatatccagaatagacatatccatggacatggaaagtaaattagtcattaccaagaaatagggtgagggattgattgggaggtttaggattttctttgagcaaagttgaaaaggttctggaattagtggtggtgattgaacaacattgtgaatatactaaaatccactgacttgtacactttcaaattgtttttaaaaagtcctatttcccctattagaatcacaaatcccctgaattgaaatattcacggtctctttagaagatatacctctctagaagtacactgttacaatgaaagatgctcctgtgtatgmtggtccattaagtcccattattgcaaacacaatcaactgcctgga

SEQ ID NO: 811379 - DNA, 614 bp, Homo sapiens
attttttatgtaaggttgtgatgacctttatacaaggtwatgatttttgcagagtcttctgtgacgttttggttttcaagcatttgtgcatgaagaccctctcttcatggccttccctggctctgtttgtcagggtttgtaacacaagtaactccattttgatgctgataactttcacaatataaagctaactttttattttgtttggtacatagttcgagattcatgttacatagtttgtctactgaatgaaattcagttatagctgatatgctacttaaagatgtttatcggctcaggacaggattgtccatagttataattcatcccctagataaaattttagaagagttgaagattccaaccaaccattatcttcacatttcctcccttactctgtccttccacaaatggtttcaatgcatataagacctattaatttatacattttttacattcagaaacaatattttggaaagtttaaatgctctttgatgtactgataacagtcaacatattactttataaaataggtatggaattttaaaaatgactaaagactttaggtagaacaaggaagctctatgagagaagtcttaggtttagtaaaggga

SEQ ID NO: 811380 - DNA, 639 bp, Homo sapiens
ttatatatttatatacatatgttgatttactttctttttatttctcatttataatacaattaataattatgttgattttttaaaaatatgtgggcagggaggttattatctgtcaatgtcattttgggatattagtggggcaattgggtctgatagagctgaaaacttctgaatcagaatggagggcaggggagcaccatcataggcagcagacttgaggaaaggggctttaggctataagagaactgaatacagtgtcttcacctgaaggtcagtggatggcttcataagtctcattaaaattatgcctttttttttttttttttgctttgagacagtctcactctgtcacccaggctggaatgcagtggcacgatcttcgctcactgcaacctctgtctccccattcaagcaattctcatgcctcagcctcctgagtagctggaattacaggtgcgccaccacgcctggctagcttttgtatttttaatagcgacagggttttgtcatgttgaccaggctggtctcaaactcctgaccacaagtgakctgcctgcttcagcctcccaaagtgctgggattataggcatgagccactgtgcttggcctaaaattacaactttaaataacaaaaattta

SEQ ID NO: 811381 - DNA, 546 bp, Homo sapiens
gctcctctcacctccctccttccccactttcttcttcagaatagttcattgtgaagaattccactggcatttcatacccttcaagttctacatcatacagctggtgtggctctaaacgtaggttttaaaaatcaaaagcaccaaagcagagagtctggctggatcaggaaagcaatagtgcaattttctgataacactgtttccccaacaaaacataaatctgaacaaatgaatcttacagaatcactggtgctggggagaattctttttttttttttttttttttttttggtgcctggtagggttatttcccatcttccaaagcctaagccctaatgagctccagggggacagaagtctgtcaatcacagggtacttttcaagtatagtcatctctgccccatcagagaaccacgaggcatgaaataattagaaagcccagaataactgctctgttttacaaragcaaaatccgtatgtggatcatttacataaacttgtcacttcccattacagttctaatgtcggctgggtagtaatcgcagg

SEQ ID NO: 811382 - DNA, 456 bp, Homo sapiens
ggctcattccctgatggtttcatttccttccacattctacctttgtttttaatttttttttttgattgttttgagacaagacggagtctcactctgtcacccaggctggaagagtatgcagtggcacaatctcggctctctgcaacctctgtcctctgggttcaagcgattctccagcttcagccccctgagtagctgggattacaggtgcacgccaccatgcccagctaagttttgtatttttagtagagacggggtttcaccatgttggccaggctggtctcgaactcctgaccgcaggtgatccacctgcctctcctcccagagtgatagkattacatgcgtgagccactgtgcctggcagcagcgccgtcatagcttatggcagccttgacttcctgggctcaagtgatgcccccaactcagcctcctgagtagtgaggcctatataggcat

SEQ ID NO: 811383 - DNA, 527 bp, Homo sapiens
tttgaattctaatataggttttaaggatgcttcctttcaycacaaaaagaacttgaggaggggtcctgagtcctccaccccaggtgaagaagactgcattgtgactcaagtccaatcacctgtacctgcacctgtcctcacacaggtctggaactaagaaacaaataaccaataactagacttaagaatctcaactttctccacaaatttgcaggagaaagggtgtctctgaaaatttggattcccatggacgctcagagaaaagaaaagggtgtgggtggagcccaggtgtgtgagaggcagatgggaaagaccctcacctggcaaagccaaggggaccagtgtgggatcagggggacacaagggctttctctacctccctccataggtcctgcttaggatcaagaccagtgttctgtcagaacatctgtagaccaaaagaagtgttacctcccagggcaaatgattttcaccaaaatcctcactatttttaccattgcacagattaggaaaattaggaaatgtac

SEQ ID NO: 811384 - DNA, 527 bp, Homo sapiens
tttgaattctaatataggttttaaggatgcttcctttcatcacraaaagaacttgaggaggggtcctgagtcctccaccccaggtgaagaagactgcattgtgactcaagtccaatcacctgtacctgcacctgtcctcacacaggtctggaactaagaaacaaataaccaataactagacttaagaatctcaactttctccacaaatttgcaggagaaagggtgtctctgaaaatttggattcccatggacgctcagagaaaagaaaagggtgtgggtggagcccaggtgtgtgagaggcagatgggaaagaccctcacctggcaaagccaaggggaccagtgtgggatcagggggacacaagggctttctctacctccctccataggtcctgcttaggatcaagaccagtgttctgtcagaacatctgtagaccaaaagaagtgttacctcccagggcaaatgattttcaccaaaatcctcactatttttaccattgcacagattaggaaaattaggaaatgtac

SEQ ID NO: 811385 - DNA, 599 bp, Homo sapiens
aaaaaaattcttccgtgtaaaggacaggaaacaaggcagattaacatttcctgctcatggttctggcaaacatttatgttcacacgaggcagcagtaagacttcagtcagattctctctaatgtggaggctgtgagtaaggccacgctgcacacacactgtgcactacaccgaccacgttgcagtggcttaggagaggccggagtcagcagaagtttatccatagcctgctaggcaccagacccagtggtagaggctgggatccagctcccaaaggcagctctcatgccagacaggacccaccaagctcactgctccagggcagcactgcatggtggggtagggcccagccccaagagcatggagaggaggtgactgggcagtggaggcagacgcagagctggggacagacggattttctcaagtcaggccaggaaggaactctcagatccctctgacgacttgaagatgccatttytggcaaattaacatgaggatcctggaactattttccctactgttttcatttctcagcacctaaaatgccacaggaggcagccaaggcagagaaaagaatcaggaggaggggctttaaatgtg

SEQ ID NO: 811386 - DNA, 599 bp, Homo sapiens
aaaaaaattcttccgtgtaaaggacaggaaacaaggcagattaacatttcctgctcatggttctggcaaacatttatgttcacacgaggcagcagtaagacttcagtcagattctctctaatgtggaggctgtgagtaaggccacgctgcacacacactgtgcactacaccgaccacgttgcagtggcttaggagaggccggagtcagcagaagtttatccatagcctgctaggcaccagacccagtggtagaggctgggatccagctcccaaaggcagctctcatgccagacaggacccaccaagctcactgctccagggcagcactgcatggtggggtagggcccagccccaagagcatggagaggaggtgactgggcagtggaggcagacgcagagctggggacagacggattttctcaagtcaggccaggaaggaactctcagatccctctgacgacttgaagatgccatttctggcaaattaacatgaggatcctggaactattttccctactgttttcatttytcagcacctaaaatgccacaggaggcagccaaggcagagaaaagaatcaggaggaggggctttaaatgtg

SEQ ID NO: 811387 - DNA, 617 bp, Homo sapiens
caagggaatggctctgttttacattcacagtgttatttyttacaaatgtaaacatctagccaggaacaacatctggcctgtgatactgctgtctcagagctgctgacataacctgcgggggaggcgggaggcgggtggggagcagccaacagttctgagaactttcccctcgttcccaaaccttctagcgggctttccaggaaaaagctaggatgagaaacaggagcccccaaccaatacggaatggtgattttcttacgtgttataattcagtagcttcccttaagggcctcctcaaacatcggacccctttctaccgctcctgctgccccgccacgaggacgaggtggtcctggctgggggaggcctctgttgggagctggtgggaaaagcctcatacaggcctggcagaggctgctcagaggaggggctccctttcagctccccctcacgtatgtgggcagcatacaagtccacatctcagctgctccccagctgccacataggagagggacaggtggaagcttgggggtctcaaggcagcacctgcacagagttccaacatttcctccacttaccacattcaatacccaaaacatcgacgggcatgaccaaac

SEQ ID NO: 811388 - DNA, 585 bp, Homo sapiens
tctctaagagacattcgtacacagcccatgttcatgacagcactacttacattagctcaaaggcacagcaactcgagtatccawcaaaagatgaatcaaggccagagacggtggctcacacctgtgaccccagcacttcgggaggctgaagtgggcagatcacttgagcccaagagttccagacaagcctgggcatcatggcgaaaacccgtctctacaaaaaatataaaaattaaccgaatgtagcagcgagcccctgtagtcccagctactgaggaggctgaggtgggaggatcacctaagcctgggggggtcgaggctgcagtgagctatgatggcaccacttcattcagcctgggtgacagagtgagaccttgtctcaaaaaaaaaagaaaaaaagaatggataaacaaaacgtggtggaagacagtggaatattactcagccttgagaaggaaggaacctctgacatgttacagcatggatgggacattatgccgagtgaaataagcagcacaaaaggacaaatattgtgtgattccacttatatgaggtccctagagtagtcaaatgcacagacagaaa

SEQ ID NO: 811389 - DNA, 625 bp, Homo sapiens
aaaataattcatgattcaaccttgacagcaagcacacatcaagctaacaggtgtccgtgatctactctaaccccacccctgccacagtgcatcccatctgtgccctcgcgcagagcagggacatgtgtaaaggttcggaggcagcaggtagaaggcacccgacggcacaggggcacagcagctacgatcttcctagctctcctctgcctctttgctcttgaagaaattgaaactcaaaagagaaacagtaacttgccccaaaacacagtggaggtgtcatgtaattagaataaacactatgtttccagaccccagggaatctgggaacactttccttctgcactaaattttcctaattacaatgtttattaagcattttaggtactaaaagaattttaacttttaataattataaacctgtaatggactagcaagaagtattaaaacctcaacatctagcaagaaaaagctgcagagaatacaaatgcataataattactaaagacaacmttatataaaactgctttctctaagaagatttaaaaactagtgctccaccacaagatttcattccaccatctgtcaacacaattaaatgctttgaaatgtgcaatgaatactgaca

SEQ ID NO: 811390 - DNA, 632 bp, Homo sapiens
gggacaaagaaggacatcacacattggtaaaaggaccaattcatcagaaaaacataacacttaaaaacaaatatgcacttaaaaaatcccacaacatgaaacaaaagctgacaaaactctccatawtgaataattattaacaattaagttactttttttttttgagacagagtctcactctatcacccaggctggagtgcagtggcgctgactcggctcactgcgacccccagctcccaggttcaagcaattctcctgcctcagcctcccgattagctgggattacaggcctgcaccaccatgccaggctaatttttgtatttttagtagagataggatttcaccatgttggccaggctggtctcaaactcctgacctcaagtgatctgcctcccttggcttcccaaagtgctgggattacaggcgtgagcctctgagcctggcataacaatttactcttaataattattaataactaaatgagataatccacataaaagagtaagcatagtcccaggtacacggtaagcacttgataatgataactcttatttagaaagaaaaactgagttgctttgctagttaaaggtaaagaagtcagaaaatctaacaatagtggctggagacatcaa

SEQ ID NO: 811391 - DNA, 552 bp, Homo sapiens
tccccagcaattggtttattgtttgtttgacatggagtcttgctctgtcatccagcctggagtgcagtggtgcaatctcagctcactgcaacttctgcctcctaggctcaattgatgctcccacctcagcctccmtagtagctgggactacaggcacccaccgccatgcctgggtaatgttttgtatttttattagagatggggtttcaccatgttgcccaggctggtctcgaactcatgagctcaagcaatccgcccgcctcagcctcccaaagtgctggtattacaggcatgagccactgtgcccagcctaggtttattgtttttaatgaacttatatcatttaatacctttccttcttggctttggcttccaggaacctcagagccaaaccacaaaccagatgtatgcatagaatgcctaacattcacgttctgagggctttagtaatgagcgtagcttctggaaccacattgcctgggtgagccacttactacttgtgtgaacttgggcaagttgcttaacctctttgtgcctcagttccctcatctg

SEQ ID NO: 811392 - DNA, 550 bp, Homo sapiens
caggagtcacctgctccatgctgccttcctgagttgccaccatggcatttctgcaattgmacttcccccctgcaggatgctggggtcagttgcaggagtgcctggctccccaccaccttggatctgtggctggcacacagtaggtgctctgtgacaggaacgagaagggccacctgaggggctgtgagggagcatcgggcaggcccaggacctggcctatgtctggtggactgtgtgcttggtgagctggctgtctgcatgacatccccagcctcccttagtgcttgctggtggggctgccaccttggtgtctctgctatttgcttgggcctgtcagcaagaccctggtgagagtaggaaggggatttgggggtataaaacctgtatcggggccccactcaccctgaggaagcctttgaggggacactgaggagatgtctgtggtgaggagctggtttagaggtggcagaagcatctcttcctactggccctccttgaagaaggataaatattaataccagctgccattagaggatcctttcgtttctca

SEQ ID NO: 811393 - DNA, 576 bp, Homo sapiens
aggggaagggccaaagccgcagggcttcagactggccgctcccgggcccgccagatccaggagggatgcccaaggagggcggtttcctctctcggggcgaactcggccccaggccccaagtagccggtactggcccccgccctctcgggtactacctaaccgaggaggggtggccaggcccacctcggagctcaccttccagttccgggaagccggccggccgtcagtcggtcccgaattccgtccacacacagcgtcttccggctcccgccggaagcagctcgagcgcgggacaggaagtttggctgaccccccacgcacacacccactcgctcgcctcagtgtcgtgtggctgccgcactgctcgggacccagacgtcaagggtgctggcggggcctccccaggcccgcgacgcagggctccgccccggacaggaggagccgcagccgccccgctcccactcactcactcactctcggccttcggractcctatgtccgcgaagcccgaaaaaacaggtcagctaattcgttgacgtcactgccaccccgcagtagcggagggagtagtttttc

SEQ ID NO: 811394 - DNA, 503 bp, Homo sapiens
cagtaggctgcagcgagccttgatcacaccactgcactccagcctgggtgacagactgataccttgtctcaaaaattttaaatatatgtatgtgtattaattagttttagctctcttgattctagggtctgtgaactccttgtaacaagtgtgatttttctcgccaaaatgagttcccaaaaattcaagagatgagtagaggatttataggtacatttctatccagtttatcctcttcttctaaattttctctaacaccaaggattactatcatttacataatgcgtagtttgagttggataatgccttatatgattttttgcctacatgatttaattttcaaaacagccctattattattattaccattttacgaatgaggaaaccgaagttaagctagttaagttytaagtcaggttaagtaactaataagtaaaggagcaagttatcctgcctgagtccaagcacctgaccctttgttatatttgccataaatctggaat

SEQ ID NO: 811395 - DNA, 503 bp, Homo sapiens
cagtaggctgcagcgagccttgatcacaccactgcactccagcctgggtgacagactgataccttgtctcaaaaattttaaatatatgtatgtgtattaattagttttagctctcttgattctagggtctgtgaactccttgtaacaagtgtgatttttctcgccaaaatgagttcccaaaaattcaagagatgagtagaggatttataggtacatttctatccagtttatcctcttcttctaaattttctctaacaccaaggattactatcatttacataatgcgtagtttgagttggataatgccttatatgattttttgcctacatgatttaattttcaaaacagccctattattattattaccattttacgaatgaggaaaccgaagttaagctagttaagttctaagtcaggttaagtaactaataagtaaargagcaagttatcctgcctgagtccaagcacctgaccctttgttatatttgccataaatctggaat

SEQ ID NO: 811396 - DNA, 575 bp, Homo sapiens
gctgggtgattctggctcaaggtctctgtaatcaagctgccagtctgggctgggctgtggtctcataagaagactcagctggggaagaatccacttccaagcttgctttcttttctttcttttttyttttttttttttttttgagacagtcttgttctgttgcccaggctggagtgcagtggcacagtctcagctcactcaagctattctcatgcctcggcctcccaagtagctggaattacaggcacatgctaccatgcctggctaattttcttatttttagtggagacagggtttcgccatgttggccaggctggtctcaaactcctggtctcaagttacctgcccaccttggcctcccaaagtgctgggattatgcatgagccaccgcgcctggcataggatgtattcttaaatcgtataaatattgtatttaaaaaactgtagtaatcaaggcattgtgctgttgatgcaaggataaatagatcaatggaagagaagagtcttgaaataaacccttcctacattatagttaattgattttttacaaaggggtcaagacaactcagtagcaa

SEQ ID NO: 811397 - DNA, 469 bp, Homo sapiens
ccctggagattagagtcttagagctctgagattctttcctcggcttattatattctactcttaatacttgtgattgtatttcaaaattcttgtagtgagtttctcagctctatcagatcagtttagttctttcttaaaatgggcattttgtcttttagcctttgtatcgctttattgtattccttagttttcttggattgggttttgactttttcctgaatctcaatgatcttcatttatatccatactctgagttttatgtctgtcatttcagcctggttatgaaccattgctaggaaactagtgtggtgatttggaggtaagtgcactctggcttcttcagttactggagttcttgcaatgatcctttctcatttgtgttggctgatattycttcagtctttgaagttgctgtcctttggatgggtttttttttcttctttgatgcccttgggatttcgattgtgat

SEQ ID NO: 811398 - DNA, 625 bp, Homo sapiens
acatttaattagttttctttatttctcctaagggatacatctatgaaaatctgaactgcattgtggttgaagtttcagtaggcttcagtatcagaataatgttcccaaatggcatatttcctattattagtcaacagtatgagctttgagtattttagtgcaatgtttataggacatggtgccataaggcaatacagctttaaccctgcactctcttgtgagattttaatagctttgacgtagttccactctctggaagcattagagcacacataaagtgtgcatattcattgtagaaaacatgatcctaggacaatcacagtggtatattgcaaaatagcactaactcttcacctcttcctgtatctatgccttttgtcatatagctttgtaagatcctccccctctaattctggggtcagtcatgtgactagctcagacaaacagggtctaaaaaatcacttgtacaatatggcttactctctttagctctctatcatccataagaaggacacaccaaggctggtttgctggaagatgagacacatggaaaggaatttaaatatctcagccaaggccattcaaagcctccccamctccagcccacccctgacatatggaagag

SEQ ID NO: 811399 - DNA, 599 bp, Homo sapiens
tgggaaagaaggtcagctgttctctagtggcgggatggaaccccactaaaagaacctrctgagcttcactctcctctggctaaaattatacaaatagaaacaggggcatgacttttctttatgggattctccctaaagtttccctaagacttttcctttctggaatatcaggaaataagaaaaaatggtgggtatcattattatttaataaatgtgaaatattatgatggagaaaaattaggaaacttgcccaaggcacaacttctcattactggggaatataaatcagtatacttgtccagacttaattagtgagcttccttaaatcattccaaacactattacagtcctccttacactgaatgttgattaaatgtatgcaaatctgttgcctttcctaagtttgaactactttactaaatgtgttcatttttactttcctcccacccccgttgtacttagtactgttcacccatcctttcaatcgatatttactgagttgtgtggcactgtgccaggaatagtctgtctcatggaatattgaatgtagttggtgctacagacaataataaatgccaacaataattattataaaaccg

SEQ ID NO: 811400 - DNA, 617 bp, Homo sapiens
atggctgaggtaatcttgcattatatgctcagctataaggctctagacttcaatggaaagtgatcattttcataatgttaaattccctttgtgagtgtggatcccatttacttgctaccagtcagcattcttgtcactttactccaagctgaatagcttggttatagcaggaaccagtagctgtcttgcccatctccaccaggtgtatgtgtagcacggggggtcgcaacatcatggttgaagctctttagatgacttgtcacgcccaggattcgccctttagttaccaaagtgaggtgaaaagagaaaaaaggattgtctccttgggttttagagtcactttattctctgagtttctaggtgctgatgagaaagttagagctgggaaagagaaaagggatccccatgacttgtccttttatcccgaggggtaatccaatactgcttttctccttttgttccatggcaactgtgcaagagactttagtagatgtccctcagttggggtttatawgatgttgattagcctgagttatgagtttttgggaggaagagcacagaggtaaactgccattttcagcatatcatatcaggagcacaaactatcgacgtgattt

SEQ ID NO: 811401 - DNA, 598 bp, Homo sapiens
tgggagtcagctgatctaggctgggctaagatggtgggctggctttttcgcatatgtctctcattgtttttctaaaatgcgcagtttagcctgatcatatccttcacaaggtggtagcagaatcataaagtagcaagtgtttccaaacacttaggcctcttgaggtttaggctgaaaattagcataccatttctcattttattggccaaagcaggtcacaaggccaaaccctgggacagaaaattgtgctggatcacaagatgagcacactgcatggttgcataactaactaaggacacagatgcaggaagaaataaagagaggaggcaaataattcagcccactaccaccctggattctgcttttggaaataaatataaatcaaatataaaaatcagacataattcaattgaattgattaaatattataatcaaagttttcctgtatgttaaaaaaaggaaaaagaaaagtatatacttytaaaatctgattaatctggcaacttgcatttcattttattttttgttaataagaggcagaaaatactaaaacattataaaataacacaaaataaaatttgtataactagtaactgat

SEQ ID NO: 811402 - DNA, 572 bp, Homo sapiens
ttgatttttgtgacactctacaccttcttaaaatcttgcatagatggcatttttataaagttatctgtactcttcttgctaggattctaggattaaacaaaaatattctacaggttaaattattttccccaagggcataatagcaagtttattaattcattgtctctcttccttacctccttccaactactttcatttaactattattcttgtactgaactacttgatgtcataattgtgaacattttattttaaagttgaagtaaattgatgttagcagtatttcagatgagaggcagtattgaatagtggttaattacgcactctgtggagttagactgcttacatttaatttcctacttccccactcattagctgagtaacataggcaaatctagcctaagcaagaccattctttgtcccagtctcatcatctataaatgaatatactaatagtaacaacctcacagaattgtgttgaagattgaatcagttaagctatggaaagaatttagaactgtgcctggcrtgtcattcattgtgtgttagctattaccatttctattccttta

SEQ ID NO: 811403 - DNA, 610 bp, Homo sapiens
atattatttaccttgattattgagttttttggtgcccctttaagttttgcacctgaggctggtgcctcacccaactmacattagcccctgccctgattatttctaacatgcaatccacaccatatcattagttcctcagcaaatactctactattatcactacttcacagttgcaaaaactgaggcacaactgtgcccaatgtcccaaaggaaggagaagaaaaatctgaacttgaaccccagtttcttcgttttttggttcagagcctgcccagtatagcactacaataagctgaattttataaattgggttttgagttaaggaatcaaaagcttcaggcttaagtcccacctctgccccagagtcttctgagccctccattttcacagacgtcagttgccctaggtggaactggactttaatattctccacatcccttattttttcccaaaacagtttaccagctttttctttcctgaaccaggagcaatagcaaaaattgggaatgggaagaaacaggtaccagccaggacacctgaacgaacttggagctcaggaacccaggaggggattggagagagtggggagactccatggtccacaatgaat

SEQ ID NO: 811404 - DNA, 420 bp, Homo sapiens
atgggtttgcaaaggcatacagagtgaaataataggtgggacacagtgactcacacctggaatcccagcactttgggaggagaaggagggaggrccatttgagctcaggagtttgagaccggcctgggcagtatagcaagaccccacaagcatctaaaaaaaattagctgggtgttgtggtacatgcctctagacccagctactcaggaggctcaggcgggagggtcacttgagctcaggagttcaagcctgcagtgagctatgattgcaccactgcactgcagcctggacaacagagcaagaccttatctcaaaaaataaaaatttaaattaaaaaaatggtataatggacagtggagactcagaagcggggagggagtggagagtgagggataaaaagctacatactggggccagacg

SEQ ID NO: 811405 - DNA, 619 bp, Homo sapiens
ctggcccttctcctctgattacatttagggagaagcccatcctgatgcagctcccttctagagggagttccatttaggcaaaaaagcgctctccattcccatcagaaccgggctttccaaagggctctgaaattggttccactgaagaaggcagctgagctgcctccccacattccgcttgttagtcgggaacttcaaggccaaaagatttggcaggatttaaagagttgctctcaagctgtctcattctgagcacactaatgctgtctgtcttctgatggtgaagtggtgggtttggagtctccctcccctgccctttatggagccgccgatagtaccgaggactcttcacatgcagactcgaggggtccagagaatgggccagaccatcttgcctgccccatggcaacctccagaggaaagaggctcagagaggtcaggggtgtctgcagtgagctgctgatggcagagagtgagctctcggaccttctcagccsggtgtggagctcttgcctctcccgcgaacctcagtttagttatcttcatagcccacgtcctggtcgcttaacaaacattgagctcctgatcggcacataacactaagccagatatttggggg

SEQ ID NO: 811406 - DNA, 600 bp, Homo sapiens
agagagagagaggagttaaatttggaggagtggagtggaccgacagggacagcccagcctcaggccrgccctccccggatctctgaagtctccctttatccccagctgagccaggcagcgcctccccaggaaccctggcacacccctgctgtggcaagctgcgcatggtgtctccatcctccccagcaggggccctccttgggccctggggattttcagcagaggataattcccagggaatatatctgagaaagtcaagtgctctgggatgagcagattagcctggagcccggggctggagaggagctccactctgggaggacagggccctgtctgtcccagcagaaggcagctcaatggtccagcctgcgcttcaggccagctggctgtgggctctgatcccctgcagctctccgcctgttgctgtgtggccttgagtaagtcccttccactctctgggcttccatgccttggctatagaaggtcaggtttggaccagcagaactcgaggcccccttaggttccaactccacagactggtcccccgaggtcctccaaggccatgtcaagccagcttcaccttccaaggagccaaaatgg

SEQ ID NO: 811407 - DNA, 611 bp, Homo sapiens
tccaagctcttggggagctggaaacaggacagtgcttgtagagaacctggccctggccaggcgtggtggctcacgtctgtaatcccagcactttgggatgccaaggygggcggatcacctgagtccaggagtttgagaccagcctggccaacatggagaaaccctgcctctactaaaaataaaaataaaaaaaattagccatgtgtggtggtgggtgcctgtaatcccagctacttgggagactgaggcaggagaatcgcttgaacctaggaggtggaggctgcagtgagctaagatcgcaccactgcactccaacctgggcggcaagagtgaaactccatctcaaaaaaaaaaaaagagagagagagcctggccctaaggaggggtctgaatctgaggtgcagggaggcagtgagggcagtcgaatggggtcacatctcagctctgtcacctgccgggtctttgaccctgggcagggtaatgagcctcagcttccctggtttttattctcataagctgtccaacaaaacctgttgctcaacgaattaaaaccaatcaacgaatggaatttatacaagctgggtgtgagcgtttgatggggtcagagtcgc

SEQ ID NO: 811408 - DNA, 591 bp, Homo sapiens
ttctgcctgctgggaaggaggccaggttcccaggctaacttaatcaacaagtctattccacccataagtgtctcttggatttacttgtaatctcccacgccttgcttgttctaggtgagctgatataatcacattctagatctgaagagctgaggaccagactctaggaggtcctgagacacacttgggaaggccctgactggccagtcagctggagccactgctgcaaagtgggcttgggatggtggcccgggtcggggaagacactctgcagaggtccaagtggggcaggctggatatcgcaggtccccgcagggacctgagctgtgcagaggactttacctgtcagtagaaacttcctgcagggccgcttgttctgctcatccagcaagatggcagctgcatctgcgagagaagagagggacgggattcggatggttcaggctccaccaaaggaggcaggaagtggaagccacaggggcayatggaccctttatctcgacacagctgtgcagaaagaagagtttcctgttccacggaggagtggaagcaggagatgaccacaggtgggagtcctgggcagatggatcc

SEQ ID NO: 811409 - DNA, 299 bp, Homo sapiens
ggtcctacagaccctccttgctgaaggagacatgagctctggggatcagaaacaagtagcatgtctgccctcagtgctgctgcctctagctgctgagaacacagcacggggtgccaaggccacgcaaactgagcctgttgttcagcccacaaaggggacaggggtggcctggctggtctgtaacccttggaaggatttctgacatttctgaagttaggtgtacagggttttgtttttatcttgtacttccttcattggtagaaaasagtttgaaaaaatctttcttttttttttttaag

SEQ ID NO: 811410 - DNA, 534 bp, Homo sapiens
tggaaaaatataatatttttgcattctttctttcttcaattacatgggcacccaagacaactaagggaaggctaccctctcagaaggatgaaagagagaagtgcttcacttaattttcatcactttatctagttgcaaaataaacatgttgctgtgggaagccacctcatttctatatggaaatggatgtgtcagcttaccaattcctttaaaaaaaatcatggaagaggcaaagttttggatctttttcttggtggagtttttgttaccatataaagaagacagaacattatttgtttttgcaggcaaacttcttgcagcaagtgcacaatagtgcattatacaaatagctactcatttttctttattttgtattctaggcagcaaagcttgatgttttaccaagcatagcaggaggtaccatcagtaagaaytgatccacacacatgaagtgttagctaatggttcaaaaagaaatcttggatgagattgaacacattgattcctttcatagttaactgaagcagttcacaa

SEQ ID NO: 811411 - DNA, 627 bp, Homo sapiens
ttattaacccattaatggattaaaccattcatgagggcagaggtctgtctcataaaccaatcacttccttaaaggccytgttaatattgccaaactgggaattaaatttcaacatgagttttagaggggacaaatattcaaaccataaccctacagttttacagaatgggaattatattagtcatctcgtttttaaagaattaacatattagatttatttgaatttataggaaataaaggaatctaaaaaatctgaatgtcacctagacatctgtaatatgacccccatcctctaaaggatccctctaaaaattaagaaaagtttacaaaaaaacagaaaggagttggagggctcattaaataagctcaattttaggcactatctattgatttcttgctgtgaaatgtggaaatcagcatggatacacacatgtacaaatatatatatacacatatacatacacacacactccctctgccacaaccaatttttgttaactgcttttatttggtaaaaatgtacatagtttacattatatgaattatgaactgtaattccatgactgcttaatcctggatctacattaaactagattccatgctcaacaagagtcctttttaatcaca

SEQ ID NO: 811412 - DNA, 507 bp, Homo sapiens
ttctaataaacctctgcaagcgttgtaagatcaactcagatcttttagcaccatattgggcaggcccagggaaaatagttccccaaaattaaaaaaaaaagtaactttcagggaaatcatctaggggtcccccttatttggggcaccttcaagttccctgctcattgcaggaccttaggcaagtaaaaggagacttagactgattttctaatgacccgaaataggtatacagagactttccaaaatttaactcaggtatttaacctcacacgggaggatgttatgttgctgctaactcaagccctcactgcagctaaaacaggcagctctgcaagcagaagagaattttggagataagcaatatgtctcctacagtacgccaaaagggaaaagaaaaaatagggaaggcaaagaaatagaggaaacactattcccaataggaagagaggcaatayttcttgaaaaccctaactggaattcctttctatggtgtttttccttctttcg

SEQ ID NO: 811413 - DNA, 659 bp, Homo sapiens
agaaactctacaagccagaagagagtgaaagccaatatacaacattcttaaagaaaagaatttctaacccagaatttcatatccagccaaactaagcttcataagtgaaggagaaataaaatcctttacacacaagcaaatgctgagagattttgtcaccaccaggcctgccttacaagagctcctgaaggcagcactaaacatggaaaggaacaacccgtaccagccactgcaaaaacatgacaaattgtaaagaccatcgctgctaggaagaaactgcatcaactaacgagcaaaataaccagctaacatcataatgacaggatcaaatacacacctaacagtattaactttaaatgtaaatgggctaaatgctccaattaaaagacacaaactggcaaactggataaagagtcaagacccatcagtgtgctgtattcaggagacccatctcacgtgcagagacacacataggctcaaaataaagggatggaggaagatctaacaagcaaatggaaaacaaamaaaagcaagggctgcaatcctagtctctgataaaacagactttaaaccaacaaagatcaaaagagacaaagaaggccattacataatggtacagggatcaattcaacaaaaagagctaactattctaaatatat

SEQ ID NO: 811414 - DNA, 596 bp, Homo sapiens
acattcatgtattatatgtgcaattaaatttcttaaaaaatattgagcttatcgartttcaatgtactgaagaaactgacccctttctttactttctgcctttactagcaacatcattatgtacctcaatctcctaaactagggaacctataactcacttatttctctattttcctcatactttctgatgactttttagaaccaaagaattttagactggaggtaaccttggcaaccatcaagtacaggcccctcatttacagatggggaaactaaaggcccagagaaatgaagtgatggacccaagggctagttagtgatggagatggaattagaatcgaggaccagtgcagagtttcctctatgacattcaccgatccatttattcattcagtcactcattcaaaaatgtactgagtgtctcctatgggccaagtaccgttttaggtgctggaaaaatcaccatcgtagcagctactgcttccattgagcccactgaatatcaggaactatttgactaagtcacagcccttacttaatcttccacagtccacttaatcctcataataaccctactaggtgggttctgttattac

SEQ ID NO: 811415 - DNA, 600 bp, Homo sapiens
acgtggatgatagagaattgtgcaccgtctccccactgagacgtggatratagagaattgtgcaccgtctccccactgagacgtggatgatagagaattgtgcaccgtctccccactgagacgcggatgatagagaactgtgcaccgtctccccactgagacgtggataatagagaattgtgcaccgtctctccactgagacatatatgagtggactgcctctcctgcggatgtgagctcggcctggtactcacactgctgtgtgctatggactttgtttgtctcagcccatgtttttaccgttcctcaaaaagatgagcccaccgggcatcacactgcaaaagtctccatgcttaggcctggacttgactaattccagtcttcctgctgactggtttaggaatcaggttgcgacccaatttgggccgatgaaacttaggagaagtttcctggggaccttaaggaaagctgtttctcactttttaaaaagaaatttaattttaattttatttttccttaagtgattggggtacaggtggtatttggttacatgagtaagttctttagtagtgatttgtgagatcctggtgcacccatcac

SEQ ID NO: 811416 - DNA, 575 bp, Homo sapiens
gtgtgtgtgtgtgcgcgcgcgtgtatattatctgttaacccagagtagtatcatcagtcttactatggtaaagtttcatgaataaaaatcattaaaagattttacttttcttaaagattctctcacaaattctttggagacattcaagcacagttttttttttcttttctgactcaaatcacaaaaccacttaagagtccctctgctttcatccttcccgcgctgggacacagctgctcctgggaagccccccagttgtctgcacagccgcatggggcctgttgaacagaaacattccttttgtacaaactttagtacttgagaataccagttagtaaacaaacaaaactatttaatgagggtgtttagctcttcacacactttaattaatggaaaacaaaatggaagtgtgtgaggctcacacaggaggatgaaactggaaaaaggaagcttggaatcttaggctccagctctgggcctcgtccctaggaaacagcccaggagctctctagctcaccctcgtrtgctaaacacctgaggacgaagctcgaattcttctttacagatggggcatg

SEQ ID NO: 811417 - DNA, 527 bp, Homo sapiens
tcaaaacctcaccaaaaggcaatttgcctttacttgtgttctgagtattctgtcaattcttatacttcaactgagctctaaaactccctaaaagtcacatcaagtctgacttgttagtttttgcacacagcctctttcctaaaagaacactttccccaggagtcaaggaagtcatacatcactgttttaatgaaattcctagtaaaaaacatacaatttcaatccaagtaaaaacgtatatttgtgtttttcacaaagataactaataactacctgttaataatttagccagacacagagtcagtgagtttacattcaccaacctatctcccttcagtaatcttctagaagagcgtttgtaggccacagggtgaaatctcgttaattcactgcacccagtctagcttgtttctatacaacacaaggaggagtggtagtttcagcaacagcaacagcttcaccacatmagtttgttatcatgtgggaagacagaggcttactgaaagtttgattttataataaacggt

SEQ ID NO: 811418 - DNA, 515 bp, Homo sapiens
gtttatgagtagtctaaggctgctttsttttcataacagcagaagttgagtaattttgacaaagaacccagagctcacaaagccaaatgcacttattatttggccttttataggaaaaaaatgctgatacattaaagttacatgaaaaacattcataacttttggagagtcaaatggaataatctctacatatttctctctcatatctaaaatttgctttaatatatttcaacaagaaagactaaagtaaaaagggttagatggagagaatcttgataactgctgcagctaagtgaagactatcttaggattcattttgttttcttctctacatttgtgtgactttttgtacaaggaaagaatacagaactgtttaagtcagttaattagtatacttgatagattatttaccaaagtggctgcaattactcttctccatatccttcagctggggaatcctgcagtgtatgtgtacagtgaaatattactcagcaataaaaaggaagaactattga

SEQ ID NO: 811419 - DNA, 515 bp, Homo sapiens
gtttatgagtagtctaaggctgctttgttttcakaacagcagaagttgagtaattttgacaaagaacccagagctcacaaagccaaatgcacttattatttggccttttataggaaaaaaatgctgatacattaaagttacatgaaaaacattcataacttttggagagtcaaatggaataatctctacatatttctctctcatatctaaaatttgctttaatatatttcaacaagaaagactaaagtaaaaagggttagatggagagaatcttgataactgctgcagctaagtgaagactatcttaggattcattttgttttcttctctacatttgtgtgactttttgtacaaggaaagaatacagaactgtttaagtcagttaattagtatacttgatagattatttaccaaagtggctgcaattactcttctccatatccttcagctggggaatcctgcagtgtatgtgtacagtgaaatattactcagcaataaaaaggaagaactattga

SEQ ID NO: 811420 - DNA, 584 bp, Homo sapiens
aactggtctcctagggttgtactaatttacattcccaccaasagtgtatgagggttcccttttctccatatcctcagcagtgtttgttattgcctgtcttttggataaagaccattttaactgggatgtgataatatctcattgtagtttttatttgtatttctctgatgatcagtgatgttatgcaccttttcatatgtctgtttgctatttgtatgtcttcttttgagaaatgtctattcagatcttttgcccatttttaaatcagattattagattttttcctatggagttgtttgagctccttatatattctgttcattaatcccttgtcagatgaatagtttgcaaatattttcttccattctgtgggttgtctcttcactttgctcattgtttactttgctgtgcagaaggtgtttaatttgatgtaatcctatttatccatttttcctttggtttcccgtgcttatggggtattattcaagaaatctttgccctatccaatgtcctggagagtttccctgatgttttcatagtttgaatttagtagtttcatagtttgtagtcctagatttaagtct

SEQ ID NO: 811421 - DNA, 235 bp, Homo sapiens
acattttttaaaactcttaaatgtacccaagtagaaaaacaatccagattatctacaaagaatttaaatttaggctgccctcagacttctccatgatcaccaaaggtagaataatatgtcaagagtcttggggaaaaagtcacaacacaaaaatgatagtcrcagacaaaacattatttattaaagtaagaaaaaaaaatcccccaaatattgaaagattgaggaaaatatgcca

SEQ ID NO: 811422 - DNA, 633 bp, Homo sapiens
aacaccaacatgagtgacattttattgttattctttatatgttatgcatgccacaaaaggttttgtatgtattgcatatttaattttaaaattaaatataaaatgatttttttcttgacaaatgaaatgcttctagtatttatcattaagcaaaatgttaggactataaattttaattattttaatattcaatatctcttggtagtatacttaggatttttaaagtagggaataatattaaatttatcttgcaagtagaaatagtaataaaaacttctaaataatgcttgtatcaaagaaggaaacaaaaggaaaatcacgaactggtactcagagaatagacagccttaaatgcatttattagcaaacaaaagtaaatggaagtaaattcattatgctttcaattcaagaaacgattttagaacagtttaacctaagttaaaaggaacaaaataatacagtcaagaaattaaagaaaataaaaacaaaaacgtgatcaagaaacattaakcgctggttcctttaaaagaccagtaaaacagataaagttcaacaacataattaattaaagagagacaagggatacataaataaatagcattagaaatcaaatggggcttccgcccggcatgc

SEQ ID NO: 811423 - DNA, 633 bp, Homo sapiens
aacaccaacatgagtgacattttattgttattctttatatgttatgcatgccacaaaaggttttgtatgtattgcatatttaattttaaaattaaatataaaatgatttttttcttgacaaatgaaatgcttctagtatttatcattaagcaaaatgttaggactataaattttaattattttaatattcaatatctcttggtagtatacttaggatttttaaagtagggaataatattaaatttatcttgcaagtagaaatagtaataaaaacttctaaataatgcttgtatcaaagaaggaaacaaaaggaaaatcacgaactggtactcagagaatagacagccttaaatgcatttattagcaaacaaaagtaaatggaagtaaattcattatgctttcaattcaagaaacgattttagaacagtttaacctaagttaaaaggaacaaaataatacagtcaagaaattaaagaaaataaaaacaaaaacgtgatcaagaaacattaagygctggttcctttaaaagaccagtaaaacagataaagttcaacaacataattaattaaagagagacaagggatacataaataaatagcattagaaatcaaatggggcttccgcccggcatgc

SEQ ID NO: 811424 - DNA, 483 bp, Homo sapiens
caggccaatcactcagtctggctgggactcaccagtcttcagatctgtgagaaataaatttctgttcattataaattacaggttcattactctcaggttttattatagcagcacaaaatgaactaagataattggccccctgtgttttctaattacatcagtaatgcaaactcataattgcacagcaaacgctcattctagaaaatgcagctatggaaaactaatattaaaaataattcatcacaccatcatccagagacggccctggaaacattctgagacgtatatactcacacttttaaaacatgtataatcatactttatattatataatatatactttttaaatgcacacataatacaggtttataacctttttgtrttaaacagatcatatagaattttgatatcaataattacacttcttcaaaattcttgccaatagaacacaagtatctatcatcatttattttgccatccttc

SEQ ID NO: 811425 - DNA, 483 bp, Homo sapiens
caggccaatcactcagtctggctgggactcaccagtcttcagatctgtgagaaataaatttctgttcattataaattacaggttcattactctcaggttttattatagcagcacaaaatgaactaagataattggccccctgtgttttctaattacatcagtaatgcaaactcataattgcacagcaaacgctcattctagaaaatgcagctatggaaaactaatattaaaaataattcatcacaccatcatccagagacggccctggaaacattctgagacgtatatactcacacttttaaaacatgtataatcatactttatattatataatatatactttttaaatgcacacataatacaggtttataacctttttgtattaaacagatcatatagaattttgatatcaataattacacttcttcaaaattsttgccaatagaacacaagtatctatcatcatttattttgccatccttc

SEQ ID NO: 811426 - DNA, 286 bp, Homo sapiens
cagatagaattaggcactctgaacagaccagtaacaagtagagagactgaaatggtaatagcaacaattaccaacaacaaaaaaagtcaaggaccaaacgaattcacagcagaattctaagagacgttcaaagaagaattggtaccaatcctattcatgctattccacaagacagagaaagaggggaccctccccycaaatcattctatgaagccagcataaccctaataccaaaaccaggaaaagacataacagaaaaagaaaatgagaggtgacagtgtgctgg

SEQ ID NO: 811427 - DNA, 636 bp, Homo sapiens
gctttgttctttcgctctttgcaataaatcttgctactgctaactctttgggtccacactgcctttatgagctgtaacactcacggcgaaggtctgcggcttaactcctaaagccagcgagcccrcgagcccacagggaggaaggaacaactccagacgcccgccttaagagctgtaacactcaccgggagggtctgcagcttcactcctgagctagcgagaccacgaacccaccagaaggaagaaactcggaacacatccgaacatcagaaggaacaaactccagacatgccgccttaaagaactgtaacactcactgcaagggtacttggcttcattcttgaagtcagtgagaccaagatcccaccaattccggacacaaaaactacagaccaatatctctgatgaacatagatgttaaaatacttaacaaagtactacctaaccaagtcaaacaacatatcaaaaagataatccaccatgatcaagtgggtttcataccagggatgcggcagtggtttaacatatgcaagtcaataaatgtgatacaccacttaaacagaatcaaaaacaaaaatcacacgatcatctcaatagatgcagaaaaagcattcaacgcaatccagcatcccttta

SEQ ID NO: 811428 - DNA, 490 bp, Homo sapiens
tgttctcactcataagtgggagttgaacaatgagaacacacagacatagagaggggaacatcacacgccaagacctgtcggggggtggaggctaagggagggataacattaggagaaatacccaatgtaggttatgggctgatgggtgcagcaaaccaccatagcacatgtatacctatgtaacaaaactacacattctgcacatgtaccccagaacttaaagtataaaaaaaaaaaagaaaagaaaatggtggcctaatcctacagctggtccccaggcagcagtggcagaggctgcagggcaggaggcagagatggttgttgctgggtggcggtggccatgttgcaagcagccagtgggaacaccagactctaccatgcagtgagcggctcctggtttttcagacatcawagttatactacaaggtataatcctgattcttttacttattcaaaaatatttgagtacctactttctgtcaggcactgc

SEQ ID NO: 811429 - DNA, 613 bp, Homo sapiens
aatctgtgttttaacaagtcctcagggtaattctgatgcacaccagtggataagacccactgacccargatatttattagaagtataaatttctgatcctcacccatatcatatcagaatctctggggcctaggaaactattttttacaaatatcaagatgattcttaggcacatagaagtttgagaaccacactggtccatgtggtatgatttgaggagacaaggaaggatccttctctgaacatttctctccatttcttgatcaaaagtcagttaattttgtagaattaagcaagaacgtccttattaatttttaagttcattaattcacaaatattttaggatgatttattttattaaacaggtatttcactctcaggggagaacagaagagtggacaattaaaagggagggacattacaaacacagactacaaaggcctaatttacatattttaccttacagtcacccaagatctgatttgcatatatttcacctctttcattagggagtgtatcataattttactataacatgttgagtctaacatcctttggccaaacctttccccttccaaagaagaccttgtaaaatctacttggcagtaatcaa

SEQ ID NO: 811430 - DNA, 617 bp, Homo sapiens
ctggcttgccgatagaagcttgccttggaataccgtttagaacttaaattagactgcatagatagcaaacaaaaatgacagtcacttaatctacttaagagtttctttttcttactgaacaaatatctggagcaggtgttctctgctgatggcaatttggccactttacaatgtcaggctgaggtctctgaaagtcactaatcttttccttcatggtgacaggatgaagctccagttttagcctctttatctgcatttagacaggataaaagagaaagttcaaaaggtgaaagagagcttctgctaactgaaatttactcccttttaaggagcttatttggaaaaagccttcttatcataactactttagaagaattcccaggatcatctctatcttcgaaggcagtctgtgaaatgtcattttttacttggacgtattgctgtctacaaccaatagcccctatctagctaggagtcataatatttaattttaaaatcaccaaaacagcaaatagtagagggcaraatttcactttaatatcatagtctcatgaagacgttttgattctcacagaattcatatatatgtgtatatatttacacaatctatatatccc

SEQ ID NO: 811431 - DNA, 629 bp, Homo sapiens
ctttttagaattttatatcagacttcccaaaacacttatttcaaagcatgtattgacattattatcaaaataaaataagaaaataaagacaggcaaaaataaatcatgttattcttgatatattaacctttaayaagttgctattttaaaatgtttccctcgtgttctctaaatatatagttattaactaaaaagaggaaaaaatttagaagcccaaggatagattaagtttattatttctacctaaaggataggaagagattaaaattattcattgaaatattagtctttttgtggggcctgtaggtgaaacaaaatattttctattttcacatgaatgagggactgtttttctataatataattaataaaggtgtttcatagcatgccagaattaaaaatatggtgaaataagccatatggcacacaataaatcagagtgagtcacatgagaatcagatgtcaggtctgtaagttacatgctttgtctttttaaaaagtatttacagctgtaaactgacattggcacacatacaaatgtacacacacaaacacaaacctgttttcttcttattcattataatttaaagttcttggaatttattgtattttttagtaataacattttg

SEQ ID NO: 811432 - DNA, 557 bp, Homo sapiens
gatgttccccttcctgtgtccacgtgttctcattgttcggttcccacctatgagtgagaacatgcggtgtttggttttttrtccttgcgatagttcgctgagaatgatggtttccagtttcatccatgtccctacaaaggacatgaactcatcattttttatggctgtgtagtattccatggtgtatatgtgccacattttcctaatccaaaacaggaaacataggcagtcctcgaaagattctggagctgttgagtggaaagccatcaggaattagcatatctctctttctgtcactgtctgtctgtctctcttcctctctgtctttttgtgtgtgtgtgcacgtgtggacgtgtatgagtgcttttctctgtttctctattctcacatgttgtttctcacctcaccttcattttggtcatccacttttgtctttttcctccctcagctgatcagttttcattacttgaccacacttatagccacattcaatgagtcctcaacggtgtccataggttattgaaaactgcgatgtaaagtgaaacaacatgtaatga

SEQ ID NO: 811433 - DNA, 581 bp, Homo sapiens
atctcaacatcaccagctcccagagaaaaacaagtgtaccttttgtgcgggaggaaaaatgttttagtagtggttatgaaggtgatgctttctgccagaactcagactgttcttgagtgctcaccatctcagcctactcaggcttctaaagaggtataagacaaaaccagcacatgtacaccaaaatccatctgatcttcagcatccccagcctctaggttgctggggctgtcatggagccaacctaggtttcctttctgtaataaactgggtcaccactggagataagaccaaagaaccagtgggtgaggcttgaagcaccccaagctgcctaaccatcccttcaaatagatgagcctcttggccttgtttttaagaactagagaaatctgagggtcctgcagaaatttttttacattcagataggaagggaaaagcctctcaggtaaactgcctgcctcagatcttctcttgaaatgaagacctggaaataaaaatgtccagtggtataggaaatatatcaggaaaaaaaaaaaaaaaaaaaaawatatatatatatatatatatatacacacacacac

SEQ ID NO: 811434 - DNA, 641 bp, Homo sapiens
ttccataatataaaattatggaaaattccaaccattttttacctataaaatggtaagtttatatgctccaacttaataaattagtagaatgaaaagactaggtatttacacacaaacaaagaaaacgtyttcagcaacaaataaatgggttttatatttttcagtatgctggcaatagcaggagtctaccttcctgatttctgagagagtcctagaagtatttacattcaaggacttagtagtaccaatacaagtaccattttcataaacatcattaaattattgagtttgaactacatctgaagttttagtattataataattaatattctttcagttgcaaataacaaaaactgaactccaaagagctaaatcaaaaaaagagaatgtattgtcttatgtaagtaaacagaccaggtaagacttgattcaggattcgaaccatgtcccaaggagcctaatgtttttgttctccagtttgagattccactttcccagagacagtccaaattttcctctgattggttcttcttacaccataagttcacccctgagccaatcactgtgaccaaaggaatacaatttaaatctggctcacgtgctctactcttaggatccaaccacaaaattaaaagagaagt

SEQ ID NO: 811435 - DNA, 611 bp, Homo sapiens
ctcactgcaatctccgcctccagggttcaagcaattctcctgcctcagcttctcaagtagctggaattataggcatgtgctatcatgcccagctaatttctgtatttttagtagagacagggtgtcaccatgttggccaggctggtctcaaattcctgacctcaagtgatccatccgcctcggcctcccaaagtgctgcaattacaggtgtgagccaccatgcctggcctaaagattttcatatttcttttcatgaggatctgagttatattattaatataatttctttaggccaaggtcaaattaaaagtgacaatttaaagaaaaagatgaagcaagtaattgtacaggtggtgcctaggatgtggtaagcatcatgccagtgtcccggggtggctgctgtgtggagcacgcagctgttagggaaagcgcatatcctttctggaagtgacagtcatagcctggagccccagctttgctgttgactgtgtgtgtgccttgtgagagatgggtcacctttctgagcctgtttcttgytcacaaagaagggaggatcataactaccttgtagggttatagcgagaattaaatgcggtaatgcatgtgtgcac

SEQ ID NO: 811436 - DNA, 622 bp, Homo sapiens
cctcaaacacacacatacaccacacacacaatcrcagttctcaaacacatacacacaccacactcctgacacatgtacaggccccacagatcactcgcagatgcacgcactccacacacacgtctatttattgcgctggaaggaaacagatgctggaatggtgtagaaccggggcccggcaccttggctccccaatggcggctgcagagctggagccagcccctctaaggctgcagtggctgcgggtcccaggatgtgaacggaagtcatctaccctctccaggagaaagggcgagggaatgcaggacaggacaagggtgctctgggaggcccacgtgtgcggcaccacgccaggcctgcccatcttcagccaaggtggcatgtcactgtcacccacagctctgtggctattccccgatggcactttccggggacatcgggcatggctctgaggtgctgctgccttcttgtagccaggagggttggggcagtcgggatgggcgggggccgcctgctctgccgagcttccccgctcactcttcccagggcaccctggacttctgcttcctctgcaagacggccactcatgcccattccgggccctcgccctgtctttacctgg

SEQ ID NO: 811437 - DNA, 450 bp, Homo sapiens
gcttagtgagcacgataggagtccaagaaatgacagcaacttctggcttgggggcataggtacatagggtgcccatcaaagtgagggaacaaaaaaggcagagtcggtttggttaaraaaagtcatgggttggggccaggctcagtggctcatgcctataatcctagcactttgggaggcggaggtgggtggatcacctgaggtcaggagttcgagaccagcctggccaacatgctgaaaccccatctctacttaaaaaaaaaaaaaaagtcagccaggcatggtggcgggcacctgtaatcctagctacttgggaggctgaggcaggagaatcacgaacccaggaggcagaggttgcaatgagctgagacggagccattgcactccagcctgagcaacatgagtgaaactgcctcaaaaaaaagaaaaaaaaaaaaagccatgggttag

SEQ ID NO: 811438 - DNA, 621 bp, Homo sapiens
tcccgcccaggtccctcctgctacayggccatgacccaagagccccacggcatctagggcgcatgtcgcccgcggcccaggcgggacgcccagctctataaccttgcccacaacggtgagcccagcagagccaacagtcccaggacctgcaccacaccctgtgccggacatcagtcacagccagtgcccccacacctgtccctcggcgtgctgggagcccccagcccaggacttcaggtcacactgtggggtcgacaacacagccacagggtcccgcccttgcacatggacattggagagccgggaccgtggcctctgacgtgcggtctggggccagaaaggggccagctgcccatgaaaagggtgggcctgattctccaacaccccaacccctctattgagaggcgggaaccaaaggtgttcagagctcggggccaataaggacctttactactacccagtggcctccgtgaccatttcaaaatgcaacatttacatggtgctgaaaaatgcacctcgtgggactcaaaaaaagccgcgggcaggaagcaccccacatgggcagggaagggcccacagctacaccaggcactaccatgaggggagaagggaagaaagtgg

SEQ ID NO: 811439 - DNA, 612 bp, Homo sapiens
gtagcaaagtgaagtcattatgagccatgaggggatggggaggtttcgatgggtggccggaagtgttcccggagagctaagatctgaataataatrttagctaaggggtgggtggtgctggggcgcagggaggggtcagtgttctaggctcaggggacagcacattcacagcttttcttgagtatgtaccagtcttcttctgagtgctctaaacattttgtcttcatgagggaaggagtggggggatgaccctactgtggagacagagactctagtaccattcacaagagagtgaagccctgtctctgggtctcctggatctgcccatcacccccagatggaagttcagaaccccttggcctgcatctagggtatttaaaaaatctggcctcctggccgggcagcagggagccccagcaggttcttgagctgggctttgaggagatgtgagttttggtcagccttacagggtctattgaaggagtctgcctggaggcccgggggtttggagagagtttggggttggcccaacattgtctgaccctagatttcatcagtgtcattgccagagcctgtgtggagagagggatcccatcaggcttggtggggcat

SEQ ID NO: 811440 - DNA, 515 bp, Homo sapiens
tgctcccttgggcctggggacccctccaccttcctgaacggagtagctgaataggtaaatgggttatatcaggccaggaaatcaatgtgtatactgtgttytcagccacagatgagcatgtcgaagccattctattatagctctaggagccgtattgatccagctgtaactactcggaggtggcccgcaatccaatgagaacacatccatctgtccatccagccgcctctctcccccagtagtgcttagagagtaagtgtttgcagattggattaatttaatgtttgcttaatcaaaactgactaccctggaacttaaatgctattaattactaagagaatccagaactaattcactagcactgtgaggccggggaggaacagccgctctgcagagaaagggagtttctgtttgtctctctttccagatgttcattttgtggccttccccactcccattaccactcacccacctgctttccctcacagccttctaaaaagaaaaaaagtacttgc

SEQ ID NO: 811441 - DNA, 515 bp, Homo sapiens
tgctcccttgggcctggggacccctccaccttcctgaacggagtagctgaataggtaaatgggttatatcaggccaggaaatcaatgtgtatactgtgttctcagccacagatgagcatgtcgaagccattctattatagctctaggagccgtattgatccagctgtaactactcggaggtggcccgcaatccaatgagaacacatccatctgtccatccagccgcctctctcccccagtagtgcttagagagtaagtgtttgcagattggattaatttaatgtttgcttaatcaaaactgactaccctggaacttaaatgctattaattactaagagaatccagaactaattcactagcactgtgaggccggggaggaacagccgctytgcagagaaagggagtttctgtttgtctctctttccagatgttcattttgtggccttccccactcccattaccactcacccacctgctttccctcacagccttctaaaaagaaaaaaagtacttgc

SEQ ID NO: 811442 - DNA, 620 bp, Homo sapiens
aaagggagagaggatgaagattaaattaaatatcaatggcccatgatgtaatcaaacctgcctatataatgaaacttccataaaaacccaaagggacagggtttagagagcttccagatagctgaacatatggaggttcctgggggtggtgcccagaaagggcattaaaactctgcaccccttcccatatcccttgccctccacatgctttccatctggccgttcatctgtgtcctttgcagtatccttcttaataaatgggtaaacataagtgaagtgtttccctgaattctgtgagctgctgtagcacattaaacaaatcagaggagggggttgtgggaacctttgatatatagatcagaagcatcaacctacaagaagtgacaacgtactacttcagactggcacctgcaatggtgggaagtcttgtggaaatgggccatcaacccgtgaaacctgacactgtcaccaggtagatagtgtcagaattgaattgaattagaggacactcaactggtatccactggagaattgcttggtgtgttggaaacaaacccccacacatccaatgtcagagtgttgtgttaaragactgtgtaagagattagaaagaacacttg

SEQ ID NO: 811443 - DNA, 620 bp, Homo sapiens
aaagggagagaggatgaagattaaattaaatatcaatggcccatgatgtaatcaaacctgcctatataatgaaacttccataaaaacccaaagggacagggtttagagagcttccagatagctgaacatatggaggttcctgggggtggtgcccagaaagggcattaaaactctgcaccccttcccatatcccttgccctccacatgctttccatctggccgttcatctgtgtcctttgcagtatccttcttaataaatgggtaaacataagtgaagtgtttccctgaattctgtgagctgctgtagcacattaaacaaatcagaggagggggttgtgggaacctttgatatatagatcagaagcatcaacctacaagaagtgacaacgtactacttcagactggcacctgcaatggtgggaagtcttgtggaaatgggccatcaacccgtgaaacctgacactgtcaccaggtagatagtgtcagaattgaattgaattagaggacactcaactggtatccactggagaattgcttggtgtgttggaaacaaacccccacacatccaatgtcagagtgttgtgttaagaractgtgtaagagattagaaagaacacttg

SEQ ID NO: 811444 - DNA, 620 bp, Homo sapiens
aaagggagagaggatgaagattaaattaaatatcaatggcccatgatgtaatcaaacctgcctatataatgaaacttccataaaaacccaaagggacagggtttagagagcttccagatagctgaacatatggaggttcctgggggtggtgcccagaaagggcattaaaactctgcaccccttcccatatcccttgccctccacatgctttccatctggccgttcatctgtgtcctttgcagtatccttcttaataaatgggtaaacataagtgaagtgtttccctgaattctgtgagctgctgtagcacattaaacaaatcagaggagggggttgtgggaacctttgatatatagatcagaagcatcaacctacaagaagtgacaacgtactacttcagactggcacctgcaatggtgggaagtcttgtggaaatgggccatcaacccgtgaaacctgacactgtcaccaggtagatagtgtcagaattgaattgaattagaggacactcaactggtatccactggagaattgcttggtgtgttggaaacaaacccccacacatccaatgtcagagtgttgtgttaagagactgtgtaaragattagaaagaacacttg

SEQ ID NO: 811445 - DNA, 551 bp, Homo sapiens
cagttgtctttgtttctgatcaatatctttgatcaatactagttagcatcacaagtgctagaaatggatcttcattggtgaaatcatggtgttccaaaaatatgaattggctaaaatattttagaaagccttcccaacttttcataaatggtatataatatctagcaagaatcttaatgtgtacctttttaatgcgtgcatctgaaaagttccatgaacagccataattttggaggactctggttccctgataccagctataaagttaactgaattctgcatccagattgttgggtctgcctcaagtgagccttttgtggaaggtcaccagagagcaggacttcactgagctgacccagcaggttataagaattgcctgtgtgccctcctgttaataattgtttttgtctaataaacacctcatatgagattttggttggagattctctttcgttagaccctggtgaacaagaytgtgtaagactagctacttgccacctacctgaaactattggaggccacgaagagctacctagaataactcaatgttt

SEQ ID NO: 811446 - DNA, 642 bp, Homo sapiens
atctacattttcccatttttttttcatatttccccccaggacatgttttaacacatttaatttcgggataagccatcccttctgagagaccatatatttcaggagaagaaasaaaatttggaaaagaaccaaaggaacttggttttaattctcatcttctcagtgcttaatattccatcttagaatttttttttttttttttttggagacaggttctcactctgttactccagcttgagtgcagtgacacaatcctagttcactgtaagtaatcctcccaactcagcctcctgagtagctaggactacaggcatgtgtcaccctgcccagctaatttttttgtattttttgtagagacgggctttcaccatgttgcccaggctggtctcgaactcgtgggctcaagtgagccacccaccttggcctggcaaagtgctgggattacaggggtaagccaccgcacccagcccatttcagaatttctttatttcttgccctattgccgttatagagattgaatagcatagaacagtggttcttagcctggggctgatggtaaacctcttgaaattatgagcaaaattgtgtgtctctccgggtgtacctgccattttcaggagacatttcatcagacaatcaagt

SEQ ID NO: 811447 - DNA, 591 bp, Homo sapiens
gtgagtaatagcaagtgggtgctaaatcattttcagatcatggagattgtcttgtaggggcagaaatggaaatgcacaagacaaatgcccactagtatcctggtgttctcaggagagtggttcttgttcatagccagagcttccgcagctgaagctcaagcccacaattccacagcccaaggaatgaaagaccagcaattaagaaggctcatttcacttccctgagactcaagttcttcatctataaaatggggttgtgaatacattccatcgagtaagctagttgaaatgcctatcacactgcctaccatacagtaagtgtacaaaaaaaagttacaagttatttagtgaggacttggctcatacatttccagaagaatgatggtattcatagctcagagatagagtaagctcctgttgctcaaaggatattccacacaccagcaacatcggagcttttgggaaacacagaatctcaggttcccccacagatctactaacttccagaatctgccactacaatayttgcaggtgattccaccacttaacaagctgtgtgtattaacatctgagattccctgggatagaggc

SEQ ID NO: 811448 - DNA, 639 bp, Homo sapiens
actgcaaggctgtagcttcaaatctaggagcaaaatatkttgaaagctttagagtttcaaaatcatttatttaccagagaagacctttgccattggatttcaaacaatggtaggagtggttttaagaaacacagtctacactacaatttttttcccaagggctttgaaagaaaggcctctccttctaaaacttacatttttgagaaaggtggagctgaaccctcatctgtagaaaacatcagtcagaatctatgattcactgccagaagccttattttggaatcttttcttaataacagccctgtataacaaaaagatgctttgtatttcagcaatgcctttatttagaccacctttccaatgtatttataaacatgtctaagaaacacaggctatgtctagactatcgaagcaaaaaggcaccaaaatcaaacagaaacaaaagtagagcattggtgaactggtatgttcagtagtctgaacatccatattagtttattccactgttaactctaataaagattgtagagaaaagtataacttttatggcagcagatttttatttaagtcattccctatcagtttggacattttcaaaacatatttattaactgtgattggtgctgatagcttaaagaa

SEQ ID NO: 811449 - DNA, 628 bp, Homo sapiens
agggacaagaaaaaaagcattacacaaattaacccatttatgcctgaggttgcagtttcttgaatttttgcaatcaggctttggcgatgatcttgagcrgtaagatataaataactcccacatgcttagcattccaataatggaacaataggcataaattggacagaatttgcccaatcttggttatcacctctaaaaaatgatttaatagaaaataagtttgaaattagtgtgaaagcttcagataatatgtgaattgcaagatctgctttattcctttcccccaatcattgctaaaagttaagaattagtcctacatgtaatggtatgaaattcattcatgttctcatctgtaaagtaaaagttaagcattataattgactttaatagttattatggtgacgactaataaaaattcctgcaagtattgacaagccttcaaggatatagcagttacgagttgctagctaaaaagtactttgagacctgggcaggaaggtgctttatggctactttatttttttaatgtaatttgatttacttcattccttaagagaaaacattttattaaggcttttcgttcgtgtgttttttagttgtttttttgtttttgcaatagactttatct

SEQ ID NO: 811450 - DNA, 483 bp, Homo sapiens
tagagctcatacaataccaagcactgcaaccgcgcagagttttctcagtttgaagtcacggctgaggtgtgaaggtgtcatctggatttgggattttgtctgaatttatcttacgtttaataattttttggcaatgctaggccagagttattctttatgcacaatccatagcttaaacagaacgttgtgggtcaggtcagaaatacaaccaccagtgacaacattgattttgtctgctcaacaaatatttattaagcactatgaggatgtattccaattttcaagcaaaagtagcaagacataggcttttacaattagtgattatctgaatatgagtggcattaaaaatgtgtattgaaattattattttttcaagatatataaaggcttawtctcttccagaagatggcaaagaatgaatttcaattattatgatcaccactattgatttaatatgacttcttcaattggatgtgctatctt

SEQ ID NO: 811451 - DNA, 579 bp, Homo sapiens
ctatagaatttaaataagactctgagtcataatatagtattcaaaatgtccaggataacraccaaaatgacttggactatgaagaaccaggaaaatgtcaacactcacgagaaaagacaatcaacagttgctaacaccaagaaaacacagatggtggagttattaggcaaagattttaagacaattgttataaaaatgcctcaagaatcagggcaaagagtcttgaaataaatgaaaagatagaaagtctcaacaaataaatagaaaatataaagaagaaccaaatgaaaattttagaactgaaaaatgtgacaaataaaataaaaacacctctctagatggtctcaatagcagacgtgaaatgacagatgagtcagtgaagttgaagatgggtcaacagaaatgaatcaatctgaacaacagagaaaaaattgttttaatataaataaacagagcctcaagacctatgggacaatactaaaaggccaaatacttgtgccaataggatcccagaaaaagaggagaaagagtgcagtgcagaaaaggtatttgaagaaacaatagctgaaaactccctaa

SEQ ID NO: 811452 - DNA, 502 bp, Homo sapiens
cagccaaagggagggttggctcattggcacagaggctggtgaccaggcattgaggagtgacccaagaacccatgggggctgggaaagctgtgggaggattggtttcctgagaagaggcagggtggtttarattagaggcctttgacctttctgccccttcactccctcagcattttaaggggttttaagggaacctccctttggcctgaacagaggccatgaagccaggctttgctgccacataggagaggttggagccctggccccaccacatactagccgggtggtttctaacctttctgaggctcagtttccttatctgtcaaatgggaatgatactaatacctacattcagggcttttgtaaagatggcccaagtgaatgcatttgaaatgcttagcacattatcttgcacacagcaggggctcaggaaacattagctgttattattattagtttggctggctgagagtaggacggggcataggatctgtgccaccca

SEQ ID NO: 811453 - DNA, 567 bp, Homo sapiens
acagcaaccacagaattggctagcgttccttggttgtaagcagcagatactgatgggttaacttaaatgaaaaagagaatttattggagacattaaagggagcttataagagaagaggtgacaaacttaggtttggaaaagacaaggccagacaggagcttcagagggtgtcagcagcaggaactcctcagcagcctcatccaggtgctgccactggagaaaatgttcttagtcccggacactgctcatgaatcaagttctagtaagggaattttctgttgaccttgatcgggttctatccttgatcgggttccctccctgtcgaccattgaggtcaggatgccttgataaatagtccttcagggattggttgccttttttctcaactgtttttgtattctgacatgcaaaggatactacgcttataagacatgatggagtgaaaggataagttgttcttccttatcgtaaggctacttctggtcataagtgactgctaaacactgyctccccaaccaggacagaggggatcagtgtctcactcacctgaaccttttatggaaatca

SEQ ID NO: 811454 - DNA, 575 bp, Homo sapiens
acaaaaattagccaggcgtggtggccaactcctgtaatcccagctactcaggtagcaccttcaagggctttgattcttttgctctgtctccatcctagaaagagttttgttgcgtttgtttgtttgtttaagtggagattctacatcctctttacctttgcccctctcttttgggaaaatgtcctcttgcctttgggcaaggccagcccggccctctgagcaacacttttaagttagatgggcagccttgatcagcaaaataggggtgtgagggaaacagcaactgtgtcacctcttcattgctgctgggatgcgttgctatggataccaaattcagggaagcaaagacagcagcagaagaaaaaaaaagctatagtgtgtatattgatgtggccacgtgtgtgctcctgcatgcttgcacacttgtgtatgagaaccagagaaaaaggaaaggtgttcattgaggaggaggcctgatattttagcaattagattggcattaycaaaggtggattagcatttccagatactatattagtgatccgcccctatacgatactccatagtcagaacag

SEQ ID NO: 811455 - DNA, 596 bp, Homo sapiens
ttggctgcatgtattgtcttattttgaaaagtgtctgtttgtgtcctttgcccactttttaatggggttgctttttgcttataaatttaagtttcttgtagacgccagacattagatctttgtcagatacatagtttgcaaaaattttctcccattctgtaggttgtctcttcactctattaatagtttcttttgctgtgcagaggctctttagtttaattagatcctgtttgtcaatttttgcttttgttgcaattgcttcggtgtcttcatcatgaaatctttgcccattcctatgcccagaatggtattgcctaggttgtcttccagcattgttatagttcggggttttacgtttaagtctttaattcgtcttgagtaaatttttgtgtatggtgtaaggaatagatctagtttcaatcttctgcatatggctagccagttatcccagcaccagccaagtggttttttcatccccgctatgttcaattcaaatttatttaaccatggaacaattattttatttttatttttattttaccgtaatattttaccaaacaaatactgtcrtttgaaaggagcatttaacagagcat

SEQ ID NO: 811456 - DNA, 660 bp, Homo sapiens
tctctgggaacctcagtcttttctcttaaggccttcaactgattggataaagcccccctacattgtsaagggtgatttcctttactgaaagtctactgatataaatattaattaatcacacctaaaacaatacgttcacagcagcatctggactggcgtttgaccaaacagccaaataccatagcctggccaagctgacacagaaaaccacaccctccttcaaggcttccctccagtgtggctggttgataatagcccgcattagttgagtatttactacataccaggtattgtgtgaagtgctttttttggcttgtttgatttaatcctcataatagccctataatgtaggttctattttggtcttcggttgacagggaagagaactgaggtcgagagaggttgagtaactatcccaaggttgcacagcaagctgaagagccaaggtctgaagccaggcagtcccactgcaaagcccgctgctgtagctgcacacagtcctcttccagaacccgcagggcctccttccacttccctaacccctggctgccagctctatcctaacttgcaggtcttggaggcactttcccttcatccgcctacgtcttagcctccttccctatttgttgggagcagataatgggtttgttgcatataaat

SEQ ID NO: 811457 - DNA, 393 bp, Homo sapiens
ctcataatagccctataatgtaggttctattttggtcttcggttgacagggaagagaactgaggtcgagagaggttgagtaactatcccaaggttgcacagcaagctgaaragccaaggtctgaagccaggcagtcccactgcaaagcccgctgctgtagctgcacacagtcctcttccagaacccgcagggcctccttccacttccctaacccctggctgccagctctatcctaacttgcaggtcttggaggcactttcccttcatccgcctacgtcttagcctccttccctatttgttgggagcagataatgggtttgttgcatataaatgaagcccaggattgcgtgtggccaggcacgtctgacctctatcactctggaaaccagggca

SEQ ID NO: 811458 - DNA, 638 bp, Homo sapiens
ttttcattcagaagcataatttccctcttaaaatccctgatgtggatcatttggttccctgtcatttccattttctttgttcagagtgtctcttctggatctcctgagtttctgtgtgtgtkttcttcctttttgctcaaatgatgagcacacatgaaagcttttcctcctttgcctgggtgaggcggtgttccaggtgtgatctgcagtgcctgattattatattgtattaatctcctcaattttattttctggcttgtctgcatttttccttttctttcttctcccttttttttttcttattagagatgggggtcttgctgtgttgcggggcctcgagcgatcgtcccactttggcctcccaaagtgctaggattacgggcgtgagccacagcgcctggcctccttttctttatagtaatttgaatgtggtgattttaatcctccatggttttcttatccttcctcaacaaacagcaaagaggctgctggaaagccacatgacatttgctgtgatttgcacggctgatgggaaaacactacttggttctgaaggacagggttgtcattggatacctttgccctctgacccgagtgagaatctcacctggacaaagacccgagttgtgaaatcacac

SEQ ID NO: 811459 - DNA, 626 bp, Homo sapiens
aacagggagatggtgaactttaataactgaaaaagtacatattaagatctgtcttcacactgaagctttgaaacacaactttttggccaggagcagtggctcacgcctgtaatcccagcattttgggaggctgagacgggcaggtcacgaggtcagaagttcgagaccagcctggccaaaagagtgaaaccccatctctactaaaaaatacaaaaattagccgggcgtggtggtgggcgcctgtagtcccagctactcgggaggctgaggcaggagaatcgcttgaacccgagaggcagagcttgcagtgagccgagattgtaccactgcactccagcctgggtgacagagtgagactcagcatcaaaaaaataaaaatacaaaaagtatctgggtatggtggcacacgcctgtggtcgcagctacttgggagactgaggcaggtggattgcttgagccagggaggtcgaggctgtggtgagcactgcactccagcctgggtgatagtgagaccctgtccaaaaacaaaacctgtgggcggcaagccacccaggcaccaaggcaagagaccgaggacacgagctgttcyagtataataaaatataaaacaagaatagttataccag

SEQ ID NO: 811460 - DNA, 614 bp, Homo sapiens
aaaaaaaaaaaaaaaaaaaaagaaaatttggaaaaaacagaaaacaaaaaaagacatctgcaccaatgtccatagcagcattattcacaatagccaaaacrtggaaaccagtcaaatgttcatcaatggatgaaaggatcaagaaaatgtggtctgttcatacataaattattattcagccttaaaaaggaatgaaattctgatatctgctacatggatgaaccatgaagacattatgctaaaagaaagaagacagacacaagaggacaaatactgtctgatttcacttatatgacagtaggcggctgggcgcggtggctcacgcctgtaatcccagcactttgggaggccgaggtgggttgatcacaaggtcaggacttcaagaccagcctggccaagatggtgaaaccttgtctctactaaaaatacaaaaattagctgggcatggtgctgggcacctgtaatcccagctacttgggaggctgaggcaggagaatcgcttgaacccgggggcggaggttgcagtgagctgagatcatgccactgcactccagcctgggcgatagagtgagactctgctccaaaaaggaaaaaaaaaaaaaaaaaaaaagaag

SEQ ID NO: 811461 - DNA, 614 bp, Homo sapiens
aaaaaaaaaaaaaaaaaaaaagaaaatttggaaaaaacagaaaacaaaaaaagacatctgcaccaatgtccatagcagcattattcacaatagccaaaacatggaaaccagtcaaatgttcatcaatggatgaaaggatcaagaaaatgtggtctgttcatacataaattattattcagccttaaaaaggaatgaaattctgatatctgctacatggatgaaccatgaagacattatgctaaaagaaagaagacagacacaagaggacaaatactgtctgatttcacttatatgacagtaggcggctgggcgcggtggctcacgcctgtaatcccagcactttgggaggccgaggtgggttgatcacaaggtcaggacttcaagaccagcctggccaagatggtgaaaccttgtctctactaaaaatacaaaaattagctgggcatggtgctgggcacctgtaatcccagctacttgggaggctgaggcaggagaatcgcttgaaccygggggcggaggttgcagtgagctgagatcatgccactgcactccagcctgggcgatagagtgagactctgctccaaaaaggaaaaaaaaaaaaaaaaaaaaagaag

SEQ ID NO: 811462 - DNA, 376 bp, Homo sapiens
gattaaatagtgcatccaagaccatacagaccaagggacagggatagacttgattccatttctgtgctcacctccttcctattackgtgctattggacacctacactgttgacagactttatgggagcatttgcagggatgcactcagcccatgtattgtagcatagttggggagatggtcaaacacagaggagaaaggaaatgcaaacaaggttcttaagtttccttgccattcacatgattcaaatagctgagaagtgctagagccacagtgtgtgtgtgtgtgtgtgtgtgcgtgtgtgtgtgcgcgcgtgtgtgtgtgtgttgcaggaggctttctggaaaagaagcaacttgatttggatcctgaataatg

SEQ ID NO: 811463 - DNA, 485 bp, Homo sapiens
tcactcttctttttactatcacacaatattgaaaatctcatcttcagttccagcagtgcgcatggagacctattaaggtggcctgcgtgaaagggaaattgatttaagctttcttccatctcatcttgtcaatttctgtgtggttgtctagactatattatgaaggagacaaacatggtactactctgatacatctttttagcccacaatgagaggaacaattttataatcttctgtagaaaaattagaaaagagacttcaatgaaagatgttctgtgtattcatcaaaaagggaaaatacacatgattcactcataacagttggtatgtgagatggtttacttacatttctcacttagccactgcaaatttatagaagagcattatccccatttttatagatgaaagaaataaataaaagataaattatgactatatttcaaggcaaagytaggaaatatcataaaaacataacaatgaaattt

SEQ ID NO: 811464 - DNA, 493 bp, Homo sapiens
agatccttggagaatggctgactcaacatcttggggcttgaaaaagtcaacctgggagtagaacatcttgtttttgccagtaggtgaggactttatgagacaattcctgagtrtttcttttaggagcaggcatgcaccaagttgtagcaattccatcaaaaagcctaaaaacaaatgacatttagtaaaaaggactggatgatagctataaaacaaaaataaaaatataacaatatgtgactgttcttgttaattataatgcctatgggatagttgatataggtgagtgagtgttgttcctatgaagtatatattgaatttttctttacctatgtgggcaagaatgggtagattaaggaattgtgagcaagcaagatatttctgggaaaagaagagattttattaagaatcagaaggacagggaacaaccaggttgttccacagagtgtatcaatatgatggacaagcagagggagaaagcagtctccttgga

SEQ ID NO: 811465 - DNA, 506 bp, Homo sapiens
taacaaactatccaattaaraaaaaaattctatgtgccatcacattaaaaaaataaaatacatagacaaaagtttaaggaggtggaagatctgtgtactgacaaccataagacattgatgaaaaaattgaagaaagacacaaaaaagttgaaagagagtccatgttcatgaattggaataattaatattgttaaaattctcatactatccaacatgatctacaaattcaatgtaatgcctatgaaaattaaaatgacttttaaaaaatagaaataggaaaaaataatcctaaaattgtacggaaccacagttaactccaaatagacaaagtaatcttgagaaagaagaacaaagttgaagacatcagactgcctgattagaaactacattacaaagctatagtaatcaaaacagcatggtgcaaataaaaacagacttatagaccaatggaacacaataaagagcttagaaataaagctacacatatgcagtcacctaatctttta

SEQ ID NO: 811466 - DNA, 482 bp, Homo sapiens; identical to SEQ ID NO: 809849

SEQ ID NO: 811467 - DNA, 613 bp, Homo sapiens; identical to SEQ ID NO: 810604

SEQ ID NO: 811468 - DNA, 443 bp, Homo sapiens
atgtagctaatagtcacctcagtaaggtagcctgtgacctgctttcttacccccaggcctggcaacttccacatccaaaatgtcttaagacaacctttggcccagggtagctgaaatggacctttaatctggagtcagagtccccaccatctccacagtacccatgagggctaacgtttcacttctctagcatagaacatggactcctagccttcaaccacgagactgggttcagggcggtcaccctgaagctttccataacttcccctctatggccttgggcagggacttactcttggcttttttgaaaccacaatataaattaagtagggaacatcgaagctttcagataccagagattttaggttgactgacaggctccagaaagtgagggaaggagagaggactggagctgggatccsacctcagccccagccctacag

SEQ ID NO: 811469 - DNA, 595 bp, Homo sapiens
tcagccttagctttaaaaccaggaaattgttagcaacaggctctcaccttcctccaacacccacagcattgcctatctccctgtgatagcttrattctaaagataacagcctgcctttactcagaaaccaggactgtgacgtgttttgcacacattctcttttcactttcacagtgtgtgactatggcatgcaacttatgttctctgtgcctcagtttactcaagtgttaaacaggaatactcacatgaggattacatgagttaaaatggataaaatggataaaagtagagagtaaattatttaaactttatcaaatccttggtacatgaccttaatacaattaagtatttgttaaatacatacattttaaagaaacgtcatcatatccacacacctatgaggcacctgcccaggaccacagagccaatcaatcaggtgatgagtgattccaggccagcaggaaaccaccgcccactgacacagggactgcaccatccatccttggtttgcatggtgcctgccatgcttcctgtattactgttaaatacatggggcaggcctttggaggatcccaatgttttaaaagggcaatac

SEQ ID NO: 811470 - DNA, 516 bp, Homo sapiens
aacttgttggccagcgtgcttctcccagcgccgcaggcctgagctcccggaacgcgcccagggggccwggccaaaggccgtagtgggcgctctggattccgggatgcgccaggggttacttccggaagcgcagcctgcgggggtcttcgcgcgcaccccccgcctcgcagttggtacgttcctcctacctgcggtgcctgagtgcgcaggcgtgggcagcgaggcggtgcggccggaagcgaaggggccgtgaggtcaacagtcggtaatcgtttatcggtgcggccttagagaaaggacctccaagcccttgttcaatacatgttgggtggtggtcacaggtgccagtctccggacggatggcggcctagatttcctcccggactcggtggcacccaaggccccctgcacgccggcgctgtgcgtgccaggctgaccgcccgagtgcgacccggacctcgtccgcacgtgcagatggaaggggccacaaagacgataaggatccaggtctcccgc

SEQ ID NO: 811471 - DNA, 743 bp, Homo sapiens
aatggaaaaaggcattcttgtttttgtttttgttttggagatggagtctcactctgttgcccaggctggagtgcaatgccaccatctcggctcactgcaacctctgcctcccgggttcaagtgattctcctgcttcagccttcgaagtagctggaattacagatgtgcgccactttacctggctaatttttatatttttagtagagacggggttttgccatattggccagcctggtctcaaactcctgacttcaagtgatccacccacctcagcctcccgaagtgctgggattacaggcttgagccatggcgcctggcctggaaaaaggcattcttaatttaaactatattttgctctaaagataatagtccactcataaattctttctgaaattaattgcacaagagaataacaatacagatagtctgtcacaagccgatcacaagcctttgtaataaaatacactattcttagctctaatatcctacacaaacaagcattacatttgaggtagggcgttcttcctcttgcttcctgaggataccctactctaatagattagtttctaataaaccatttaaactttactgtactttgcgactcaccctaaattctttcctgtgcaagatccaagaacctgcccttggggtctggggtgaraccccttttctggtaagagtactgttacatgggatccacactatgggctcagagttggtccctttccagcgttaatccagaa

SEQ ID NO: 811472 - DNA, 743 bp, Homo sapiens
aatggaaaaaggcattcttgtttttgtttttgttttggagatggagtctcactctgttgcccaggctggagtgcaatgccaccatctcggctcactgcaacctctgcctcccgggttcaagtgattctcctgcttcagccttcgaagtagctggaattacagatgtgcgccactttacctggctaatttttatatttttagtagagacggggttttgccatattggccagcctggtctcaaactcctgacttcaagtgatccacccacctcagcctcccgaagtgctgggattacaggcttgagccatggcgcctggcctggaaaaaggcattcttaatttaaactatattttgctctaaagataatagtccactcataaattctttctgaaattaattgcacaagagaataacaatacagatagtctgtcacaagccgatcacaagcctttgtaataaaatacactattcttagctctaatatcctacacaaacaagcattacatttgaggtagggcgttcttcctcttgcttcctgaggataccctactctaatagattagtttctaataaaccatttaaactttactgtactttgcgactcaccctaaattctttcctgtgcaagatccaagaacctgcccttggggtctggggtgaaaccccttttctggyaagagtactgttacatgggatccacactatgggctcagagttggtccctttccagcgttaatccagaa

SEQ ID NO: 811473 - DNA, 628 bp, Homo sapiens
caccatcaccctggggttaggtttcacatatgaattctggaaaagggagagacaaaaattcagacaacagcaggctgctcaatcacaccttttctcaagaagggaacacttagagtacaggtcacttacactgttgaatgtcaggataaacccagttgagtgtggacagaatatatcaccaatctaaatccgattgtaagcagggttaatatggttcttttgcttcttcctttgaagcggcattcgttcatctagaattttcctccctctctttcccaccaagcatgggcctccaaactgctccccacaacctgccttttcccatcccatcaccacatgatggaggagaggaaaaatcaagaagacaaacatatatatatatatatatatatatatatatatatttttgttttgagacggagtcttgctttgtcactaggctggagtccagtggcgtgatctcggctcactgcaacctccgcctcccaggttcaagtgattctcctgcctcagcctcccaagtagctgggactacaggtgcccrccaccacgcccagctaatttttgtatttttaatagagacggggtttcaccatattggtcatgctggtcccaaactcctgacctc

SEQ ID NO: 811474 - DNA, 647 bp, Homo sapiens
ctggattaagaaaatgtggcacatatacaccatggaatactatgcagccataaaaaacgatgagttcatgtcctttgtagggacatggatgaagctggaaaccatcattctcagcaaactattgcraggacaaaaaaccaaacaacgcatgttttcactcataggtgggaactgaacaatgagaacacttggtcacaggaaggggaacatcacacactggggcctgttgtggggtgcgggaattggggagggatagcattaggagatatacctaatgtaaatgacgagttaatgggtgcagtacaccaacatggcacatgtgtacatatgtaacaaacctgcacgttgtgcacatgtaccctagaacttaaagtttatatataaaaaataaaaaataaaaattcccccaaaaaaagaaacaaataaccctattagcagacacattttctcctaacacttaaccaacagcgtccagtcctgctacttgttagaggcgctgtgttctgctcctcctgcccagcttgtgacccagagccctgcagaaaggatagggctgaaaagcaggcataaaaggaaacactgcacagaataaaacagcaaagcaatcctgaatatccaggtaatgcctgttcattctttgcaacgtg

SEQ ID NO: 811475 - DNA, 639 bp, Homo sapiens
gccatgtttcacagcacctaagccccatagaatctgccgtgtttttcagcacctaagccccatmgggtctgccatgtttgggagcacctaagtcccataggatctgccatgtttcacagcacctatcccatttacctttgcctagtgttgactcctggcatgtgtttaattctggcaggctctgtccacacctatcacaatgcagccattggtggtgtcgatccttttgctccatcctcaatttatgtactgctggcattagcaactgctttgattaaagtggctttgatttaagttgagacttttggcaaaatgttcagtttcacatttgacatcaggaaatagttacagcacaggagcagattcctcatgtcactttatcagtgttattttcttgttgcttattactagaagtttaactgcatgaatacctttacctagaggaaccccaacataaggcaactcaacctgtaaaattcccaatttgtaaaagcgacagtcaacgtgacataagaaaagagactaaaactattcttttacacagattagttcattactgatgttctttaaaatgtgagctgtcctatttcactgaagacattattcatttcacatgatttaatttacccataaattttc

SEQ ID NO: 811476 - DNA, 543 bp, Homo sapiens
tgcccatttgtcatttgtagtgtccaggacttttaatatctttatttgtcaaaccttttaatatatccaggatatgagtcctttgtcagttaataagcattgcaaatacttcttctttttggyttccattaaaatgatgttctttttcatttggaatagggtaatacttgatttttaaaaattcaatcttccctggtgtttacctatttaattatttgcttgaaaaacaacttttagctttttgagttgtgtcatgcactttttatcaatttaattaataagattggtcatacgtactattttttcctactttctttatgcaatcatgcatgacataacatttcagtcaacatatgacagaccacatataccacagtagtcccagattataatgaagccgaaaaattcctgttcctagtgacatcatcattgtcctaacaccatagcacaatgcagttctcacgagtttttggtgatgctggtgtgaacaaacctattgcactaccgcttgtttaaaagtatagcgatacaattatgtatggt

SEQ ID NO: 811477 - DNA, 603 bp, Homo sapiens
accatgacatatttgtaagtgggaaaaaaatgtagactatcacaacagcatgcacagaatgatcccacggcaaattgtgaatgtgtgtgttcatgtgcacacacacccaatagaatatataaaagggattcactaaaacatcagaagtagatttggggagattttaatgctttggtctggttgagtttttaacaatgagaatataatatgttcacacacagagatacacacaagatattgtaaatttgtagaaagacagtggtaaataccatttagtggtacttacccaataattttatattggaaagcagtaaaattgatagtgaatatataattctcataaattccatgaaacaagttatagtgtactaaaatatgtataaagctaaaactgaaatacaagaagaaattcataagaaaaaattatattaggataattctttaataaacaaattgtcttcatcaggtcaaacagccaaaaaatagagaaaaagctaaataattgtattaatrtaattactaatctggataatgactcttcattatatcattacaacataattaaattaatttaataaatacattgacgatacatatgaaaac

SEQ ID NO: 811478 - DNA, 580 bp, Homo sapiens
aataaaaatttaaaaaaaaaaacaaaacactaaactcgtagtctcagacacagtaggtaacctgtcttttctcttcaattatytttggtgtttgcccatcgtctatactgttctgcagtttcattataatgtatctgccaatagattttttattttcctgattgaaactgggtacaattcattagtctgaggattcatatcactagtcaattctgaaaaattctcagccactagatctttagttactattttgtccatattctctctggtctttcattctgaactcctactaaatgtgtgctggcctttctcattctgtcttccgcagtgtttgaccattcttttacatccaccatttctctatgctacattttggatagtctcctcagatatatatttcttctggttcattatctctccttttagtcctattcaacacagttggtaaactgtgtttgggttttgttttgttggggttttatgctatattttacatttcttgaagttctacggattatctttaaaattttccattttttccaaggtcttgttcctttcttagagtttcaactcattttat

SEQ ID NO: 811479 - DNA, 552 bp, Homo sapiens
atttaagccatggactgaattagctcacttacaacataaatgtagatagagaagccacccaaggaattaaccttgasgcagcacagccaacctagaaggagcctccactgaagaagaaccaagagttgtacctcatacccaagtgaagaagatgttttaagaaggagggagtggccaaccatgtcaaatgctgcagggtgtcaaatatgatggcttctggatttggccaatgtggaggtattgggtgatcctgacaaaagcaatgccattggagttgtggtggggtgcaggactggtgtagactgaagagagaaaactgagtctccatgtaaaaaaaaattatgttaagaaatttttctacaaaagatatctaagaaatggggcaatcactagaggagacggttatgtcaatacatggtttctttttaaaaatggaggccattagagcatatatgcatgtgggtaagaataatccagtggaaaatgaataatcagtcatgcagtgggggggcagcacttgcaagcaaagttcctgagaaggtgagagaagat

SEQ ID NO: 811480 - DNA, 592 bp, Homo sapiens
tccagtttctagatgaagacacttgggacctggaggccttctgacttttgggtcagagctggyatggagtccaggcacctgctttctgcaggcatgcatgctcctgggacactctgcagggacagagccatccccagcaaggcagactgacagggctggtttccagtcgggtggggccgcatccctccaggggatgtgaggcaggtttgagatgagtctgctccccttctgcctgctgctcctgtctttttttttctttttctttttcttttctttttttttttttgagacggagtctcgctctgtttccaaggctggagtgcagtggcgcgatctcagctcactgcaacctctgcctcccaggttcaagtggtactcctgcctcagcctcccaagtagctgagactacaggcatgcgcccccacacctggcttattttgcgtttttagtagagacagggtttctccatgttggtcaggctggtctccaattcctgacctcaggtgatcctcccaaagtgctgggatcacaggcgtgagccaccgcaactggcctaggagtaacttcttaatgaatattttaataatataaa

SEQ ID NO: 811481 - DNA, 544 bp, Homo sapiens
tgccgtgcccaggtggggggctctcggcgtgcggggccggggtgcgtttgccgtgctgcgagtccggggcgctcatccctgcgtgtggaggcttctgggaccctgcctgggatgactttttttttcttaaatttttacagaaacgagtatcttatatttcagaagatcattaagttggaatatgactttccagaaaaattcttccctaaggcaagagacctcgtggagaaacttttggtaaatatcgtgaatttccttttagaaaggtgatccgggacaccctgagtcctctgaacctgctttctgagtggctttcctggaggctcccgtgttcacaaaaaatggtgtttttagggttaacagtgagtgtggatcattacacctagtctcgccagacacattggctcacgcctgtcaccccagcactttgggaggctgaggcaggtggatcacctgaggtcaggagtttgagactagcctggcctctatggtgaaaccacgtstctagtaaaaatataaaaattagccgggcatggtggcgggc

SEQ ID NO: 811482 - DNA, 560 bp, Homo sapiens
ttgaaaggaatccctttttttccctggaggagtaagtctcaacggtaggcttaaaatattcagtaaacatgccataaacagatgtgctgtcattcaggctttgttatttcatttatagagcayaggcagaatagatttagcacaattctttgttttgagacagggtttcactcctgtcacccaggctggagtgcaatggcgtgatcttgactcacggcaacctcagcctccaggctcaagaaattctcctgcctcaccctcctgagtagctgggactgcaggcacacttcaccacacctggctagtttttgtatttttttgtagagatggggtttcaccctgttgcccaggccagtctcgaactcctgagctcaagtgatctgcctgcctcgacctcccaaagtgctagaattacaggcatgagccactgtgtctggcctgggtttagcataatttgtaagggtccaaagattttctgtatggaaaatgagcaattggcttcagcttaaagccaccagttgcattagcccctaataagacagtcagcctgtcccttgaag

SEQ ID NO: 811483 - DNA, 653 bp, Homo sapiens
cgcaaagacgacctcgagcaggcactgcgggcagtttgtactagcgcctagaaccctgacaccgggaattagtctcttggaagagctagcgattggaggctcaggagttaggctgtttccttgttaaccaacaaaatcaggtgaaaccaacgaagtcaggaagcctaaagacatatatgtacagatatctaaccctttacgctaattatttagatttttaataaatctatcttaatgtttaggtatgaagacgggaggaactgtggaattttagtcaagttacagggaagaaacgctttctaaaaaaagaaaaacattgctcacatgtgacctcacagtcttatttaacccatggaaccaaaatatatcagagtttgtatcaaactaatcttataaattttcagcaaccccatccattcactcactccccctccaggatgaggaagctcgtacaatgggatgtaatcctcagagaaatttaggaaataacttgtatatggttggaaggctggataaaaatactttgggcaggcrtggtagctcacgtctgtaatcgcaacactgcaaggccgaggcaggcagatcgctttagctctgtagttcgaaaccagcttgggcaacagtaagaccctgtctctacaaaaaaaaaaaaa

SEQ ID NO: 811484 - DNA, 465 bp, Homo sapiens
acgtatacaataaatatgagtttctacctgatgctaaggtaaggtactttccccattgtccaatggggagattaatctctactacagcagggtaattgtaaccagagggcctgtggagcctaaatgcctgagttcaaagcctggctctcccaaccactagcagtgtgactgtcagcaagtttcttgcattctctgtgcctcagttattctatgaacagtgatggtaacgataggacctaactttgagattcattgtgagaatggaattgatgcatatgcagtacagcattcagaagaaagtgtgacacacagtgagtgctcagcacatgccaggccttaygattaactcctcccttctagctttgccaagaacatcatgagagagcaatgcaatcaccaagaagtttgtagaccattactgtaagcctttaggaagagaagaattttctgtatttcatttccaat

SEQ ID NO: 811485 - DNA, 614 bp, Homo sapiens
tgttttcaataatggctgtaccaatttacattctcaccaactgtgtgcaagggatcgcttttctccatattcttgccaacacttgccatcttttgttttttgtgtgtgttttttaagtaatagtcatcctaagaggtgtgaggtgatatttcactgtggctctgagttgcatttccttcatgaccagtgatgctgagaaccacttcctatatatgtgttggctacctgtatttcctccctggagaaatgtccacccagatcctttggacatcttccaataaggtcactcattttttagctcttcagttgtatcagttccttgtctatattgaacattaacccttatcaggtatatagtttgcaaatattttctcccattttgtagtttgcctttctactccgttgattctttcctttgctgtggagaagctttttagtttgatgtagccctacttgtttatttgtgcttttgctgcctgtccttttggtctcatacccaaaaartcattggcaagatacaatgccaaggatcttttccctatgttttcttctaggagttctgtagttttgggtataccccaagttgatttaatccaccccaaattgatttcctt

SEQ ID NO: 811486 - DNA, 354 bp, Homo sapiens
cttacagcaaggaccaatgggaggaagttgtaggaagacattgctgttccttatacttagctgaaagtaaagagctggggctgcttaaaggtagggtgtgcttcctgggaaggtggtgaggctcttgggccactcaattatctgtaagggatgctgtgccttagttacaaggaggggctggatcgtggagattctgctattttaaaacttaacaaaataactcttccattctgctggcttgcatgtaagacatgcaggtatagaggccrctagtcccagtttaccccagatgtctctgtttttaatttagaatgtcctgcttctgaagaacccctccatccagagcaaactggg

SEQ ID NO: 811487 - DNA, 535 bp, Homo sapiens
ggtttcaccatgctggccaggctggtctcgaactcctgacctcgtgatccaccggcctcggccacccaaagtgytaggattacaggcgtgagccatcgcgcccggcctggctgttactttctaccagcttcagagccagtagcacaaatggctcaaaaccttgaactcagagtaaaagctaactcctcgccacggcgcacaggcaactgcatgccctctgccctctgcacccactccctgcagccacccggcttgttgctactcaatgcttggcacccccagtcctaggcctgtgccctggctgttctcaacaccattcgttccacagggctccctgcttcgcgaacttgtgtctgctcaggcgtcaccttctcaatacagcctcctccttcctcccttccgctccctcccttctgtttttttttctttctttctttctttttttctgagacggagtctcacgctgtcacccaggctggagtccagtggcgcaatctcagctcactgcagcctccgcctccggggttcaagcgat

SEQ ID NO: 811488 - DNA, 610 bp, Homo sapiens
tccaaccgggagcccgacccctcatcccaggctctaggatccgcgacagccggcgaggggcgccagggagcccaaggcacgcgccaaccctctgcggccgcgccgcgccctgcgttgccagacgcccgttgccatggcgccagggaggggacaagagcccaggaccctagcgcgcgccgcaatctgtgcggtcacgcccggcccgcgttgagagagcgcttggcagccagcgggtggacgcgcccctcagcggagggcacaaagcctggccgcaggcacgcaggacactcagaacggagcgatggggacgtcgcgggccgcaacacggactttgcctgggtgtcagctcgggtccacagcgcggccgaggcgcaccttgcgccacacactgctcttttactggagaaagcgggacggccgccacggacggcgcaacccctgcgtgcgccgcggatcgacgcctgagggcgccagcagggtccgaccctcctgctccgtccccgcccctgtcctcgkgcccggccagcgccgcggcctctggctccgcctccacacgggcccgcaagcaggcaccgcccccgactctgcccccagccccggctcgggcccg

SEQ ID NO: 811489 - DNA, 637 bp, Homo sapiens
tgtgcatgtagctagcgatattctgacattgtaatggcagagtgaatgataattgtggcaccttaagaggtgttctgggatgtttctttctgcctaagtacttcctcttcttcctaaccacatttgacttagacccacccactccagcattagagatgctattaatatgcaaattttggttggcccctctagggagtgggtagtgaaccttcccaggcttttcctttctcaggagcctcccccatgttcatgtctagctatctacctactctaacaaatgatgttttacattcgttgaatttcacatgttgaattaaccttgcatctctggaaacatcccatttggtcatcgtatataattatttttatatgttgctgtatttgatttagttttatttcgttaaggattttagaaaacatattcataagagatattggtctgtatgtttcttttcttgtgatatctttatttggttttggtatcaggataaactggcctcataaaaataattggaaactgttcatcctcttctatcttttgaaagagtttgtggagaatttgtattttttttttttaatgtttggtgggatccastagtaaacttctgggactgacctgtcctttgtgggtattttg

SEQ ID NO: 811490 - DNA, 577 bp, Homo sapiens
ggcggctgcatgaggccgggagctgtgctgtcgaggcattcactttaccttcctgaatttttctcaacaagtgtcttcgagttctcgaagctgagaccctgggcattaytaacgtcacctgggctgctcaagtagctccttcgaataaccaccaaaagaactcaaccccagcctgaccaacatggagaaaccccgtctctactaaaaatacagaaaattagccgggtgcggtggcgcatgccagtaatcccagctactcgggaggctgaggtaggagaatcgcttgaacccaggaggcggaggttgcagtgagccgggatcgcgccactgtactccagcctgggcaacaagagggaaactccgtctcggggaaaaaaaaaaaaaaaaagaactcaaccagtgaaaaaagcaggccccacctcagtcatacatagacttctgctgcatttcttagaaaatgctcctttgccttcttttgccagcaggtgagtgcacgcatttgtctaagcgacagggaactgcccgtgcaaggaaggagggccgagcgggtggagagggatgtggaaatgggagccac

SEQ ID NO: 811491 - DNA, 577 bp, Homo sapiens
ggcggctgcatgaggccgggagctgtgctgtcgaggcattcactttaccttcctgaatttttctcaacaagtgtcttcgagttctcgaagctgagaccctgggcattactaaygtcacctgggctgctcaagtagctccttcgaataaccaccaaaagaactcaaccccagcctgaccaacatggagaaaccccgtctctactaaaaatacagaaaattagccgggtgcggtggcgcatgccagtaatcccagctactcgggaggctgaggtaggagaatcgcttgaacccaggaggcggaggttgcagtgagccgggatcgcgccactgtactccagcctgggcaacaagagggaaactccgtctcggggaaaaaaaaaaaaaaaaagaactcaaccagtgaaaaaagcaggccccacctcagtcatacatagacttctgctgcatttcttagaaaatgctcctttgccttcttttgccagcaggtgagtgcacgcatttgtctaagcgacagggaactgcccgtgcaaggaaggagggccgagcgggtggagagggatgtggaaatgggagccac

SEQ ID NO: 811492 - DNA, 436 bp, Homo sapiens
gtagtcatctaacctcaaataacagcataacagttayaaacagcaaattctaccaagtattcaattaaccccaatggaaatagaaaaggaggagcagagaaaccaaaaatagatgggatgaacaagaaacaaatagtaaaatagtagatccgaatcccactttatctttcaaatgtaaatgtaagagcccatcatgtgtaaatggactaaacactctaagaggcagaggtagtctggatggatataaaagcaaggcccaactcaagaaagcaagatgtgctttaaatacacagatatagataggttgaaagacatgcaagtaagtaggtgttaaaagatgtaccatgcgtatagcgtaaaaatactggggtagctatatattaatatcagataatacacatcacaacaaaaaatattaccagagataaagagggac

SEQ ID NO: 811493 - DNA, 436 bp, Homo sapiens
gtagtcatctaacctcaaataacagcataacagttataaacagcaaattctaccaagtattcaattaaccccaatggaaatagaaaaggaggagcagagaaaccaaaaatagatgggatgaacaagaaacaaatagtaaaatagtagatccgaatcccactttatctttcaaatgtaaatgtaagagcccatcatgtgtaaatggactaaacactctaagaggcagaggtagtctggatggatataaaagcaaggcccaactcaagaaagcaagatgtgctttaaatacacagatatagataggttgaaagacatgcaagtaagtaggtgttaaaagatgtaccatgcrtatagcgtaaaaatactggggtagctatatattaatatcagataatacacatcacaacaaaaaatattaccagagataaagagggac

SEQ ID NO: 811494 - DNA, 308 bp, Homo sapiens
aggaggctgggataggaatttcaaacaaaatagaatggaasccaaaacattgtagataaaaggcttatgctaacccattatatgaaatgctttgggaaggacttaacagttgtcccttgagccatatgggtttaacactgtgggtccactaatatgcagatttttttcaaccaaatgcagataaaaaatacagtatttgcgagatgcaaaacccatgtataaggagggctgactaatttccatagggccttgaatattcacggattttgctatctgccgcagtcctggaaccaatcccctgtgtatac

SEQ ID NO: 811495 - DNA, 308 bp, Homo sapiens
aggaggctgggataggaatttcaaacaaaatagaatggaagccaaaacattgtagataaaaggcttatgctaacccattatatgaaatgctttgkgaaggacttaacagttgtcccttgagccatatgggtttaacactgtgggtccactaatatgcagatttttttcaaccaaatgcagataaaaaatacagtatttgcgagatgcaaaacccatgtataaggagggctgactaatttccatagggccttgaatattcacggattttgctatctgccgcagtcctggaaccaatcccctgtgtatac

SEQ ID NO: 811496 - DNA, 639 bp, Homo sapiens
tttgttctgtcttatttttaaaataaatggcaaataacagatgctttgaaaagagtcacactttaggaggaaaactgagtgtacaaagattttaaaatgtttgacttcatagcaagtacagatatatttctacagttcaaatcctgggttttcagaaagctcaagtacaatagaaataatccataaacgggagttaaaagaacattcgttcacattttggaaatcttcaaagcactatacccaattgttttaatagtctgcaacaaacaaaatcactgtactataaatgagaaaaaggtaactgaagtccatgttggcaatgaaaaacatttatcactttgcttctgccataataacattatgtttttctgatgctcataaaccaagtaatgagtgttttaaagtttaaaaagtgtttagggccattatgaatatctagtttgctagtcaatttgtcacagaaaaagagtgtgcatgatcttcctataaagagaatttattgttttagatgatgaggtctataaaaagctgtctccatgcaaaattatagtattttacctctacatttctgtttttgttgggtcataaaaagttaagaacactaaagaaawaccactaaattttaacagttgctataaa

SEQ ID NO: 811497 - DNA, 607 bp, Homo sapiens
tgtgttttgagaatagtgaagatactatcatcttttctcagagtcaattaagaaaagaatgcatatattaaaacttctctattatttttcaggatgaaaggaaatarcctttttaatttaaagaatagaaagaaagtcttgtgtatttaaagtaagaaaacatcagtgttttgctttaggtggacttttgttctttatgttcataattttaccatcatttatattatggcagaaatatcctaaaaagcatgtgttagctttgtcttctgttctttttcttttttttgagacggagtttcacttgtcacccaggctggagtgcagtggtgcgatctcatctcactgcaacctccgcctcccaggttcaagtgattctcctgcctcagcctcccaagtagctgcaattacagcactcaccaccatgctcagctaatttttgtatttttagtagaaatgggatttcacaattttggccaggctggtctcaaactcctgacctcaggtgatccacctgcctcagcctcccaaagtcctgggattacaggtgtgagccactgcgctcggcctactgctctatgactttgtggtgattaacctttctgagcct

SEQ ID NO: 811498 - DNA, 435 bp, Homo sapiens
atggtcaagtgggttttataccatggatccagggatgtttyaacatatgcaagtcaataaatgtgatacaccacataaacagaattaaaaacaaaaatcacataagcatctcaatagatgcagaaaaaacatttgacaaaatccagcatccctttatgattaaaaccctcagcaaaatcagcatagaaaggacataccttaaggtaataaaagctatccatgacaaacccacagccaacattatactgaacgtggaaaagttgaaagcattccccctgagaactggagcaagataaggatgcccactttcaccacttgtatctattcaacatcgtactgggagtcctagccagagcaatcagacaagagaaagaaataaaaggcatccacatcagtaaagagtaagtcaaattatcactgttcaccaatgatatg

SEQ ID NO: 811499 - DNA, 547 bp, Homo sapiens
ccttgcagcacagccagggcctagcatagcgctgcctccttccctttcacttgtcctcaggaatccccggagatccagggtgaggctcctttagtctaatgagaaggaggcattctgactttttaggttattttctcttcccagcccctggcagatggaaaaagaaaacaaaacaaaacaaaacaaaaaaacaaacaaaaaaaaccccgccacaataattgctgcttgcatgaatgacctcaatacgggaagagtgctgagcgcctaagtccttgcactgctgccaggcctggcgtcatcatgattaacacagcaatcaccggccagggagccgggccgctctgcctaccagacaccctgactgggtgacttacggctttatatttttaaattggcctctctagcaccgtctgatwaatcaacacacaagtcattaaatggttcattatcccagtaatatgattcattctttgtgccaagaaatgcaggagatgtcaggaaacttaaaaatatctcatttgaagccatgagtgcccatctacataac

SEQ ID NO: 811500 - DNA, 553 bp, Homo sapiens
ctgcatgtcaagcttgattccttaaagggaaacacaccctttcagttaaagccttggcaaaataaccggtttttccaattgtgttctgttgacaaaraaaaatggattcttgctgcactgatgcgaacaactatattgccgtaagttaagagtacttacagatagtctccaaattttagaggaaccaggcagagaaaaatgaacatgctccaaattttgttcacagtagtataccttacttgattattaaaggccataaatagtttaaaataagtttcctttcccagtccatgcaccaaaatgatacggctctgatgagtggaggaacaacagggttcctggtcctcatgctggtttagataaaatgacacagacacatgtggagtggttttaaggagtggagagtttaataagcaagaaggaagggagaagagagaaggaagacgctcccccttgcagagacggagcgggggttccaaagctgaaagaggaggtcccccacattaacaatttttaaaataccgtacaactgcagaaaatgaggactgcctgt

SEQ ID NO: 811501 - DNA, 595 bp, Homo sapiens
ccgccaaacccaacgattcggacctcactctgtacctggtggtggcggtggccgcggtctcctgcgtcttcctggccttcgtcatcgtgctgctggcgctcagactgcrgcgctggcacaagtcacgcctgctgcaggcttcgggaggtggcttagcgagcatgcccggctcgcactttgtgggcgtggaaggggttcgggctttcctgcagacctattcccacgaggtctcactcactgcagactcgcgtaagagtcatctgattttcccccagcccaactatgccgacacgcttatcaaccaggagagctatgagaaaagcgagcctcttctgataactcaggatttacttgaaacgaaaggagaacccaggcaacttcaggtgagtttctttccgcctaagcgggaagagtaatctgatcttcccgcaacccaactaatcagacaggctcatcagctagatcggctgttatagaagcgaacctcttttggtacaggaagattcgtgattttgtaaagtggaagactcccttgttcaggtgagggtatcgtttttttttttttttttttttgagacggagtctcgctctgtcg

SEQ ID NO: 811502 - DNA, 489 bp, Homo sapiens
agctactcaggaggctgaggcgggaggatccctagagccagggagttcaaggctgcagtgagctctgattgcaccattgtactccagcctgggcaacagatcaagaccctatctttacaaaaaagtagagactctgtctcaaaaaaaaaaaaaagaaagaaaaaatatatataaaataacgtgggttgtgtattccagtatgtcaaagaaaatctatttctcagaatctaaaatctctctcacaactataaagagatatttatataatggtcattgcagtattctttgactagtttttttttttaaattggcaataatctaaatgtctgtattaatcagggtccctgctatggtaaattgattgcaaaactggtctcaattcttcatgctgtcccggcgcggtggctcaagcctgtaatcccagcactttggrgggccaaggcaggtggataacttgaggccaggagttcgagaccagcctggtgaaca

SEQ ID NO: 811503 - DNA, 555 bp, Homo sapiens
gggcttaaacagtagatttggactagcagaagaaaaaataacaaacgtgacagtagatcaatagaagtgatacaaccagcagaacagagagaaaagaagaaaaatgaatagagccttagagacctgtggsatgtgatcaagcacacaaacgtgcatactgtagaatcaggaggagacagagagagagagaaagagagaggagaaagaaattctaggaaataatggctgaaatcatcccaaatttgatgaaaagcattcatctgcatagtcaagagcttaacaaataacaagtaggatcaacacaaagagatacacacagagatgcattgtagtaaacctgctgaagatacagagaaaatcttagaaacaacaagaaaaaaacaatttgacatgaataagggaaccacagcaggatttaccactaacttctcctgagaaacaatggtagccaaggtcagtggggtaacatactcaaagtgctggaaccaagaattctttttcttttttttttttttttttttttgagacagggtttcactttgctgccaaggctgg

SEQ ID NO: 811504 - DNA, 481 bp, Homo sapiens
ccctctgggacctgccaggagccggctctccaggctgcccggctgmcaagtacctaaagcaggtagacttcagccgctatgacttcttcctgctggtctccccccgccgctgcggggccgtcgagacccgcctggccgctgagatcctgtgccagggcaagaagttctactttgtgcgcaccaaggtggacgaggacctggcggccacgcgcacccagcggccgtcgggcttcagagaggccgctgtcctgcaggagatccgagaccactgtgccgagcggctgcgggaggccggcgtggctgaccctcgcatcttcctggtgtccaacctctcgccggcccgctacgactttcccacgctggtgtccacctgggagcacgacctgccctcccaccggcgccacgctggcctgctgtcgctccccgacatctcgctggaggccttgcagaagaagaaggccatgcttcaagagcaagtcct

SEQ ID NO: 811505 - DNA, 481 bp, Homo sapiens
ccctctgggacctgccaggagccggctctccaggctgcccggctgacaagtacctaaagcaggtagacttcagccgctatgacttcttcctgytggtctccccccgccgctgcggggccgtcgagacccgcctggccgctgagatcctgtgccagggcaagaagttctactttgtgcgcaccaaggtggacgaggacctggcggccacgcgcacccagcggccgtcgggcttcagagaggccgctgtcctgcaggagatccgagaccactgtgccgagcggctgcgggaggccggcgtggctgaccctcgcatcttcctggtgtccaacctctcgccggcccgctacgactttcccacgctggtgtccacctgggagcacgacctgccctcccaccggcgccacgctggcctgctgtcgctccccgacatctcgctggaggccttgcagaagaagaaggccatgcttcaagagcaagtcct

SEQ ID NO: 811506 - DNA, 303 bp, Homo sapiens
ggtggtacacgcctgtaatcccagctacttaggagggtgaggcaggagaattgcttgaacctgggaggcagaggttgcagtcagccgagatcacaccactgcactccagcctgggcgacagagtgagactctatctcaaaaaagaagtgagaaaggcgtgtgtgaggacctcgggggccgccacacaccaggatgctgtgagtcgtgttatgagcctgaaaaaatctgaactgagtccctcacgcctcccagcwggctcctcggcctggccattctcatgggggccgtgttaccctcatggag

SEQ ID NO: 811507 - DNA, 639 bp, Homo sapiens
caccgtgggtcacatggccagacctgaggcatgagacccacagtctcatgactgtgaccaaagacagacatgctctgataggccaggtgtgagtgacgaaaggccagagaatgagatcccaaggacggaggggctggtgggcataaggagggcaatcggagttggcttgatgggctgccagacaggagggagagggcctgaacatgaacccgaccttgctctgcagatggccaggtgtcctttgagatgctgcccaggcagtggtctgtgtgcgagcagataggaggtactcattaccccgatgggtctgcggtgggaggctgggggaactgaggatgcagaagagcaggggagggtggcaggggtcatgggaaagaatgggcagtgtcttagggaggggtgagttatggggaggggtacagctggcacaggaccaaggctattgagccctggggcggctctggactgcccctttccctctcagttaccacctgctccataatttggtctgaatacatcgcgggtgagtatacyctactgctgctggtggagagtggatatggtaatgcaagtaaacgtttccaggtggtcagctacaacacaggtaatgagggtgatgcaaggggctgggcacaaagg

SEQ ID NO: 811508 - DNA, 580 bp, Homo sapiens
agactcaagggatcctcctgcctcagccttctgagtagctaggactataggcatacatcwccacacctggctaattttttattttttttattttttgtagagacaggtctgctatcttgcccaggctgttcttgaactcctggcctccagtgattcttctacctcagccttccaaagtactggtattacaggcataaactattgttcctggccatctaataggcatttttaaattggtttagcttgataggaagttttgaaatgctgatgaagcctgtcaggttcttccccctttggagattatgtccgcttttggcctacaagttgggaatggaaaggttgtatgttcctctctctttggagtagcatgagtttaattcaatatgttactttataatctcagctctctgaggacctgaaaaatgttattctcttgaagaccttttcacttgttctggttgtagaggtggtagtaacattctcttgtggctttcaatgtcctaaactaaagtggagcattgagtggtcaatgctactcacctgaccactgctgagaaactgttcatggaaaaagacatta

SEQ ID NO: 811509 - DNA, 542 bp, Homo sapiens
caaataaaaggatttccttatttttaacatttgaatacaattctattttacgtatatacaggcatgcctcagagatattgaaggttaggcttcagaccactgcaataaagcaaatattgcaatacagcgagtgacacaaatttttggtttcctagcgcatacgaaagttatggttatgctatactgtcatctattaagtgtgcaataacattatgtctatgaaaacaatgtacataccttaatttaaaatacattattactagaaaaattctaatgatcatctgaggcttcaacaagttgtctttttgctcgtagaggatcttgtcacaatattgatgactgatgactgatcagggtggtggcgactgaaggctgaggtggctatggcagtttcttcaaataagacaatgatgtttactgcaccaatggaattttcctttcaagaaaaatttctctggagcwtacaatactgtttgatatcattttacccacagtagaccttctttcacaattggagtccatccttttaaaccttgccactg

SEQ ID NO: 811510 - DNA, 605 bp, Homo sapiens
ccagagacggacatggaaatgttagttgaatttccaggagccgtggcactggagacaacagagggtggttgtggtgaccgggaagggcagggtgctgtgggagatgggtcagggaaggcctcttctaaggaagggtgtggatggggctgggatgagagactatcagggcagagctgcaggtgtggggaagggacggatgcaaggcaaggcagggctcactggacatgacctgggagcacagagcagagggcagaggggagaccacacagggcctgcgagccaagactcaatcctaaatgcaacagaaaaccatggaaaggtctacactgagagtgacgggatctgactcatgcttattttgttatatttttaattgtggtaaaaaactcatcaaataaactttcccattgcacccactttcaagtgtatagtggagtaaagtacgttcacattgtgcaaacatcacaccatccatttccaggttattcttrtctggcaaaactgaaactctgcccccattaaatatgaactccccattctccccagcccctgacaaccaccgttctttcagtctctaggaatttgactcctagactcctcatata

SEQ ID NO: 811511 - DNA, 568 bp, Homo sapiens
gagctttctaaatctcgggtacagtgactgaagcactgggctgggagtccgagtgcctgagctgtggtctggttctgctgcctactaagctgaatgacccaaaagcctctccacccttccctcacccactctacctaccttgagggctgtaagagaattaaatgagaagtcatgtctgaagaagtactttatattttataggttatatgagtatacgaaatgattattctcagagtatcatgagatggtaatatttggaaatcttagatgtgatttagtcttctggttttttgtttttggatttcttaggtgacacttcggttgtgtgttttaatttttgttctttttttttttttttttttagtggtatgtgtgcaacagagagaaattatgcgaatcactccaggctgtctttgttcagagttaccttgatcaaggaacacagatcttcttaaacaacagcattgagaaatcgggctggctatttatccaattatatcattcttttgtgtcatctgtttttagcctgtttatgtctagaacatcyatcaatgggtaagtgaatctt

SEQ ID NO: 811512 - DNA, 618 bp, Homo sapiens
ttaagatattactgcaatccacctgtggaccatttcacagcaaaagatcctaaaaggagcatctatgttctacctacttgacattctagaaacttagaaaggggagaggggcaggaaaataaaagaactacatttctgacaacaatgaaatagtttattttcttcaaatattttaaggtacgaacgtcagaaagaaaaatgcggcatttaaccctggaacctcaaatatcactgattatattcaaaggagcagaggcactgttttccatctgattcctcagttcctcacacacacaaccatccccctcaccccatgatctgaacagcggaatgaggaactcaccctaaaattagtgctgaaaatatgagggtaacatcgagccaccaaaagaatgcacttaacacatttgcaaagcaattctggtgtatccacattttcaagaattgactgcaggctggtcattacaagcttaaaaataaaagttacaaaccgtgaacattcaacaaaatagggagaaaacaagcaaattaggttcattatttacgaagtgcctacataaaaamctgagtatgagaccaagaaaaatagattctgtagttttagttaaaaaaaaaaag

SEQ ID NO: 811513 - DNA, 585 bp, Homo sapiens
gcccaagctggtggcattctgttcagttacaggtaattttctgaatcttccctcaaatttttctcaaacctctataatcaaggggaaaatgtttcattttgttttgcttttttgagacagggttgcctataatggagtgcagtagcttgaccatagctcactgtagcttcaacctcccaggcacaagcgatcctcctgcctcagcctccaagtagctgcgattacaggtgcatgccaccatgcccaacttattttttttccttttttttttttttttgtttgatagaaacagggtttcaccatgttgctcaggctggtctcaaactcctggactcaggcaattcaccagcctcagcctcccacagtgctggggttacaggagtgagccaccatgcccagttaaaaatacattttttattaaaaaaaaaaaaaaagaatattccttatatttcctttatattttttaaactacatacccaaaataaagcatatcaaaaactgtaaaaaaaaaaaaaaaaaaaaaamaaaaaaaccctaatatcagatattccaaacacaacaataccataatttaatcacttaaaa

SEQ ID NO: 811514 - DNA, 642 bp, Homo sapiens
ctgaagttaaagcctgatgtacatgccacatgagaggtaagtttctaaagctcatacctcaaaamtcgcctttgtgatgttgtgcatcaagtcaatctgtaagacagtagttacaatattagtgaagacagtgggttaaaacatttgttgttcaaacatggagcaaatatcattcatgagttaggtgcctttagttgaactatggtcccattagggttcatacattaaagcaaaaattgaggtggaaagacactctgtgccttacaggataaagaggcttactgtggcaaccaaaaaaattttagtacataagagaatttaaatgttaactataacatacaaatcacatgcaaatatagttaccacttattttagttacctattctcaatatacagaaaaatgccacaaatctaggaggccattcgtttcaaatgaccggaatccttagacctcacaccaacaagccaccatgtgctggggatggtatcgcctgactaaatgtagccttgcagtccattcttgtaagtattagagagaaaaagagagagagcgtcgtctctggaaagtgtgaagtcagggaattccctactaggaagcaattccataaagcaccccaaaatgacttgatgcaaacaccacac

SEQ ID NO: 811515 - DNA, 628 bp, Homo sapiens
aaactcccccaaaccagagacttgttttctacctgggggctaacttagcaraaggccaaatcactaagtcttacaacttgggtcacattccatttcatcaaaaaataacccacactgagcttctttctggttctgttccacaatagaaccgaacacagtgttttttggtttcttgataacccctggtaccagtgcttgtgtttttcagtacacaactgcaggcttttcgtgttccgtcttaattgtttcttacatgccatgattgtgaggttgggaccatgtgctttacagggtactaacttcaataatcctaacagtctgaactccagcaacaagcaccactaaagacccaaatgtctggcaggtcgagctaggagctttctttttatctttcttataagaatgtgtgtggtttataggctccaggtgacagggaattacaaatagtccatccttcctcaaagaaacttctatgggggaagaggagaactgccacttggcagagagtaggggagaggatcatgagctctacttttaaaaaaacttaatgtaaagaagtaatattgtcagagtagtaactcctagtgatacactaatgccaggtaaggcagtgagatctaaagataga

SEQ ID NO: 811516 - DNA, 600 bp, Homo sapiens
caggagagcctcgggacttgactgtgtgtccagtccccactacaaagaggtgggagaagtgctgacagtttggggccctcctcaaaggcacctactggcacatgtgtgcagccacccacactgctacggtgtgaatgctagtgttccccaaattcacattaaaacctaatctccaatgtgacagtattaagaggtagggcctttaggaggtgattagtgcccttatatgatcagtgtccttatcaaagcggctcttgagggctggtttaccccttccaccatgagaggacacacagcgccatctatcaatagccctcaccagacacggaatctgctggcgcctcgatcttggacttcccagcctccagcactgtgaacagtatgtttctgttgtttataaaggactccatctaaggtatttggtggcagagcgtgaatgaactaagacacacacagacacacacacaagcacacccasgcacagggacccacagctgccccacaggcacacgcaccagcaggcacactcgtccacacccatatggctgctgcttatcccacctagaagtcccgacaggccctttggggggtgggggacat

SEQ ID NO: 811517 - DNA, 480 bp, Homo sapiens
aagctggtggcaggaggccctcacatccaccctgtccagcccaggggctgtgcctacccagggtgagaaggaccaggagcacacagtgtccagggccagtccatccctgtcacccccacccgccaggcccaccagaacactctgctgtcctatgtgggagaggatgtccccaagctaaacccaggccactcacctgtcttgagggaagatcagcatgtcccgacacccaccctgcaggctctggctcctgcagggaaaccagagggcatgagtgaggtcaatccagctgggtaggtccctgccggataaaggtacacaagcccagaccgtcctctaagcaggaccttgtcatgcctgatctgaaggtcatcccgtggtgctcctgactcataaccacacactcatgtgtaccttcttgcycccacatgtccaggactgtaggtgacactgggctgccacggttccttgtcagcatgtcta

SEQ ID NO: 811518 - DNA, 592 bp, Homo sapiens
caggagagcctcgggacttgactgtgtgtccagtccccactacaaagaggtgggagaagtgctgacagtttggggccctcctcaaaggcacctactggcacatgtgtgcagccacccacactgctacggtgtgaatgctagtgttccccaaattcacattaaaacctaatctccaatgtgacagtattaagaggtagggcctttaggaggtgattagtgcccttatatgatcagtgtccttatcaaagcggctcttgagggctggtttaccccttccaccatgagaggacacacagcgccatctatcaatagccctcaccagacacggaatctgctggcgcctcgatcttggacttcccagcctccagcactgtgaacagtatgtttctgttgtttataaaggactccatctaaggtatttggtggcagagcgtgaatgaactaagacacacacagacacacacacaagcacacccasgcacagggacccacagctgccccacaggcacacgcaccagcaggcacactcgtccacacccatatggctgctgcttatcccacctagaagtcccgacaggccctttggggggtg

SEQ ID NO: 811519 - DNA, 488 bp, Homo sapiens
acaaacccaagctggtggcaggaggccctcacatccaccctgtccagcccaggggctgtgcctacccagggtgagaaggaccaggagcacacagtgtccagggccagtccatccctgtcacccccacccgccaggcccaccagaacactctgctgtcctatgtgggagaggatgtccccaagctaaacccaggccactcacctgtcttgagggaagatcagcatgtcccgacacccaccctgcaggctctggctcctgcagggaaaccagagggcatgagtgaggtcaatccagctgggtaggtccctgccggataaaggtacacaagcccagaccgtcctctaagcaggaccttgtcatgcctgatctgaaggtcatcccgtggtgctcctgactcataaccacacactcatgtgtaccttcttgcycccacatgtccaggactgtaggtgacactgggctgccacggttccttgtcagcatgtcta

SEQ ID NO: 811520 - DNA, 601 bp, Homo sapiens
ttgtatttaaaagcggcccctcctctcctgtggccacagaacacaggcgtgcttggaytcttgacaagcagacctgctcctgcagaggagacagccacatttggaattgggcaccgagaagacctgagaaaaacccactctctcttttttttttttttgagacggagtcttgctctgtcacccaggctggagtgcagtggcacgatctcggctcactgcaacctccgcctcccaagttcaagcaattctcctgccccagcctcctgattagctgggattacaggcgtgtgccaccatgcccagctaatttttgtgtttttagtagagacggggtttcaccatgttggtcaggctggtcttgaactcctgacgtggtgatccacctgcctcggcctcccaaagtgctgggattacaggcgtgagccaccacgcctggccgaaaaacccactctcataacagaagtgcagactcattgctagattcagtgcccttgagtgtgccagaggtcctctgtgtttgagacaatcctgtgtgtgccaggaggctccgtgtgcaccaggggctctcagaatcccgcttacccagctggagaccatgcct

SEQ ID NO: 811521 - DNA, 473 bp, Homo sapiens
tggttcggtttatttgcatttatttatcctacaagcattttttttggacatctattatatgcctagtctagtagggaaaccaatccaagggagcagaaagctgtggtactaattttgcagtgtgagaggatgagggattattatgcaaggtcctccccactttgggccaaatggctcgccacatcagccaggaccctcacacaggaccactggaccctcacaggcacctactttctgctgaagcaattgctcataaagcctttcatctgaaaccagtaagtggctcgtgtcctagagcggggcatggggtaggctctggagctagagcaactgagctcaaatactgatttcccttagataatctgtagaaaaggctcagcccagtgcctggcacaaagttaaggagtcaagaagatgattgttatcacgcatggcacaagtctaytttgaattgagagtgggatgaagaatat

SEQ ID NO: 811522 - DNA, 580 bp, Homo sapiens
tgcaaataagcatagaggtggactgtcagtgtcctatgtccctgagaaccttgagtaaaccacaagctgcccttaggacctggctgtgagactgcaggacaagggcctggacaatggaggagaaacagatacctggaactgtcaccaaaggcccctacaactcctctggagggcagcctcaggatgggaataactttgggctctcctttctttatcataacagtcaccgtggtgatagtggccaccaccattctctgcaggccaccaggcactggtccacagagctctgggagatgagcagcacacggctgtctaccctgccatgcgggtagattcacagaagccatgtgtctttggcctgactctgtcttcctggctagagcccattggtccagacaggaacatttgaccccaggtgagctttaaatgttgaacagagagttttggagccaagtcacatcaagggtggggtggtctggarggtgccaaaaacccctgctgattacaacaattttccttgttgctcaaactcattagagatggtttttgtcatttgaagctaaaggatcctttaaacctc

SEQ ID NO: 811523 - DNA, 550 bp, Homo sapiens
ggaaggaccattaggaagtgttcctgaaaaaaaaagttttaagaataagtcaaccaccactaggaaacaattaaccaaattcagaatatgggaaattctatataacaaatgaactactttagtcaataaacaaatggcatttaaaaaaagaaaggggtctttctttaaaaattaaaagatactttaaaaaactgaaacaagaccaaaaatatgcaatgtatagactctgtgtggatactgatttaagcgaattaacaataaaaatttttaagcacctggcaaactttgaacgtggagtagacataagatattaagaaacattgttaggtatgataatgacattgtagtttatgtttaaagtcattgagatttataataaagtatccagggatgaaataaaaaaaaaaaaaaaacaatgaatacacagaaactgaaattaaaagcataatgtcatttacaactacttcgaagataatgaaayacttaggtatatattaaacaaaacatgtacagaatctgtatatgaaaaattacaaaatcctgatgaaag

SEQ ID NO: 811524 - DNA, 613 bp, Homo sapiens
agaagcatgatacagaaaattgatacagaaaaaatttatgttggactccaccaaaattgaaagtttttgctttgtgaaagacyttgtttaaaggataaatagacaagatacatactgtctttgcacataatgtattcaagaaaggactgttgtctataatatataaaagaatttcaaaactctacagtaaaaaacaaatacgcaatccacttagaaaaggaacaaaagacattattagacatttcatcaaagaagatatatagatagcaaatgagcacatgaaaagatgttcaccatcattagccattggggaaatgcaaattaaaaccacagtgagatatcaccaaacatccatcatcacaacggctacaattaaaaaacagtgacaaaatataaagttcatacagaccaacaccagtgctggcaaggagctggagaaactagctatctcgtgcattgctggtggaaatgtaaaacagtacagccaccctagaaaacaatgtagcagtttcttataaaattaagcatgcaaccaccacacaacctagcaattgcactcttagacatttatcccagagaaatgaaaatgtgttcacacggaaacctgtacata

SEQ ID NO: 811525 - DNA, 440 bp, Homo sapiens
gcagttcatgagcacttaagtttttcaggaatagtaaataggtggttcgctttctcagcatgtctgagaacatctgtcctttgtagccacatgagttagctacaatgttttttactcaaaaatctatagatgcttttctgttgttttcagattttcatttctgcaaaggagaactctgcagccaattttattttttattagttattaggtatcatggacctagaatattacataaatttatatggtattatgtgaatcttataatttctgaaagatcacaggctatatgtctaagtattaaatgttttcatcaagttaacctaggactagtgagygctttcaatgtacacaactgggaaaatgacttgtagaatttgtgattgtacttttctaccagttgtgtctgcagtgttctttctgcaggcacaactgctgaaact

SEQ ID NO: 811526 - DNA, 621 bp, Homo sapiens
aggctggcattaggaaggcgtyttctgatgtccactctctgcgggttgcttgctccgtcatcccttctgggcagcctcagcccttctcccctccccaccgcagcactcgtctctcaagaaggtgtcacagaggagcccagtggccaagctcagacatcctttaccacctagaacagaatgttcctttgtgaatagggacaggcaagctggacgccctgacctccgcagcctggttaatccagactttctctccctgttttccaaatagatttgaaagtgaccttaaggccatgaccggccgagctgtgagctggtactggaaggtgatgtgggctggcgtaagcccactgctgattgtcagcctctttgtcttctacctgagcgactacatcctcacggggaccctgaagtatcaagcctgggacgcctcccaggtatctactgtctccgtagggctggcgctgggcccccatggccactgaaaagcatgggccattcattttccgaaaccaggggactatttccatggtgtgggtaggttatttgtcacgacatggaaatatcactgaggtattttagaaatagtccagcacggaggagctgggctttgagcttttaggt

SEQ ID NO: 811527 - DNA, 486 bp, Homo sapiens
ttatttttcttcctgtcacatctaatgacaatctaatgtcacatccactttacccattaaatttaatagggaaacatcaagtgttcggtgaactcaaaaacttaagatgttgtaaaagaaaggtcaacattctaactaagaaacaaatgtgtggagcagacttaccagccataagcaaacagataatgcacattgaaaaggcaacaaccatgataataggcaactggaaaagacaatagaaagagatcatcatttaagaatgctaatcaatggcagcaaaatcagttgtgcatgcattgcttgggaaaagaataaaactcatctgtcagctaatacacagctaatatcttttgtcaacaaaacattattatttatgggttcaatcacaactgcccyagactttagatgggggatgtggtaagatcggaagaagcatgcttttgctccaagccaaagggtgctaaatggaaggaggatgcccagatg

SEQ ID NO: 811528 - DNA, 543 bp, Homo sapiens
ggctggagttgcatactggtaggactacagttttgtggtcttggagatggctccattcccgctgcttcactaggcactgccctactgcagactatgtggtggctccaatcccacatttccgcttggcgttgccctagtggggactctctgcagtaccagctttaaataaatagcattaggaactggaggggcaaagaaagctacataggccaatacaaacaggttctgaagagtcatggtatttgaataacaatgttgttccccttttctcatgtagccagaaactagtgagaaatagcacatttgacaataacataaagagatagttcctggacccagacagaaagcgatggtgcctgaacactgtaaagaatattcacatgcacttattagacaataaacaaatatctaagtacttttctctactaattattctaaatctttgttgttaaatcactattcytcacgagtccatgaattttataacacagttttgtttgtttgtttgttttttgatacggaatctcgctctgtcgcccaggc

SEQ ID NO: 811529 - DNA, 586 bp, Homo sapiens
tgaacctaaaattgctctaaaaaaygaaatatttacaaaatgctgtacctccttactgagacggacacagggtaaaaggaagccaagtctcctcatggccctctccatacctatcaagtaaacagggttagatcccagcaggctcttccaaggctaattaaaagacaatgctgagcaaaaggataatacataagaaacattgtaggagtttgctagtttggagcagagatttggagattagatgtgagaatgaattctgagagtgctttaccaaagaaagtacatatttatttatcataatgattacctctaccagacagacttgtttcagtctgctggctggatctataagtgtgattttaatttctttctctgctgggtgactaaaatctggttttaaagtgatccacctaaacaatgttgatttatcagaattcccttagtgtgtggtctatgaaccctgaagggattgtgggtgtatgtaacacatgagttaagtcaataaataagaacagactggttatgaagacaagatcattattgcacatggctcagttggtttcaaagggaaaggaccatatctaca

SEQ ID NO: 811530 - DNA, 545 bp, Homo sapiens
ctgatgagagctacttccatttaataaaaccttgcacttattctccatgcccacgtgtgatccgattcttctcgtaaaccaaggcaagatccctgggatacagaaagtcctctgtctttgtgataaggcaggggtctaatggagctaacacaagctgcctatgggtggctgaactaagagcaccctgtaacacacgcccactggggcttcagttgtaaacattcactcctagacactgccttaaggttggagctccacaatctgctagtttgtatgctccccctctgctcccgtacaggtttgagcggcggggaactgaagcagcgagccacacgccccgtcgcatgccttgtgagagggacaagggaacttttccggtttcgctggtaccttgaaaactcatccttggcacccacttctttatattgtggtgaaacagcctgaactgctcatgaattaaagttcataaaatagcacagagcggaaaaacttttctacccacaagcmtgccaagaataaaaggcatacagaacctggaacaaaag

SEQ ID NO: 811531 - DNA, 496 bp, Homo sapiens
atagcagcatgacaacagactaaaacacccatcttttrtagtattcttatatattttacttctctgtacattataactgccagcttaaaatgatattatttttgctttaaatgatcacttgttttttaaggaaattaactaaaaagcaaggcttttatattcacatacatattcaccattctgatgctcttaattccttcttgtagatctgagtttccagctgtcacttcccttcagactgaagttttttgtttttctttagggtttggttttggttttggtttggttggttggcttgcagtgcaggtgcaagtctgctggagaagtatttttcagctatcatttaatagaaaatgtctttatttcactcttattttcgaaggacatttccactggatttaaaattctgggttaggagttacaagagaaagatggcagaataggaagtattagccctgttcccctgcagaaacgctgattaacaattatatatgga

SEQ ID NO: 811532 - DNA, 496 bp, Homo sapiens
atagcagcatgacaacagactaaaacacccatcttttgtagtattcttatatattttacttctctgtacattataactgccagcttaaaatgatattatttttgctttaaatgatcacttgttttttaaggaaattaactaaaaagcaaggcttttatattcacatacatattcaccattctgatgctcttaattccttcttgtagatctgagtttccagctgtcacttcccttcagactgaagttttttgtttttctttagggtttggttttggttttggtttggttggttggcttgcagtgcaggtgcaagtctgctggagaagtatttttcagctatcatttaatagaaaatgtctttatttcactcttattttygaaggacatttccactggatttaaaattctgggttaggagttacaagagaaagatggcagaataggaagtattagccctgttcccctgcagaaacgctgattaacaattatatatgga

SEQ ID NO: 811533 - DNA, 533 bp, Homo sapiens
acacccttctaaataacccatgagttaaggaatgaatcacaaaagaaattagaaaatattttgaactaaacgataatgataaggcaatatgtcataatttgtgggatgcaactagagaggcacttaccaaaaaagtttacagcaggataaatgattatactgttaggtaagaaaaaataaatgattatactatgttagattaaattcttttttttttttttttttgagacagagttttgctcttgttgcctaggctggagtgcaatggtgtgatctcggctcaccgcaacctccacctcctgggttcaagtgattctcctgcctcagcctcccgagtaactgggattataggcatgcgccaccacgtccagctaattttgtatttttagtagagatggggtttctgcatgttggtcaggctggtctcaaactcctgacctcaggtgatccacccgcctctgcctcccraagtgctgggattacaggtgtgagccaccgtttctggccaaaaacaatgttttaaataaagtgac

SEQ ID NO: 811534 - DNA, 600 bp, Homo sapiens
gttggtaaactacagtaaaattaggccacgcccatttatcacataatgtctatggctgctttagcrctacaatagcagaattgcagagttgcagcagagaccgcgcggcctgtaaagtctaaaatatttagttggccaacctctgctctatagagtcaggggagaatattacaataatccaggagtgagatgactgtgacttggaccagagtggaacactggaggtggtataaaatgctcagattatgaacatattttgaaggtagagccaacaggattttctgataggttagacatggaataacagagaaaaagatggtgccaggatttttggtttgagcaacaggaagcttggaagtactgttactatggagtggagcatgttgggaggggaaaatcaatggttccattttgagatattaaagtttgaatatgtcatgagaaccactcctttaatcattttttgaggctagtataacattgatatccaaaaccaataagaatgctttaagaaagtcaaactacaggctaatctcattcatgaacatagatgaaaaaaccccaaacaaaccatgaccaaaccaaatttagcaatctatg

SEQ ID NO: 811535 - DNA, 600 bp, Homo sapiens
gttggtaaactacagtaaaattaggccacgcccatttatcacataatgtctatggctgctttagcactacaatagcagaattgcagagttgcagcagagaccgcgcggcctgtaaagtctaaaatatttagttggccaacctctgctctatagagtcaggggagaatattacaataatccaggagtgagatgactgtgacttggaccagagtggaacactggaggtggtataaaatgctcagattatgaacatattttgaaggtagagccaacaggattttctgataggttagacatggaataacagagaaaaagatggtgccaggatttttggtttgagcaacaggaagcttggaagtactgttactatggagtggagcatgttgggaggggaaaatcaatggttccattttgagatattaaagtttgaatatgtcatgagaaccactcctttaatcattttttgaggctagtataacattgatatccaaaaccaataagaaygctttaagaaagtcaaactacaggctaatctcattcatgaacatagatgaaaaaaccccaaacaaaccatgaccaaaccaaatttagcaatctatg

SEQ ID NO: 811536 - DNA, 614 bp, Homo sapiens
gaatggaataaagaaactgtggcatatacacacaatggaatactatccagccttaaaaaagaaggaaattctatcatttccttcatgtcgttcatgtcatgaccacatggatgaacctggaggaygttgtgttaagtgcaacaggccagatacagaaagacaaacttggcatgatctcccttaaatgtaaaatctaaaaatgctgaactcataaaagtagagatgaaaaaggaatcagcagccaaaagtgctttctcaacatccaccaatatcttaactgcttagctcttcataggattagtgaccttcatttcaagcatgaaaggaaaataccaagtattggttggcttactgatggtaattttgtttgaaaaggaagcatactaattttaaagggctgaagtataattcccaggcaccatgaaaacaattctcacaaaaattttaacaaatgtggtattttggtagttttgtccaatataagaaatacaatgttcacataagccaattatttgagaatatgtttcagtatatcacactttttaaaatatgtttttacaaataaaataaatgtacatctgtgacatggataaaggccaagcattatgattcat

SEQ ID NO: 811537 - DNA, 614 bp, Homo sapiens
gaatggaataaagaaactgtggcatatacacacaatggaatactatccagccttaaaaaagaaggaaattctatcatttccttcatgtcgttcatgtcatgaccacatggatgaacctggaggatgttgtgttaagtgcaacaggccagatacagaaagacaaacttggcatgatctcccttaaatgtaaaatctaaaaatgctgaactcataaaagtagagatgaaaaaggaatcagcagccaaaagtgctttctcaacatccaccaatatcttaactgcttagctcttcataggattagtgaccttcatttcaagcatgaaaggaaaataccaagtattggttggcttactgatggtaattttgtttgaaaaggaagcatactaattttaaagggctgaagtataattcccaggcaccatgaaaacaattctcacaaaaattttaacaaatgtggtattttggtagttttgtccaatataagaaatacaatgttcacataagccaattatttgagaatatgtttcagtatatcacactttttaaaatatgtttttacaaataaaataaatgtacatctgtgacwtggataaaggccaagcattatgattcat

SEQ ID NO: 811538 - DNA, 559 bp, Homo sapiens
agagggacgacagggctgtgaggggcaagtgggcacaagagasggtggtaccaggagtgtccaacagaagaggccgggagctgttgcagctgccatggggccagagctgcagaagaagattttaaggggacttttgggatttctcctgtgtgctgttcaatgtaatgccctcctctgtcttcccacaaagcttcaccaaaacttacattgctgctctgatatttttagatgctatgctaggtgagagacagggctgggtgacaatgtgacaagtgagagatatgctatctgcttctcctggtagctgatgagttcctcgagggcaggaaccacgttactttctcttgatacttgctcttagcaacttaggacatggcaggcactttgcagaatggatgaatgaatgaatgactggcaaggagagaaggagagcaaaagagacagggtctctagctctgggaactcacaacccagccatgaacagagaaccccaggcaggtcaactggcagtggggattccaatgaagaatggcctcagccgacagagctgacagggctt

SEQ ID NO: 811539 - DNA, 597 bp, Homo sapiens
cctccacaagtcacatcagttctctggaccttggtgtccagttttgcaaawtaagtggaaaccacctctcatctcacaaagcagttgtgtggattgaaatgacactgaaaaccataaagcacccatgacatacaaagcattatttggaactgttaccagtgaagaccccagaatttaaatcccagctacactttatttccaaggcatatgtctccagaaagctcaaggtgccaaacaattaacttctaaacaacagtcatctcctacaaacatcccaatagcatcttataaaaataaattgtttaaagcacagtaattctgtgtctggaggactgagttcccattctttccccaggagaacagtaatgtcaagaatcatcaagggctaggaacagaggctccataactataaacctagcactttgggaggctgaggcaggaggatcatctgaggccaggagttcaagaccagtctggtcttgagactctgtctctattaaaattaaaaaaaaaaaaaaaatcagctaggcgcagtggcttacaccagtaatctcaggccaaggcaagcggatcgcttgagctaaggagctcaagacc

SEQ ID NO: 811540 - DNA, 597 bp, Homo sapiens
cctccacaagtcacatcagttctctggaccttggtgtccagttttgcaaattaagtggaaaccacctctcatctcacaaagcagttgtgtggattgaaatgacactgaaaaccataaagcacccawgacatacaaagcattatttggaactgttaccagtgaagaccccagaatttaaatcccagctacactttatttccaaggcatatgtctccagaaagctcaaggtgccaaacaattaacttctaaacaacagtcatctcctacaaacatcccaatagcatcttataaaaataaattgtttaaagcacagtaattctgtgtctggaggactgagttcccattctttccccaggagaacagtaatgtcaagaatcatcaagggctaggaacagaggctccataactataaacctagcactttgggaggctgaggcaggaggatcatctgaggccaggagttcaagaccagtctggtcttgagactctgtctctattaaaattaaaaaaaaaaaaaaaatcagctaggcgcagtggcttacaccagtaatctcaggccaaggcaagcggatcgcttgagctaaggagctcaagacc

SEQ ID NO: 811541 - DNA, 615 bp, Homo sapiens
ttttcagaaagcctaaagacatgcttctgttttaagtttctgrtattaaaaattatccctgtccttgcaagctctataaagctgtgaattcaattctattgcagaataaccttgttaactgcttgagagagttgggtcagaatcctcacccattccactattaactttcgccctcaccatgacaacttagtgctggttaaaagggctcaaaagacttgttaccagaaaattaagctaatgaattcttcattttccaggttgaagtagttcctaatcagtcctctcaactatgtccactcaatcataatattgttttaaatagattgtctgtctcaggagcaaacgggagttcaaatgaactatattcctgttcagatcattaataacaataaatccactgcaatatcagcaacttgatatagattcttttagtggagaagcacctcacttttgacgaaacacatatcagcaaaagatttgttcagaggtagccaaaaaaccaatatcatcaacattgcattgctcaatgtgtttattttatatatacaccctctctatcttacctatctcatttagtgccttaattttaagcatggcaaatatattcttagcatc

SEQ ID NO: 811542 - DNA, 615 bp, Homo sapiens
ttttcagaaagcctaaagacatgcttctgttttaagtttctggtattaaaaattatccctgtccttgcaagctctataaagctgtgaattcaattctattgcagaataaccttgttaactgcttgagagagttgggtcagaatcctcacccattccactattaactttcgccctcaccatgacaacttagtgctggttaaaagggctcaaaagacttgttaccagaaaattaagctaatgaattcttcattttccaggttgaagtagttcctaatcagtcctctcaactatgtccactcaatcataatattgttttaaatagattgtctgtctcaggagcaaacgggagttcaaatgaactatattcctgttcagatcattaataacaataaatccactgcaatatcagcaacttgatatagattcttttagtggagaagcacctcacttttgacgaaacacatatcagcaaaagatttgttcagaggtagccaaaaarccaatatcatcaacattgcattgctcaatgtgtttattttatatatacaccctctctatcttacctatctcatttagtgccttaattttaagcatggcaaatatattcttagcatc

SEQ ID NO: 811543 - DNA, 617 bp, Homo sapiens
attttttatgtaaggttgtgatgacctttatacaaggtwatgatttttgcagagtcttctgtgacgttttggttttcaagcatttgtgcatgaagaccctctcttcatggccttccctggctctgtttgtcagggtttgtaacacaagtaactccattttgatgctgataactttcacaatataaagctaactttttattttgtttggtacatagttcgagattcatgttacatagtttgtctactgaatgaaattcagttatagctgatatgctacttaaagatgtttatcggctcaggacaggattgtccatagttataattcatcccctagataaaattttagaagagttgaagattccaaccaaccattatcttcacatttcctcccttactctgtccttccacaaatggtttcaatgcatataagacctattaatttatacattttttacattcagaaacaatattttggaaagtttaaatgctctttgatgtactgataacagtcaacatattactttataaaataggtatggaattttaaaaatgactaaagactttaggtagaacaaggaagctctatgagagaagtcttaggtttagtaaagggatct

SEQ ID NO: 811544 - DNA, 641 bp, Homo sapiens
cctatagcaagaaatgcacttgtatgacatagacctgtacacacacacacacacacacacacacacacacacaagcaaccacaactgaaacgaaagattcacaagcartactcattctttctgcatgagatgtactttactttctattactttgtttaaaaaatgttggctttgcctttatacaatacactgatttcaagtcacattcagaaaacaataatctggcccaaaccatttactctatagattggaagaccaaaatccagagagagcagcaacactgcctagctcatactaaattcaagtaaccctgtcttgaaattgagtgtgatagttaacatactgtctttatccccatcaatggtcctatacaataagaagaaactacagtttagtcaaagagaaaaaatatatacaacttccttcttggagctgaatccaggtgcttcattgggtagattctctaacctctttaagccttactgtacttattttttatagagggatttaaaccctcatcgtaacaagcctcaccatagccctggtaggtggtcattgagacaacaggaatgaaatgcctaacataattcctggctcacgttcttctattttacttataaaagaagtcaatgaaggaaaat

SEQ ID NO: 811545 - DNA, 621 bp, Homo sapiens
cttacagaaaacacagttctgtttctcacacacacaggtttttcattgtattccatccttgtttataggctatttttagcatccagcattattcctggttagaagaatgactttggttattatccataattaattaaggccatatggctcttgaaatattctacttatgaatataataataattgcaataagatcattactgttaacatctttcaagtcatgatcacattcagttctaaccctgtgaagtacacaaggcaggaatttacaacccattctccagatgagatggcgatgaaattatacatatatcttaggattggctttcagaggcaataacttgaaacagggccacaaacacatgtaagagggacttgtcaatgtgtcccaggatgggactgatcagctccaaaaaccagttttcttggttcccaaaccgtggctttttctatcaaggagatttgaaacgcaaaaatactactaataatgtgtatatagcatttttctaagtcctttttgtgtattatctcacttgattttccaaacaatgctatgagataggctgtgttattagmactattgtgtagatgagaaaatgagaacaagaagaggtgaagtagc

SEQ ID NO: 811546 - DNA, 531 bp, Homo sapiens
tgtttcttctctctctctatctctctttgctacaatttgtttattgaagaaaatgggttatttgtccacagtcctttctttacaggaataataaaatttatattttgcataattatttaattgcattatttcacaatacacacacaatagtctctgaatgacagcatcaactttgccataaacaataggaagatttttgaaagtttacatatttgagggacagttctttttgtccttagtgtgtatcctacccaccagggataaatagtcaaattattgtgacttacagtcattcggaattatttttctttttgtggatttgacacaaactatatatacagtgaaattcatctgtttcattttactttttattagtaataatagatttttaaatttaatttgttttaaacatatgtaaatttttgrcatagttcccaagacaatcaaaaaacaaagccaaatcttaaaaaatagaccccaaataggtgactattttcttttttattttagggcttattctttaattatttg

SEQ ID NO: 811547 - DNA, 425 bp, Homo sapiens
aaggatttccatctaccactgtccttcaggatgccccaggaaagagctgtggtgctgcagctgtccacattcagtggtgcctgcacatgatgcagaaccatcggtaaacctgttccaagccttctctttctctgtcaactgattgtaggggaccccccatgaggtcataagtccaaaatggaaaagagaaagcagtgtagcagaactggcgaccatggcatttgggacacttcatgtaaattacttgtgccttcacgacctgctcagaccccatcacgtatacaccacttccattggataatggagtrttgctgtgcacgcctccatttatagcttgataggccagctaacactcaattccttgtggtcaactcaggtcccatggtgacttgctggctcatggttcagtctctactaaggcctgg

SEQ ID NO: 811548 - DNA, 608 bp, Homo sapiens
ccatctctgcagactcacctgctccacagactaaatgggagatgaaagaagatgaaggagagaggaggcatcctcaataacttctctgttccttctgaaaaatttcctrtctacatcccagagacttgaaatgcacagaaatctagggaagaggggtctaaagcagaacagttgactagggccatttgatgcagccattttaacgtgtaaaaatggccacattaactttttttggctttgtgttttcattttcttagaatttatttttaggtttgcatccagaaaaatttactctttgtagtgtacagttctgtgggttttttacaaatgcacaatatcatgaatccaccaccacaatcatgatacagaatactgtcatcagtctcccaaattctcttgtagcctgttcccctaagcatctccctgacagtcactaatattgtacttatccctatagtgttcctttttccagaaagtcatataagtggaaacatacagtataaagccttttgggtcaggtttctttcacttagtaaaatgcatttgagatttatctatgatacggctgcaggtatcagtagtttgttccttcttattgctgagtagtt

SEQ ID NO: 811549 - DNA, 608 bp, Homo sapiens
ccatctctgcagactcacctgctccacagactaaatgggagatgaaagaagatgaaggagagaggaggcatcctcaataacttctctgttccttctgaaaaatttcctgtctacatcccagagacwtgaaatgcacagaaatctagggaagaggggtctaaagcagaacagttgactagggccatttgatgcagccattttaacgtgtaaaaatggccacattaactttttttggctttgtgttttcattttcttagaatttatttttaggtttgcatccagaaaaatttactctttgtagtgtacagttctgtgggttttttacaaatgcacaatatcatgaatccaccaccacaatcatgatacagaatactgtcatcagtctcccaaattctcttgtagcctgttcccctaagcatctccctgacagtcactaatattgtacttatccctatagtgttcctttttccagaaagtcatataagtggaaacatacagtataaagccttttgggtcaggtttctttcacttagtaaaatgcatttgagatttatctatgatacggctgcaggtatcagtagtttgttccttcttattgctgagtagtt

SEQ ID NO: 811550 - DNA, 599 bp, Homo sapiens
ctggtgttggctgatgttgtcaaggaagtacttgtcaaatttccttcttggctgagcagatggtaatgtaaagggagggggagctggtatttgtggcgtgatctccgagtaccacacactttacaaatgaattctctcatcaaatctctcagcaatatacgaggtaggaaatttcatccctatagtgcaggaaggaaactgaggcaaagaaagcttagacagcttctgcaaggtccacagccagtaaagctttgggtaggcaagacataactcagaccctgtttcctttgcagagacttcactcttcctatgatacaaggataaacagcaagaaacagtctattttatttgcttagcaatttatagttcttcctgcaacttctgggatttgggtccatcaattacactttctctctctctcatattttcaaccttactgtcttccttggctctttcacctcaacataagagtgtacttaastatcttgtgcccttgggatatgtgcttgctcaaccctgctgcttcttccagtcaccaccttttctcttccttgccctactctactcccttacctcccagactgtccacacctattgga

SEQ ID NO: 811551 - DNA, 619 bp, Homo sapiens
taagcgttgtgttatgtaatatcccgagccgtccttatggtttgtactttatacgccctgattctgttttagcgcctaccactccacttggtaattattcattaaattctggtgtccctctgtctgcttgtgaagccagagcatgtatcctaatgctgtatttatagcaccaagctcaaagtattgaagcaagcaatgttggtggaatgaataaagaatagttgccattcttttctgaaatcttgaaatattattaaccagctctcctctcatttttttttaaattgtgagtcttccttctgtctgtcactcacaatgactcagacaacaatgacatgctccatttatttctagcattcatgcctcaaagttgccaggtagactcagcattggaataatgatggggaattctctctctctatgttagtgttaataatattcatggcaaaaaaattagaattttcccatgaggagaaacctctttcctttttctgtgagtataatgaaygctcagttatggatatactagtggctccgtagcgatacattgcaaaattctttttctgcctttcatgatataatttaaactctttactgtagcatactatgtcccttccga

SEQ ID NO: 811552 - DNA, 673 bp, Homo sapiens
cttttgagcctattgacttagttagattaattctgtagcatgtcctcacttctatgttctagattatttctcttactttgtwgcccatccccgacttttggtgttcttggaaatgagaaaaaggggcagtaaaaagagccctttaggcattaccatgactgctctatcttcctctgagtgatatcttgcttctctctatgatttttttggggatagtcactttttttctttcttttttttttttttttttcttatatagagtctcacactgtcacccaggctggagtgcagtggcgtgatctcggctcactgcaacctccacctcctggcttcaagtgattctcctgcctcagccacctgagtaactgggactacaggtgcgtgccaccacactcagctaatgtttttgtatttttagtagagacagggtttcacaattttggccaggatagtctcgatttcttgacctcgtgatccacccgcctcgggctcccaaagttctgggattacaggcgtgagccaccagcgcctggcccacttttgttttttgttatataggcacagtatttccaacaagccacacatattattgtttctgtacttgaacccttatgccttaatcccaattacagtagccttagctacctgtgacaccttgttaggttatatctac

SEQ ID NO: 811553 - DNA, 673 bp, Homo sapiens
cttttgagcctattgacttagttagattaattctgtagcatgtcctcacttctatgttctagattatttctcttactttgtagcccatccycgacttttggtgttcttggaaatgagaaaaaggggcagtaaaaagagccctttaggcattaccatgactgctctatcttcctctgagtgatatcttgcttctctctatgatttttttggggatagtcactttttttctttcttttttttttttttttttcttatatagagtctcacactgtcacccaggctggagtgcagtggcgtgatctcggctcactgcaacctccacctcctggcttcaagtgattctcctgcctcagccacctgagtaactgggactacaggtgcgtgccaccacactcagctaatgtttttgtatttttagtagagacagggtttcacaattttggccaggatagtctcgatttcttgacctcgtgatccacccgcctcgggctcccaaagttctgggattacaggcgtgagccaccagcgcctggcccacttttgttttttgttatataggcacagtatttccaacaagccacacatattattgtttctgtacttgaacccttatgccttaatcccaattacagtagccttagctacctgtgacaccttgttaggttatatctac

SEQ ID NO: 811554 - DNA, 612 bp, Homo sapiens
ttttcctctacttctccactgaggatcatatgaaagtcttttgagcctattgacttagttagattaattctgtagcatgtcctcacttctatgttctagattatttctcttactttgtagcccatccccgacttttggtgttcttggaaatgagaaaaaggggcagtaaaaagagccctttaggcattaccatgactgctctatcttcctctgagtgatatcttgcttctctctatgatttttttggggatagtcactttttttctttcttttttttttttttttttcttatatagagtctcacactgtcacccaggctggagtgcagtggcgtgatctcggctcactgcaacctccacctcctggcttcaagtgattctcctgcctcagccacctgagtaactgggactacaggtgcgtgccaccacactcagctaatgtttttgtatttttagtagagacagggtttcacaattttggccaggatagtctcgatttcttgacctcgtgatccacccgcctcgggctcccaaagttctgggattacaggcgtgarccaccagcgcctggcccacttttgttttttgttatataggcacagtatttccaaca

SEQ ID NO: 811555 - DNA, 628 bp, Homo sapiens
ggaaacatgaaaattgtgtgaaaaaattctttaaraatatatttatgtgaataaacaagattgtacgaaaatactagaaatcctcagggctcaaaatgaagtagaattctcactggtgagtaataaattgtcagtgaagcttgtagatgccccagaagtgttgtataatccctgctcaccttgagccttctttacaatacagcacatcaaagggacataaggcaagaccctataggcttgtggaaggggagcagttggcacagacaggctcagaataggaccccgtaaacccaggatattatggagctccattctcagtgaacatccagacaacaaaaaatctaaccttgatgccaatatgagttatctttgggaataaatggaagagaaagcagaataatttttctacagtcctcataaagaaaaaatttcaaactcttggaaaaaaattatgccaatacaacctcttaaataagcactaacaagcataaaacggtaagtaaaagacggataaattcaattacatggaatattaaaatttacttcatcaaaattagctattaaaaatagtggagaaagaaaaagaaagcttggaacagttaccacacttacaacctctataaatgat

SEQ ID NO: 811556 - DNA, 608 bp, Homo sapiens
tactgcctagattttcttctagggtttttatgattttgaattttatggagttaatttttgtataaggtgtaaggaaggggtctaataccattagacccagcaatcccattactgtrtatatacccataggtatatgaatcattcttctgtaagacacatgcacatgtatgtttactgcagcactatttacaatagcaaagacatggaaccaacctaaatgcccatcaatgagactggatgaagaaaacgtggtacctatgcaccatcagatactatgtagccataaaaaggaatgagatcatgtcccatgcagggaaatggatgaagctggaagccatcatcctcagaaaactaatacaggaacaagaaaccaaacactgcatattctcactcataagtgggagttgaacaatgagaacacatggacacagggagaggaacaacacataccagggcctgttgtgggggttgggagaaagggaagggagcacattaggacaaatacctaatgcatgtggggcttaaaacctagatgacaagttgatagttacagcaaaccaccatggcacatgtatacctatgtaacaaacctgcactttctgcacatg

SEQ ID NO: 811557 - DNA, 634 bp, Homo sapiens
agtctaatattgtttgtgctatgtagttaagtagtttgggtagctctatttgttttcttcttattttttagggttactggtatatgcttttagaagaattgtgtcaatactaccgaacttttgttcccataccagtttggtttcgctaccttataagctatggggagtttggtaacgtaactagatggagtcttgggatactgctggctttactctacctcatattaaaagtaggtaacattacaaatcttgtcactgcatgattcacattaatgattactgatacatactactgttttcctcttttaacagttttatagtttatcttcatatcactagtttgaagtaatagcaggttctatatttgtttagaaatggagaaacggaaatagactatcttaatccagcggtcctcaggtttcactggagggaaggggagtcgaccttcacatagcgtggattatctaagtagggaaaacaagtggaatagaacatacccatcctcaacagtaacattgtcatacacataattcttaaactagtagagtatcttgtcctgttctctccatgcctgcrcccctcaacctaataatcactttatgaaactttaaaatctaaatgttaaaaacaggtg

SEQ ID NO: 811558 - DNA, 513 bp, Homo sapiens
taggaagaatattttggtgtataagtttcactggaatttggtcaggcagtcaacactacagttagtaaacatatttgaaaacaagtatcaagagtatcacaagccatttacagtctgaaataatgcctgtacatatcaccatagcttttcgggttctgttttttcagacatcacaaattgtcaaagaacaaggatctgcactttttaagtataatttctgcccttaattattattgtagcttctaatttaccagcaacagtcaaagttctcagtaggctgctgcaataagggaggagggggaagagggagtgatttttttttaaaggctttctgtccaaagatgaacttttatcgattctttcaattattgccacaattgaaaaggtgtatktccaatcatttttcatggttctgtttttgcttactgtcataggatttcatcccatctcatttgagttgcaatttcaaaaagcaaagccttgctcttttctgactgaattcaacatgcataa

SEQ ID NO: 811559 - DNA, 529 bp, Homo sapiens
gaggggctggtccagggacgtagggactgggcgggtggtcagtgaggcagaggaagcagctggcctgagcggtggcgggtgagggcaacgcrctgtcactgggaggggcagcagtccctgctggacctgaccccaggttgctgttaactttggcagtttgataaaattccaaaaggagaaccacagtcctggcttgggggtggctgcgcgcttgtgtcaggatcccacctagaggctgggacctaagactggtgtggctgtggcctgaggatggtacatcccggggtcccaaagccagcccactggtgctcatttgctcaaaggctctcagcccttgaggtctgcccttccctggctccttccagctggctcccaccagggctccagagcccaagacccagcatccgcgggcggctctgggaagcctggcagctccgctaactccaacatgcctcatttgacagcaaattcggcgggagatcagccgaaagagcaagtgggtgaaaatgctgggagaatgggacaccta

SEQ ID NO: 811560 - DNA, 625 bp, Homo sapiens
cccaggtctccagctggagggaacgtcaagaccaccctggggagctgggggtgaaggtcagatgaacaccctgggcacagatggtgacacagtcaccacagacaaactcagctctggtgaccctccctggcttcagtaacaagccaaaatgcagctttctgcagaaggaaaccttccttctgtccttccttcccgaagtgctgactgtgggctgactgccactgggggcagggagtcttccatctgttctgagactgcttcctcctcttggccctgccctacagatcatgaaggagaagggcaagaggtcatctgaacacatccagcagatggacctggacgtaagcgggacattaaggaggcatatattcttcagggatcgatacggaaccaagtaagccacagggtcccagcagagatggggtgaatgagagggatgggggcttccccggagcagaagccagggtcacccaggagggatgacacagctgccaagagctctccyggcccagggagcagccggcaccatgaaccgagcacctccctggttccaagccctgggccagactggaacatgtggggccagaacccaggaggatcctgaggagatggaaggcagcaaaca

SEQ ID NO: 811561 - DNA, 660 bp, Homo sapiens
cgcaggtaatcttaatgactaggcagagtaaagaacaagtgcctcagaaattcaaaatattgctgaaagaaattaaagatgacctaaataaatgggcatatcatgtctatggatgggaacatccataaacatggatgttcgtgttaagatggcaatatttctcaactagattcatagactcaacacaattcctatcaaaatcccagctgacttctttgtaaaaattggtgagctgatcctaaaattcatatagaaattcaaaggatagtgaatagccaaaataatatggaaaaagaagaaagttggaggactcacacctcctgatttcaacacttactataaagctgcaatatgtaagacagtgtagtacctgcctaacaatggacacaatttgagagttgagaaataaaccatcacatttaccatctattgatctttgacaatgatgccaaggcaatgcaatgggaagagtgtcttcaacaaatggtatttggacaattggatatccacatgcgaaagaatgaagttggattccaaatcaaacatacaaaatagttaagtcaaaagggatcaaagacctatacataagagctaaaactgtaagacttttagaaaagaacataggcatgaatattygtgacattggaataggcaacagtt

SEQ ID NO: 811562 - DNA, 504 bp, Homo sapiens
agaagcctgcttttttttgtccctcaaattacaggggacacayatcaaattatctcagtggttgttaggaagcagaaggttaattatgttgactccaatcccctgcagtaagaatcagagactcctgcaggaaagggcagtgttcaaaactttcaattgacaagagagtaagcattgactctgcccagaacatggtagtcatccggatcctataaatgtaatcctggaattgtgactggaaaggaatagggagccccagaggagcgtgtgggtttggttgtttggaaatttgcttgagttaaataggtaatacaggtcctagttttcaattattccctcatccctccctttttcttttgcccattttatgtcatgcaacatatttctatcatccaggatcagttggaactgaggagtgcccatactgttcccctcttcccaaaaccctcgtgggtggagtgggaagcgacaaggtatggagaaggatgacagggtggacacaaa

SEQ ID NO: 811563 - DNA, 560 bp, Homo sapiens
caaacattcatggccaataaatgggggtggggaacacaccacataaaacatggccactgtcttaggtcaggttcaccagaagaagactccaaggattagtgtgaaagtgatttatcaagaaatgttctactgggraaaactgggaaagaaatggggaagtaggatctattatagaagggaagttgggagatgcaggaatgtggtatccagcaaagtcccaggagggtaactttggttcattcccacaggaggagctctggaaacagggtaggtcatgcctcagagggtcacgcctcaggagaagagcatctggggtatttataccccagaactcattagtctttggttatggattggcctgaggcacaaattcccaagcacttccaggctttcttgcctaagcaaagtagattctggcagcctgaggacagttcatcttcaaggagatgtaagaataagcatacggggagtctgtgctcaggaaaatgatcaaagggtccgaggagacatgggttgaagtgtggacagcgtctgctatagcttcgtaaagagatagctag

SEQ ID NO: 811564 - DNA, 570 bp, Homo sapiens
ctcacatcccagacgatgggcagccaagcagagacgctgctcacttcctagatggggtggcgggcgggcagaggctgtaatcttagcactttgggaggccaaggcaggcrgctgggagatggaggttgtagcaagccgagatcacgccactgcactccagcctgggcaacattgagcattgagtgagcgagactccgtctgcaatcccagcacctcaggaggccgaggcgggcacttcacccgaggctaggagctggaggccagcccggtcaacacggcgaaaccccatctccaccaaaaatacaaaaaccagtcaggagtggcagcgcgtgcctggaatcccaggcactcggcaggccggggcaggagaatcaccggagcctgaggcagggaggttgcagtgaaccgagatcatggcagtacagtccaggctccgcaagagagggagaccgtagaaagagggagatggagagcgagagcaagagcgggagggagagggagagggagagggcgaaaagtagtttttttaatagatgcatgttttagtcttctgctgtttatttcaatgat

SEQ ID NO: 811565 - DNA, 570 bp, Homo sapiens
ctcacatcccagacgatgggcagccaagcagagacgctgctcacttcctagatggggtggcgggcgggcagaggctgtaatcttagcactttgggaggccaaggcaggcagctgggagatggaggttgtagcaagccgagatcacgccactgcactccagcctgggcaacattgagcattgagtgagcgagactccgtctgcaatcccagcacctcaggaggccgaggcgggcacttcacccgaggctaggagctggaggccagcccggtcaacacggcgaaaccccatctccaccaaaaatacaaaaaccagtcaggagtggcagcgcgtgcctggaatcccaggcactcggcaggccggggcaggagaatcaccggagcctgaggcagggaggttgcagtgaaccgagatcatggcagtacagtccaggctccgcaagagagggagacygtagaaagagggagatggagagcgagagcaagagcgggagggagagggagagggagagggcgaaaagtagtttttttaatagatgcatgttttagtcttctgctgtttatttcaatgat

SEQ ID NO: 811566 - DNA, 647 bp, Homo sapiens
aatgtttacatattttcttttgggatctgaattcacttgattgtctgatgaaatgtctcctgaaaatggcaggtacacccggagagacacacaattttgctcataatttcaagaggtttaccatcagccccaggctaagaaccactgttctatgctattcaatctctataacggcaatagggcaagaaataaagaaattctgaaatgggctgggtgcggtggcttacccctgtaatcctagcactttgccaggccaaggtgggtggctcacttgagcccacgagttcgagaccagcctgggcaacatggtgaaagcccgtctctacaaaaaatacaaaaaaattagctgggcagggtgacacatgcctgtagtcctagctactcaggaggctgagttgggaggattacttacagtgaactaggattgtgtcactgcactcaagctggagtaacagagtgagaacctgtctccaaaaaaaaaaaaaaaaaattctaagatggaatattaagcactgagaagatgagaattaaaaccaagttcctttggttcttttccaaattttstttcttctcctgaaatatatggtctctcagaagggatggcttatcccgaaattaaatgtgttaaaacatgtcctggggggaaa

SEQ ID NO: 811567 - DNA, 623 bp, Homo sapiens
atagtttctatgttctcactcctccttatgccacatgggaaactattagaatgtaattaaaaaaaaataaaagtagtatcagtatctctaaagcagtggttctcaaagtgtggctcccacaccagcagcatcaacattccctagaaacttgttagaagtgcaaattcttgggctctatcccagacttactgaatcagaagctctgggggtgggatcagcagtgtgtgttttaatatgccctccaggtgattctgatgtgtgccaaagtttgagaaccactgtcataaagaattaagacatttaatcaaaacatgcttcctaatatatgaccgtaccaaaattgatgcagaggatacatcatttaagtatcttgtcctcaagggatatcttaactaatgctacctagaaatgtagttctgtagcgggcatgaagtgtcatccaaattgtaagaagctagacataaactgctgggatattgaagccatctattcattgccaactccagaaaaatgcctccacartgtattgactgtcctttgcccattgatcaaggcaggtgggatgtggttggaggttgatgattaattcaggtgtttcttacttgaagagctcagctgttccc

SEQ ID NO: 811568 - DNA, 623 bp, Homo sapiens
tctgagaaatatatgatccaatgcatgtaagagccagtgtctgggacatagtaatcactcaataaatgatagtctttaatatctcgagcagacaagactgtgaggcaaagttatgaacaaggttttgtttatttttctgttgttaagggaaatcacttgccattttaagcactagttcatatcctgaatgcaggtggtaacacgttaaaatgttgactgggcttggtccctgcaggtgttgagataactaagcacttacggaaattcagatacactttcattccctcaggaccactgacaacaataaccaaggttttaagcaaatacataattggtattgaactgaatcactcatttactaattgtttctccatgcccaaatattaactggcatttgctaaattagctgacccagctggagggaccaggaagactcattaaagctgatgatttgtaggaagtgaaatgtatgtaagaggcagtcccagtgaacagaaggatgccygggctcaagtcagaagccttgaagttaaatccctgttccaatatgtgttagtactggaattagcctgaacctcagttccttgttaaaaattgtggtaataatagctgcaaaggtcaca

SEQ ID NO: 811569 - DNA, 565 bp, Homo sapiens
caaaccaaagaataatagaaagctggctctcatctcatccaacttcctytatgatacaaataaggaacctgagacagagagaaaggatttttcaaggtcattgtcctcataacaatcaaatacatataataataacacatgagccgggcacggtggctcacacctgtaatcccagtactttgggaggccgaggcgggtggatcacctgaggtcgggagttcgagcccagcctgaccaacatggagaaaccccgtctctactaaaaatacaaaattaaccggacgtggtggcgcatgcctgtaatcccagctactcaggaggctgaggcaggagaatctcttgaacccgggaggcagaggttgcagtgagccgagatcgcgccattgcactccatcctgggcaacagagtgagactgtgtctcaaaaataaataaataaaataataataataataataataataataatacatgatactttgtggtcgagctgggacttcaacctgtaggctttgctctcccagtccaggttgcagcacgccaatgacccctttccttcccttacg

SEQ ID NO: 811570 - DNA, 545 bp, Homo sapiens
aggatcaccccagatggaaatgataaacttgggggcacatccaggcgggcccaaaagtggagcaggagcagggatgctggcctctgtgtttcagttcatcaggctgaaggggcagcagggctttggcaggttgaatggcacgagctctagaaacaggacagtgccaatacttttctaggactgcatcggataaactgggacatctgcaatatttcctaagcaaactaggttaccctccccactgctgcggctacccgagggcattgggcagctgggtgacccagaaatggccatctccttgtccagctccatctggaattccagcccctaattccggggcactgacaacctttaggtgaaagcgagctttacaacaccaaatggaatcaagcccatttttggtgtaggatgcctattccaaaacaatagggggaaagaaacatttctcatttaaaaaaaagacagcatcaggaagtgaaatggcaagaaatcttccccatgtactttyacgttttatagtctagagaagcaaaataattgcagga

SEQ ID NO: 811571 - DNA, 542 bp, Homo sapiens
gtgcaccagaagagcgccatgaggatgatggcatacgcgcagtaggcctcctgcaggtgggagagaagcggcagagctgtcakagggcctgtgtcccagagctatgccacctcctgtctgtcagacaaaccaggccatttgtgactgcctggggagagcctgtgaaacccacagtcattgattcccaagcccaaggtctcatttcaaaatgcaaataaaaagcaaagcaaggcactcaatatcaccttgtctttgaccgtggggagcccagacattacaagccagccacttcggagagtctggagttggttaccagtccccatccagcccagtgggattgcaggggcccagctgaggatcccaagatgagatgggggctgccagaagaaggagcaggacctgggcaatgtggacctttgcctggcaccctggcgttccctggcttttatcacaagctgcaagagtatgtttgtttgttggatatttagtgtttgttccctttgctaggagtgagctctccatcagacagagtcggttttgtg

SEQ ID NO: 811572 - DNA, 633 bp, Homo sapiens
accaattactagctttgccaagtcatttaaactctctaagcctcaatttcctagtctgtagagtgaagatgataataatctctacacccaaggaggaagaaatgagtgaacttmtctaaagcccttacttatcccaatccctgactgagagtcaatactcaaaaagggttagctagtgaatgaatttggggcaatgaatttgaggtaagagggagagaaaaacattcaaacaaatggttctggaattatgtaataaataatatagtaggaatacatttgaattactctgagagcagaaaggaaagcaccaaattttgccttggcatatatagaaaacttcacagaggaggtaacacttgaactaaaatctaaagatctaaaatcaggccaaaggaaggccatgtgtgaagtcagagaggcaggaaagagaacctggtatgttcaggaactgcaagtctggctataagaagggtctgtgcaaaggaatggtggtgacacacagggtgaagagatgacttagagccaaaaattccctgcaagctctgccacagagaatggatttctcctggaagatactgaaaagccactgcagggttttgagtaagagagtgaaacatagaagcactgtggtgg

SEQ ID NO: 811573 - DNA, 527 bp, Homo sapiens
ttagccctcatcctaaagctctttagaggccacagccacaagtcatctcattagcmttcaaaagaatccagagattccatgaattttaggcgctgtatgctaagaaactggctaaaggccagttgcaatgtctcaggcctgtaatcccagcactttgggaggctgaggcaggaggatcgtttcaggccatgagatcaaaaccagcctggtcaacatagtgagacccccttacaaaaaatttaaaaattggccaggcgtaatagctcttgtctgtagtctcagctactcagaaggctgaggatcactgagccctggagttgaaggcagcagtgagccatgatcgtgccactgactccggcttgggtgacaaagtgagaccttgtctcagaagaaaaaggaaaaaaaaaaaactgggcaaagactaaataacatatttcacagtatcacagatttgtattgtctaggaaagtgaatgtaaacagaccaggacactagtatgatcccttggtttcatgaaggtcccacta

SEQ ID NO: 811574 - DNA, 664 bp, Homo sapiens
tgctagcagcttcagcggaacagggtgagagttaattatgcagtcttcttgacagcggcattaatttggaaggaaactgacaagtcatgggtcaagtttcagtgacttcctccttcctctgatggcagtatatagttttcacattttaattcctcctcctgagatgcactatacttaaaaccattctctcccctgctaacagaagggtgtgaatctggtttactttgagcattaggatttgcccctttggaattctgcactccagttacttaactttcccttcagaatacatgtggaaagaaagaaagaaatagcgatgactccacttttgcccctgtggcaccttgaacaaagcagttcttcccaaattatactttttttttttttaaataaggtgagcaggatgactggggagagagaaacatttgactttgactgcctcccccattctttgctgtgagctggaaagtgtgcagttggtcgtctttcttctcctttctttaggatagtaagagactcactcactgcacttctgctcagttggcttctgcatcgggatcacacagccatcagcaggactgcccagttggtgagcacactccrttgaccacgtggcgccagcgcttcctcaatgcacatgattgagaggaaagaaagttctctt

SEQ ID NO: 811575 - DNA, 479 bp, Homo sapiens
tgatctcagcctttgtctgtctgaaaaagtttttatttccctcccattagaaaatgtttttaggccgggcacaatggctcatgcctgttattcccagcactttgggaagccgaggtaggtggatcacctgcagtcaggagttcaagaccagcctggccaacatggcaaaaccctgtctctactaaaaatacaaaaattagctggatatggtggtgagagcctgtcatcccagctacttgggaggctgaggcaggagagtcatttgaacccaggaggtggaggttgcagtgagctgagatcgcgccattgcattccagtctgggcaactgagtgagacttttgtctcaaaaaaaaaaaaaagtttttaaagagggctgggtgcggtgactcatgcttgtaattccagcactttgggaggctgaggagagttgatcacytgaggccaggagttggagacctgcctggctgacaaggcgaaa

SEQ ID NO: 811576 - DNA, 392 bp, Homo sapiens
ctcataatagccctataatgtaggttctattttggtcttcggttgacagggaagagaactgaggtcgagagaggttgagtaactatcccaaggttgcacagcaagctgaaragccaaggtctgaagccaggcagtcccactgcaaagcccgctgctgtagctgcacacagtcctcttccagaacccgcagggcctccttccacttccctaacccctggctgccagctctatcctaacttgcaggtcttggaggcactttcccttcatccgcctacgtcttagcctccttccctatttgttgggagcagataatgggtttgttgcatataaatgaagcccaggattgcgtgtggccaggcacatctgacctctatcactttggaaaccagggc

SEQ ID NO: 811577 - DNA, 656 bp, Homo sapiens
ccagctagacaggtctaggatgaaggggtgatatcaaaactatttaacattmcaggtgcagtggcccatgcctgtaatcccagcaattttggagtccaaggtgggaggatttcctgaggccagcagttttagactagtctgggcaacatagtgggaccctttctccatttaaaaaagagaaaaaaaaaaggctggcatggtggctcatgcctgtaaccccagcactttgggaggcaaaggcgggtggatcacctgaggtcaggagttcgagaccagcctgaccaacatggtgaaaccccatctctactaaaaatacaaaaattagctgggtatggtagcagatgcctgtagtcccagctactctggaggccgatgcaggagaatcatttaaacccgggaggtggaagttgcagtgagccaagattgcgccatttcaccctagcctgggcgacaagagtgaaactctgtctcaaaaaaattaaataaataaaaattaaaaaacctatttaataaccagtaagttgtggacactttactggttattgcagtgtatcagaaataatgctggccaaagcactggatgagaatctgaaggactcctcccgctcatggggccaggcattaacgttttattggctgggtcatggagatggcca

SEQ ID NO: 811578 - DNA, 564 bp, Homo sapiens
aaccagtaagttgtggacactttactggttattgcagtgtatcagaaataatgctggccaaagcactggatgagaatctgaaggactcctcccgctcatggggccaggcattaacgttttattggctgggtcatggagatggccagtggcaaggtcagggttgtcatgtttttctgactgggatatcaagattttattggctcatgaactgggcagctactgtggcacatagcagcttgacagccaactttcgtactcgtaggaatatgaatctagcaaaattcttggtagacctgagatcatacccttggaagggccatctagggaactccgggcagtggaccaggtgagaccgcagggttgccttccagagctattcttgcttgtttttattttcaaatgggaatttgatttaggaccggcctttggttttccccagacctgggaartaaacatttctcattctcaaaacccacaaattaatcatttttgcaaatcagagctgagctctgagcctctgaccaggaggcctgagcctgctggccttgggagccaggatttgcc

SEQ ID NO: 811579 - DNA, 564 bp, Homo sapiens
aaccagtaagttgtggacactttactggttattgcagtgtatcagaaataatgctggccaaagcactggatgagaatctgaaggactcctcccgctcatggggccaggcattaacgttttattggctgggtcatggagatggccagtggcaaggtcagggttgtcatgtttttctgactgggatatcaagattttattggctcatgaactgggcagctactgtggcacatagcagcttgacagccaactttcgtactcgtaggaatatgaatctagcaaaattcttggtagacctgagatcatacccttggaagggccatctagggaactccgggcagtggaccaggtgagaccgcagggttgccttccagagctattcttgcttgtttttattttcaaatgggaatttgatttaggaccggcctttggttttccccagacctgggaagtaaacatttstcattctcaaaacccacaaattaatcatttttgcaaatcagagctgagctctgagcctctgaccaggaggcctgagcctgctggccttgggagccaggatttgcc

SEQ ID NO: 811580 - DNA, 536 bp, Homo sapiens
ttctgcaaatccccttattatctctgcatcattagcagtttctgagcttgtctacaactaatttcacagtgaatcttatttctacctgatattttaaataagctgtcacgcagggcagcagctgayatgccgctgagaaagaagcaaatcagcctaaagtaggctttcaagcagcctccaacaattaggctttgggccatcgtacaaggtgggaaaatggggcaagtgtctagagcaaaccctgccccctaccccagtttaaataagtcatgtcttagtagataggtaagtggtctccagagctaggtttccagggggctcatttctgctcagctccttcccacaggtgacccatagcgagtgaattgatgtctctgaacttcagacagtaaaggaataaaacctcctcatagggttgttgtgggcttagcaagctaatgtctataatgtgcttagtgtgatgcacctagactattgaacacctagtgtatcctcaataaatctagttttaattgctgttcatatgtttatgaatt

SEQ ID NO: 811581 - DNA, 635 bp, Homo sapiens
acctctaaaagcctcagcagccagcctctaggcagatgctagcattatgrttgccacggtaggcatgaaaaaaaatgacatcagaagcaggagggtgaggaacttgcctaaagttacatggcacatgggcaggtgagccccgcttttgaccttagactgcctctttgtaaaaatgatgtggcttcttggctgtccttgattatcgtttttttagggtgtggctgccccctgctcactccctctgggcacccaggaaggtggctaaaccttaggcattatcatttccttcttgatgcttcattgtgggtggacttggccccatgttctccaaggaagacaaggtttcctgatacataaagtagagcttctctgctgagaggtatggagattctgagcatctgacttcacacacccagcctaggaaaatccagatgtgtaccccacattgattagggtggtgaatgcttcatgattttttattgtcagaaccgcagagtcatagcaaggtatttttaggtacagagtcttcctgcagcatttaaattatgatttgatgtaggaacttcagctttccccagagcctggatctacttagatgcacaggatcgtgccctttattttatttattgattctt

SEQ ID NO: 811582 - DNA, 594 bp, Homo sapiens
tgagtcctaagctttgctgtgctggggctgggagtgctaattcaatggcatactcattctgcacctgctcacttcagcctggccrtcttcctcctgagattgggaaaagaaaggaaacttaaaaggcctcctgtctttcctcactatatatctctttgtgacacaaagttgaatctactttcccaactttaattattttcccaacttatttattacaaacattccacagaacatggaaggaaaatataacaatgagtaatatgacatacgctatatacttaccatccagggtcagtgacagtgaacattttgtcacctctgctttacctacatttgtgtatattaaaagaggtatctgcatgtttacatgtgtgtggtgtgtatataagccacagtaagttgtatgtatccactgtagaaaccttagcctgcatctcctcaggataagaacaaaattaataactccttcatattacctagtctccagtagatatccagattttcccagttgtctcacaaatgtctttatctattaagtttttaagatttaaaaatacttaattgacaaaacttgtatatgtttaaggtatacgg

SEQ ID NO: 811583 - DNA, 594 bp, Homo sapiens
tgagtcctaagctttgctgtgctggggctgggagtgctaattcaatggcatactcattctgcacctgctcacttcagcctggccgtcttcctcctgagattgggaaaagaaaggaaacttaaaaggcctcctgtctttcctcactatatatctctttgtgacacaaagttgaatctactttcccaactttaattattttcccaacttatttattacaaacattccacagaacatggaaggaaaatataacaatgagtaatatgacatacgctatatacttaccatccagggtcagtgacagtgaacattttgtcacctctgctttacctacatttgtgtatattaaaagaggtatctgcatgtttacatgtgtgtggtgtgtatataagccacagtaagttgtatgtatccactgtagaaaccttagcctgcatctcctcaggataagaacaaaattaataactccttcatattacctagtctccagtagatatccagattttcccagttgtctcacaaatgtctttatctattaagtttttaagatttaaaaatayttaattgacaaaacttgtatatgtttaaggtatacgg

SEQ ID NO: 811584 - DNA, 566 bp, Homo sapiens
taaggattaaatgagctgatatagaacaaacatgttgcacagtatcttgtcacatagtaagtgttccataaatgttcattcttgttttatgattattaaatctcgtagactcactccccttatctgtgggttggcttggctaatttcttttgctttatatttatgaaatgcttatagaatgcttactatgtctcaaggactgttctaagtgctatacaaatattaatttatttaattttcataaccacacaaagtaggttatccccattttacagatgaggaaactgaggagaaggttaagtatgttgcccaaaataactaccaagtggcagagctgagattcaaacccaagcaatctgactctggagtcctgctctgcacggccatacgctgcctcccaggaggagggtggggggacgctccctaccttttgcccaggtgtcacccacyaccttcctgtctgcatgctgctgccacctggtcctcagttcttctccctggagggcatcccagagttctcaaccagctaggattgtcaactttaacaaacaaaaaatacaaaatgc

SEQ ID NO: 811585 - DNA, 644 bp, Homo sapiens
tttcattttgaacttggagaatctgattattatgtgtattgggaatggtctattttgtgtattatttcacaggggtgttctgcatttactgaatttaaatgttggcctctccagtgaggtcaaggaagttttcatggatgatatcctgaaacttgtcttccaggttgtttgctttctccctgtctgttttatggatgccagtgagtcatagatttggtctctttacacaatcccatatttccaggggatttttgtttgttctttttaattcatttttatttatttttgtctgactagattaattcaggagccagttttcaagctctgagattcttttctcagcttgttctattttgctgttaatatttgtgatttgcattatgcaattcttgtagtatgaatttcaactttatcagctcattttgtcttttttataatgattatttcatctatcagctcctgtgttgttttactgtgttttagcttccttgaattgtgtttcaatgttctcatgaatctcgatgatcttcatcgctatccatattctgaattctatttctgttatttcatcctggttaagaaactttgctggggaactmatgtggttgtctggataaaataaggcactctggatatttgagttg

SEQ ID NO: 811586 - DNA, 564 bp, Homo sapiens
aagatgaagctcatcatcctggagcactattctcaggcgagcgagtgggcggctaaatacatcaggaaccgyatcatccagtttaacccagggccagagaagtacttcaccctggggctccccactggtgcgttcttggatggagagggtgccgtggataagggtggagagagtaggcaacaggggccaggtacaccggctcactcagccaagggacttcacgggggctctggggtactggtgctgagagagcaccttcctgccccttccacatacaaaggacccagcttcccttatgggttggtttagtcgctgcctgtccctgcagaatcctggagcagaagggatcttggttggcaggaagaatttgatttttaggctacatcctaagtcagccctgtccaccagggtttcttaacagaattaagtcctgataccctaaggcattcattttatgtaatgaattaatttctcttctctgcatctagaggggtaccagctaagtaccatccttgggagaattgaaaagatagtcacttaggtaattttctgtaaggcttaatt

SEQ ID NO: 811587 - DNA, 488 bp, Homo sapiens
cctccagctgcatccacctccaggccccacccagcctcctgtcctgagccgctttggatgagatcaggggctcatgagccatgcaaagccagcccggcattcctgcccagaacagccatgcttgcatrtttctgtacatttcgtccatggtcttcttgtccacaagtcttagccggcctatttcccttctccagaaacataaacatggtatttgtaattttattatcaccaaggttgcattgatgagaggctttctccttgtgtgtcgcggttcaggagccagtttgaggggcccaggccctgaagcagccttcttaggagggcaagcctctttttgcggagaagattcctgggctggcagagtgtgtggtgtggttcatttcatgtgccaacttgcctgggccatgggatgccagacagctggtgaaacattattcctggtgtctgggagggtgtttcttaatgagagcacatgtgaacccacagat

SEQ ID NO: 811588 - DNA, 612 bp, Homo sapiens
ggcagacatcaatcaataaatgtaagctgtacattggttcagcctggaaaggcaggacaattgaagcttccaggtcataggtggattcaaaggttttctgattggcaattggttgaaggacttaagttattatctaaagatctggaatcaatacaagggaatgtctgggttaagataaggggttgtgaagaccaaggtttttattatgcagataaaacttcagggagtaggcttcagagtcaataggttgtaagtgtttcttatcagacttaaaaaggcgccagactcttagttaattctctcctggatcaaagtaaagacctggaaagggaaagggattctctacagaatgcagatatcccccacaagagacagctttgcaggaccactgcaaaatatgtcaaagaaatatattttgaggtaaaacacttccatttctttcagagcctgctatctgtcatgtgatgctacactagagtaaggttggaatttggtgtcctattgctacaaggagtctgttttttcattcttcagatctctgtcttcatggtaacgctggtctgttgtgcctgaactccaaagggagsagggtaaaatgaggcacgcccaacc

SEQ ID NO: 811589 - DNA, 643 bp, Homo sapiens
cgtggggagaagcgaattggtttttgccctctgtctgattctcgctctaacctgctgcaatgggaattgcttcttcacctccaggaaagcctcaacaaaaatactcctgagggggagacaagagtcctccccggcaaatttcaacccagcagagtcctggcagcctcttcggctccctaccttgaggccccgggggctcaggcttcctggccctaatcttcacctggcctggatccagaaatgtctctggttcgcatagagaggtacccaactggtctcgggactcacctttcactgagcagggggcatgaacaagacacagcttagtggagtgtttacctcaggggtcacactcagcctggtctggccttaactgggtgtggtcctgtccctgccaccatgtaccaccatccagtggggtgcaggtacaggccaggctgtgtgatcaccagctaggcaaggctccagctgcgacaaggactccatcttcacgcctgtcctggctcctggggagtagactccagaacatactatcaaagatcgrcgaatgagatccaaacggtcattacttgcactgtctttggggggtcctaggagaaactacctcattcttaacagctcataaaactcttaattttagctc

SEQ ID NO: 811590 - DNA, 585 bp, Homo sapiens
ctgaaaagaatgctagtaggcacatttctatataccaacaacatccaagctgagtgccaaatcaagaatgcaatcccattcacaatagccacaaaaaataaaataaaatgcctagaaatacagctagccaggagggtgaaatatctctacaataaaaattacaaaacactgctgaaagaaatcagtgatgacacaaacaaatggaaaaacattccacactcatagataaaaataatcaatattgttaaaatggccatactgcccaaaacagtttaaagtttcagtgctatgattaaaaagtcaaaacataacagatgctggcaaggttgtgaagaaaagggaacgcttatatactgctggtgggaatgtaaattagttcagccactgtggaaagcagtttgatttctcaaagaacttagagctaccattggacccagcatcccatttttgggtatatacccaaaggaatataaatttgtttttacyataaagacacatgcatgcgtacgttcattgcagcactattcacaatagcagacatggaatcaacctagatgcacatcaatggtagactagataaagaaa

SEQ ID NO: 811591 - DNA, 475 bp, Homo sapiens
acagatgtgggctcttgtcttcattttctctcattggatacatggctccttcagttgcttcatcygcctggatctgaatttctcagtctgtgaaatggggatgaactgagattatagctcatctggtaggagcatttggtgagaagatgcgtgcaaatcccttagcacaattcccagggcacaggaagacttgatacttgtcaaccgtaactgttagtaggcagatagtaggcccagcacagaagtcagttctgcctctctaccctccttaggattttttctttgcacaaagggcttcagaaagtgtaaaccccctcctctctctcgtgcatgtgagggacagaggtgtccctgatgtgaggcagtggtagaagccaagggcacgggaggagctgtcggatggctggagccgtttcagtgcaccagctgatcgcagcacacgtccaggtagggggatgcccttggtttcaagttc

SEQ ID NO: 811592 - DNA, 567 bp, Homo sapiens
gaacaaggtcactttaacaattaatggtacacacatgaaaaatcttttacgatgcataaatattttgttgccatgttgcccaggctggtcttgaattcccagcctggagcaatcctcccaccttggtgtctcaaagtgctgggattacaagtgtgagccactgtgcctggcccattcagaattgttttaaagactttctatatatctattatgtatctaaattcaaatttgctcttttgttaatatgatgaattactttacattgattgttttaatttaacacatactacatttattatttaggggttttgtttggtcttgaataacagaaaactcccaagatatgctccacaaatcaacaaggtgctgatttttctcctaggagagtccagaaataggtagggcaaggatggtgtagctactgaacaatacagtargggaataaggtacttatttgttcatttttcctgaaatagtgtatgacttggagaaacagggccttgagaagtattatgggaacaacatgctcaccataaaaattagacttttgataaatgtcaagaaaat

SEQ ID NO: 811593 - DNA, 610 bp, Homo sapiens
ttggctgcagtatggagaattaatttcagggggagtgactggagaatcaaggagatcagataagagatgatgatctggatgaggataatgccagtgtggatggagagaagagggatgaatagaaaggtatgaggagatgaaatgttttcaactgttggttgataggttgcatggggagaaaaatgggaaagactcagagatgatatcacacctctggactgggcatctggatgactagtggtgtcattcactaggacagggaatgctaaaaaaaaacatgattggggtggaaaaagatgaagtgttcagttttgaacatgctgatattgaggtaagtgcctgtaggatgtgtgtttgcgtggtggtggggtgtgtgtgtgtgtgtttgcatataaccaaagcataggaaataaatctgagctggcaatatgaactgtggtgtgtatatatgtatatatatagagagagacagagagagacagagagagagagcatatatatagcatatatatakagagagagcatatatatagcatatatacagagagcatatatatagcatatatatatatatagcattcatggtttcaatcaccatatatatatatat

SEQ ID NO: 811594 - DNA, 606 bp, Homo sapiens
tcggggcaaggagtgtggacgccctttggctgcactgcagtgcctctaactgcagcttctccctctctctcagggttgctgaaagattattagataattttcaaatttgtaaagcgccttaagctcctyggaggaaaggtggtatatgagtgtaataacaataacaatcctatctgtcagagccattgagaaaatgaatcttgttattctcaggaaacagccggaggaacttcagcaagaaacatgaaaataaagcacagagcacggcctcctgaccagtcagcagaggggaaagtccccaccaagtgtggagggagcattcgagccctgctccctgccagcccagtgctggtgcaaaggggctctcagaaagtcacccaaattgcctctgacacttcaccaattaaaatgactttaggacaagttgaaatcaacttagggagtgaagcattctgatttctgagactctcccaaggcagcggggaaggcaagtgtctgagcaggttgtcactcactcaggagtaatgatgggaaaatccatcccggtaacgtgattgagtttggtgaattagtaaggatgtttacactgtgtgctgcaagttggag

SEQ ID NO: 811595 - DNA, 409 bp, Homo sapiens
gataaatttggatttatttttctaatactgttttgtaatttcaatcttctggggctttttctctactttcctgctttttactggattaagttttctttcttttttattccacttgtttggaagtaacacattctttttctttttaatcccagatgcagatggttaattgtatttcttagtttagagtacattatcaactttggtctgtgcaggaatccccttattttattacttcattttcccctaactttcagcactcctgtttctctatttayattcttagcctatatgtttaatatgtgtctttaaatgtatgtttatgcttacaaaatattgctttgttgtttttgtccctgtaaaatatggtcaatacccgggtactcattttcagtttcttattccatttcta

SEQ ID NO: 811596 - DNA, 409 bp, Homo sapiens
gataaatttggatttatttttctaatactgttttgtaatttcaatcttctggggctttttctctactttcctgctttttactggattaagttttctttcttttttattccacttgtttggaagtaacacattctttttctttttaatcccagatgcagatggttaattgtatttcttagtttagagtacattatcaactttggtctgtgcaggaatccccttattttattacttcattttcccctaactttcagcactcctgtttctctatttacatwcttagcctatatgtttaatatgtgtctttaaatgtatgtttatgcttacaaaatattgctttgttgtttttgtccctgtaaaatatggtcaatacccgggtactcattttcagtttcttattccatttcta

SEQ ID NO: 811597 - DNA, 641 bp, Homo sapiens
agcaagttcacagaggatccatactatataaattcatttgtatcaattgcaaagacagatacaactaaatggtaagtcatttaggaatacatgcttttctattgcaaatataaagaagaacaaacaattaagtaaaaattcagaaaactggttctttttcatagggttgaaagatgttatggtggaggcataacatcttggcatcattctagttcttaagctgggtaatgggtagatgagtgaccatgttattattgtttattattattattgtacatatatgttgtatacactcttttgaattttgatagattttaaaatagaaaaaagtaaaaacaaacaaacagcaatttctgagctgggcatggtagcatctgcctgctactcaagaggccaaggcaagaggatcacttgagctgagaagttgaaaaccagcctgggtaacatagcaagaccttgtcgctaaaaaaaaaaaaaaagttctttcataaaaatgaagcaatttctctggagtcaggctgcctggattcaaattctacttctgcctcttattagctaggtgactgttgaaatcctaacccccaacgtgatggtaggaagtagggctttgagtggyaattaggtcacgaagaagcagccct

SEQ ID NO: 811598 - DNA, 516 bp, Homo sapiens
tgttgaaccaccgtgcttgagccagaacctgcgcagggggctatgagcaccatgagtgggccaggctgctgctgcgggggtggcaggtggtaagcccgtccccaccctcctcagatgcttcctggctgagtggccagaaatgcctgtgcctcagttttcccatctgtgaatggagatggtgttaagaagtttagagacattaagacatgtaaagtgtgtgcttatgaccgtgccaggcagacagtcaacactgtgggaatatgtaaagagtgtctaaaaagcaaatacaggctgggtgcggtggctcacgcctgtaatcctagcactttgggaactgagacgggaggattgcctgagcccgggaattcaaggccagcctgggcaacacagtragaccctgtctctaaaaaaaattaaaaatttagccaattgtggcagcacacacctgtagtcccagctacttgggaggctgagctgggaggacatcttgagcccgggagtttgaggctgcagtga

SEQ ID NO: 811599 - DNA, 607 bp, Homo sapiens
ctcactcacatatatttcaagcctgattctaaactgctgcagagactggaaagcttgaaactatatttctcagaactcttggcagctaaatttcttgatgtgattccagttatacaaattctgtactctgaaagaaggcatttgttattgtttatataacattttgctatgaaaatttcaaatatgtgtaacattagaaagtatacggtataatgtacctctgttgctcagcctcaaaaattaccaacacatgtgaatcttgctttatttctatccatatctattccctacacctgaatcattttatatcgatctcagaagtatttcatccataaatatttcagtgtatgtctctgaaagataagcattcttttttataacattcccacaatgccattatcacactgaaaaaaaattaatgctaaatcctactaatatcacaaaatatctggtcagtgttcatatttaacccaaattttcttctagtacttacattgttttgtagttctgtctcataaaagttttacagtttttaaaaatcaggattcaaataaggatttatatgttgcaataygttgatatgtcttttagattttttaaatctgtg

SEQ ID NO: 811600 - DNA, 438 bp, Homo sapiens
cccttccatttctgatgtgcaggttaagtgagcagcatctgacccataacccataaactgagaattcaacagaatcattagcaaaactaccygctgctacactcgaggccacgtgcagtcagggcacagaaattcagccattgctgggaagacaactggcaaaggtgacctaagtatcataaatggatgtttgggttttgtgatggtgttgtttggacaataatatataacttgaagcatactgtttatttgaggattttgcagaagctacaataaatgaactagaaaatagttaaagagatttttctctgctgcgaatagtggcaaaagtaaaaattcagttagaacgagcattcaatatgtttatatttatcatgctgcggggtttaccttgtaaagttgcttggtgaactggaaagtgctatgcaaaaataatgg

SEQ ID NO: 811601 - DNA, 590 bp, Homo sapiens
ttcttaaaattcccttttgggactctgtttttctttaggtaaatgcagtggttagtcatttaggtgagaaaagaggtgccagatgagacaaaggcaggagcagaacaaatccaagagmtgacttgcgctgcatcagaaaatatttgtgtattctgttgtcctcctgaagggaggggaaaagcaagctaattatccatattagaacctagaggtcaagtttattgaaatgagcaagggactttgaagcacagaactagttgcattagtctattctcccactgctgtaaagaaatacctgagacagggtaatttctaaagaaaagaggtttaattgactcacagttttacaggccgtacaggaagcatggctggggaggcttcaggaaatacatgatcatggcagaaggcaaaggggaagcaacacatgttacatggtgggagctggaggaagagagagaatgaaggagctcttttgctgagcgcacactccatgtggctgtgtgtggcatggtgtccctctcccctggtctgtgagtatatgtgactaatacactgctgttgatctcacttgtccagtgtgaagtattagt

SEQ ID NO: 811602 - DNA, 465 bp, Homo sapiens
tcatgtgccatcgcttattttatctgcattaatttaaagatatagtctgcctgtgcccaataaaaacatctgtattgcaaaatttaataatttatattcatatattcgtatagttgtacttgtctttgatgaatattatcactgaaaaaaattgttgagtgatctgtttctttcccttttctttttgttttctctttctcacacacaaacacagaacactcaatcacatgtttaaaaaaaatgaatcagtcttttctaatattttcccttatctatttaatcctttgtttaaaaaatggctataaatttcatgtatttaaaagtaaacagacttccattttacatattcagcctgcatttattgaaaagggaacaaagaaagaaaggtatcacgtagttgcatgctgtcaggtaacatttttataataattcatgtgawtccttttgtacatatctattcttgag

SEQ ID NO: 811603 - DNA, 587 bp, Homo sapiens
tcaaaagtgtgccaaaagtgacagtgggtaaccaagagagagataaaagatgtccggaggtgttacagatacttggaaaagaagatacacaagtagtttcagaattctgtcagcagrgagagaaggctcaggttttttagctgaatagcaggaaagatcagtcccaggggaagagaactggctctgaatgaaggaagtatatataggtactaggccttgtggataggaagagacaataagaagagctagataattacagaattttatctgtcacaatattgcgtgcttataacatcaataaactaaaagtaaaatcacaaaaccaccaactttacagtaagcttctttgcaaattgtatggctttgtgtttaattaaagcttactaacgggttgggctcagatagttgtactcagaatacattttgacttctttaagcctaagataagaatgttcatcttcatttggatggcatttattacacaaacccaagaattccatgatcatatcaataaaaattaggagaatttcattaggcactataaataaccccttctcctgagacaagtagagaagcccgagtgagta

SEQ ID NO: 811604 - DNA, 587 bp, Homo sapiens
tcaaaagtgtgccaaaagtgacagtgggtaaccaagagagagataaaagatgtccggaggtgttacagatacttggaaaagaagatacacaagtagtttcagaattctgtcagcagggasagaaggctcaggttttttagctgaatagcaggaaagatcagtcccaggggaagagaactggctctgaatgaaggaagtatatataggtactaggccttgtggataggaagagacaataagaagagctagataattacagaattttatctgtcacaatattgcgtgcttataacatcaataaactaaaagtaaaatcacaaaaccaccaactttacagtaagcttctttgcaaattgtatggctttgtgtttaattaaagcttactaacgggttgggctcagatagttgtactcagaatacattttgacttctttaagcctaagataagaatgttcatcttcatttggatggcatttattacacaaacccaagaattccatgatcatatcaataaaaattaggagaatttcattaggcactataaataaccccttctcctgagacaagtagagaagcccgagtgagta

SEQ ID NO: 811605 - DNA, 576 bp, Homo sapiens
tttcttattaaaagttctgcattccatgactcatcatggaaaggataaaatgatccaaattaaatayatatagatgtagtgactttaaattgcaaaaatagtttatgaccaatgtttggtttgtcgatcccatattcctgggaagacaatcaaagcttcaagcacatttggctacctgatgaaccgtttaaatatttatagagggatttcactcaattgtcattttcaatgcatgttttctggttgtataaaagctttcccatgcaagagagctgatgttataacagtagattattatatatggcacagtgtattttcaccaggtaaagaaagctttttatggttcactgacaggacaatcaaccccttcacaatctagaacctgaagactggatcttctgagaatgtcagagaaagactggccttgccatacacactgcaacaaaactttaggaccttgaaccttgatttcataatctcacacctgagaagtttccctccacactcttggaactgtacacccattggaaccctaaaggtaaagccaaccaaagaagtttctccctggaaggagat

SEQ ID NO: 811606 - DNA, 432 bp, Homo sapiens
attgcccaaacttactttgccacattaccctttaaatttttttaatggaacatctgttaacatcttgaagatgtccactgaggatagcttgggcaatgatgaattacacctctttatagtccctcttggtttaaaattacagtgtctcctcaatatcagagaaataacttcgaaaagaaaaactaaaatatgagttggcctgagtaatcattgtatcaataagagtaactggtgaaaccttcttctaacctgttgaattagcatgtgtttatcattcgttgggtcaaattaaccttttcatgtataattttgttaagatatagtaatttttacatttatacagcattttagacatgtaacatcattaaactgatgacagrcaaattagaagaaaatcagacaagacattaaatttgttaaataattaaagaa

SEQ ID NO: 811607 - DNA, 603 bp, Homo sapiens
ggacaaaataccaaaagatgacaaaatgaaaagttattggaggctatttctgggggttccracatggagactttttctctcttgtgcttttctatgttctccaaattgtttatgattttaaaaaacttaactttttaaaaagagtcaacctttggaaacactgaaagtgtcctataattcaatgtcagcacctatctgtttcctgtttcctctaattcatcttatttcccctaaacagtaatgctatggggcggggtggcgggtggggataagccatctactactttttttcctcgttgttttgttgttaatactccttcagtattgctctttgttcactgaaatatgaaacagtggctgaaatagatccagcatcttgccagttactagaaccaagaatgagagcaaacaatcacatggtgtttcctgagttccgggaactgttctaataatgcacgtgtgtgtgtgtgcacgcgtgtgtgtgtgtatttaaattctcacacaacagctccatgagatagatcttaatatcatgccccttttatgaatgaagaaactgagaagccaagtgacctacccaaagtcacacagcaagtgcgtgtc

SEQ ID NO: 811608 - DNA, 621 bp, Homo sapiens
tgcatgaattgttctcatttatagatgagaaaaccaagatccaggaagatccgtggatttgcgtaaatgcaatgcatttgtcgcagaactccagtctgaactcttccctctctcataactaagagcggctcttccctggcagcagacataaaagtgaatttgtgaatgagggagctgtgtatccccagtggccagcaggatggtcttcctcacatgattgttgtgtcattcctaagctgaaacccaccagggctcccctttttgtaaatgagcatgtctaagccttgcatgttaggcttggtttgcactccctctggcctttgctgctctccaggtctacctcttattcttgcccaacccacctttggttcaagccattatctgccaggtcattagttacccagaccaggtgttgctggtaccaacacctctgagcctccacacttgctgttccctcgcctggaatcatctctctctttttgtctggagaattgtagtcatgcttcaagtgttrtcagcttggatgtcacccctctgggaaaccttcttggatgtcactttcttctgctctgggttgtgaatcttcctattccacatggttatctcctcaactctcaattc

SEQ ID NO: 811609 - DNA, 581 bp, Homo sapiens
ttttttttcttttttctttttttgctcatcagctgtagttagtgtatgtgtactttatgtgtggtccaagtcarttctttcagtgtgtcccagggaaaccaaaagattggacgcccctgtgtctaaagtattctgagaatgggtaatgatgacttttgttcctagtatttatactaaatacagttcctaagcatcagatactacaggttgcggatttagatatttagaagataaaaccagaaagcatggctgatctgtacacagaaagatatgcccatagtcccagagactgttgttggagacttttttaggacttaacgtgaaaacatttccaaaggatctatttgttcttccactgaccagctttaagttttctcctgggatactgctctatctttcctataccccaaataatatagagtcttctcaaatacttctcaaggtaactctgggaagtttacacagatgtatgacaattacctgagaaagggcagaaaatcttactcagagatacctagagaacaagaccaaaagcctacagctgacactagatgcttaggcttagaataataataaaaaca

SEQ ID NO: 811610 - DNA, 607 bp, Homo sapiens
gacgggtgggggcaaggggagtgagagcattaggacaaatgcctattgcatgcggggcttaaaacctagatgatgggtgataggagcagcaaactaccatggcacatttatacctatgtgacaaacctrcatgttcagcacatgtacctcagaacttaaaataaaaacactgtatttgaaaagagttatacctaatacatgtgtctttgggtctcacaacagtcttgtgttcctttacatcagtaggaacacaaatccattttacattgtcgttgtttgttttgcctttctcaccaatgaatgtggaactcccagagtttacccaattcttgtggctctctttagagtatcaggctatttctcaagtcactatgtattactgaagaatactctggtcggcaaaaacctaactctatccagaattggttaaaaggtagactgagtggcttatgtaaaataagataagggagggataggacacagggaatgaaatgccatcaagataccttttgcattgttcagctctcagtaggagctcttactctccgaaacaagctcagtctcaagccagagccatggctgatatagctatagctcagctgtgtag

SEQ ID NO: 811611 - DNA, 626 bp, Homo sapiens
aaacttcacccactgcttgtttttgtacygacttaagaatggttaaaaaaataaattcaggctggacgcggtggctcaacgcctgtaatcccagcactttgggaggccggggtgggtggatcacctaaggtcaggggttcaagaccaacctggccaacgtggcaaaaccctgactctactaaaaacacaaaaattagctgggagtggtggcaggtgcttgtaattccagctacttgggaggttgaggcaggagaatcgcttgaacctgggaggcagatgttgccgtgagccaagatcgcgccactgcactccagtctggggaacaaagcgagactccatctaaaaaaaaaaaaaaatcaaaagaagaaaaatatttcattatgcataaacattttattaaatttaagtgccagcgtctgtataggaagtttaattggcatccatttgtctgcatattgcctgtgccactacgtggtagagttgtgtcgttgtgatagagaatcatgaccccaaaagcctaatatatttgctttctggctcttgatagaaaatgtttgccaatccctgctctagatccggaagtaaaaaaaacagaggtgttttttttaaggaaatgtattactcag

SEQ ID NO: 811612 - DNA, 553 bp, Homo sapiens
aataaaactgaccctgccttttagaacagagatagttgggtgcatgttcctagctctctgtccttcctttcattcattcattctcaccaaaggcagtaaatagggagtgaaacattggcacataagcctttytttactgcagcattgataaaaggtaacagatgagtgtttatttgtaaggttcagtttaatgtatgtgtctgaaggtcatgggatgctcagttatgtagtgataagttgtaacgtcctccctcgcaggctgaaagcaacacattggcaagacttcctagtgattgttttggtcatagtttaggcttaaaaacgacaaaaggaaaaagaaggaaatctagtgttaaggcattcacctatcttggcatttaattaactccatactaatcaaagtacaaatttaactgttctgaaccacatcaaagaaaaaagacaggtgttattttgatggacgtatcatgcagctatgcaatttccatttgccaatgtcctggtttcaaaaccaaaagacctggtctctctaagtcctgctacttgagagatg

SEQ ID NO: 811613 - DNA, 509 bp, Homo sapiens
tttgttacctgcagaggtgttacaagaaatttcatctgctgcaacgaagacgaactgatttctggaagagaagataaaattcacaatactgctcgctcagggggaaatgtgctctctgccaattgcttcgatgtgtacagatgaggggagggaagggtgctgcgtgtgaatggatgttgcgaggaaatgtgctgatgtacctcagagtttagaaagatcatgaaataagcatgcggggacctcttaaagtcatggtaatgtcagaatacgaactatgtacaagctgttgcaccaaatattaatactatgtgttaccaaaacatgccaggatatgtttctaaggctaaagcatttcaaattgtgctcatatgactttctatgctaaagagattactttttaaaatgggactaatgattaagaaatagggtatactacagctagctagaaaaattataaaattctagacttataatatcaaaaaaaawtaagaaaaagtgctgtcatttca

SEQ ID NO: 811614 - DNA, 553 bp, Homo sapiens
ctcacagtcaatattctcagatggggcattcaggatgccgggagkggcgtatggatgtgttccctgagaggaaagatggccactgagatgggcgggggacgcacatgcccgctggctgaacagggaggtcccacaggggtcccaggcatgcctgctgaacagacagaggatgcttggaggcggggtgcagagtcagtgtccgtagagcctgccgggagcgtgccggcttattctttctcgcggtgcctgagctgcgctcccccctccttcctgccctgccctggctgccgctggccccatctcaggaagctctagcggtgcctgcagggatgtggcggccgggggtggagtctgagccagactatttccatccaggacaagcggttctaggaaatcctcctaaatgagcgtctgacaaccctaacctcgttcccgccgtggccctgcgcttgcagggagctgccagcccctgcacacacacacacacgcttgcacacacgcatgcatgctcatacatatatgcacgcacgtgcacaggcgtgcacacatgtat

SEQ ID NO: 811615 - DNA, 505 bp, Homo sapiens
aaccttagggactctacctggtactctgttctactgtggctgagctggcacacaagccacaagacaaaatcttccccactcttttttctgcaagcaggggagcctctccctgtggccaccactgccccaggaccatggcagctactgcttggctactgccggtgttcatttaaggaccaaggtctcttcagtcagcttgtgtgaaggctgccaggcctgggtctctcccttcagggcagtgggctcccctctggccaaaggtaggtccagaaatgacatccaagagccaaggcctggaatcagggacccccaagagccaacttggtgctctactccactgtggccgagctggtaactaagctgccagacaaaggcccctttactcttccctcccgcttcctygagcagtaggagcctctccccgtagtcaccacgtcagggaatatgctgggtcatatctgaagtcagtgtgtctctgagtctcactcaaggcccacacggagta

SEQ ID NO: 811616 - DNA, 513 bp, Homo sapiens
tcccatcacgcgggtagtgaacayagtacccaataggtagcctttcaacccatattctcctcccttccttccccccaagtggtccccagtgtccattgttgccatgtttatgtccaaacgtgttcaatgtttagctcccacttacaagtgaaaacatgcagtgtttgggttttctgtttctctgttattttgcttaggattatggcctctagctgaatccatgttgctgcaaagggcatgattttattcttttttatggctgtatagtattccatggtatatatatatataccacattttctttacccagtctaccattgatgggcccttgggtggattccttgtctttgctattgtgaatagtgcagcagtgaacccaccaaggcatgtgtctttttggtagaatgatttattttcctttggatatatacccagcaatgggattgctgggtaaaatggtaggtctgttttaagtgttttgagaaatctccagaaaactttccacagtagcta

SEQ ID NO: 811617 - DNA, 513 bp, Homo sapiens
tcccatcacgcgggtagtgaacatagtacccaataggtagcctttcaacccatattctcctcccttccttccccccaagtrgtccccagtgtccattgttgccatgtttatgtccaaacgtgttcaatgtttagctcccacttacaagtgaaaacatgcagtgtttgggttttctgtttctctgttattttgcttaggattatggcctctagctgaatccatgttgctgcaaagggcatgattttattcttttttatggctgtatagtattccatggtatatatatatataccacattttctttacccagtctaccattgatgggcccttgggtggattccttgtctttgctattgtgaatagtgcagcagtgaacccaccaaggcatgtgtctttttggtagaatgatttattttcctttggatatatacccagcaatgggattgctgggtaaaatggtaggtctgttttaagtgttttgagaaatctccagaaaactttccacagtagcta

SEQ ID NO: 811618 - DNA, 564 bp, Homo sapiens
aggacacatttctctcttgtaggtttgatcaactgaaatatactagaagcttatccttctgtagaacgaaatacaggagataattctttatggttacaatgtctttgagtaaacggacttgagtgagaaacataggcattcacagctctgtgaagaagcacctccaagaactttccccatcagggccagtgtattcatccgcactcagcagttgcttcctgaaatttgaaatgagtcaagatgctcagaatggcctccatagtgtggggcaaacagaaggagtttagcagcaagcttgttacagctcactggctcccagagcacggctgcccatccttccccggagccgcctcactccagacatgggctctgcttttcctccctgacccgccaatcactcttccttttgcttgcaagcagctgaacagctttatttgtgtttctcatcacagttttattttcacttcaataattctgttcaaaaattatccaaatacttggtttttgccatatgaataggcragcccagaaaagaggaaaggcataaacaagtgtccgcttgtc

SEQ ID NO: 811619 - DNA, 589 bp, Homo sapiens
ttgcttctgcctggctcttgcaagcttcttacaggcaggagatggtgtctttttcacctttgtatccctggttatttgcaccaactctagcaaagrgcaggtgccagatcatgtcggaggagctgaactaggtgtttggaagtgctgcatgagggtctgtgcttacaacctggatcttcggtaaaattctcgaggtcagacaggttgaggctctaacagaggtggctgcttttgtctgtgagattcctggcgggtcagtatctatccatcatcaccctcctgtttttttttttttttttttttagacaaagtcttgctctgtcgcccaggctgtagtgcagtggcgcaatctcagctcactgcaactactgcctccagggttgaagcgatcctcccacctcagcctcccaagtagctgggactacaggcatgcaccaccacagccagctaatatttgtatttttagtaaagacggggtttttattggccaggctggtctccaactcctgacctcaggtgatccgcctgcctcagcctcccaaagtgctgggattacaggtataaaccactgtgcctggtggcctccctt

SEQ ID NO: 811620 - DNA, 539 bp, Homo sapiens
agtatctttttcctttaatgttatctcctacatctcatcacaaacatttatgtatacttcacaattaccttctggttcccaaattatgactcttgcacagtgaggattcttcgagatctctccctgttttcagcactccctgaaatgttttcaaagcttcctttatattgacatttatggatattttgagctagtacagatttctcctactccaagatatggattcacctgtgcctccaggagcactggctcgtctaataaaaataagaattagaaaataaatcatatcacagaccacaaactggacccatggggtgaattttaattgttttccatgaatacaattgcagagaggataatattgttaccagtggaaggtgtccaggttcttggtgtattggacaaaacgcacaaacaaggcaataaaagaatgaagcaaaaaacacagattcatttaaatgaaagtacactccacagagtagaagtggcctcaagcaagcagctcmagagtgctggttatagaattttctggagtttaa

SEQ ID NO: 811621 - DNA, 583 bp, Homo sapiens
gatatgagatttggcaggagccaggggcagaatgatgtagtttggccctgtgtcccctcccaaatctcatcttgaattgtactcccataattcycatgtgttgtgggagggacctagtgggagataatcgaatcgtgggggcggtttcccccatactgttctcgtggtagtgagtaagtctcacgagatctgatagttttatcaagggtttctgcttttgtgtttccctcattttctctggccactgccatgtaagaagtgccttttgcctcctgccatgattctgaggcctccccagccatgtggacctgcaagtccaattaaacctctttttctcagtctcaggtatgtctttattagtagcgtgaaaatggactaatacagggtccaacgtcatcattttgctgtggatatccagttttccgcagaatttgttgaaaaacacttgtcctttcccatttaatggtcttggcatccttgtcaaaaatcatctcactgtatattaagggtttatttctgggctctccatgtcttttactgatctatatgtctgtctatgtaattttgacctcaaggttccttg

SEQ ID NO: 811622 - DNA, 571 bp, Homo sapiens
acacaaattttatataatgtattttttcctaattttttttttttygagacagggtctcactctgtcaccaggttggagttcagtggcttaattatggctcactgcaacctctgcctcccacgctcaagtcattctcccatctcagccttctgagtagctgggactacaggtgctcaccaccatgcctggctaatttttgtatttttttgcagagacagggtttcaccatgttgcccaggctggttttgaactcctgagctgaagcgatccacccgcctcggccttccaaggtgctagtataacaggcatgagccaccgcgccaggctcctggatgttttatcgtggacatagtccaaggttgtatgccatctttatcccatccatttttctgtgtgtgtgatttttttttttttttttagtagagacggggtttcaccatgttagccaggatggtctcaatctcctgacctcgtgatctgcccgcctcagcctcccaaagtgctgggattacaggcgtgagccaccgcgcctggcccccaatccatgacaaaaaacttcgaatagtacatg

SEQ ID NO: 811623 - DNA, 571 bp, Homo sapiens
acacaaattttatataatgtattttttcctaatttttttttttttgagacagggtctcactctgtcaccaggttggagttcagtggcttaattatggctcactgcaacctctgcctcccacgctcaagtcattctcccatctcagccttctgagtagctgggactacaggtgctcaccaccatgcctggctaatttttgtatttttttgcagagacagggtttcaccatgttgcccaggctggttttgaactcctgagctgaagcgatccacccgcctcggccttccaaggtgctagtataacaggcatgagccaccgcgccaggctcctggatgttttatcgtggacatagtccaaggttgtatgccatctttatcccatccatttttctgtgtgtgtgatttttttttttttttttagtagagacggggtttcaccatgttagccaggatggtctcaatctcctgacctcgtgatctgccygcctcagcctcccaaagtgctgggattacaggcgtgagccaccgcgcctggcccccaatccatgacaaaaaacttcgaatagtacatg

SEQ ID NO: 811624 - DNA, 595 bp, Homo sapiens
ataatttgtcttagttgatattcaaggctttaaaagtcattattcctgggcttggtaagtgaatttatgagatttactgctctagaaagtatagatggcsaaaggaccgttttgtattgcttcctgattaccagtctgattataccatgtgtgctaatatactttttttgttatagattgtcttaatggtaggtcaagtaataaaaagagatgaaataatttaaattcttaaatgaatcagtttttcttccctttctcctttccgtctttcctctctctgtccttccccgaaagtctactcgggtgggcaaaaatgaaaagggggaaagtgaattatgggatcggtgttttgaaagagcaatgtttattttcagtgcttttcagtttgtcaaagagtggatctcaaaatcttgcttaaagggtaattgagatgtagcagatttatttacttagtcatggaaagaaaaaaattcagtcaaaagctaaagatttccttttgattgaagacagattggttctgtggccttggaactttcccagacttaatggggaaacatcatttctagattagcatactctttggtttaaatttaat

SEQ ID NO: 811625 - DNA, 571 bp, Homo sapiens
tttattactactgagaactgtagaactgcaaagtggttctaaagttgtagaaccactttagaaaaaattgggcgatttcttgtaaagttaacacattcactgtatgattcagaaatttcattactatgttgtaygtaagaaatgaaaacacatgtctacaaaagaattatatataaatgtttattgtagttttatttgtaataacaaaaagctggagacaattcagatattcatcaaacagtgaatggataaacaaatcgtgatatattcattcaatggaacacttcttcagcaataaaaagcaaaaagctactgatacatgcaacatcatggctatgtctcaaaatcattacgatgatgaaagagggtagagtaaataatatgtgattctatctatacaaaattgtacagcaaacaaaactagtttgcaatgacagaaagcagtttagtggttgtggttaaaggtagagttggagaactttttttggagtgaaaatgtatgttcaatatattaattgtggtcatggttacactaatgtttatgtttttcaaaactcacaaaactgtatta

SEQ ID NO: 811626 - DNA, 523 bp, Homo sapiens
ccttatttctcatggctcggaggagatctctgacagaaccacctttataggtcctgaatttacgcaggtctagaaaaacattgagggaagcaatgggtaatcaaatttaaaactaatacattttaaaagaaaacaattcatggggtcctgggattagggagttggactgaaaggtgaggtcactccacacctaggcatgggagcagatcctcccatccaacccaagggtggtatccccctgaaccccacctggtgatcacacccaggtcagaaatgaccacctagagcacgacaccatcactcacctgtcactctagggaacaaaaatgaaacacacatcagtgtaaccaaaccacagaggacacacccaagaaagtctcaaacctgacaggtgggatgtggggcctgaacagcctggagcggccatttccacgtttactttttggaaaggcggcagcracttttgcaacctgccctctcacacgctgcagcatgatcacctgtctggagggggacagtgatg

SEQ ID NO: 811627 - DNA, 639 bp, Homo sapiens
aaaaaaaaaaagctcaggataaatctcagaatcatcttggttcttttaaagaacctscctttataatttaggatccatgaatttctctgtgtgtttggaagcccttcctatgtccaacctcgactaactctagggttctgtgtgcctgctgtggaaagtcacagatctgctgttgatcctaaagtggtgtctttcaggcttcaagatctcctgttaggttcaagactgtggggttgaggacgatcacatttttcgaagccattctcaccggtcttagggatcgcctccaagggactggtgggtgctccttccactctcactttggtgatttgaggcgcacacttctcacctgcagctctgttctttcttccttgagatcagaggctggttattgtactgggacatactctacctccttttggcttctaatgtcctttccatgagtttgctaccgagtcaattacttggctcattggattgaggtcttcagagaatattatatggggattcccaagggctctcctaggggaggtgaggaagatgatcaatacttctgcgtgtccactatgtgcttggcactctactgaccatggggatgtgagtgaggatactgaggcccaaagagataaggtggcttgc

SEQ ID NO: 811628 - DNA, 471 bp, Homo sapiens
gtgaaaattaagtccaatcacactcctcctctgctctaaaccctcccatggctccctacttctctcagcataaaattaaatccttakgcagggtgcggtggctcacacctgtaatgctggcactttgggaggctgagggggtaggattgcttgagttagagaccagcctggacaacatagcaagaccctatctctataaaaaatagaaaaaaaaatagctgggcatggtgatacaagcctctagtcctagctatctgggaggctaacatggaaggaccccttgaacttggggggtgacatagtgagattctgtctcaaaaaaaaaaaaaaaaaaatccaagcctcccttggcttccaagttccctttccctacctctttcccccttgttcactcagctccagccatcctggcctcctttctgttcctcaaatacaccagacacatccccacctccaagacttggtcccggc

SEQ ID NO: 811629 - DNA, 617 bp, Homo sapiens
tattctctatttgccctggaatcctgttcactatttacaattatattattctgaataatagtatttactattttcrtctcttttatattttaataaaccactttcaagtcactgacctttttgtttgttaaactggggatataatgtaaaaaacagataataaaaattacaaatgtaaataatactaaaacaacattagaaaatcatagccaagacagattgtcatgatattaacttagtgttaggcctaaggaaacatatcaaatgcatgttcctgtagtagatatgtaacctttcagaacataatgatattataacaatattataaagcagcattgtgaatagttaaaaccatgggctctagagccagatagcctctactcaaagccaggttctgccacttactagctgttaccttgagcaaacaacttaaactctctctctgttggtttctcaccaggaaacagggataagtactagtacacaacttataggttgtatgaggattgatgtgaagattgaattaattaacatatgtattagaatggtgctcaacacagaaagtgctaaataatgttagctttgtatctataatggggtttctgttaaaaattgta

SEQ ID NO: 811630 - DNA, 595 bp, Homo sapiens
gtttgagaccggcctggtcaacatggtgaaactccctctctactaaaaatataaaaattagctgggtgttggccgggcatggtggctcatgcctgtaatcccmgcactttgggagaccgaggtgggtggatcatgaggtcaggagatctagaccatcctggctaacatggtgaaaccccatctctactaaaaaataaaataaaaattagctgggtgtgatggcaggtgcctatagtcccagctacttgggaggctgaggcaggagaatggcatgaatccgggaggcggagcttgcagtgagctgagattgcaccactgcactccagcctgggcaaagagcaagactccatctcaaaataataataataataataaaaattagctgggtgtggtggcacatgcctgtaatcccagctacttgggaggctgaggcagaagaatcacttgaacccgggaggtggaggttgcagtgagttgaggttgcaccactgcactccagcctgggtgatggagtgagactctgtctcaaaaaaaaaaatttttttttttttgtagaaatggagtcttgctttgtttgcctaggctggtcttgaac

SEQ ID NO: 811631 - DNA, 595 bp, Homo sapiens
gtttgagaccggcctggtcaacatggtgaaactccctctctactaaaaatataaaaattagctgggtgttggccgggcatggtggctcatgcctgtaatcccagcactttgggagaccgaggtgggtggatcatgaggtcaggagatctagaccatcctggctaacatggtgaaaccccatctctactaaaaaataaaataaaaattagctgggtgtgatggcaggtgcctatagtcccagctacttgggaggctgaggcaggagaatggcatgaatccgggaggcggagcttgcagtgagctgagattgcaccactgcactccagcctgggcaaagagcaagactccatctcaaaataataataataataataaaaattagctgggtgtggtggcacatgcctgtaatcccagctacttgggaggctgaggcagaagaatcacttgaacccgggaggtggaggttgcagtgagttgaggttgcaccactgcactccagcctgggtgatggagtgagactctgtctcaaaaaaaaaawtttttttttttttgtagaaatggagtcttgctttgtttgcctaggctggtcttgaac

SEQ ID NO: 811632 - DNA, 656 bp, Homo sapiens
aacagaaataaagtacacaataagtgtaatgtgtttaaatcatctcaaaaccatcccccaccccgggccatggaaaaactgtcttccaggaaactggtccctggtgccaaaaagattggagaccgctgsccgggcacggtggctcatgcctgtaatcctagcactttgggaggccgaggtgggcggaatgcctgagctcaggagttcgagaccagcctgagcaacacggtgaaaccccatatctactaaaatacaaaaattagccgggcatggtggcatgcgcctgtaatcccagctactcgggaggctgagacaggagaatcacttgaacccaggaggtggaggttgcagtgagctgagattgcaccactgcactctagcctgggcaacaagagcgagacttcgtctcaaaaaaaaaaaaacaaaaaaaaaaaactggagaccactgacagggaatacactcaaggtaactatgctccccattcttcccctctcctgaggctgtccctccccatctccttctcctgctacagggaaggggcagcacaggtcctctgtgccccagagcccctcttctaccctgcctgtgacgagggaagtcaggccacctgtcccaacctgaggaagctcagaaaacaccaagtttttcactggga

SEQ ID NO: 811633 - DNA, 656 bp, Homo sapiens
aacagaaataaagtacacaataagtgtaatgtgtttaaatcatctcaaaaccatcccccaccccgggccatggaaaaactgtcttccaggaaactggtccctggtgccaaaaagattggagaccgctgcccgggcacggtggctcatgcctgtaatcctagcactttgggaggccgaggtgggcggaatgcctgagctcaggagttcgagaccagcctgagcaacacggtgaaaccccatatctactaaaatacaaaaattagccgggcatggtggcatgcgcctgtaatcccagctactcgggaggctgagacaggagaatcacttgaacccaggaggtggaggttgcagtgagctgagattgcaccactgcactctagcctgggcaacaagagcgagacttcgtctcaaaaaaaaaaaaacaaaaaaaaaaaactggagaccactgacagggaatacactcaaggtaactatgctccccattcttcccctctcctgaggctgtccctccccatctccttctcctgcyacagggaaggggcagcacaggtcctctgtgccccagagcccctcttctaccctgcctgtgacgagggaagtcaggccacctgtcccaacctgaggaagctcagaaaacaccaagtttttcactggga

SEQ ID NO: 811634 - DNA, 591 bp, Homo sapiens
agattgagatggaaaaatgggatggttataaaagggtctttgcttttttttttttttttctgaggcaagagtctcactctgtcacccaggctggtgtgcagtggcatgatctcagctcactgcaacctctgcctcctgggctcaagcgattcttgtgcctcagcctctcgagtagctgggattacaggtgcacatcaccacattcagctaatttttgtatttttagtagagagggggattcaccatgttggccaggctggtctcaaacttctaacttcaagtgatccgcccacctcagcctcccaaagtgctgggattacaggtgtgagccactgtgcctggcggtgaaaggatctctctgaaacagagaggacagatctagggagattttgcagaagtacattacctacttaggatgcattaaccacccaatggcattactacatattgttattctgctgtggaggtgaaagtattatgtatcttacagatataataaatgatttgaaggcagcatggtgtagtggaaaaacttctgaatttgtattagaacctcgttctggatcckagctccatgactgtgtggctgtg

SEQ ID NO: 811635 - DNA, 646 bp, Homo sapiens
tggtgtggactggggcatagtacttcgtctctccatgctcagtatagtaggartgggagatagaaaagacaatgattgaagagtaaacatagggtgccattgacataccccattcaggtctcagagagcttctgaacctgtgtaaaccactgacctcactttactgctttataatttgcattgtgtaactctgtctccaggagacctcaggcttctttagagcagagggcatttcttttcgcttttgtctctcccgcccttagaaggtgcttggcacattcttggctctttcctggatctgtcacattctctttgctaagcaccaagaggcaatttgtgctgatagaggcaatctctatcagtaggatagctgaccccatcttcatcagtaggatagctgcctccaagtaggtctctactggaaactctctgacagaggtgggggctgtcccactccccagaaccttgagtgtcagaggcagaatcccaaaggcctggtcatgccaccttgggacagtctggggtgggcctctctctgggagccagctcacagttcccatgctgtctccagcaactgttctttgacacacatatgaggacaacatttctcctatctgttggaacacagtcaacatttagtgtctga

SEQ ID NO: 811636 - DNA, 553 bp, Homo sapiens
aggaagagcatggccctagcagtgctgggttgcagattttcaccccagagcacccatttacaagattcagtaactcttggctgggcgtggtggctcatgcctgtaatcccagcactttgggaggccgaggcgggtggatcacaaggtcaggagttcaagaccagcctggccaagatgatgaaaccccgtctctactaaaaaaatacaaaaatataaaaattagctgggcatggtggcgggcacctgtaatcccagctacacgggaggctgaggcagagaattgcttgaacccaggagatggaggttgcagtgagctgagatcacaccactgcactccagcttgggtgacagagggagactccatctcaaaaaaaaaaaaaagaaaaaaaaaagattgagtaactcctttgccagctctgagcatagcagctggtwtctttttttcagtgcctccagttcatgtcttggggaaaaatatctgattggcctagcccattgttttctttcaggccacatcatagactactggccagtccatgaactggttgtgctt

SEQ ID NO: 811637 - DNA, 629 bp, Homo sapiens
agcttcttgacttcctctgcacacttcccttccctcttctcagtctctaccttcttcccacaggactgccagcagcagcrtctgaaccgaaggctgcattgcctgtctcagggtatgtgactttgggatgtttttcctggagaagcccacctggggtgaatcaggccctgaaaactcctatgggtagcttttgagggttcatcccttcctggacagctccttttttctggccaattgtgccccttattgggttgccatctcctaggcctctctttccccaggtcctcctcaataaggttgcaagtttcccagcttctcctggagtctcttttctctgaaagcagcatcctgccttattgaagttttctcaagacagcccacatttttaggggaatagacctggataaaaatgacaaacatttccattgtaatacatttctgagacatttaaaaacattcacgaaagccatcctgtggtgtgctggcattgaatggggagtaggggggaaagagggtttgggagggggtgtacggtaaggaaaagacaccttgcagtaggagaagccaggagtggaattgcaggctgagctcggagtcctggaagacttcacgcttgctgggaagcagag

SEQ ID NO: 811638 - DNA, 629 bp, Homo sapiens
agcttcttgacttcctctgcacacttcccttccctcttctcagtctctaccttcttcccacaggactgccagcagcagcatctgaaccgaaggctgcattgcctgtctcagggtatgtgacttygggatgtttttcctggagaagcccacctggggtgaatcaggccctgaaaactcctatgggtagcttttgagggttcatcccttcctggacagctccttttttctggccaattgtgccccttattgggttgccatctcctaggcctctctttccccaggtcctcctcaataaggttgcaagtttcccagcttctcctggagtctcttttctctgaaagcagcatcctgccttattgaagttttctcaagacagcccacatttttaggggaatagacctggataaaaatgacaaacatttccattgtaatacatttctgagacatttaaaaacattcacgaaagccatcctgtggtgtgctggcattgaatggggagtaggggggaaagagggtttgggagggggtgtacggtaaggaaaagacaccttgcagtaggagaagccaggagtggaattgcaggctgagctcggagtcctggaagacttcacgcttgctgggaagcagag

SEQ ID NO: 811639 - DNA, 263 bp, Homo sapiens
ttttctcatacgaatctaaattttagtgagcaactcctagttattgtttaagctcaagataaggttttatattgtattaaggtaagtaatgctaggctctgctgaggtaacagatacactctgaaatctcagtgccttaacacaataaaactttatatactgcttttcctcagtctaatgtgacattcccggtttggcagctttcctgggcagctctcctccaagcaatarctcagggatccaggcttctttcatctctacaa

SEQ ID NO: 811640 - DNA, 625 bp, Homo sapiens
tatgtatgtaaattcttttctattctctatttactatctcactctccaaatgcaaactgagttctcctttcttttttctgctwtttttaaattcatgaacgctcattaatggctcacaaaatgtgatgccttacagactggagctggcattctgtcctggttctgacctgtgctcagtagagactgattagcatcagtaataataataggacagggttgcaggctgcttagtacaggcagatgaacaagtatccaagtaagcagaccttatggggggggcggtggggaagagctgttatgtattactgcatattctggccttgtaaagaactacttcctttgtagatcaacgtcagcaaaatttgcctcctccaagaattacccaacatttttatggatattagagaaaaggtgctgtggaaggttggggttttttttttttttttttttggtcatggttattttgtttttataaaccttttggtagcatatctactctctgtaaactacctttgagaaaaccccaaatacataatatatttaataccttcctttagatatggcaaaaacacaatctggaatggatggctgttctgatcaatcccggtagctctgaacttggatg

SEQ ID NO: 811641 - DNA, 565 bp, Homo sapiens
tgtggtggctcacacctgtaatcccagctgagtcagaggatcatttgagaccagaagtttgacaccagcctgagtaacacagcaagacccgaccactacaataaataaataaataaataaataaataaataaataaataaataaataaatagaaaattagcagagcatggtggcgtgagcctgtagctttagctactcaggaggctgagccaggaggatcacctgagcccaggagtttgaggttaaagtgagctatgatggtgccactgcactccagcctgagggacagagtgaggttctgtctttaaaaaaagtggaggattgggactccagaggaactctgagaagttccttgtccccagctctcagctcccctcctcccattccttttaagccaccatgttgatcagagccaccctgggctgtcactgtggcccagaggctgccagagraaacttctggctctgtgtcattcacatcgttgtaatggccttgagcaagtcacttaaccaggatccacattcatctatagactggaattttcgatgtgtacctcacagggtca

SEQ ID NO: 811642 - DNA, 537 bp, Homo sapiens
aaaagacagtcttagcctctgggcctgaggcttggaagaatcagtgcagggcaggggagggcacattaactgggacttgagaccttggcccacctcagctagcaaatggctggggtaaggcctctgcgtgtaactcccaaggcttcatggaattgacagagtccatggacatcagaagtttatggaagtgcagaggccattgctattgggttcagttatcattatccaggggctctgccatcaccagcactccccaaccacgcaaagccaggcccgaggtctcccctgcatcttccttcttcctggatcccatcagctccacccatcatctctaaatggcccctcttccttcccccacctggaatgtctcttcccaggtaggtgacatagatgagaatcatggtcttggaagctaaagcatagcccaagaccagaccaaatcaaaacactccaccacgccctgcaaagtacattgcatttccatccttcacagattccgctgttaccacgcccrgaccaaggctggacattatccta

SEQ ID NO: 811643 - DNA, 580 bp, Homo sapiens
taggacttcaatgtggagatcacagttcaagctgccacactaagtgagctcattcacagtgacaagactagggacatacaaagggccggggtgaatatgaatggtgttccakggtgctgcctgaaagtgactggcagcagtgtcagcaggggagcatgtcctctgttctcagcattcactagagaggtgtgctgagctggggcccagctggacacattggatgctgtgctccagaggaggaactgcactcacctatcgctctcctttgtatgggacaagtgggacagagccttgatggggggaacacaccactggggttccaggcagccttaactatcgaggaatggcaggaaattctgtctgcccagcacctggtgaccctggagctcctcagtttcccgggaagttgagttttggagcagtctcttccagagaggctgggagtgcatcactttccccctggaggtggcggaggctgctgggcccaactagctcattgccaggcaatccagagagagttccagacaccagatactgaacaacctacttgtctccacacctagtaaagcttggatccaat

SEQ ID NO: 811644 - DNA, 580 bp, Homo sapiens
taggacttcaatgtggagatcacagttcaagctgccacactaagtgagctcattcacagtgacaagactagggacatacaaagggccggggtgaatatgaatggtgttccatggtgctgcctgaaagtgactgkcagcagtgtcagcaggggagcatgtcctctgttctcagcattcactagagaggtgtgctgagctggggcccagctggacacattggatgctgtgctccagaggaggaactgcactcacctatcgctctcctttgtatgggacaagtgggacagagccttgatggggggaacacaccactggggttccaggcagccttaactatcgaggaatggcaggaaattctgtctgcccagcacctggtgaccctggagctcctcagtttcccgggaagttgagttttggagcagtctcttccagagaggctgggagtgcatcactttccccctggaggtggcggaggctgctgggcccaactagctcattgccaggcaatccagagagagttccagacaccagatactgaacaacctacttgtctccacacctagtaaagcttggatccaat

SEQ ID NO: 811645 - DNA, 604 bp, Homo sapiens
actcacagctccgcgcggagcgmggatccctctggcatgagcagctcactttgccattctcaggacttgtgaaataacctccatgtccctcctgacttattctgaaggccctggctgtgtgcctgcctgctcacctcatgcaggtaactgaaaacaaccctggcacattcctaatgttttctgcaagactggtggaattggaagtcagttgcccaggtggtgacacctcaggccccacctaaaatctctttctatagtttacaacacacttagcggagcgcctggcccacaataagtgctccataaatggctgcattatgatgatcagggcctaaccatggctgtgccctcccttgcccttcaaaagtgtgggtttgttcagaggccactggccagaagagtcatagaatcacaaaactgctaagcacgttgaggtcatctggcctgccctctccacctcttgtgttaacggatgaaattctccactgtgatccccaagtgcattctgcagtcgcgctgcgacccagtcaactcactttcccaactgctcctactttaagtcctggaaaaaagactcctccttttccatcctcacgcttgctcc

SEQ ID NO: 811646 - DNA, 663 bp, Homo sapiens
agtcatctccacttgctcatcccttcattcctctcaggctcattgggagctggctctgggcccatactcagtgcctgctgaccccttgagaggtgcggaaactgaggtcagctgcactcactcccctcaaatcttggaacacatgcccctccctgttctgacatctaagccagagggggaatgtgcagagcaaaccccacaggacagaccattgtcttctgaggctgccccaccctactgtgtgtttgcagagagggactgcagagcagcagaggagaggggtcaagggagagggagggagtgtgtagctgggtagcactacactgctgtctgctgagcagaatggatgcacttggtttcggggtttttgttgttgttgttttttgagacagagtcttgctttgttgcccaggctggagtgcagtggtgcaatctcggctcactgcaacctttgcctcccaggttcaagcgattctcctgcctcagcctcccaagtagctgggattacagaggtgcgccaccacgcccatctaatttttgtatttttagtaaagatgggatttctccatgttggccaggctggtcttgaactcctgmcctcgtgatctgcccgcctcggcctcccaaagtgctaggattacaggtgtgagccaccgtgcccgg

SEQ ID NO: 811647 - DNA, 494 bp, Homo sapiens
tagttgcttttattactttgaaayttctcagaaggtaatgtcacactaacctcacatggctattgtttttttttaataattatgggccaagaattattctagaaactgtgactatcacagtaaaatacaaaaccctggcttcatgaagctcacagtttaaagggttaatgagaataacatatgggcaagcatctgtcacagtgccttgcaaatactaggtgctcaataaatataaattattactctctttggttccagcctctccactttcttccatttattatgagtactattagaagaatgatattctttattaattatatattcattatatttctctgcttaaaaacctacattagtttcctactgcaatacccaaaccaatagtccagacatatttgcttgcacactgcattaatttttttaagtatttatttaaaaaattatatgcacgttctatgtagtaccaatatgatatacacattataaatcat

SEQ ID NO: 811648 - DNA, 508 bp, Homo sapiens
tgactacaaaaccatccactataagtgatgtgcaccaccaccttcccagtggtatgcaggagttctacccaagatggaaaacaaaaaaaaaaggatcctctaaacactcctaattcttgyctcaggctgaacatcaagcctatctgtggtgcttttaaaaatttaaggtgcaaggagctaatctcacaaattctgactcaatagctctacactcagtcctcatttctaatttttataaagctttacgagtgattctgacatgagccaattttgaaagcaaatgatattctgtaacgactaaaatacactaagaaaaatacaactttgggggtttgattggaatatgtttgtggaagagtagagggtgaaaggacaatgatgaagtgtaaccgtatttctaatttccttgctttttagtgagtggaaggacaaatgtatgttttcagtttgaggagtgggagcagatccaatcagaacagaagagaaactaaataatgctaacaaattc

SEQ ID NO: 811649 - DNA, 568 bp, Homo sapiens
tatccccaaattaatgtcagacaccaaaccacagattcaggatactcagagagtacaaagcaggawaagagccaaaatctacacctaggtatttcatacttaatctccagaaaatcaaagataaagaaaaaatattgaaacaagccaggaggattaaaaaagaccttatttatagaagggcaaacataagaattacatttgacttcacctcagaggccatggaggcaagaagagagtgaagtgaaatatttaatgtgttgagagaaaaaaaaaaaaacccatctgcctagaattctgtattttgtgaaactgtccttcaaaagtaaaggagaaataaatactttctcagacaaacaaaaattaagggagtattttgataacgggggcatgataaagaggtcgatactttaggaagatgtaacaatgcttactgtatatgcacctaataacacagcatcaaatatgtgagacaaaaactgaaagaactgaaagaggacacagatgtattcactgttatagttggagacttctgcatcactctatcagtaatagattcagcaggcaatca

SEQ ID NO: 811650 - DNA, 482 bp, Homo sapiens
ttcccagaaagaggggtctcgtcagcgtcttagtggagaagggcaagtgcacgcgagactgcagaggagtatttgctggcctctctagctgagtgaactttgacctattctagacagcagtaaactggcaccgattatggtgcaatgtttgatcaaattattttatttatttttaatggataattcatgtaataagacacaaaatgtagaatatatttaaaaaattacacagtgaaagcagtctcctcccacctctagccctcagtcctccaatgcctgccgactctagaggtagccacgatttttgtggtgtttttaataaagactttgtaattttagaaagtgatctasttcagcagtcactttatacagggtaggaatctttttgttttaaaagaaaacaatttggaaataattacagattcacaaaatttgcaagaattgtacagagcagttctgtatacctcttacacccagttttt

SEQ ID NO: 811651 - DNA, 482 bp, Homo sapiens
ttcccagaaagaggggtctcgtcagcgtcttagtggagaagggcaagtgcacgcgagactgcagaggagtatttgctggcctctctagctgagtgaactttgacctattctagacagcagtaaactggcaccgattatggtgcaatgtttgatcaaattattttatttatttttaatggataattcatgtaataagacacaaaatgtagaatatatttaaaaaattacacagtgaaagcagtctcctcccacctctagccctcagtcctccaatgcctgccgactctagaggtagccacgatttttgtggtgtttttaataaagactttgtaattttagaaagtgatctagttcagcagtcactttatacagggtaggaatctttttgttttraaagaaaacaatttggaaataattacagattcacaaaatttgcaagaattgtacagagcagttctgtatacctcttacacccagttttt

SEQ ID NO: 811652 - DNA, 494 bp, Homo sapiens
gtgggaggggaaggagaggttggagattggggcctggtgcaggagctagagaaaagggggaggaggaataggttgaagaagggakgcatgcagctgagtgcagaagactcaggactcaggactcagtacctggagctgcttagggtccctgtttcagaaacgaggaggataaggactagtgcagagccatcttcaccattaggggcaaagaagaactctgtagatgtttttttcttttagctagttttgcttttccttgtgtaaaatggaacctattaaggtgaatttccttacgggagggagttgtaatgtttggttgttaaaaacctgggcttgaattccaactctgccatttgctagcttcatgattttttagaagttcattagcttctctgaactttggagttcagtgaggattagaagaataatgtacgtaaaacagcacaggatccggcacacagcaatcatttgttaaaagttaactggtgttgtaa

SEQ ID NO: 811653 - DNA, 712 bp, Homo sapiens
gcagccttgacctcttgggctcaagggatcctcatgcctyggcctcctaagtagctgggactacaggtgcacaccaccacagccagctaattgttaaactttttgtagagatggtgtcttgctatgttgcctaggcctggtctcgaactcctggcctcaatccaacctcctgcctctgcctcctgaggctgtgtgattacagatgtgaattgctgtgcccagcccttatcttctattactatatttcaagctggtcatggtcaaaattgttcaacctggttttcccccataaaattaagtcactttcttcaaccctcttccatcagattttattcatctcttagttttcttctctgtcctatattttctctatctcaaaatgtagcacctagaattcgacctgatattccctgataggggttgcggagagtacagattgctgcccaagagtgttttgttgttattgttgttttccttttttgttttttaaatgaagcttttggtgtcctctaaatcctctttgtaggaacttgccagaaactgttaaatctgataggattgaatctggcatgctccagtcatctgagcaagagtttgtttagggcttgtgaatgtgcccttgatcgggatgtgaggttggaatgcaggacgatgcttttggtctggacattggaacgcagcagtcggccctgggcaggggttggggcccgga

SEQ ID NO: 811654 - DNA, 395 bp, Homo sapiens
agcaagactctgtctcaaaaaaaaaaaaaaaaaaaaaaaaaaattatttgttctgtctcaggtcttagggaccccttacctcagctaatgtctctgtcccctaaatgcacatcggtgggcagggcaaacccgtaggtgcccttatccctcccaaggctgcactgcaaagctcctgtgtttccattgcccactttcttctccctctcctttcttttctgattataccaaacaggaatgactcgtgtacttgagtcaaaatcctgatggcattgggaaaagtaaactgaaggaatttttgtacacttrtaccagctaagatgttctgactgcaacgacagaaaactccagctcaactggcttaaacaagaacagggctctctcacgtgagaagccaa

SEQ ID NO: 811655 - DNA, 616 bp, Homo sapiens
tgggaggggctgaatgtggtgaagacgggccgagtcatgctcggggagaccaaccctgcagactccaagcctgggaccatccgtggagacttctgcatacaagttggcaggtgagattttggtatttttcccccttttccaaaatctgatttagttgccacaaggatttgggtttccgaggctggaggtagacatgataccatatgcaggttgattttatcggagtttattgttttcctccctcttaagttggcgtttggctttggttgttaacatcacttagtcgtacctctgttacacgaagtgtagaacctggtacaacacactttgctggccagtctttcctgaaggctctcactgtttgcaccagcgtggccgggagggctggatgtggggagggcatttttcagccttaagtgaatggccattgtaggctttttcttttaacatggtctaatgtccatggagcttcagcttttatgctgctgtggctgtagatttctggcaatgggmgcattttaatccttctggtcttggtcatgtgactatctctttctccacccaggaacattatacatggcagtgattctgtggagagtgcagagaaggagatcgg

SEQ ID NO: 811656 - DNA, 639 bp, Homo sapiens
tttgaaaagaatatcatgacacctttttaatgaactggaagcgtattttgaaagtctkaagaatagctggggcatctttctctcagactttacatggtggccgattgatccctggtacccgttcttcagtctcccacagtgatgtgcataaacacctttgccatggcctgctggtgggcagcgtgtactgccctgccctgggctttgggtctggcataggactttctttggacaacaatctgtgagaagaaaggacaagagcaaaattttcaatatgctcagctggcgggtcttgccctcttgtgcacccatcctttgctctgggatgaattttccctgggaagcctgtagccccagcaggatgagacatagagcagaccagaaaccaatccatagcttgcagccaagcccagctgagcctaccctgggtcagccaacccctggatgacccactggttgatacctgagctaggaggaaatgcttatagttgtatgctgttgaatgttggggtggctgttctcatagcactattgtggtatggctaactgatatgcataggatagtcgctatatatggaaactacgggatgcttgataaaatgggcaattaatcaacattaaacagtaaactcgtaggag

SEQ ID NO: 811657 - DNA, 639 bp, Homo sapiens
tttgaaaagaatatcatgacacctttttaatgaactggaagcgtattttgaaagtctgaagaatagctggggcatctttctctcagactttacatggtggccgattgatccctggtacccgttcttcagtctcccacagtgatgtgcataaacacctttgccatggcctgctggtgggcagcgtgtactgccctgccctgggctttgggtctggcataggactttctttggacaacaatctgtgagaagaaaggacaagagcaaaattttcaatatgctcagctggcgggtcttgccctcttgtgcacccatcctttgctctgggatgaattttccctgggaagcctgtagccccagcaggatgagacatagagcagaccagaaaccaatccatagcttgcagccaagcccagctgagcctaccctgggtcagccaacccctggatgacccactggttgatacctgagctaggaggaaatgcttatagttgtatgctgttgaatgttggggtggctgttctcatagcacyattgtggtatggctaactgatatgcataggatagtcgctatatatggaaactacgggatgcttgataaaatgggcaattaatcaacattaaacagtaaactcgtaggag

SEQ ID NO: 811658 - DNA, 572 bp, Homo sapiens
atggaaatggtgacattttgggacrttttgaagagttggtaagattttggtggatacagaaaggctattcgagacagaaagagttacgtcaacaaagaccaagagtcggggaaagtttatgtttgagaatactgagcagctgagtttggtgaaacagagggtataagaagaatagaggatgatgctgtatgtggaaggctgaataaagaccttaaagagtggcatttattcagtagctagcagaaagcagttgaaagttttagaatacggcagcattgtagaatgggacgggtaagggtaacaatacttttggtgtggcatggtggttctggaacagggtcctgacgagtccccttgttgagcccaacattaactctttagctgctgggtcgtgaagctgtcctggggaggggtccgggtggcagtgggacactcagagggcctggggcagccactgtactaacacatgcttaaggatttcagtgttttaataagtggtacggctatcctggtgtgtactggctgaaaagcagccctgggaacaaattgttattggaagttaaagattctcc

SEQ ID NO: 811659 - DNA, 593 bp, Homo sapiens
tttggtagacagattcatgatgtatttaaaacattgctgtcttatccgttattcttctctctgtgtagaaatatacaagttgatgagggcagatattttcataatcctagttctgtttagcaaatggaagtccattactggcagtgtgagggtaaaaagtgaaatgggtaacagattaaagaaaagtggcagagaggtagcaacaaataggttcagaacatgtttggaagattatagagggggcacaatggttcagaatgcctgcaatcctggcactttcagaggctgctgtgggcatattgcttgcacctaggagttttagagcagcctgggcaacatggcaagaccccatctctacaaaaaatttaaaagttagccaggcatggtggcccaaccctgtagtcccagctacttgggaggctgaggtgggaggatcgcatgagcccaggagatcaaggctgcagtgagctgtgttcgcactactgcactccagcctgggtggcagagtgacactctgtctttaaaaaaaaaaaaaaaaaaaaaawtagaggaggtaaaaaaaaaaaaaatattcaagcctgatttagcttgtt

SEQ ID NO: 811660 - DNA, 564 bp, Homo sapiens
gcccctacgaggcggtgcctcccagttaggctacttgggggtcagggacccacataaggaggcagtctgcccgttctcagatctcaaactccatgctgggagaaccactgctctcttcaaggctgtcagacagggacatttaagtctgcagaggtttctactaccttttgtttggccatgccctgcccccagaggtggagtctacagaggaaggcaggcctccttgagctgcggtgggctccacccagttcgagcttctgggctgctttgtttacctactcaagcctcagcaattgtgggcacccatcccccaggctcgctgccaccttgtagttccatctcagactgctgtgctagcaatgagcgaggctccgtgggcgtgggaccctccaagccaggtgcaggatataatctcctggtgtgccgtttgctaagaccattggaaaagcacagtgttasggtgggagtgacccaattttccaggtgccatctgtcacagcttcccttggctaggaacgggaattccctgaccccttgcacttcccaggtgagacgatgcctcgc

SEQ ID NO: 811661 - DNA, 533 bp, Homo sapiens
agatctcaccgtgtcgcccaggctggtcttgagctccttggtgcgagtaattacaggcatgagccaccccgctctggcctagcagtgctatttaaaatggtatcggtcgagtgcggtggstcacgcctgtaatcccagcactttgggaggctgaggcgggtggatcacgaggtcaggagatcgagaccatcctggctaacacggtgaaaccccgtctctactaaaaatatgaagaaaaaaaaaattagccaggcgaggtggctggcgtctgtggtcccagttctttgggaggctgaggcagaagaacggcgtgaacccaggaggcggagcttgcagtgagcggagatcgcgccactgcactccagcctgggtgacagagcaagactctgtctcaaaaaaaataaaaaataaaaataaataaataaataaaatggtatcttaggacagcccaagtcagaatccctgggctgtttgtttaaaatggagattcatgagctccacctaagtttgctgaatttgattatccaggagtt

SEQ ID NO: 811662 - DNA, 494 bp, Homo sapiens
tgtgtgtgtgtctatgttcctgggtgtgtgtctgtatgtgtgtacctatatgtstgtgtgtgtgtatctatatgtgtatgtgtctgtatgtgcatgtgtctgtatgatgtgtctatgtgtctctatgtgtgtgtgtctgtacgtgtgtgtgtatctatatatgtgtctgtgtgtctgtgtgtgtgtgtgtgtgtgtgtgtgtgtgtgtgttgggaaatggcagtggcaggtgcactatatggtggagacactgggttttaggctttaatgagtttgggttttacccccaagaaactgggggtaaaagagggaataaaagcaaaacatcccatgccctcaaggaacgtctagtccaggattagaagtggggcagtcccaggaaggagccatcttgacagtgaattcacgcggaagacgcgtgaacccagctggcctggagagacagaggtgctttgcagggcatggggaagccagcaggtcccagtcgagaaacc

SEQ ID NO: 811663 - DNA, 651 bp, Homo sapiens
agagggaccctggatcccaacaccatgagatcttgcatggccctggacatcctaccccaaacttctttacatragagataaataaacttagattgtataagtcctgtcactcacagctgaacctactcctaactgacacagacagcagtacttggacctaccctagatggtttctgcaaaatgaaatcaaatgagatgacaccaggaaatcaaatgcttataactattctcatttgcctgcaatcggtactggctcctcagttctctgctaaaccattctggcagggatgcaaaacaagggccagctaatttgcacacttccagcatctccctggctccaaggccctgcatcagctactcctgtcttctttcaactcctgtcggccgtgccaggagctgcgggagagcagctgccccagcccatccagccatgacctcaccatgcctgggttggtgtgcaggcccaattgtggcccatcttaatcacatttccagttcattaaagaagaccaggcatcttccctggagacatcaggcgggtgcaggggaggaggagggaaagcaagcacatctcagtggcaggcagcaggaggagagaaagcagagccagagatctgaagcttagctattgtgtttgctcccaagcagctg

SEQ ID NO: 811664 - DNA, 521 bp, Homo sapiens
tcccggtgggctcgtggttttgctggcctcaggagtgaagctgcagatcttcacggtgagagttacagatcttaaaagcagtgtgcacccagagtgagcaatagcaagatttmttgcaaagagcaaaagaacgaagccttcacactgtggaaggggaccggagcgggttgccaatgctggctccggcagcctgcttttattctcttatctggccccacccacatgctgctgattggtagagccgagtggcctgttttaacagggcgctgattggtgcgtttacaatccttgagctagatacaaaggttctccacgtccccatcagattagttagatacagagtttccacacagaggttgtccaaggccccagcagagcagctagatacagagtgtcgattggtgcactcacaaatcttgagctagacacagggtgctgattggtgtgtttacaatccctgagctagatataaaaactctccacgtccccaccagactcaggagcccagctggcttcaccta

SEQ ID NO: 811665 - DNA, 521 bp, Homo sapiens
tcccggtgggctcgtggttttgctggcctcaggagtgaagctgcagatcttcacggtgagagttacagatcttaaaagcagtgtgcacccagagtgagcaatagcaagatttattgcmaagagcaaaagaacgaagccttcacactgtggaaggggaccggagcgggttgccaatgctggctccggcagcctgcttttattctcttatctggccccacccacatgctgctgattggtagagccgagtggcctgttttaacagggcgctgattggtgcgtttacaatccttgagctagatacaaaggttctccacgtccccatcagattagttagatacagagtttccacacagaggttgtccaaggccccagcagagcagctagatacagagtgtcgattggtgcactcacaaatcttgagctagacacagggtgctgattggtgtgtttacaatccctgagctagatataaaaactctccacgtccccaccagactcaggagcccagctggcttcaccta

SEQ ID NO: 811666 - DNA, 623 bp, Homo sapiens
ctgggcgagggctggcatggccttggtgctacatgcatctgccaagatacgactcgggttctaatcctggcttccctggtctgtgtggccttggttgaaacttgccttcaaagggcctgtgtttcctcacctccctggcagggagacaaactgtgatcctttttcgggggaagatcttttcttattgtgtgtgcttctataaattcaaaggtaatggaagcctattgttaacatttaaacaatgccaataaggagtaaaaaaaaaaaaaaaatgcaagtcttactttatcacacagcctcttccccacccaattccaccctctgccttcaaggtaacctctgttaaaggtggtgatgataagcttcattttgaccacactgggtgggtgaaattattccgagtagctgacattcttcagggcaagaccaggatgtcaggtgtcaggtagcaggtgcagtcttcagacactggagtcagactgccttagtttgaatcttatctctgctacttgctagctgggtaattttgggcaaatacttaacctctttgtatatcgtctatacaaaggatraggcaaatacttaacctctttgtatatcatctatacaaaggatacacatct

SEQ ID NO: 811667 - DNA, 647 bp, Homo sapiens
tgcttgggagcaaacacaatagctaagcttcagatctctggctctgctttctctcctcctgctgcctgccactgagatgtgcttgctttccctcctcctcccctgcacccgcctgatgtctccagggaagatgcctggtcttctttaatgaactggaaatgtgattaagatgggccacaattgggcctgcacaccaacccaggcatggtgaggtcatggctggatgggctggggcagctgctctcccgcagctcctggcacggccgacaggagttgaaagaagacaggagtagctgatgcagggccttggagccagggagatgctggaagtgtgcaaattagctggcccttgttttgcatccctgccagaatggtttagcagagaactgaggagccagtaccgattgcaggcaaatgagaatagttataagcatttgatttcctggtgtcatctcatttgatttcattttgcagaaaccatctagggtaggtccaagtactgctgtctgtgtcagttaggagtaggttcagctgtgagtgacaggacttatacaatctaagtttatttatctctyatgtaaagaagtttggggtaggatgtccagggccatgcaagatctcatggtgttgggatccagggtccctct

SEQ ID NO: 811668 - DNA, 536 bp, Homo sapiens
atctgtaaactcctggataatcaaattcagcaaacttaggtggagctcatgaatctccattttaaacaaacagcccagggattctgacttgggctgtcctaagataccattttatttatttatttatttttattttttattttttttgagacagagtcttgctctgtcacccaggctggagtgcagtggcgcgatctccgctcactgcaagctccgcctcctgggttcacgccgttcttctgcctcagcctcccaaagaactgggaccacagacgccagccacctcgcctggctaattttttttttcttcatatttttagtagagacggggtttcaccgtgttagccaggatggtctcgatctcctgacctcgtgatccacccgcctcagcctcccaaagtgctgggattacaggcgtgasccaccgcactcgaccgataccattttaaatagcactgctaggccagagcggggtggctcatgcctgtaattactcgcaccaaggagctcaagaccagcctgggcgacacggtgag

SEQ ID NO: 811669 - DNA, 554 bp, Homo sapiens
aggctgtgtggctcaaaccccctgacacgaagtctctactcaacctcctcactaccctgtagacaccacccaataaggctgcgcagctcccgggggatgtttctgtggaaggcaggctcaccttgtgccaccccaaacagggtcttggatctgagaggcaatgtttctgctccagcccctcaaagacactctttggatgttgtggggggaagccctctgcaacgggtggggttcacagatggattgggattggccccggggtcacacagctggggctgcatccaaactccaacccaggatgttgggctcctcctttgccctatagtcagagagaagagaccaagagaagacagaggctgggcattgtgaaggcaatgggctcacagggctcagttcagggaagggtagagtgagctgacccctccccttcccgtgcccctcctccggcctcagcctcccttcagccagtctgggtgctgaggaagggctgaccctcgctcttgmggattaggtaggatccaccctctccaccgggagccctatccgtggcctgg

SEQ ID NO: 811670 - DNA, 378 bp, Homo sapiens
ggccaacacaggctttctttcctgctgacagtaattcttctctgaatgaggcagaacccaattagttaataactatttcacctggaagggaaccasaagaggtatttttctcttctcaacccagggaatctcagagaaaagtgagtaattacatttaggctattctgttactgaatacatcctttctactcaaagtatgatccatggtgcagttacatggatctgaatctcagaccccacctcagatctcctaaaccaaaatctgaatggcaataaggtctccaggtgttttaaattaaaattaaattaaaacctgagaaaattaaaatctgagaagcactgggccatactacctgccgtaatacagagactgacaaa

SEQ ID NO: 811671 - DNA, 562 bp, Homo sapiens
acctatcttcttaggatgctcataatacattatgatacacgtgaagagcaaaactaaaactttgggacagacagaaaggaaatattttacggaaagaaggtaaggtggtgacaactgacatttaatgagtccttgttatgtacctgaactatggccagaagatttttattatctattaatttttacaacatcagagacagatgttcctatactcttcttatggacaaagaaactcaaggtcatgtacccagtcagctacagaaatgggaatgaaatctacacctaaccacaaagctcatgcacttgcattacacacgtctattcaaaaaatttatcaaaaatggactttaacaacaagctatgtaaaacatgttcatgacaaaaaaattcagatgacactgccaaagttgggaggtagtatacagtacttaatttctctaaatcayaccttcttctgaaaaaaatggaaattgtaacagtgcttttacctcataatattttgtgaatacaggtgataatgcacgtgaaatgcttagcatagtgtattcagtaaccaaatgtt

SEQ ID NO: 811672 - DNA, 621 bp, Homo sapiens
tcagtagtaagaccatgaccttttttatattttggaggcatagatggtaaaaaagttggtaaaccatcagccctaggcatttttttcttaaaaggccctagtaaatggaaaatacaatttttgtgatatttagaaaaaacaaatggtgtactcaattgctcccagtcaaagcaaagttggatcacacagatgcagctgacttttaagctttgctaagcttgccaagcataccatgcaggagcgcagtcacagggaggggagacatacttgtctgccatgatgccccagcaagttctattagatcagtgctcggaaattccgtatattaaccatccagcacggcaatggcaattacctaaatgtgacatattcactatatgactagtggagggacttttacaaggttatccagtaaattaaaaaaaaaattaactcagactatttttataaagtttttctgatcaaggaatcagataatatgttaggaagtcaggtcaccataacatgcaaaaattctgcaaaaaaaaaaaccaccctgctttaaatgataaaaagcaactttttagtgaatggcayttccttgtagttaatttatatctttgaatctagtagcatataaag

SEQ ID NO: 811673 - DNA, 346 bp, Homo sapiens
aaacactggactattgctagtacagactgactaaaaagagcttcaaagaatcctcttttctctaccactakgctggtagttcttgtatatgacgttcttccacttgaatttttgcagcaaataaaagctgtcattcctctctataatgactggctgaaaaaaagaagttgatgggatttgtgtgttcatgcacaggtccatacatgtgtacatgtgcctcttgtgtgtgtctgtgcatatgtacgcatgtatgcacagacaaaatcccttcagcttttttttcctcctcagcacgtgtgcatgtatgtgtgtgcatgtatgtgtgtgcatgcatggatatgtgtgt

SEQ ID NO: 811674 - DNA, 346 bp, Homo sapiens
aaacactggactattgctagtacagactgactaaaaagagcttcaaagaatcctcttttctctaccactaggctggtagttcttgtatatgacgttcktccacttgaatttttgcagcaaataaaagctgtcattcctctctataatgactggctgaaaaaaagaagttgatgggatttgtgtgttcatgcacaggtccatacatgtgtacatgtgcctcttgtgtgtgtctgtgcatatgtacgcatgtatgcacagacaaaatcccttcagcttttttttcctcctcagcacgtgtgcatgtatgtgtgtgcatgtatgtgtgtgcatgcatggatatgtgtgt

SEQ ID NO: 811675 - DNA, 605 bp, Homo sapiens
tactcagttcctccatttacatagaagagaataatactcacaggattattttgaggatcaatgacttgttaggaaagtggttgatgtgtgaaaaaattatgtacgmattataattttttttgagacagggtctttgtcacccaggctcaagtacagtggcctgagctcattgcggccttgactcaagctcaagcaatcctccaatttcagcctcctgagtagctgggattacataaaagtacacactaccacacctggctttttacattttttgtagagatggggtctccccatgttgcccaggctggtttggaactcctgggctcagtaatccgctcacctcagcctcccaaagtgttgggattacaggcatgagccacagcacttggctggtaattttttattatctataattactgcaagttcatccatgagtatcagttacatctacttcacaatccagtccaaataattcacactctacactagttaaccacattctatccttcatttgtcatactgttattttgtgatattaaatattgattgaaataaatttgttattgagaggacttggatataaccattactctcatcaagagttt

SEQ ID NO: 811676 - DNA, 616 bp, Homo sapiens
atacatctgtgtgtttttcttttctttttttttttttaagacagagtctcactctgtaacccaggctggagtgcagagtgcagtggtgcaatctcagctcactgcaacctccacctcccaggttcaagcaattctccctccctcagcctcccaagtagctaggattacaggtgcgtgccaccgcactcagctaattttttttgtattttttagtagagatggggtttcaccatgttggccaggctggtcttgaactcctaatctcaagtgatccacctgcctcggcctccaaaagtgctgggattacaggcgtgagccactgcacccggccctcctcattatttttaaggttcccttcttagctgggaaaaacaaaagcaaaatcttctgaaacaaagcaaaactatctcgtccccactgatactttttatgcaataaagtcaacaaccaaatacattaatgtagacaatgcaccagcatttcctatcttttcatttcaattatggcatttgcatgacattgaaatackgttttccactttcatggtgatgacattcatttttatatttgctgctgcacagcaaaactctatgtgtacagtacataacaggctgat

SEQ ID NO: 811677 - DNA, 577 bp, Homo sapiens
aattttcagttccctgcagtggcctctaggagtgactgctgtatcctctctggggacatctgagctgggatggaaagtcctgtgactgaacaggagccctgaccctgggggtctcacacccctcagtcaaggggaaacacatctcttggcttggtggcaaccatagccatggcttgcttccattcattcataccttaggttaaaccccatggctctctaccaggtcctgagcttcaacttctcttcatatgtccatcctctctgtctttagagtcttctctctccacctcaactcttctttaccctcctttctccatttttgtgtctgctcctctttcctcatcttcctggttctctttcactctaatctccttgccatgtcacataagaggactttgattatcttcctccatgcctgtcccgtcactgaaaacactatacctgatctttttttcatatgattggtggctacatgtatgtgttcttttgaaaagaagacatgtcctttgctcactctttatggagttgttgctttttytcttgtacatttgtttaagttccttacagatgcgaatat

SEQ ID NO: 811678 - DNA, 643 bp, Homo sapiens
aaaaaagtaaaatcattctggacctaatctgatgcaatttatttaattgttaagtgaatgcacacatcaaaattcatacaagtatggggcagcgctgctaatttatttacaaaacacctggcaaatactgctactctaatactgtgcttccacttttgattttccttaggaaaacatgttccttcagtcgtcaatgctgacctgcattttcctgctaatatctggttcctgtgagttatgcgccgaagaaaatttttctagaagctatccttgtgatgagaaaaagcaaaatgactcagttattgcagagtgcagcaatcgtcgactacaggaagttccccaaacggtgggcaaatatgtgacagaactagacctgtctgataatttcatcacacacataacgaatgaatcatttcaagggctgcaaaatctcactaaaataaatctaaaccacaaccccaatgtacagcaccagaacggaaatcccggtatacaatcaaatggcttgaatatcacagayggggcattcctcaacctaaaaaacctaagggagttactgcttgaagacaaccagttaccccaaataccctctggtttgccagagtctttgacagaacttagtctaattcaaaacaatatatac

SEQ ID NO: 811679 - DNA, 555 bp, Homo sapiens
cttgggcaagaagattaagaaacagtaacacagtaacatactcaacccctggatccgccactaagccaagaygtatgtttgcttgaataatgtaatctctctatgtgttaacgttcttgtctgtaaaatggaaatggtctctatccctaaccctcatgagagaggagggagccctttccaagccttctcagctgtttcttggaaacacgatgcaagtttatgtgccagcttgagcagggttgtggttgtttggggggatagaaatgactggaggcatgtaggcagcacgcaaatagaggcctggggagcagcctctaaaacacagtgggcccattctcccctctctttgcccactagcataaaagaagaagagctggaggaagcctggttacctggaatactgcttccccctctgcccacctcatttattttgctttgcaacctccttccatgttctcacacacataaaaaacaaaaacatgtgtatgtgctcaggtaagtgcactttggccagagaggaccagcctggagtctaacgccaccccatgggctgaa

SEQ ID NO: 811680 - DNA, 513 bp, Homo sapiens
tttgaagaaatttttatttctatgtgttgcttattttttatttgggttatttacctctttattattgagttgtgtcatttatatattttagacataatttccttatatgaatgacttgaaaatatactcttccattctgtagtttgtcttatcactttcttgataatgacttttgatacacagaagtttttaactttgatgaggataaatttacccatatttcttttgtcgtctgtgcttttgatgtcatatccaagaatccatcaccaaatccaagatcataaagatttacttctacgctgtcttccaagaattttatgattttagctttttaaatttaggccattcatccattttgagttaatttttatatatgatgttgaggtaggaatctaattttattttattttatttttgcacatagaaatccaaatgtattagcaccgacttttgaagrtactattcttttcccatttgttggtcctggcacccttgttgaaaaatcggtcgtcc

SEQ ID NO: 811681 - DNA, 581 bp, Homo sapiens
cccattgctgaggaactaaaggttcctttcaaaatattactgctcattcgcaatgctactgctcacccaagagctctgaaggagatgtacaagaagactaatgttgttttcaacattataaatataaacaacatagtgttgttttaaatatatataattatatataaataaatattaatatacttttacatatttatataattaatatataaaatttatatgtaaattaatagttaatatcatatttaccatattacatatattttatatataatatacatatttaatatatttgaaatgacatatttaaaatatatattatgtttacattttatatattacaaaatgtatttaaaatatttatgttttaaatataaacaacataatgtcgttttcactcctgctaacacaacgtccattctgaagcccacggaccaagaagtaataatgactttaaagtgttactatttaaagaatgcatttcataaggctatcgctgccatagagagtaagtcctctgayggatctgggtaaagtaaattaaaaaccttcttgaaaaggttcaccattctagatgtcat

SEQ ID NO: 811682 - DNA, 624 bp, Homo sapiens
cggtcaccgggcgtgactcaggcctcagctggaggggcagctgccacagtggggagccccagctctgccctgaacatattgtggagccttggacgcattgycccctctcagggcctagccacctgctgatctcccaaggactcatgtctattctggtttctttcctcccaggattttgagttgtgctgactgccaggcatcgtgtttccctctggtggctgcaccacacctcacacgtgttccctgctgtgcagaagtgatgtgtgggcctgtcatagagggaccctgtggcagggcatccagacgggagctctgtgggagaactgggtctccaggtctcctaaccagtctgtgaatcagcctgagaaagttggggtgtggatggtacatttggagggatgaaggagcagggaggatgccatcaatggaccttaaaatccaatgtagaaaacaacccaatagagtcatccctgcaagcatcataggatgccttggtttcccttgagcttttctaccgccttccctgtacccgagttactgtccgtggttgagttccccatctcgttgtctgctggactcacccatcatctttccaccatcaccatcgcagccactgtatgtgga

SEQ ID NO: 811683 - DNA, 559 bp, Homo sapiens
acatgcaccagctccggttaactgatacctgagcccacgtaggactctccttccctcctcctgcttcatacactctgaaagtgggaaacctcctggggcgtgaaagaatcacttgagctactctctttggatgcccatccttagcaccttcctcagtacttgcagcagatattgggtctaagctggagttggggctgtgtcacagtgatcacaggcctactgtgagatgtggagctggtctcccagctgagggcttttagcagggccattacagactactgccgaccctcagtcacctgctgcaaagctttgtcacagtgccccttgccctgagcgtgggggagggagaattgtgctggagagctgagtacagcaggatgagagcaggtgccgcaaggaacctgagcacccagcccccagcccccagcccttgcctgctgctggcccagctcagttctgctaagggaactgctgcaacattgctaccctcagaacaggcagagcccacctcagggcaacactgggatgagagaragagtattcctccatttttcgggta

SEQ ID NO: 811684 - DNA, 605 bp, Homo sapiens
tggccaggctggtctcaaacttctggcctcaagtgatccacctgcctcggcctcccaaagttctgggattataggcgtgagccactgtgcccagcctccttcatccatttttaaattgtgttatttgttgttttgggtgctttttttttttttttttttggagatggagtctagctctgttgcccaggctggagtgcagtggtgtgatcttagctcactgcaacctctgcctctcaggctcaagcaattctcctgccgcagcctcctgagtagccaggattataggcgcatgccaccatgcctggctagtttttgtattttagtagagatggggtttcaccttgttggccagcctggtcttgaactcctgacctcaggtgatccacctgcctcggcctcccaaagtgctgggattacaggcgtgagccaccgcttctggcatagccaaaacttattaaggcctgtttcctaccaagcattgtacttggggagtgccaaaataaatatggcatagtacctgccctctggggactcacagttcaatattacaagcccttaaggtactrgttctggtaagaaaggatccagccttctggagaaaaagg

SEQ ID NO: 811685 - DNA, 612 bp, Homo sapiens
ctctcaagtcggagcccttttcaggtccccagaaaacttggagaagaaaagtctaacctgaaaagccatatccctagaccatttcttctcttccagctggaaaggaactatggggcaaacaggcaatgttgcaacttaaccctgtgttaggttttttctggtttttttttttttttttttttttttttttttttttttttagacagagtctcgccctgtcgcacaggctggagtgcagtggcaatctcggctcactgcaacctccacctcccaggttcaagcaattctcctgcctcggcctgccgagtagctgggattacaggtgcgcgccaccatgcccagctaattgtgatccgcccaccttggcctcccaaagtgctgggattacaggcatgagcctgtatgatcccagggtgccctctgtcctcctgcaagtgcttgttatctttctttttaaattaaaaaaatttttttgtggctacatagtaggtwtatgtatatatatatgtatatgtatatatatatatttatggggtatatgggatattttgattcaggcacacagtgtgtaataatcacatcatggcaaatgggttatccatcacctcaagc

SEQ ID NO: 811686 - DNA, 575 bp, Homo sapiens
aattcctatgttactgaatggactataatatgttactatcatctatttgatgttcacatgrtcccaggagtgtcccagtcccttcaggctagcttctgtgtggttttctttgatgtgtccccattattctttgagcactttctcactttctggcacaataaaatattctaggctcatcttatgcttttccctgccccagtcctagaatcacccacatctccaaggagcccttttttgaaatggagaatgatattttgaagtggaggatgatattttgaaatggagatatgtgcgttgggagtggtcattattcctgggtatcactgctcccataccctcttagtggaggagctgggaaatatatgtgcatatacgtacatatatgttatttctaaatctttgtacagatgtatgtatgaaaaccatgggatcgcactgatagctccaattccagttcagccaccacggggttcattctcatttccttcctttccatatttgtaattcccttctccaactggctccattctccttaatatattgacttatttaatcagttccgctgtatgtgacca

SEQ ID NO: 811687 - DNA, 644 bp, Homo sapiens
ttgatcttgggttcccacaatggcctggtttgcatyttaaatcctgatttactgtactcagtgaagaagaacacattcattcaccctctggggcttttctctgcccattgtttcttgagtttatattttcctgcccattaagcagaaaaggctacagcagctgcccatcctctaaagcactggacctgttttctctgccagtccctggatcgtgatagatgatcacactctagccctgctcacttgtgcatccagaccctgcagcttctcattgcaggatatctcgctctatcacgcacacagctcagtccccttctcctgggcttccccagccccaccactgagagcctggcaaaaacaaacaaacaaacaaacagcaaccaaaaaaacccaaaaacaaacaaaataaaaagtaacaaaacatataggcacaatgatatttgtgatatttgtgagagcatcattaacacagaaaactagggaaagaaactaggcaaatgcagttgggactaccagtattttctcaaggattctacagcacccagggtcccaggaacaatcccttactcaaaagagaggaagtcagctgcaagacggatgggccataggagtttttgtttgaaaccctgtttttcatttttttg

SEQ ID NO: 811688 - DNA, 546 bp, Homo sapiens
ctcccaactgaatacaggctgctaagctcaacttggacctacctgagatgccctttgatgacagatgcatgttattgcacctgcaatatttctcagtcagaaagatgatatgattctatgtgtccagcttgtcttgtgcacacccgttttctactgtttgtgttctagaatgccaactgtttgcttcattattgtttcaaggatctatcaccccatcataaactactccaaattaggagcttaaagcaatcatttatttgctcaccacttttgtatcagcaatgcagacaagctaggatgagaggggctttctctgctccacgatgtttggatccttggctgggatgtcacaaatagtggtgactcaactgggatcacacacctcaggcctctgtggtcactggcggcctggttacttgggtcatccctatccacatggcttgtgtgagcttcctcacggcatggcagccgcakagtggctggagttcttacacagtgcctggttttccccagagagaaagcaaaagctgttggacctcttataga

SEQ ID NO: 811689 - DNA, 420 bp, Homo sapiens
tcctgtctagctggaaagccccagctgttagagccaggtgggcagcctttgataagcaaatgagagccattagaaactaggtccacccacacatggggattctggctgccttcttgcccttgccccacatgttcctggcaacatggccacccccacatatccccacgtgtgtggaacatcatggcggcctgtatttgcatattcaaaggctagggtgggagggtcagttttttccagggctacgtaaataacatgcctggtcaaacctatcccctaagccctatgcaaatcagacaccgcctcctccagcctctacatatacctggcrggtatccacccaacttggggtttcctcttttgggtttggagactcctcctctctgtctctgtacgagggagcttcttgcttttgtcttctcc

SEQ ID NO: 811690 - DNA, 420 bp, Homo sapiens
tcctgtctagctggaaagccccagctgttagagccaggtgggcagcctttgataagcaaatgagagccattagaaactaggtccacccacacatggggattctggctgccttcttgcccttgccccacatgttcctggcaacatggccacccccacatatccccacgtgtgtggaacatcatggcggcctgtatttgcatattcaaaggctagggtgggagggtcagttttttccagggctacgtaaataacatgcctggtcaaacctatcccctaagccctatgcaaatcagacaccgcctcctccagcctctacatatacctggcaggtatccacccaacttggggtttcctcttttgggtttggaractcctcctctctgtctctgtacgagggagcttcttgcttttgtcttctcc

SEQ ID NO: 811691 - DNA, 633 bp, Homo sapiens
tgctggtagagagtattgttaactcgataacaagaattaaaatgagaaaaaaagagtattagaacagtcttgggatctggatgttgtcgtttttattttggtttttagtgttttgacagtgagcaaatccacttrgctgctttttttttttttttttttttttgtcttcttgggtaaagaacaaggttgaatttgataatctccaaggtccttttcagaataaatgatttgagacctgtacaggagagcctttcgatttttgtactttaatttctgctttcaaatatttgttctgtgtcctgccagctcatggtaactttccctgcccgaggtagtatttatggcttcatttgtttgtgtggagacgaatggaatattttcccccaatgttcatttaatattttcatcagtatatagagaaggatggaacaggaaaatagttatctctggatttattaggtttaaattgagaaacaaggttgaaaattttcacaactattataaacaaatcttttatagtttttgctgtatgtactgtatgtactatttgtttacaaataatttttgtttatgtaaaaagtgatttactttgtagccttgttaatacagctttcaatttagtaaatcttaagc

SEQ ID NO: 811692 - DNA, 641 bp, Homo sapiens
ttaatgctgaaatgagttaagattttgggggactgttggaaaggcaygattgtttttgaaatgcgaaaacatgacatttgggaggggccagtggtggaatgatatggtttgtctgtgtccccaccaaaatctcatctcgaattgtagctttcataattcccatgtgttgtgggagggactctgtaggaaataattgaatcatgggggtggttcctccatactgttctcatggtagtgaataagtctcacgagatctggtgatttcataaggggtttcccctgtctcttggctctcattctttcttgcctgctgctatgtaggatatgcctttcaccttccaccatgattgtgaggcttccccagccaggtggaactgtgaggccattaaacctctttcttttataaattacccagtcttgggtatgactatatcagcagtgtgaaaacagactaatacacagccctccatgagcttggattttcttccccaaggtggagttcttcaagggaagaggtgggggactccataccaggctcttgggaggggaacagaaggcttagggaacttcagattgagtgatttctttaggcccatgatagtgtaagcattcagataccatctccctggaatgcttgtctc

SEQ ID NO: 811693 - DNA, 517 bp, Homo sapiens
tgttgggttttcttgaagtcatttcacaagaaaccrtttctaccagggatagatatagaaagctgtattggaatggaagctccctgcctggctttcagcctctgcactcttaacccgtttgggtgagcaagatgctgaggggactggttaccaacttgttcgctgtgggtgagtactatctcactctttgaggctctgggagaatgaaattaaagggcctgcaaaaggtttgtattccccaaagatctgcaggctttccagcttttatagcagcagcagtgctggctgcatgtgagattttttttcttctctcccgttgtttcagtgcactgattttattggcgggaatattggattagggaagtaaggcagctggttggaagcggggactctctagtttaacccctcggctgctgggaggcaggtcatatttactggcgttttttcgctccatttgtgggcagctgggacagacggcccaggcacatggaatgtgacctctgaagtgtgggtggac

SEQ ID NO: 811694 - DNA, 640 bp, Homo sapiens
ggaacacttcggcagtgcttgttactgaaccagacttgctttgcctattgcacagtatgccaatcactgagatgatgagttttgcattgcagaaagggtttattcacaaggcagccragtgaagagactggagaacaagactcaaatctacctctctgaagatgggggttttagggatatttatgggccaggggagcaaggtggtatgaagcgtagggaaaggtgactgggggtaatgaaaagtgaggcaattggtgatcttcacaagcatagtcaagcttcatggctctttataggatgcatgttcataaaatagcatggttagcatgatctaaaggtatatttttaggccctctgatctcaaatggtcacctatcggacactcatgcaggcttatttgaagggtcggtggtctcagtaggcttgaagtgggtaagaactgactctacgttcctgaaaaacaacttaggcaactgttaccatggtgactcatacatcagagatgtcgtctataaggaagctagtgggaatttagatatatattgtttcgctacatcacttttagctaaatgggttttaaaatcgactaaaagcaagtgaccgaaaacaagtgaggtaagttaagtttgtggatccaaac

SEQ ID NO: 811695 - DNA, 640 bp, Homo sapiens
ggaacacttcggcagtgcttgttactgaaccagacttgctttgcctattgcacagtatgccaatcactgagatgatgagttttgcattgcagaaagggtttattcacaaggcagccaagtgaagagacyggagaacaagactcaaatctacctctctgaagatgggggttttagggatatttatgggccaggggagcaaggtggtatgaagcgtagggaaaggtgactgggggtaatgaaaagtgaggcaattggtgatcttcacaagcatagtcaagcttcatggctctttataggatgcatgttcataaaatagcatggttagcatgatctaaaggtatatttttaggccctctgatctcaaatggtcacctatcggacactcatgcaggcttatttgaagggtcggtggtctcagtaggcttgaagtgggtaagaactgactctacgttcctgaaaaacaacttaggcaactgttaccatggtgactcatacatcagagatgtcgtctataaggaagctagtgggaatttagatatatattgtttcgctacatcacttttagctaaatgggttttaaaatcgactaaaagcaagtgaccgaaaacaagtgaggtaagttaagtttgtggatccaaac

SEQ ID NO: 811696 - DNA, 586 bp, Homo sapiens
ccccacctccaggttttgtttcattacgcatacacaaaaatgagtacgccttttacacaaattagaaacaaaaagaacatcattaaaattcacaaaaataccaccacttttagataaatatggttgacaatttgaagcacagtctttaagactttttctctctataggtacacatatattttgcaaaaatggaatattttacgtatgctttgcaacctaattccctttatttaccttattatgcccatattttatgtgaagtagacatcaacatcatttattaaaaaatattcattttacctttattttatttatttaatcaattccatattattaaacaattaggttttccccctttcttctctcttaccttccatccacccaattatttatctatatctatgtaaccaaacaccacctgtgctccaaaaacctattgaaatagtgaaaaaaaayctgtttttgtacacatgtagctttctatcaatcaccctatgtgtatatgaatctatttatttctattataaattaagctgcaaaaaatactcttgatcacaaattatatgggtaaatgattatttcccta

SEQ ID NO: 811697 - DNA, 390 bp, Homo sapiens
aaaagcaaaggtgaagaattaggaagtgagaaacttactaaaataagtctctatcttagccattttaaagtagaaatagacaaactttgaatgtacaattgygtggctgtattagtcaggattctctagagagatggaactaataggatatatatatatatatagatatatacatgcatatgatatctcatatatatatcccatatatatatataggagtttattaagtattaattcacacaatcagagggtcccacaataggctgtctgcaagctgaggagcaaggacagccagtctgagtcccaaaactgaagaacttggagtccgatgtttgagggcaggaagcacccagcgcgagaaaaggatgtaggctgggaggctaggccagt

SEQ ID NO: 811698 - DNA, 605 bp, Homo sapiens
ctttgcgtcagagtgcactaccttttgtgacattctggaatggatccatattccttcttttgtatttatgcctctagaatcaatatttctaaccacaagrtttttttctggtcacaatgcatcctccctgtcagcagggtcattgctgtgttttcacagcaggatactcagtatgtgtttgtatattacaagaagcactgattcaacttccattacacacttgctatgtcattatggggaaaagttaaatatgagaccttgaaagtattatcacagatggcttttctttctctctttttgttcctatactcatctaaattctggagatagtccagtcattttcacattatgttctttggaggggaagtttaggatttccaataggtgcataaaaagaacattcataataaggctagcaataaacaggaaaggatgttgtcttggaaaaggcatttttctaggccagtactaaagaaacgagaatccctaagtaaaagtgggcagctggctccttggtctctaaccagcctccactggtgttgaaattcttttagggtgtatgtcttttatggcttctttgggtccctctggctcccttcaatgag

SEQ ID NO: 811699 - DNA, 605 bp, Homo sapiens
ctttgcgtcagagtgcactaccttttgtgacattctggaatggatccatattccttcttttgtatttatgcctctagaatcaatatttctaaccacaagatttttttctggtcacaatgcatcctccctgtyagcagggtcattgctgtgttttcacagcaggatactcagtatgtgtttgtatattacaagaagcactgattcaacttccattacacacttgctatgtcattatggggaaaagttaaatatgagaccttgaaagtattatcacagatggcttttctttctctctttttgttcctatactcatctaaattctggagatagtccagtcattttcacattatgttctttggaggggaagtttaggatttccaataggtgcataaaaagaacattcataataaggctagcaataaacaggaaaggatgttgtcttggaaaaggcatttttctaggccagtactaaagaaacgagaatccctaagtaaaagtgggcagctggctccttggtctctaaccagcctccactggtgttgaaattcttttagggtgtatgtcttttatggcttctttgggtccctctggctcccttcaatgag

SEQ ID NO: 811700 - DNA, 582 bp, Homo sapiens
tgtgtttgtattttaaggtaaagtacaaaagagtcaaaatggcattaacattaaaaagttacagtaagctaaagttaatttactattaaagaaagaaaaaattttaaataaatctagcgtagtataagtgtatagtgcttataaagtctgtagtcagcccggcgcggtggctcatgcctgtaatcctgcactttaggaggccgaggcaggtggatcacgaggtcaacagatcgagaccatcctggccaacatggcgaaaccccatctctactctaaaaatacaaaaattagttgggcgtggtggcacgcagctatagtcccagctacttgagaggctgaggcagaagaatcacttgaacctgggaggcaggtcgcagcgagccgagatcgtgccattgcactctagcctggcgacagagcgagactccgtctcaaaattaaaaaaaaaaaaaaagagtctgcagtgcagtcatgtacaktaatgtcctaggccttcacattctctcaccactcactcactaactcacccagaactatgtccagtcctgcaagctccattcatggcaaggatcctatacaagt

SEQ ID NO: 811701 - DNA, 624 bp, Homo sapiens
tggcgtttatggttgcttatggaacttaartcattttatggatacaattgtctattttttatgtcattaataaacaaaaaaatttagtcctcatggtccgatcttggcttaaaatttcacagtcttttgtaacagctgaaataatgtgtcaaaaatcagttaacagtgaaataatttgaaaaaatatatataaagcattctcttaaagctttgggataaaaagaccatgagaaaatgtttagagaagatgttgaaatttgttgtgatgaaagtaaacagtgattttttgggaaagatggggggtgttggttctgtttttctaaaaactatcaatttatgtcttgtctattgtgtttagaactatagagctataagatacttagggtttttttgttttctttgttttttgtttttgtcccagggatatttatttgaattttctacctgtaaacacaatttgctaacagctccatttaccctttcttttcaccaaaatttgacattgtccttaatcctcccaattctttattctccatataacaatcaggaaattttatcatttctacctcctatatattgcatgtcccattttccatctctcgggcccccattgccctagtttgg

SEQ ID NO: 811702 - DNA, 589 bp, Homo sapiens
ttttgataataattggtcaatattgattcatcagttgtaacaatgtatcacactgggtgcaaaatgttaataataggagaaactttgtgcacctgaggcaagtggtattcgggactctgcacaatttttctacaaacctaaccatgatgctatgctgcctctcaaatattaccatacatattgtggccaggcacagtggctcatgcctgtaatcccagcactttgggaggccgaggcgggcggatcgtgacgtcaagagttcgagaccagcctggccaacgtgatgaaaccctgtctctactaaaaacacaaaaattagccaggcgtggtggtgggcacctgtaatcccagctactcaggaggctgaggcaggagaatcccttgaacctgggaggtggaagttgcagtgagccgagattgtgccacagcactccagcctgggtgacagagcaagactccgtctcaaaacaaacaaacaaacaaacaaacaaatattgtctgtgtgtcctcactagaggtgaattttgtcacgaaaaccttcccacttacatcgyttgtgtctgaaactatatttgccttaatcaaagcg

SEQ ID NO: 811703 - DNA, 587 bp, Homo sapiens
agttcagaagatggcagccctataggatgattgctgtaaaagtagaacagcagagaaaaatgttcattctcctccagattgcttatcaaattcacaaccctgaaatatttttttctcctttgctgataaaaactttacacacattcagctttctttcattttccaactcctggttgggatcagctggttcaggaggaagtaagtgcctgtccatggcagatggtgtgaaggtgtgtgtcaggatggggtggagtagtgtctggaggtagctagggcccagtgaccagcggtctcaagggtgctgttgaggagtttggactttattctgtcggcagtgggtggctattgaaggttcttagcttgaactctagtgtggaagtggaatggaggggcaggcctgaggcagggaaatgtgtcaggagctgccaccgtggagatgagtggtgattaattgcaggttgcaagccacggtgcagtcgtagggatggaaaggaagggctaggtctgagtggcaacagggtgcatgctgcttgtcgaaacycccaggtccagccattttggccactaccttgtttttctcatgccta

SEQ ID NO: 811704 - DNA, 566 bp, Homo sapiens
gacaaaggcctcctgccacccaggatccacagcctgtgctctgccgctctcctgggtcactggccactttataaactgagctataatttctctatataatgtcccctctctctctcgactcagatcctgaaaggytgggcttgcacatctgctgaatcttccacagtatagcctagttgaggactgtaaacatgaaatgtttgctggggaatgaacaactggctcagtaagacaccacaaaaagggagggtgagagcatgaggcaagaaccaccaagagaaagaaggacttcttttcacgatgctcgaaaggcagggcagggcaatacagggttggtatattccaacaaaaacacaggagaatatacttccaccaaggctggattattaagtaagggcgtgggatctgtgcatacagtacaaacaatgataaccaggagaaggaccccagatgtaggctgatgtagaaatcagcataactttgtgagatcagtccaaagcctccactggagacagcagcttcgagatacccagatgctatcctgattctgagcagtaaccacaaac

SEQ ID NO: 811705 - DNA, 588 bp, Homo sapiens
cctgccctacaaatttcagactgaagactttaacatcaactcttgcttgagttttcagtctaccaggctccaatatgtatttcagacttgtcagccccccagtcttgtgaatcatgtgggccagttcagttcctgtaaatctctccctctctttctttctttctctctctatctctctcagaaaatatattctgttggttctgtttctctggagaactctgactgtactaatagtggtctagaaaaacaatcttatggatgacttttctaaattggtcctagggtccctggaattgcttctctaatctgataagatgttaaaatttcgaatgactattcttagtagtaaagagggcactgatagactgtggaataatgtggcaatagagatacaaaaaacaaaacaaaacaaaacaaaacaaaacaccattggatatccctaatcaaatgcttataagaagcaagaagcaaggttttgagtgaccatgtatttgatacttcagaacatttttgttaaactaacaagtatggtgagattgactgtttattccyaattgcactggacaatgtggtgaaagaaaaggatga

SEQ ID NO: 811706 - DNA, 578 bp, Homo sapiens
gcatagacatatttagcaactggcagaatccctacattggttctttgacctgtggaatgaaggcaattatgttaygaaagagcaagtaaaatccaccaaaacagcttctacctagaaaaatagtacacccaaagcattaccgagtccctgtagggaatacagagattactgccaacatcaagaacttgaaggatgtaggggaggtgattcccactgcattactattcaattcatctatttggcctatgcagaaaacagatggatcctggatgacagtggactttcatagacttagctatgtggtgacctcaattgcagctgctgttcagaatgtggtttcatttcttgagcaaatttacacatcccctgctacctgctgtacagctataaatctggaaaatactttttttttctcaatacatgatagtaaagacaaccagaagcaaaacttgctttcatctggccaggccagcacaacactaccactttcctactcaggggtatatcaattctacagccctacatcataatttagttgcagaaatctggactgtctttcccttgcacaagacatgaca

SEQ ID NO: 811707 - DNA, 622 bp, Homo sapiens
tcagtaacataggtttctactcaccaaggccagcctggctatagccattaataagtgcccaatctgccagcagcagagaacaatgctgagtccyatcaggggctcattacctggagtgagaagccagctacctggtgacagtttgattacattggaccacttccatcatggaaggggcagtgttatgttctcactaaaatagaaactaactcttgatacagatttgcctgaatgtaatgcttctgccaaaaataccatctgtggactttcagaatgccttatccaccatcatggtattccaggtagcattgcttctgatcaagaaactcacttcacagcaaaagaaatgtggcaatgggcccatgctcatagaattcattggccttattacattccccattatcctaaagcaattggcttgatgcaatggtggaatggctctttgaagatgcagttacagcaccagctaggtgacaacaccttcagggataggggcagtgttctccagcaggccgtatatcctgtgaataagcatccagtatatggtgctatttcccatagccaagattcatggatccgggaatcaaggagtggaaaaagaggtggactcactgttacccat

SEQ ID NO: 811708 - DNA, 617 bp, Homo sapiens
cctaagtcagttcagtgcatgacactgctgtctctctgagtaccagcctctgaggtcccaatttaattcgcctggggtgcagcctgggaattgattttttttaaccctcaggtggttctagtggacatctgaggtcaaaagtagttctaatacagtagttcccaaagtgaggtctgggaccagcagcatcaacattgcttgttaaacgcaaaatcccaggccctaccccaaacctgctgactcagtaactcttgggaggggtccagcaacctaccagtgtgcattcaggtgattctgaagcacgttcaagtttgagaacactgctctaaggcttggcctttcaaacttaaaggccgtgctcatggttgctcatggcaggcaaacctcacgaatgggtcaggttgaaagcacggaagctgacgagggggaaccgaaaggcttcaggtctgagcttggaaataaccacagttgttctcttacacataactgaggccctgggaggtgaagtgagctgcaggaaccaaagcttgggacaraataactccaccaatgataataatgaattcctccctagaaaattatcatttataatacttttaacattgggctctattttt

SEQ ID NO: 811709 - DNA, 617 bp, Homo sapiens
tttgcatgcaacaaaaagcccaggttttaagcttctggttcagtaaaagggctttgacaaatgtatacctgtgtaagcaccaccrtaaccaaaatctagaacatttctatcaccccagaaagtccttcatgcccttttgtagtcaatcttcagcctctcccaagatgacaaatgatctgatttctatcaccaaagcttccttctgcctattttagaactttatataaattgtgcaacataaagtttttgagattcatgtatgttattacacagatccgaggtttgttcttttgttgttgttgttgtatggtattcccttctatgactataccacaatgtatttatccattcacttgtttgtgggatattaggattctttccagttttttgctatttattcataatagcaaaggatatgttttcatttcccttgggtagatacctagaagtaagtttcctgggtcttagggtaggtacatgttcaacttcataagaaattgccaaagagttttccagactagttgtaccattttacactccaaccagcaatgtgagagttcaaggtgcttcacagccagacaccttagcattactgatcttttaatttagccatccta

SEQ ID NO: 811710 - DNA, 557 bp, Homo sapiens
cactttccctgctggcactcattctctctcctgctgccctgtgaggaggtgtcttccaccatgactctaagtttcctgaggcttccccagcaatgtggaactatgagccaattaaaaacctcttttctttgtaaattacccagtctccagtgtttcttcatagcagcgtgagaacggacttgtacaaatagattgtgatgccctatccacatttactaaataagagagtttctggaattaaagcctgaaaacttctttttcacaagcttcccaagaaattactggtcacagtcagatatggtaaattattctttatttttttgagacagggccttgctctgtcaatctggctggagtgcagtggtgtgattatagctcactttaacctcaaactcctgggcttaagtgatccacccgccttggcctccctaagtgctgaattacaggcatgagccatcgtatccagcataaattattcttaaactgtgaaatttgctgctcttactatggatgtcaaaattcacttgcagwcttcctcataaaataaacatgtccaa

SEQ ID NO: 811711 - DNA, 609 bp, Homo sapiens
cctgcctcaccctcctgagtagctgggattacaggcgcctgccaccacacctggctaatttttgtatttttagtagaggtggggtttcactatgttggccaggctggtctcaaactcctgacctcaagtgattctgccacctcggcctcccaaagtgctggggtgagccaccatgtccgtcaccaccatctttttaaaacaatattttaatcgtggttggttggatttatagatgtggaaccctaggatatggagggctgactctgtgtgtgtgtgtgtgtgtgtgtgtgtgtgtgtgtgtgtgagctacttgaatatttcaaaatatttgaatattacaaaataatgagtttacaaaaacctatatttgaccaacgcagattgactatcttgccagacaggtttacatttgatgctaatattatatctgatgaaaaatagaccatttacttacgcttttctaataaacaatatataaatgtttctaagtatatgtgaaaataarcatttcatatttatattaaaagatttgtgtttttgagtaaaatataaagtcaactaaccattgtacataaaaatatctattccaaaatctcatgttatatagtg

SEQ ID NO: 811712 - DNA, 592 bp, Homo sapiens
cagctactcgggaggccgaggcaggagaatcacttgaaccygggaggtggaggttgcagtgagccgagatcatgccattgcactccagcttaggtaacagagcaagagtctgcctcaaaaataaaaataaaaatataagaaaataattattattcagatgaattgaacaggcaagaccattttaacaagtaggattagtatataggaagacacagaggcataggaaatgtgccttcaggcagccataaattattctgcatggagatagggctggaaatgtgatgaggggagcttggtaagaagtgaacctggagggctgggcgcggtggctcacgcctgtaattccagcactttgggaggctgaggcaggtggatcatgagatccggagatcgagaccatcctggccaacatagtgaaacaacttctctactaaagatacaaaaatgagttgggtgtggtggtgtgagcctgtaatcccagctactagggaggctgaggcaggataattgcttgaacccgggaggtggagattgcagtgagccgagattgttccactgcactccagcctggagacagagcgagactccatct

SEQ ID NO: 811713 - DNA, 563 bp, Homo sapiens
cgagaaaaaggtagctcaggggatcccatactagcccaagcttccccagacaaaacaggcatttgggggaagatgaagcagtgactcgtatatttttcaaagagggaggagatccaagactccagttccaagatgtacaagtacaaatattgctcttacaacaacaagccggtttcttgtttggatctttttttaaaaaccacaagaaagttttttgaagtcccaaacttgaatgcacagatgggctagatctccaacttcggggtgtgccagagtcctgtcactcggagtgctgatcttccagcagtggcccagggagcggtcgcgggtgccggggggctgcaggccatatcccagccctgcccgaaggccccctggccctctctggggtccttgtatggactgtcccaagcggtgcacggggtcacacagtcggaaacccttgccggccccgggktactccctttctgaaacggtcttcctcggagccatcccctggaggaccccacttcgctcggtgcccgggccccgcacccaccctccccttcccggcccgcttcccg

SEQ ID NO: 811714 - DNA, 550 bp, Homo sapiens
tcacactcaagatccctactgccccccacgcctggcccccaaagacagggtcaagtccatctacttcggctgatgggcacagcacaaccaaagccagctggaaggtgggcccaggaaaccagactgccakcccatctcccagaactgggggcaattctgtggcttcccttcttggcctaagtgtgtcccacaattcgtgtcagcatcccaaaggccagcggccccaaaagctttcccagagaagacaatgtgtatgattcaggacaacgccaggactctgaatgctttccgtgttccaggttcaatctgaacatcagaacgtgagctcctcgcaggaagaggcccagcctgcagtgtccaggccaagagcaggctggaagcactcgccagctcccccagccctgggcgtggtggcagggaggcctgcctactcatttctaacctccctctcagccagttgactgcggcctctctgggaaagccacacactggttccaaagatgttgctactgtgctcctgaagaacaatcctcagcgcccagggagtcca

SEQ ID NO: 811715 - DNA, 637 bp, Homo sapiens
tggatagctgcacccccaacacacacaccctggcccccgcttccaggccattggggattagggtggggcagcaaggatgtgcccagcctcctctccctgagccccaacctacaggggtgcagtgtggcacttgctcactccaccagaggcctacagtgaaccaaagatgtccacgcacacttccacccactcttgggtggggaggcttgtgctctcagctcctcagtccttttcaagtttgaaagctaatagcattcgttataatagggcttcgttaacaatattaacagtaatcgctgaccttgctggccctctgctgagtggtgcgtgctttacttactccatgccatttaacagtttatggtctagggggtgggctgccatggagagaggggactcagcacagaggaaatgagatacagaaatgacctagcccaggcaggattttgcagctggggtaacgttttcagtggtgctatgtggcggaggtggccggcagggtgtgtgtgasgctgagtgtggggctaggagaaagcggagattcctcctggatgctgcatcaggaatgctccaccctcagcctttaggccaaggctcctgtttctccacgggcagccttcgcccccggtggggtggg

SEQ ID NO: 811716 - DNA, 637 bp, Homo sapiens
tggatagctgcacccccaacacacacaccctggcccccgcttccaggccattggggattagggtggggcagcaaggatgtgcccagcctcctctccctgagccccaacctacaggggtgcagtgtggcacttgctcactccaccagaggcctacagtgaaccaaagatgtccacgcacacttccacccactcttgggtggggaggcttgtgctctcagctcctcagtccttttcaagtttgaaagctaatagcattcgttataatagggcttcgttaacaatattaacagtaatcgctgaccttgctggccctctgctgagtggtgcgtgctttacttactccatgccatttaacagtttatggtctagggggtgggctgccatggagagaggggactcagcacagaggaaatgagatacagaaatgacctagcccaggcaggattttgcagctggggtaacgttttcagtggtgctatgtggcggaggtggccggcagggtgtgtgtgaggctgagtgtggggctaggagaaagcggagattcctcstggatgctgcatcaggaatgctccaccctcagcctttaggccaaggctcctgtttctccacgggcagccttcgcccccggtggggtggg

SEQ ID NO: 811717 - DNA, 678 bp, Homo sapiens
gctgctgtggcctgttagcattcactagctaggcgaggcctcgggctccagcctctcctcccagtggaggccctgcccggtcctacccccacccccacrccacagggccccgggtgcacctggggccgtgctgattccatgccttttgcctcctcagttttggcaaggagctttgccaggccaagccggaacgtcccatgagtgagtatggcctctggtttctcttgccagttgctccctgaactgaacttgaacccataaactcatggcattaagcctgggccccagggtgtgctggggccgctgctggggtcggcctttcaggatggctctgagctcagggattgggctcttctactgtcagccatcactgggctcatctgtgatgtctacaccctagggtggtatttgccaaaactccagtctgtccagggtataggcagggccagagctggggtcccccaggggaggaggctgggaagcagacctctggctggcctgggaggaggagagggaggggtggatttcttcagcagacacgctgtgtctgtggacccgccacgaaacccaggggagtcggcaggggcgggagtaggaggccaaggcccatcgggaccactgaaatccagaccaccaggacctaccacacagaccactggacccagtgcagggatccgg

SEQ ID NO: 811718 - DNA, 601 bp, Homo sapiens
gatcccatctctaaaaaaacaaacaaaaagtcattgctaaccaatgtccagaaaaaaggatttctcgattctcrgatgggagaattcaggtccctgtagtggacgcaggggcaccaggtcctcaacatcaatggcctgcaatcctttaaggttgggcaactccgtgcgtaagcactggcacaagctaccgtgtgcaagtgatctggtgttccatggaggaaggaatgtgctgacaggcagatacaagcattcccatgtgctgggagcggtgctgttccgtgtgaattaatgaagtggcacttgggcttatcaatcacgctgctctgattttggctagcaagtcagtcatgtgggctgctagtaagcctgcttattcctgagccaagtgctagactcgagttcctaggatgccaagctagggatcacatcttgccggcccctgcctgaacctctccctttgaccactcttcaaatccagggggtcctgtgtccatttagtgttgctcctaaaggtgcagtgctcacagaacctggtgacagaactccctcctggaacctcgcttggggacagtaaaggactgagataaccagatagccatgg

SEQ ID NO: 811719 - DNA, 568 bp, Homo sapiens
aatccctacaagtttccttggtaccaaccaccaaattccgagactcccctggagctacccctgggaaacactaaacaacataaaatgtcagggccaggtcaaccgctacagcattactaaatgcacgctttccactccaggacttaattccttacagatcagcccaggtccacgggccacgctctgggtagtaatctgatgattacttgcacccgactgtcctggtggctgccctgagatacccttcctaggcctaagcaagcaggcttccccaggtgtgtggatgagctaaggcgatagtgcaaagcaaattctgcagcggggagagtggatctgcccagggaccagctggagctgatggttgccatgctcctggggaggccacgtgggtgcaacggcctgagcccctgacggtcagctgcaggggctagagagtcacctgctgtgaaggaacataaaagctatctgaggccaggcayggtggctcctgcctgtaatcctaacactaggggaggccgagggaggtggatcacctgagctcaggagtttgagaccagcctgggcagca

SEQ ID NO: 811720 - DNA, 592 bp, Homo sapiens
gagttccagaccagcctgagcaacacagtgagaccccatctttacaaatcaaatttaaaattyagccaggtgtggtggagtgcatcagtggtaccagctactcaggaggccaaggtgggaggattgcttgagcacaggaggttcgaggctgcagtgagctccgatcgtgacactgcactctagcttgggtgacagagcaaaaccctgtcaatcaatcaattaatagtgttgccccaactctaaagcaatgcagtgcctaggcactgagaaggaacaggcaaacaagatgccagccctgactgcaggcacctccgagtggtctctcccctactcccccatgtcctccacagctagccagcccctgcgtttgccatgcttttccccacattgttcttcttcctcccttctatacatggatgatgtgcctgtacaaacgtcactgcctcttccacgctgcacgccatcaccctcatccaccctggactgtgatcgcctgactatacgtccaccttccccagcagagctagcccctgctctcagctcacagtcacattcaccagcagagcagctggctctccaggcctgaccaaac

SEQ ID NO: 811721 - DNA, 614 bp, Homo sapiens
agtaaaccttcattttaaagaggcaacagaggaaaggaagagggaacgagtggscaatgaatttcccaagcaggcatctgaaaccgcggaactgctgggctgaaaggacctccaggatcatctggcacgaactccttgcgctacagagaggcacccaggcccagaaagcagagtgacgtgcacatggtcacacagccagcccatgtggagcaacaccagactccggggcgctggcggccaggcccgtgccctttgagtgacagggcaccgtacttcccctcctgccctagcccaacctgggctagggcatattctcacctgggaagagccaacacctccccacaggagcaaaagcccaaagtcacccacacctttcagcacaggtttctctcacctaccaatggctcactcccttccccaaatcaaaggaggtgacctgaaagaagggagaagcggggtgcacaggatgtggtcagtggagaggagcgggggtgcattcacagcagagaggccctccagtgaagcacacagccctccgggcaggggcaggacgggctgagaggatggggagggagagaaggccaagacttcctgcagaaaaaagcacacacaaa

SEQ ID NO: 811722 - DNA, 556 bp, Homo sapiens
tatctgccactatacttagtgtttattctgtgccggccagatcctgggcattttacctrgaataccttaactcgtttctttcttttttttttttttttttttttttttttgagacagagtcttgctctgttgcccaggccggactgcagtggcgccatctcggctcactgcaagctccgcctcccgggttcacgccattctcctgcctcagtctcccgagtagctgggactacaggcgcccaccaccgtgcccagctaattttttgtattttcagtagagacggggtttcaccgtgttagccaggatggtctcgatctcctgacctcgtcatcctcccgcctcggcgtgagccaccgcgcctggcaccttaactagtttctaaactccagaaatattagtgttctcaggctttcagaagagagccatggtctaacacgaggtgcttggtaactgcatggtcatgtggtcggcttgctgttttcgcctggtgacttcctcacctgtgcggggtctgcccgtttaacgcacctgcaacatgcattcctggacagtggg

SEQ ID NO: 811723 - DNA, 522 bp, Homo sapiens
ccagttggccctccttcacatgcttatctgatgtggtgcargaacaacaggcggaggtgagaggtcagtccacagaagggaggtctgagggagcagccgccacgggtgtcccacccaacgctggcaaacagttctgtgcacaagggatgcagctgaatggtgctgacggtggagctcacagagctcctgcattctcaaggtttggatacattctgggaagggtgaactggtgtaagagtcacataatacgtggaggggtgtaataatcaaaaaaacgtagcaaaacaccttctgtgcctgagccagggttgagggagccgagaagaaagtccacagctctgccacacgggccagcagtgctcatgtctgctggctgatcctccccaaagcctctcctgccacctttttttttttttttttaactaaactaaatggtcaatactgccatctctcttgataatgacaaagtgtttgcacaggatgcctacaggtgtgtgtgtcgctcctcactaatggatccgt

SEQ ID NO: 811724 - DNA, 522 bp, Homo sapiens
ccagttggccctccttcacatgcttatctgatgtggtgcaggaacaacaggcggaggtgagaggtcagtccacagaagggaggtctgagggagcagccgccacgggtgtcccacccaacgctggcaaacagttctgtgcacaagggatgcagctgaatggtgctgacggtggagctcacagagctcctgcattctcaaggtttggatacattctgggaagggtgaactggtgtaagagtcacataatacgtggaggggtgtaataatcaaaaaaacgtagcaaaacaccttctgtgcctgagccagggttgagggagccgagaagaaagtccacagctctgccacacgggccagcagtgctcatgtctgctggctgatcctccccaaagcctctcctgccaccyttttttttttttttttaactaaactaaatggtcaatactgccatctctcttgataatgacaaagtgtttgcacaggatgcctacaggtgtgtgtgtcgctcctcactaatggatccgt

SEQ ID NO: 811725 - DNA, 402 bp, Homo sapiens
taaaaggttaaaaatatctgaagaataatattttgagacatgtaaaaattatattaaattcaaattccarccaggtgcagtgactcatgcctgtcatcccagcactttgcgatgcctatgtgggcagactgcttgaggccaggagtttgagaccagcctgggcaacatagtgagacccgtctctacaaaaaatttaaaaattagccaggtgtggtggtgcacacctgtaatcccagctactcaggaggcagaggaaggaggactgcttgaacccaggagttcaaggctgttgtgggctacgactgcaccactgcactcagcctgggcacatagtgagaacctgtccccccagcccaaaagaaattatcactgtgcaggaagtaatgaataaaaagaaaaaag

SEQ ID NO: 811726 - DNA, 402 bp, Homo sapiens
taaaaggttaaaaatatctgaagaataatattttgagacatgtaaaaattatattaaattcaaattccaaccaggtgcagtgactcatgcctgtcatcccagcactttgcgakgcctatgtgggcagactgcttgaggccaggagtttgagaccagcctgggcaacatagtgagacccgtctctacaaaaaatttaaaaattagccaggtgtggtggtgcacacctgtaatcccagctactcaggaggcagaggaaggaggactgcttgaacccaggagttcaaggctgttgtgggctacgactgcaccactgcactcagcctgggcacatagtgagaacctgtccccccagcccaaaagaaattatcactgtgcaggaagtaatgaataaaaagaaaaaag

SEQ ID NO: 811727 - DNA, 402 bp, Homo sapiens
taaaaggttaaaaatatctgaagaataatattttgagacatgtaaaaattatattaaattcaaattccaaccaggtgcagtgactcatgcctgtcatcccagcactttgcgatgcctaygtgggcagactgcttgaggccaggagtttgagaccagcctgggcaacatagtgagacccgtctctacaaaaaatttaaaaattagccaggtgtggtggtgcacacctgtaatcccagctactcaggaggcagaggaaggaggactgcttgaacccaggagttcaaggctgttgtgggctacgactgcaccactgcactcagcctgggcacatagtgagaacctgtccccccagcccaaaagaaattatcactgtgcaggaagtaatgaataaaaagaaaaaag

SEQ ID NO: 811728 - DNA, 402 bp, Homo sapiens
taaaaggttaaaaatatctgaagaataatattttgagacatgtaaaaattatattaaattcaaattccaaccaggtgcagtgactcatgcctgtcatcccagcactttgcgatgcctatgtgggcagactgcttgaggccaggagtttgagaccagcctgggcaacatagtgagacccgtctctacaaaaaatttaaaaattagccaggtgtggtggtgcacacctgtaatcccagctactcaggaggcagaggaaggaggactgcttgaacccaggagttcaaggctgttgtgggctaygactgcaccactgcactcagcctgggcacatagtgagaacctgtccccccagcccaaaagaaattatcactgtgcaggaagtaatgaataaaaagaaaaaag

SEQ ID NO: 811729 - DNA, 643 bp, Homo sapiens
ccaactccatgcttcaagccgtctctcactcaaggcctaactcctcccaaagggactagaaaaggaagacgtggtcttgctctcgctccctctttatttttttttttttaaagagacagggtcttgctctgtcatcagggccacagtggcataatcatggttcactgcagcctcaaattcttgggttcaagggatcctcccgcctcggcctctcaaaatgctggcattacaggtgcgcaccaccacaccaggcctggaagatatggtctcttctaacagctattcaggagaggcctcctcgtgctgatttcctaaaagctcagaacacgatcaacagtctctgcccagcattcccggaacagcccgccttcggtttcacttgcgtagccaactgtgttatgctctgtgtgtgagctgcctctcccacaccccatgatttttattaatttcatcactttatgctctttatattccccaaagtgcccagcataacaccctacctttaatacataaagcaggggtcacaagctggtacccccagaccaaatccagcccacgcacaggttttatttggtccgcatcacrttttaatttttttttaattagctgccaatagttaaaaattaggagattttacccaaaa

SEQ ID NO: 811730 - DNA, 586 bp, Homo sapiens
cagaccagcctgagcaacacagtgagaccccatctttacaaatcaaatttaaaattyagccaggtgtggtggagtgcatcagtggtaccagctactcaggaggccaaggtgggaggattgcttgagcacaggaggttcgaggctgcagtgagctccgatcgtgacactgcactctagcttgggtgacagagcaaaaccctgtcaatcaatcaattaatagtgttgccccaactctaaagcaatgcagtgcctaggcactgagaaggaacaggcaaacaagatgccagccctgactgcaggcacctccgagtggtctctcccctactcccccatgtcctccacagctagccagcccctgcgtttgccatgcttttccccacattgttcttcttcctcccttctatacatggatgatgtgcctgtacaaacgtcactgcctcttccacgctgcacgccatcaccctcatccaccctggactgtgatcgcctgactatacgtccaccttccccagcagagctagcccctgctctcagctcacagtcacattcaccagcagagcagctggctctccaggcctgaccaaac

SEQ ID NO: 811731 - DNA, 615 bp, Homo sapiens
tccagaggactttgataaactcaccagggagagagacacaagggccatgacaggaaacaggggcactggacgcttctgaccttcaaagacagccctggaggaaacatcccaccccacccaccatccatgcccgatgggtggactgctgacccagcatgggtagtcctaatttattcaaagaaatggaggaaagtttaatttctttgaaataaaatcctttaattttaagggatttaaaatgaaatcctttaagccagcactgcccttgtgcatggtgagacgacaaggggcaatcaaccccactcatcaacaaggtgcagcattgcaggaggaaaacatgcgggatttggagtctgacatccagagttcaaatcctggctccatcattcactcagaggctttgaacaaatcacataatctctctaggcctgttccctcattcataaaacaaaggtaaggatgtctgccctggagggatgatgtggagatgaaaccaaacatatgtgaagccctaagacagcacctgctatatggaggtgctcggmgagcagccctaaccacagtccattccgaccttgtggacaagtcagacatgggctcggccctcaggaacgt

SEQ ID NO: 811732 - DNA, 615 bp, Homo sapiens
tccagaggactttgataaactcaccagggagagagacacaagggccatgacaggaaacaggggcactggacgcttctgaccttcaaagacagccctggaggaaacatcccaccccacccaccatccatgcccgatgggtggactgctgacccagcatgggtagtcctaatttattcaaagaaatggaggaaagtttaatttctttgaaataaaatcctttaattttaagggatttaaaatgaaatcctttaagccagcactgcccttgtgcatggtgagacgacaaggggcaatcaaccccactcatcaacaaggtgcagcattgcaggaggaaaacatgcgggatttggagtctgacatccagagttcaaatcctggctccatcattcactcagaggctttgaacaaatcacataatctctctaggcctgttccctcattcataaaacaaaggtaaggatgtctgccctggagggatgatgtggagatgaaaccaaacatatgtgaagccctaagacagcacctgctatatggaggtgctcggagagcagccctaaccacagtccrttccgaccttgtggacaagtcagacatgggctcggccctcaggaacgt

SEQ ID NO: 811733 - DNA, 627 bp, Homo sapiens
acactccacatacagtggctgcgatggtgatggtggaaagatgatgggtgagtccagcagacaacgagatggggaactcaaccacggacagtaactcgggtacagggaaggcggtagaaaagctcaagggaaaccaaggcatcctatgatgcttgcagggatgactctattgggttgttttctacattggattttaaggtccattgatggcatcttccctgctccttcatccctccaaatgtaccatccacaccccaactttctcaggctgattcagagactggttaggagacctggagacccagttctcccacagagctcccgtctggatgccctgccacagggtccctctatgacaggcccacacatcacttctgcacagcagggaacacgtgtgaggtgtggtgcagccaccagagggaaacacgatgcctggcagtcagcacaactcaaaatcctgggaggaaagaaaccagaatagacatgagtccttgggagatcagcaggtggctaggccctgagaggggrcaatgcgtccaaggctccacaatatgttcagggcagagctggggctccccactgtggcagctgcccctccagctgaggcctgagtcacgcccggtgacc

SEQ ID NO: 811734 - DNA, 603 bp, Homo sapiens
agaaacacaatatttagtagaagcaatgcaagctacagaaagctacatgtagcacaataccattttacacagctcagaagcacatgcaactatagaatgcatcgtttagggaaacatctgaggggcaacattacataaaaaggcaaaaggctgataaaaatgccctcaggagaagggtgccctccgccaggggatgggacagggacggagcagggctagaggtgatgtgttgtgacaatccacattcagctaggtggtggattccacagtgtttcttacaactttgtaacttacatgtattcttttgtatttatcaaataccacttaataattttacatgcttgtaaccttactaatttacataatcctggaagcttgagaattcaagctttggtagcttcaagctgaagctaccaaaagagacagaaaggaatgagacgacaggtggccctggagggaaaaaatcggyttgacctagccagcaaagtctcaagttctctgtccccattcctgggtggctttcctccccacacctgtgatcagcaaaggcacctgaaaagcctgagaaggaatagagagtatgtagacagaggtgacaagact

SEQ ID NO: 811735 - DNA, 586 bp, Homo sapiens
cggtggaacgtgctctggaccaacctacgttctccactccgatacaggctgtgccgggcccaccacggagcctggagagagcagcaaatggcagctggagggaaatgaggggcccctcccacccccacacttcccagacagcccacaagtggggttccccaggtgtcagacgctggggtgcctcagcaggcaactgcaggagccagcaacatgacttggggctgcctggtggagaaattccccagggaacaaatcattgcacagctttagggccctctaggaaggctgagagatgggatggaaatagatacagagaacaacaggaagtcatgaaaagaaaaataagctggcgatcctgattccaatcagcagaacccttcctaggcctcagagtactttcaggatcaccatcccattgcagcccactgacaaggctcccaggttggccaggcaagtttgattaagatttgattcccaccttaccgaggagaagctgaagtcaaagatcctcccagggagtcaatggcagagcagcagggtagcccaagccttcccccagccagmtatggcctgcggcgctggtgca

SEQ ID NO: 811736 - DNA, 556 bp, Homo sapiens
ggtggctcactcctgtaatcctagcactttgggaggctgaggagggcagattgcctgagttcaggagttcgagaccaccctgggcaacatggtgagaccctgtctctactaaaaaaaaaaaaaaaaaaaaaaactgtgactctgctgaaatacaacaacaacaaaaaatggccagttggccgggagcggtggctcatgcctgtaatcccagcattttgggaggccgaggcgggtggatcacgaggtaggagatcgagaccatcctggctaacacggtgaaaccccgtttctattaaaaatacaaaaaattagccgggcgaggtggcgagcgcctgtagtcccagctactcgggaggctgaggcaggagaaaggcgtgaaccccggggggcggaacctgccgtgagccgagatcgcgccactgccctccagcctgtgcgacagcgagactccgtctcaaaaaaaaaaamaaaaaaaaaaccggccagttgcagtggctcacgcctgtaatcccagcactttgggaggccgagacgggtgaattacaaagtcaagaga

SEQ ID NO: 811737 - DNA, 642 bp, Homo sapiens
ttcccgccacccttcaccactctctcccataatcaacatcaggcaccagagtagtatatttgttataactgatgaacctacatctacacatcattattacctaaagtcggcagttttcattagggtttcctcttggtgttgcatgttctataagttctgacaaatgtatgatgagatgtattcaccattatagtaacatatgcaatagtgtcactgctttaaaaattctctgtggagacaggcacggtggctcacacctgtaatcccagcactttgggaggttgaggtgggtggatcacctgaggtcaggaatttgagaccagcctgaccaacacggagaaaccccgtctctactaaaaatacaaaattagctgggtgtggtggtgcaggcctgtaatcccagctactcgggaggctgaggcaggagaatcgcttgaaccctggaggtggaggttgcggtgagccaagatcgcgtcattgcactctagcctgggcaacaatagaggaactccatctcagaaaaaaaaaattctctgtggttggccarttcacccctttcttcctccttatcctctggcaaccactgatctttttgctgttttcatagttttgttttttccaaaatgttatatggttggaatc

SEQ ID NO: 811738 - DNA, 642 bp, Homo sapiens
ttcccgccacccttcaccactctctcccataatcaacatcaggcaccagagtagtatatttgttataactgatgaacctacatctacacatcattattacctaaagtcggcagttttcattagggtttcctcttggtgttgcatgttctataagttctgacaaatgtatgatgagatgtattcaccattatagtaacatatgcaatagtgtcactgctttaaaaattctctgtggagacaggcacggtggctcacacctgtaatcccagcactttgggaggttgaggtgggtggatcacctgaggtcaggaatttgagaccagcctgaccaacacggagaaaccccgtctctactaaaaatacaaaattagctgggtgtggtggtgcaggcctgtaatcccagctactcgggaggctgaggcaggagaatcgcttgaaccctggaggtggaggttgcggtgagccaagatcgcgtcattgcactctagcctgggcaacaatagaggaactccatctcagaaaaaaaaaattctctgtggttggccagttcacccctttcttcctccttatcctctggcaaccactgatctttttgctrttttcatagttttgttttttccaaaatgttatatggttggaatc

SEQ ID NO: 811739 - DNA, 475 bp, Homo sapiens
ccgtattcacttggccctttcgttcctctctgtgagtgccacggacctcagctgcttctaatcggccatcttggccttatctcccacttattttcttattttttattgtttagttcattttagttttaagagttcattgtatattttgaataacaggtccttatcagatatgtcttgcaaatacttcctcctagtctgtggcttgtctttgtagtcccttgacagtgtctttcacagaacagaagtttttaattttaatgaagtccagtttatcaattatttatttaatgaattgtgcctttggtgttgtatctcctgtatttcaggagtttttatagtgttgcattcacatataggtttgtgatccattttgtgttaatttttgtgaagggtatagaaagctgtgtctagattcaktttttttgcatgtgatgtccagttgttccagcaccatttgtggaaaaataatatctct

SEQ ID NO: 811740 - DNA, 658 bp, Homo sapiens
tgctaattttcccctgatacatttattgtttagtttcaagtacactgttgtttaaaattcacattctatatttmtgttagataaccatttttcttgaacttgaatgaggtttgttttgtcactagattcctaatttttggttttgttttttgtttttttttttcctgagaatcagattctggtatactaagtccgcccacaaaatggcttccctggtttgttttgggaagaaggagatactgatgtctctgctaatctcagaccgactggagtgagcatgcacgtagtttctttatcccttctcttgttatagggaaggtggagtcataaagttctcactagcatggtattatgtcgtggtgaagcaccagactctgagctattctgtgtggtttacgtatttcagcacttcatgttattactgtgtgatcttgggcaaattattcaaccagtctctgcctccgtttccttatctgtaaaacgaggacgataacagtacctacctcatagggttgttgtgaggaataaatgatgcttagaacagagtctagcacctagtaagtgctggttatcaactattattgactctttcctggaagtcatatttaaaggttttaaatattggcctggttttagcagaaagaatttatttcctgag

SEQ ID NO: 811741 - DNA, 615 bp, Homo sapiens
gattctcccacctcagcctcccaaagtgctgggattacaggcytgagccactgcacgcagcctgtgtctgttactttattactctctatatatacaagtctaagccctgagtcccattttggttttataaaataaattcactaaggtatgcattttagtttgttcatgactttggtttaccctccctctccatcgagcaggcggcggtaggtctcgatctccacctccaggcgtgtcttgatgtccagcaattgctcgtactctgcgttctggcatttagtctcaccccagatctggcagatctcctcctccagggcactgatctgcgtttgaatttctgacagctgagccacgtagccagcttctgtgtcagccagggttccctccagggagcttttctaagagaaaaagcaaataaaaaattcatgatgaaaataaatcattggatgattttttaaaaatgcaattttatgtggcactagaagtgcaccttcgccatataacctatattgttatatcattgcttctttaattttggttggcacttctttttaaactaaatcttttatgcaaaatagagtacattatctttaacttttaatgctttctataatc

SEQ ID NO: 811742 - DNA, 635 bp, Homo sapiens
tgagctcacctggccgtgtttcaaagggtaccttccattcttacatattgaaaaagttctcacttgtgggcattttaataaataaaggttattaagttttctcttgrgaaattttcccttgtaaagaaaaataccaatgtaatgttaattctaatcatgtctaacatttttaataataaaattctcattctaaatttgcctctttcttttttctttttcttttttcttttgcagctgttgtaggctgatgaaaggagcagaagcggccggtgtgtagctactggcttaggtgctcagcagagaggatctacctgccccagcatcagtggagatttgtctaatggtctaaagtttacccttgggatgtttgtaaatttaggtcatgatcctctagtatatatatatatatatatatttatttatttataaaatggaataaaatttatttttctcccgtaacacttgttttcaagtctttatgtttcttacttcagtctgaagtcatcagcagccaatctggcttgtcaatgtgcaaaatgatcccagcattttcaacagtggcagcaatgatctaaaaaagatgttaatagtgagtgaatcacgaatgatttttaccttgtgtctgcatgcctact

SEQ ID NO: 811743 - DNA, 629 bp, Homo sapiens
ggataatttctgtttcttgaacacttctctgaagctaggtcagagccctgggacatttactatatcaataaaaaaagaataaagtggagcaaaacaaaaaaattttcagaattacagttttaatctttcagaggttttgatgattggtaacttttctctggaagtgtagttctattaaatttgcttcatgatttcacatttgcagagaatatctccaggttaacaaatgtaattaaaatacttaatatgatgagaataaaaatttcccatcaatcatgtaacttttttgttcatattgttctcaaaagttgaaattagctttcacatcagcaataatttcagatttgattaagcatccatctctttgattatttcaatcagcgtgttttttaaggttgttgaagtttgtgattttaagttattgctttctttttttgtattttgtataatatacaaaaaagcatataatttgtaacaattatgttttatagttcataagaaaaacatamataatagttttctaggtaagtattattacatctcagcaacatgtttattcaagtagctaatgtctaagaaagattgaaaagcttttaggcagattgttttaatacgattttctttctggt

SEQ ID NO: 811744 - DNA, 628 bp, Homo sapiens
atgcaactaacaccttcccaccccactgcaaataataaagaatgtctccagatgttgtcaaatgtcctctggagggcaaaatcgcctccagtggagaaccgtgggtttatatcaatctacctcttttattggcggcataagagtattccagagtgtggctgtggaatttcttttagctaatttctctttgatgcacaattgtttccaggcccttgactccctgagcacttgtgtgtttctacaagaagcttcaggactgaggcaagagcacgctgggaccaagctgagcctctatggacggcgcatgacggagccgtttcactccatgtttgttgatggtaggaactgccaccctaatctttgccaatctgatgtggtttgtaagcaatagcacttcttgtcttgttctcttgtataattgtatagactgttccttctacaaaaaatgtcaaataacagtaatgaccacaaggaaccccttctggccctaactttggcagtgcacttggaataactagtatcacatagttacgacgtatgtgtatgyttcacatgaatataaactcacttcccaaacagtctgcaatgggagtttgaacgttctctttgaagataaagttgtttatga

SEQ ID NO: 811745 - DNA, 558 bp, Homo sapiens
acttgaactcctgggattacaggcgtgagccactatgcctggcctcaaaattaaaaaaaaataagcaatttagatgctgacctgaagtgctyctgtcaccttgttacaggaggccgcaaatgctaactaagcaagttgcagatggtcccacatgacgtttctgaatgaaacaggacacttcttactattggaaccatttttctctgttttgaacagttggataagggaagtcttgacgtgctgcctatgtgtccgctgcccttcatcaaagttgagctactgagaaattggagttgaaggaacagtggctaatggcatgtgctgggatgcaagtaagacattatgcttggccataaggagttctggtattttatgtatacctctcccacaagctttagagatgacttcgtggtctaggaggaacaggtgtgtaaagaagtgacagtgtggtgtgtgtgaataaaagtgggtagatagggtcaagccattgcatgagcccgtacaaggtgcaagcagagttattaactagaatttggcaagggagctgacccggaagga

SEQ ID NO: 811746 - DNA, 674 bp, Homo sapiens
tttggtgggaggcatctgtagtcccagctactcggggggggtgagacgggagaattgcttgaacccgggaggcgaaggttgcagtgagccaagatcatgccactgcaccccagcctggrcaacagagcgagactccatctcgaaaaaaaaaaaggaggtggaaggggacatcactatcttatataaattgaaatgattatacgggaatactgtgagtaaatgtttgccaacagatcagctaacttaggtaaaatggataaattcatataaagtcacaagctggcaaaactgactcaagtagaatagaaaacttgaatagacctataacataaagagattaaattagtaattttaaaacttcctaaagaaaataagcccgtgcccagatgactttactgataaatccaaatatatatttaaataagaattaataccaattcttctcaaactcttccaaaaaatacaagaaaagtaatacttctcaacttcccaactcactttataaagctagtattactctgataccaaaaccatacaaagatatcacatgaaaaagaaaactacagatcaatatcttttatgagtatagatgcaaaaatcctcaacaaaatactagcaaaaataattcagcaacatacaaaaaagatcatacacaacggccaagtgggatccat

SEQ ID NO: 811747 - DNA, 610 bp, Homo sapiens
gtgtggtattttggtacaaataaattgaaaagtaactggcttgatatcttcttaaggttttttaagttgtatgctaaatacactagaaaacttgcataaaatactcccaggatgggctcagaggaataatgattgtatattggaaacaataattttagatgaccaaatacatttttgtttgaagtttccgttgaatgtttataaaaaggctgaacacctgagattcctatgtaacagtaaataatttctctggagaaaaaagacctaggcaaaatctaacatatattaatttaatcaaacatcttaaaacaaatacagaaagaattagtgccccccagatattgtggagtggggcctagatttcctggcctataagataaggagccaagatttcccagtgtttctgtttaggtttcctgcacagagatgagcatctactataacaaaataaactctttgtttttatgtactgcccccaacagaagctgacaagaaatgcaatggcagcaatgtttagttctttcaaacccartgagctctgtgaggcttctgaactctgactataacttgtaatgtaattgtaattgttggtgatgtttgaggagcccag

SEQ ID NO: 811748 - DNA, 341 bp, Homo sapiens
aaggatcctgccagcaccagcccaggattctcctaacagagcaactcctgctgactcacagtgttacatacaaaggcatcccggcctagagacacactggaagcaaagaagacatactgcacagtccgaaattaacttttacatgatacccaagggagcatcaggtcgaatggttgtaaggccattgaataggcatcagtttatcttaagtgggataaattccatgaataaataaagaaggttcacctgaatacacttactgctyattttacagatttctcctgattccatggattacttaggagcttcagaatctgaaattgtatacctggcactgctaa

SEQ ID NO: 811749 - DNA, 426 bp, Homo sapiens
tcctgaagaaccggttgcaatacccactggtgccacagacccgaggtgcccctgagctgtcctggtgccgtgcagccaccttgggccaccgtgcwgtgccagctgcctcttacggtcgcatctatgctggcgggggcacgggcagcctttcacagccagccagccgctactcttctagagaacagctggacctgctcctccggcggcaactgagccgtgagcgactagaggaagcccctgcccctgttctacgtcccctgagccggccagggtcccaggaatgcatggatgctgcaccaggccgactggagcccaaagatcggggcagcaccctgccacggaggcagccacctcgggactaccctggcgccatggctggccgcttcgggtcacgggatgcgctcgacttaggggcacctcgagagt

SEQ ID NO: 811750 - DNA, 542 bp, Homo sapiens
accggtgcatgcagcccctgtcacgtaccgcctgcttgctcaaatcaatcacgatcctttcatgcgaaatctttagtgttgtgagcccttaaaagggacagaaattgtgcacttggggagctcggattttaaggcagtagcttgccgatgctcccagctgaataaagcccttccttctacaactcggtgtctgagaggttttgtctgcggctcgtcctgctacaatcccagcactttgggaggccaagccaggcggatcaagaggtcaggagttcgagatagcctgaccagcatggtgaaacactgtctctactaaaaatacaacaattaactgggcatagtgtcacgcatctgtaatcccacctactcgggaggttgaggcaggagaatcacttgaccctgggaggtgaaggttgcaatgagccgagattgygtcactgcactctagcctgggcgacagagcgagactccgtttcaaaaacaacagcaataacaacaacaaaacatagatatgtatgtatgtataggaaaaggcatggctt

SEQ ID NO: 811751 - DNA, 644 bp, Homo sapiens
tttgatttgccttagcagtttatggtgataccaatgtgtagccagagcctgggtgacgatgccaggattaggtrggtctgattgtctgaagtgaatcaccctataactgagctgctgggaagagggactctgctcatgaggcaagcaactgggtgaggttctctatctattcctagagtgagtagcattgtaggtgacagtaagcctcagcttcctagctctcatcaagaaaataatgtcaaacaaaatcacattggaagacattcattaactgggttggttctttggaaggaacaggattctctcctgggaaaagagacacagtgaggatctgcagccatcttcaggaccaagaaagcaatataagaaagctaaaatgatggaagctctgctttgcttttagtttttccccgtagttaattttcctggaaaatttctttggaatatcaaaggatccagagattggaggaaacagtctgtacaatattcactcggatattgcataaacagtatttgcattttctaagacgccccatgccctgcttaccaagtttagaagcaaagaacaccctccatgtgtcctgtctttaaattttttccaacacatctaattctgctactgtttcctgacacactggacagtg

SEQ ID NO: 811752 - DNA, 604 bp, Homo sapiens
gatgatcaagggagaggctattcgtctataaggcagaggttatatggggcaggggttcccaacccctgggccrcagacaggtctagtctgtgacctgttaggaactgggctgcacagcaggaagtgagcagtgggccagcaagcattatcgcctgagctccacctcctatcggttcctcggcagcaatagattctcatagaaatgcaaactttattgtgaactgcacatgcgggggatctaagttacatgctccttacaagaatctaatgcctgacgatctgaaggtggaacagttttatccctaaaccgtccacccccgtggaaaaattgccttccaggaaactggtccctggtgccaaaaaggttggggaccactgatacaggaaatttctgaactgtctgtccaattttgctgtgaacccataactgctctgtgagagaggctatgaggaaattggcattgccatgctttgctgacaaatatgcaactttgcacaatcactctgaaagcaaatttagcactatctaataaaactacatatgcacttgtcttttgactcaacaattccgattctggggtatatcttcctaccctgaagatac

SEQ ID NO: 811753 - DNA, 612 bp, Homo sapiens
tcctcaccatcacaaggggctgtggatcctttctactgggcactgatggtgggatgccaggtacaggacgggccggaagtccacccttagtatcactcctgaccstccctgggagaggctgtctgcgcaggcccagcctacccttgctggaagaggctgggggaaggctgtcctctctctgcccctgcggctccctagttctgctttcagatctgcaggtgtgaggggcaccaggtccctcctctgtgtgtgtcacaggctgtcagcgttggagggacccacccattcccagccgtagcctatgccccaagctgctgcccagccgggaacctatacctccagtgacggggacctcactaccgtcctcctgcctgtcttccctcccaagactgtctaatcagtttccaaatggatgtggcccttctcggtgtctgtggggctcaggaccacagggattagccaggatctcacagcttagtaagagactaaccaggatttgaacccacctgcatggctccaaagtcagccttgatattctggaaaggcaacctcctcagagagagggcactggcctgcccacgtcacacagcagagggtggaaggaaggcagag

SEQ ID NO: 811754 - DNA, 469 bp, Homo sapiens
ctccctctgaccaggtcctggatgacccagmtgaggacaacctctatttgggtgagtgacctggctcattcccacagcagctcactcagggctggcccaagggctcccttgggacatgtatgaccttcaggtgggcggtgtaaatgcactgacctcctggggacagaagaaaaacacacgttctgaagccctggattcccttgcccagccctgcagaaccaggcccagaatatccagttagattcaacaaatatcgccaagccccactccctgcttccctctgagcagcaagacagtggatccacgtgggctgcgcgctcaggtagatgcaggaagcaggctgcatgggttcccagacactgtagctctgtgcctcagttttcccacctataaaacagggatactagtggtgtctacctcatagggttcctgtgaagagtaaatgagtaattatatgtaaagcacattc

SEQ ID NO: 811755 - DNA, 599 bp, Homo sapiens
gagtcaagcctggaggtcagttcagtcatcaggcagtggaggcagaaagtggggcagtgttttgcaggtgtttcatgatgacttacttgaaccagtgacctctaaagatagagcagagygcaaggaatgatctaggaagagtgaaggggataggcaagagctggtggctttggagcagaaccatgttccctgtcctgggtcctttaagtttcctttccttctgcagagggcaggtgaggaccatgtggatctttccagaaatacatgtggacatttgcaaatgcagaactgactggtggaaagggtgggaatgaactgctggaaatctggtcctcatggaccatatgtgtttgatggatatgagacaaatttggagaaaagttttgcaagtagtttctttcattggatattctactctctgatcccctgggttcgactactctagggacctcatgtaaatggattccagagtgaatatgagaagagactgctggttgccaggagctgggagtggggagaatcagaagttgttcatgggtgtgcagtttccgttatacaagttggggagtttctagagatctgctgtagagcttgatgcg

SEQ ID NO: 811756 - DNA, 616 bp, Homo sapiens
gaaacctctattttctatgtgttctattctatgtaaaatttgtatgtttttctaaggttcagctggacatgactttcacatgatcwttccagaaataaacagacaaggatttagtgactctgtcaaagcatgttgttttgttaacttataaatgttgacactgactgttgacaggtagttaggaactgtttataagaattgtaggcaaaaaaaattgtaggcattttcaagtgtgtatttactcaacctttaaaaaattaaacttagactttctataatgtgtaggaacacatctattttgaacttaatatgacacataaacgtgtttataagaattgtattcctttctgaaaagttgttttaatcccagtcaaagaatttttatgtgttttggagcaagtatttatttaatcaaaggtttaaaagttttaagaagtatcaaaatggctgaaccatgtgaaggaattctgagaaaccatggatgagatgctaatgaaatattggagaagaagttcaataaatcccaagactaaaataaaattctaggatgataaagacagtgaaggaacatttgagaaaaagaagaacacttggaaagaagaggaaaaaccataga

SEQ ID NO: 811757 - DNA, 632 bp, Homo sapiens
catgtagaatcaatgggagccctgagcttgttttcctgcaactaracagtcccacctgggggtgataggagacagtgacagatcattatgcactagattctcataaagagcacgcaatctagatcccttgcatgcaccattcaccatagggttcacactcctgtgagaatctaaagccaccactgatctgacaggaggctgagctcagagggtaatgggagtgatggggcgtggttgtaaatacaaatgaagcttcactcactcgcctgctattcacctcctgctgtgcggccctgttgctaacagaccatggactggtactggtccatggcccagaggttggggacccctactctacaaggtggctcctggtctctagataattttataagccaagaggagatatccccatcccaacccaggaagcaggaggaaaaggaagcagggaataatataaaatatagaggatttgaaagaaaaacaacttttcttctgccttcattcctctcttcccatctcccccagggaggccttcactatcttcagagcttcagctcttgcctctaagctggtggttcccacattgtgttctcaattccaatttccccgagactgctagtattatatctatg

SEQ ID NO: 811758 - DNA, 598 bp, Homo sapiens
ctttcccattccaacagaaccatttattgcacttacttgaaagagatgtaccagggtcttgttaaacccatctatctcccagtatgaaaatrctacgctccctattaagtagaatcttctcatccctgtggctctttgagcagaactttattcaacattttattaaaaattaaaatgcaattgaaatcacattaagatgcttaaaagctccacatttttaccctaaacccctcacgggcattcacaaggagagaacagaaaggtatctgatagccagagagccccaaacccaataaagaaggctgccaaaatgtcccaatataggccccagtgaaaccatttactggctcactgttggctgcataatctgcctttaagcactttctcctctgcaaaaaccccagaactcctttaagagccatgtctcagcacacaaaactttcaagtgactcacccttccctcccgcttccctggcccagccccacagcccctcacaccagccatgcagtctttgacctttcctgataacccactcacagttcattctgcctgcagggcagacaagaaacgcacaggggcaagattactgaagctttg

SEQ ID NO: 811759 - DNA, 628 bp, Homo sapiens
aatacaaagagatcctatggactctttcccaaattattccctaatggaaataacttacaaaactacgatacaatatatacccaggatactgasattgatacagtcaagatgcagaatattcccatcatcataggctcccccgtggtgcccttttatagccactcccactcccttcctgcccccactccctgagtaatccctggcaatcactaatctggtcttcatttcaataatgttgtcatttcaagaatgttatgtacatggactcatacagtatgcaatcttttagattggctttttatactccatataattccctgaggatccatccaagttgttgtgtgtatcaatagttcgttcctttttattgctgaataatagtccctggtatgccatgtaccacagtttaatcattcacccattgaagggcatctaggttgcttccaatttggggttattacatataaagctgttgtgaacattcatgtatatgtttttgtgtaagtatgagtttttctttctctcagaggatgcccaagagctcaattgctggattgtatggcagtgcatatttagttttcttaagaagctaccaaaatgttttccagagcagctataccattttaca

SEQ ID NO: 811760 - DNA, 603 bp, Homo sapiens
ctttcccattccaacagaaccatttattgcacttacttgaaagagatgtaccagggtcttgttaaacccatctatctcccagtatgaaaatrctacgctccctattaagtagaatcttctcatccctgtggctctttgagcagaactttattcaacattttattaaaaattaaaatgcaattgaaatcacattaagatgcttaaaagctccacatttttaccctaaacccctcacgggcattcacaaggagagaacagaaaggtatctgatagccagagagccccaaacccaataaagaaggctgccaaaatgtcccaatataggccccagtgaaaccatttactggctcactgttggctgcataatctgcctttaagcactttctcctctgcaaaaaccccagaactcctttaagagccatgtctcagcacacaaaactttcaagtgactcacccttccctcccgcttccctggcccagccccacagcccctcacaccagccatgcagtctttgacctttcctgataacccactcacagttcattctgcctgcagggcagacaagaaacgcacaggggcaagattactgaagctttgacaac

SEQ ID NO: 811761 - DNA, 623 bp, Homo sapiens
aaagagatcctatggactctttcccaaattattccctaatggaaataacttacaaaactacgatacaatatatacccaggatactgasattgatacagtcaagatgcagaatattcccatcatcataggctcccccgtggtgcccttttatagccactcccactcccttcctgcccccactccctgagtaatccctggcaatcactaatctggtcttcatttcaataatgttgtcatttcaagaatgttatgtacatggactcatacagtatgcaatcttttagattggctttttatactccatataattccctgaggatccatccaagttgttgtgtgtatcaatagttcgttcctttttattgctgaataatagtccctggtatgccatgtaccacagtttaatcattcacccattgaagggcatctaggttgcttccaatttggggttattacatataaagctgttgtgaacattcatgtatatgtttttgtgtaagtatgagtttttctttctctcagaggatgcccaagagctcaattgctggattgtatggcagtgcatatttagttttcttaagaagctaccaaaatgttttccagagcagctataccattttaca

SEQ ID NO: 811762 - DNA, 611 bp, Homo sapiens
ctctattttctatgtgttctattctatgtaaaatttgtatgtttttctaaggttcagctggacatgactttcacatgatcwttccagaaataaacagacaaggatttagtgactctgtcaaagcatgttgttttgttaacttataaatgttgacactgactgttgacaggtagttaggaactgtttataagaattgtaggcaaaaaaaattgtaggcattttcaagtgtgtatttactcaacctttaaaaaattaaacttagactttctataatgtgtaggaacacatctattttgaacttaatatgacacataaacgtgtttataagaattgtattcctttctgaaaagttgttttaatcccagtcaaagaatttttatgtgttttggagcaagtatttatttaatcaaaggtttaaaagttttaagaagtatcaaaatggctgaaccatgtgaaggaattctgagaaaccatggatgagatgctaatgaaatattggagaagaagttcaataaatcccaagactaaaataaaattctaggatgataaagacagtgaaggaacatttgagaaaaagaagaacacttggaaagaagaggaaaaaccataga

SEQ ID NO: 811763 - DNA, 553 bp, Homo sapiens
agaaatgtgtatatttaatacacctaacttacccaacatcacagcttatgctagcctaccttaaatgtcctcaaaacacttacattagcctacaattgcctaaaatcatctaacacaaagcctattttataagaaagtgttgaaaaacctcagataatttattgaatgctggtcaaaaagtgaaaaacaaaatggttgtatggatacttaatgtatggcttccactgagcatgtatggcttacacaccatcattaagttgaaaaatcatcagtagaactattgtaagccagagaccatctgtattcagaacaaaccaggtgaaactatttttagatgggacaactaagataagaatgttaaatagtctacaggaaaagatagagatgtaagtgaagataatgaaaattttataagagagttgaacattgtaarataaatctaataactaaacaatataatatcagaaatcaaaacttcatttaaaaaacttgattgaatgatattaacagcagattatacccaacaaaacaaaagttcagtgaacttgaagac

SEQ ID NO: 811764 - DNA, 444 bp, Homo sapiens
tggtactcagtgcaccgtgtctgtataccagcagaaccaggccatgctcagtggtctcttattaggagaaagttactgaaatcagtctcctgtccaattgaagtktagttgtggctgttggaacaggggtcagttagccagtgttggtggatgagccgcgatcatttcaatattgcttatctcgaaggctagtgttactttagccgctagagagaaagaaaattctgtgttagaacatagcttattctttaaatgtaggaaagtgtggcttagcccttgcctgcatgaccttaggttgagtttataatttggtatcttatggccacagagagtctgttctgtcagtctcatgatctcgattttagcgttaatgctagtcagttgtcacctctaaacttccaaagggaggggctgtaatgaggtgtaacctcccatcctgtcatg

SEQ ID NO: 811765 - DNA, 444 bp, Homo sapiens
tggtactcagtgcaccgtgtctgtataccagcagaaccaggccatgctcagtggtctcttattaggagaaagttactgaaatcagtctcctgtccaattgaagtgtagttgtggctgttggaacaggggtcagttagccagtgttggtggatgagccgcgatcatttcaatattgcttatctcgaaggctagtgttactttagccgctagagagaaagaaaattctgtgttagaacatagcttattctttaaatgtaggaaagtgtggcttagcccttgcctgcatgaccttaggttgagtttataatttggtatcttatggccacagagagtctgttctgtcagtctcatgatctcgattttagcrttaatgctagtcagttgtcacctctaaacttccaaagggaggggctgtaatgaggtgtaacctcccatcctgtcatg

SEQ ID NO: 811766 - DNA, 631 bp, Homo sapiens
gggggtacagtaattttctgcttaaaaaatgagtaccttgtaaccattacctgtatgctaaatattcttgaacaattggtagatccagaaagaaaaaaaattatgctttctctgtgtgtgtacctgctgtatatgctaaacttattagaaaattttatatactttttaacatgtccagggcagaagataaagccatgttttgacttggtgaaaatggagttgccaaacagcccattaagctccctggtatttcaccttcctctccatctctcccatccctccagtatgcctttacccctttgaaagggtgccttgtacaattgtatatattttattgaagagttattatatcttattctgaattaaattaaacatgttttattgcaaaaaaaagaagagaaagttatctcacttttagcattgtctaaatagttccccaaaaggcatttgccctttgtttttgttccatctttactaaatactctttggataatcttcayattgtgctacttagctgaaatggcttaaatatggccccttcaaaattcaggtattgaaatttaatgttcagtgtgatggtgttaagaggcgaagcctttaagaggtgattaggccatgaggattcctccct

SEQ ID NO: 811767 - DNA, 631 bp, Homo sapiens
gggggtacagtaattttctgcttaaaaaatgagtaccttgtaaccattacctgtatgctaaatattcttgaacaattggtagatccagaaagaaaaaaaattatgctttctctgtgtgtgtacctgctgtatatgctaaacttattagaaaattttatatactttttaacatgtccagggcagaagataaagccatgttttgacttggtgaaaatggagttgccaaacagcccattaagctccctggtatttcaccttcctctccatctctcccatccctccagtatgcctttacccctttgaaagggtgccttgtacaattgtatatattttattgaagagttattatatcttattctgaattaaattaaacatgttttattgcaaaaaaaagaagagaaagttatctcacttttagcattgtctaaatagttccccaaaaggcatttgccctttgtttttgttccatctttactaaatactctttggataatcttcacattgtgctacttagctgaaatggcttaaatatggccccttcaaaattcaggtattgaaatttaatgttcartgtgatggtgttaagaggcgaagcctttaagaggtgattaggccatgaggattcctccct

SEQ ID NO: 811768 - DNA, 601 bp, Homo sapiens
aagttttgcattttcagtagagatggggtttctccatgttggagttgtgaccattattgcctaaactatttttactgcgcctttctctcctcttcttccaggattctcattatgtgtgtgtcttggtmtccttgatggtgtctcacaggcttctgagcctatgttcattttcgtttattcttctttttgctccttagactggatgatttcaattgacctataatatctctagacctctgattccgaaatgccatcatagaggaaaattggattcactccccgacttccacagaaccaaaaacaaatatatagcactgagatctacaccagaaacaacccagagctcaagtataagagtgagacagttcttggggccacagagggatgaaaaaagtccaagcagctgataggagaatcagacttccacatctgggacacccctcatccccattctgtccagcaccaagtgccaaaaaatctcctcccaactacagtttctacactggaaaaactgaaattgaggtggcccaccagcttccttaccttcttggggtccctggcaggagaactgttcttgccttaatccacagatagcatcatg

SEQ ID NO: 811769 - DNA, 580 bp, Homo sapiens
gttgatatccaacaaccctgaaaaaccttacacatgtgcattaggctacatttacaggaagattatcagaacgttatttacaaaaggggaaactggaaaaaattaaatgttcatcaatatgagaatgggataaatacatttttgtatattccaagttgtgttcctgtactgaacttaaaatccagccattgcagctctacatatcattattacatatcattatcattgtttcccctgtatacagtgcatattcatgggtgtgtgtgtgtgtgtgtgtgtgtgtgtgtgtgcatgagggaagaaaatatacccaattaggttcaccagtttatgtttaccagtttgggagagaagagagaagaaacaattggagcagacacaataaacaaagaccaatttaaatttacatgtaaaaatattttatcttaacaatttcagaagtgaargaaaaacctgtgaatttgctaatagatgctatatatttatttctagtcaaaagtttaagaaaactgctcatgattttatagaattttgtggcaagtcaggtaaataaatacttgctatatttatttataatgtt

SEQ ID NO: 811770 - DNA, 469 bp, Homo sapiens
ggaaattctcagaccgccaacccaggcctactaaataagaaactctgtgcagagcccaggaatctatgttttgacaagccctcctggtgattctgaggcatgctcaagtttaagaaccactgttctaggggatgggtatataagtgaataaaacaacaagcaaaattaaaagtcagctatcactgagatttggggctttgactgccaagtgaaacccaagtgaagatttttgcaggctctgggctagagagtcccaagttgagcagatctcctgacaaacttaccctgggtctttcttgatcctggcatttgttccttagttttcctctgtggtcaccttgttctttcccattggataccctttctctatgtctccatttatgtaaagtcaactcattttggggacctccttaaagtattgaaaagcyttttttcccctgattttttttcatttcaataatgtctgtat

SEQ ID NO: 811771 - DNA, 463 bp, Homo sapiens
atccatcacccagcttaagaaatagaacattatttytacattagaagcttccatctggccaggcgcagtgggtcatgcctgtgatcccggcactttgggaggctgaggggtggatcacctgaggtcaggagttcgagaccagcctgaccaatatggtgaaaccccgtctctactaaaaatacaaaaattagtcaggtgtggtggtgtccgcctgtagtcccagctactcaggaggctgggacaggagaattgcttgaactcaggaggcggagatttcagtgagccgagatcgcaccactgtactccagcctgggtgacagagcgagactctgtctcaaaaaaaaaaatcctccatttgttccttcccaattgtatccccctaaagctaaaggtattagtttcatgagttttttaaagttatatatatttttctcaaagaacatattgtttttgaactttatat

SEQ ID NO: 811772 - DNA, 574 bp, Homo sapiens
tatccaaaaaagttttataattttttatgaaatccgagtttatctgtatttttctttagtyacttatgcttttgatgccacagccaacaaatcattgccaaatccaaggtcataaagccttctatttttttcttttagagttttatattttttagctcttacagtaatgtctttgaccaatgttgagttaatttttattatgtaggcaaggtgttacttcattctttttacatgtggtgatccagttttctcaacaccatctgctgaaaagaatcttcatgcattgtttcaataatgcaaaaaagcatttgacaaaatgcagcacactttcatgatacaaattctcaacaaggtaggaatagaaggaaatttaatataataaaggtcatatgtaagaagctcgtagcatactcagtggtgcaaactgaaaggttttcctctaagatcagaaacagggcaaggatgcccactcttgccatttctgtataacgtagtactagaattcctagccagagcagttaggcaagaaaaaggaataaaagtcttccaaatgggaaaggaaaaagtaaaattg

SEQ ID NO: 811773 - DNA, 608 bp, Homo sapiens
aactgtctgaaaagcaaattaggaaaacatttccatttgcagtagtatcaaaacaaatagaacacttaggaataaacttaaggaggtaaaagacttgtatattgaaacccataaaacatttctatatatactgttttattttgatttttatttccttttctgttttccacagtggctatactgttttatattcccaccagcaatacacaaggattccaatatcacaacatcttcactaatagttattttatttacttttttaaataatggccttccgaacagctgtgaaccaatatctcatcgtggttttgatttgcatttccctgataattactgatgttgagcatctttccatatacctgttaaccatttgtatgtcttctttggagaactgtctattcatgtcctttgcctgtttttcaatttttttttaatattgggtttcttaatatattttggatattaaccccttatcagatatatggtttgcagatattttttctcatcctttaggttgcctttccactcttttttttccctttactttgcagaaaccttttagtttgttgtggtcccaatmgtaggttttacttttattgcctgtgctt

SEQ ID NO: 811774 - DNA, 584 bp, Homo sapiens
tgaggttcttcctaatccatccaagaggcagtcttttttaaatttttttgaaaacagggtctcactccattgcccaggctagagtgcagtggtgcggtcatgggtcactgcagccttggcctctcgggctcaggtgatcctcccacctcagcctcctgggtagctggcactacagccacacgccaccacacccagctaatttttaaacgtggtttttttttttttgtagaggcaggatcttgctatgttgcccaggctggtctcgaactcctgagctcaagtaatccacccgcgtcagcctcccaaagtgctgggattacaagtgtgagccaccgtgcctagccctaaggtgtactcttggcttcaagaagctattcacagtttcttgccatgtggccttttcacaagccccctcgtatcatgacagtatacttccagaggccaataggaagctctctagcccyagtcagccaatacagagtcttacacaacttaataaaattgtgaggaaaaaaataaaattaaaaaatcatgggaataacttcccatcatttttgctatataatataacctaattaagagtg

SEQ ID NO: 811775 - DNA, 529 bp, Homo sapiens
gcttaaaacacaaattatacagctgtayaaaaataatttttatatccttattctataagctttttctatttttgaaatttttattttttatttttttactttttaaacttttctgttaaaaatgaagacatggggagcgcaatagctgaagcctgtaatccagcactttgggaggccaaggtgggcagatcacttaaggtcaggagttcgatagcaacctggccaacgtggtgaaaccccatctctactaaaactacaaaaattagctggatgtggtggcaggtgcctataatcccagctacttgggaggctggggcaggagaattacttgaacccgggaggtggaggctgcagtgagccgagatcaccccactgcactccagcctgggcgacagagcgagactccatctcaaaaaaaaaaaaaaatgaagacataaacactcatgtagtatcctaggcctacacaggatcaggagcattaatatccctgtcttctacctccatgtcttgaatcactggaaggtcttca

SEQ ID NO: 811776 - DNA, 579 bp, Homo sapiens
ccttggtatcagggtgataatgctggtcatgtaaaaagaatttagaagtatatcctccttttcaacttctttgaaagcatttgagaawgattggtattagttctttaactgttaggtagaattcagcagtgagccaacaggtcttgggcttttctttgattggaaagaactcattattggtctgtttaaattttctatttctttatgatgcagtcttggtaggttgtatgtgtctaggaatttatccatttcttccaggtatccagtttattttgttggcatataattgtaatagtcactttgatcctttgtatttctgtggtatcagttataatatctcctcatttgtttctcattttatttgaatattctctttttttcttgttaatctagctaaaggtttgttgatttcatttatcttttcaaaaaccaattcatagttttgttgatctttgtgttgttttcctagtctctactttatttatttattctctgatctttattacttctttccttctgttaattttgggcttagttcttctttttctagatccttgaggagtaatgttatttatttgg

SEQ ID NO: 811777 - DNA, 488 bp, Homo sapiens
cttaagcccttttaaatctgaagactatgttttttctaatttcagagaaatgctgttctattatttttcagaatcctgtctcttrcctgtggatatgggatgttggaactttttgctgtagctcccatttttaacttttttcctgtggtttctatgtctttgtgctttactgggtactgagagaattcctcagttctctcttagctttcatttacttttcacttctgtgtgttcaactattgtttaccttcagtgattcagtttttagtttctttgattctttaataaattttttttttattttttgagacagagtctcactctgttgcccaggctgaagtacagtggcacaatcttggctcattgcaacctccacctcctgggtgcaagcaattctcatgcctcagcctcctgagtagctgggaccacagacatgtgccaccacgcctggctaatttttgtaattttagtacacacggggtttcgcc

SEQ ID NO: 811778 - DNA, 488 bp, Homo sapiens
cttaagcccttttaaatctgaagactatgttttttctaatttcagagaaatgctgttctattatttttcagaatcctgtctcttgcctgtggatatgggatgttggaacttyttgctgtagctcccatttttaacttttttcctgtggtttctatgtctttgtgctttactgggtactgagagaattcctcagttctctcttagctttcatttacttttcacttctgtgtgttcaactattgtttaccttcagtgattcagtttttagtttctttgattctttaataaattttttttttattttttgagacagagtctcactctgttgcccaggctgaagtacagtggcacaatcttggctcattgcaacctccacctcctgggtgcaagcaattctcatgcctcagcctcctgagtagctgggaccacagacatgtgccaccacgcctggctaatttttgtaattttagtacacacggggtttcgcc

SEQ ID NO: 811779 - DNA, 637 bp, Homo sapiens
caccactagaagcctgaaaggaaggcaaggttttatcagggtaggaactgagctctggagaaagaacaggacaactggccatggctgaaaagggggcacagggtcarcaagttgaagacagatccttatgataatgaaccagggtggaaacaggaaaagagggtttgatgctttctttggggcaaacgattctctccctattcctgcaacaatagcgcaggttcctagatcagtcatttggtccattagcagctaatgctggttgtgggtatcacaccagtagatggccatcaccttcataaagctcctgcacaatgctcagctcgtgagtgctccaaggaaaacatttctgtggtgactgtgtttgggatttttgcaaactacaggtccttcttggggattcacagtgtacattagctctgaatgtgtacagcgtgcattttaaacactctgccaactcctgaggtatagaaatctgtttcattgtttttaatttaatgtttctcaaatgtagttgacacccgggtccaacaggatccttttgctatataacaaccctgaacattctgtggacacaccttgagaaacattgttctagaacattcctaatctggtgttcccaggcccttcacagcct

SEQ ID NO: 811780 - DNA, 599 bp, Homo sapiens
cagtgagccaagattgtggcctgctgcactccagcctgggagacagaatgagaccctatcaagaaaaaaaaaaaaagaggagtggagagagatcattctctctgccatgtgaagacacagtaagaagctgatcatctgcaacccagaaagagagcccttgccaggaaccaaattggttagcatcttgaccttagactccctaacttccaaaactgagaaacataaatgtctgttgttgaagccaccagtctatattttgttgtagcagcctgagaagactaatacagacaataactgctctactcagccaaacaccacagcaaacgctttggcccccacccatgccaacaaaggctgagtggggagcctacgattccacccttatgaggctataatgcggcacctcacccaccagggttgtgtcagagaaggccaagtagagagtcaataataagtccactctccacctggcccccatggtatcagtggagaccatgtgggaagcctacacttrcacccccaaaaggcagtaatgaagtgctcctcttcattcctgctcagtggtatcagagtaggactagcggagagtctagactttt

SEQ ID NO: 811781 - DNA, 609 bp, Homo sapiens
cctcactcagggtgcccaaccctgaaccttgggattacacttcctggctgrgtggccttgggctgtgttctgggatctgcctggggaatgcaccctacctctgcaggctgaatggctgaacacaggtgggggaccacatcccagaaggcacaaagttcaggtcctgccctagcctccctgggcaggacacccctctcagccttcgtgttctcacaggtgagacggatcacgccacccacaatgtcatcttcctaggcttgatggaaggagccacggaggtcacaaccccataggaaagcattgggtaaaacactgtgaatcccagggtcaaggtcaggcaatggaggcgcacacacctctgtgacgtatcctttctccctcttgcctgatgattctgccgttgcctttccaagctcctgggtgtgtgatctttttgcggtcaagtggtgaaaagatacagtttagatcactgtgaaggtctagaaattaaataattaaggaagaagaattaaaatcccctggtgcttcaggaggtgggtcccggtacaactgccagtcaatccagcctggagccaagttcagcagatcacaaaggggtcaggagaggtg

SEQ ID NO: 811782 - DNA, 567 bp, Homo sapiens
atttttaaaatgcattttcttccttcatttcacaaatagttcttaaacaattartatgaatcagaatctgtgacagatgctgaatctacaacaggaaataaaagagtccctgcttttatggaatgtatattctagcagagggagacagacaatatataagtacatataatgcaatgtcatggtgataaagctgtgatcaaaaatagggcaagtaagacaatgaagagcaatgagaaggggcaggagttattattttagctagggtggtctgagatggctttaactataaggagtttatattagcccttactctgaaatcaaacaattgttttaataaccaattacagtcatgcaccacaagtcagtgatggaccacatacatgaagggggtcccatgagattataacaccatattgttactgtatcttttccatgtttagatatatttaagtacaaaacaccactgcgctacaattgcctacagtattcagtacagtaacatgctgcacagtttgtagcctaggagcactataccacatggcctaggtgtacagtaggctataccat

SEQ ID NO: 811783 - DNA, 707 bp, Homo sapiens
aattatggagacatgtcaaaagaagacagaagtcagcttgaaggggttcctgttggccaaatcttgaactatttaaggagtaaaatagttaatgacaaatttaaccckttgagtaaaataagagtccatgagtccatgctgatagaaacagagaagggaactctatagtagaatgcgactaataaatgaagaagaaaagatagaattagaaaaccaccatttggcaaccaccatcttaataattgattcaggccagaatcatcaataaatgctaaaattggtgggtaaaagtttgatgaggaacaggatatttacatagtctcaaagcatatctctaaaaatgttcattaatacatcattaattattaataagtacagcatacttattaacatgcagctgtaatacttgggaggtatcatcttaatcgactggtaaaattttacataaatgaaaaccagtgatgggacaaatcagccttgtgcagcatcctgatatgatatgctgagaatgtagtgtcacttcttatgcataaatatgtaagttaggataaaacatcagacaaatgcaaattgaaagaaaaatcaaataactggcctgtattctttaaaaatgtcaagactatgatagtaaagatggtttcagattgaaggatgctaaagagatgagacaactaaatgcagcatgtgatcttgaatgggatccaaaa

SEQ ID NO: 811784 - DNA, 584 bp, Homo sapiens
agaaaccacattacatttgtaattacctaataatccattatactaaataaactgcatttaattttaagaaacgattcatcatttattaaataaccccactgtagtctcagtggcatggtattccttctccatttaccatttctttttgctcaggataacagtttaagtagtttgtaaatcaaagcccacatccttggaagagctcggtgtgaaatgctcaccaaggttatactgtgacctgtgctcttgatctgcacaactgcctcataggagacaaaacaactcttgcatccttactcaagtattaggaggtggtgccatccattctgccagtctcagttcattcattattaagcagctcatatgagcatcctgttgaggctgacctgtgaagcctggaaaggaaaacctaaggtgtttgtaggaaggccgtatccatcttgctgaagattatgggcaattatccaatttttaaarcaaggaaggatctgtttttgggaggcctacctactggtggctaattgcttgaaaatgttagacaaaatacaatttctcaggcggtgagccacctcccagtagatttc

SEQ ID NO: 811785 - DNA, 625 bp, Homo sapiens
tccattcaacagcacctagcacttcattgtaaggtcatccagtaatgtcttttgcctagttccaagttctgcataatttttcttaacgaaccacatattttaaaagtgctttgcagaaagcaggggctcaaacaggtatgcatataccaatgttcatagcagcactattcatgattgccaaaagggggaagcaacctaaatgcccacatcaacacatgaatggataaaccaaatgcgatatacacatatacacatacaatggaatattattcagccataaaaagaaatgcaattctgacatacactacagcacggataaaactttaggacattgtgctaagtgaaataagccggacacaaaaggacagatattacatgattccacacatataagttagctagaataggtgaattcatagagacagaaaatagaagagtggttaccagaagctgagaggggaaattaacagagttaaggaatacagaatttcagtctgggatggcgtaaaagttctggrgatatatggtggagatggttgtggaacaatgtagatgtacttaatgccactgaattgcacacttaaatggtttaaaatggtaagttttatgttatgcatattttata

SEQ ID NO: 811786 - DNA, 625 bp, Homo sapiens
tccattcaacagcacctagcacttcattgtaaggtcatccagtaatgtcttttgcctagttccaagttctgcataatttttcttaacgaaccacatattttaaaagtgctttgcagaaagcaggggctcaaacaggtatgcatataccaatgttcatagcagcactattcatgattgccaaaagggggaagcaacctaaatgcccacatcaacacatgaatggataaaccaaatgcgatatacacatatacacatacaatggaatattattcagccataaaaagaaatgcaattctgacatacactacagcacggataaaactttaggacattgtgctaagtgaaataagccggacacaaaaggacagatattacatgattccacacatataagttagctagaataggtgaattcatagagacagaaaatagaagagtggttaccagaagctgagaggggaaattaacagagttaaggaatacagaatttcagtctgggatggcgtaaaagttctggggatatatggtggagatggttgtggaacaatgtagatgtacttaatgcyactgaattgcacacttaaatggtttaaaatggtaagttttatgttatgcatattttata

SEQ ID NO: 811787 - DNA, 673 bp, Homo sapiens
tttggatccactgctggtgagcaagagtgatttttggggggtgttaaagagccttgttttgtcatattaccagagttggttttctggttccttctyatttgggtaggctctgtcagagagaaggtttagggctgagggctgttgttcagattcttttgtcccatggggtgttgccttgatgtagtactcttcctcttttcctatgcatgtggcttcctgtgagccaagctgcagtgattgttatctctcttctgggtctagccacttagcaagtctacccggctctgggctggtactggggattgtctgcacatagtcctgtgatgtgaatcatctatgggtctctcagtgtggataccagtacctgttcccatggaggtggcagggggtgaaatggactctacgaggttgtcagctttggtggtttaatgttctatttttgtgctggttggcctactgccaggaggtggtgctttccagaaagcatcagctgtggtagtattgagagaaaatggcagtgggcggggccttaaaactcccaagagtatatgccctttgtcttcagctaccagggtgcataggaaaggcccatcaggtcggggcagggctaagcatgtctgagatcagactctccttgggcaggtcttgctgtggctgctgtggggtatggggg

SEQ ID NO: 811788 - DNA, 604 bp, Homo sapiens
gcaggtttggaaaggatgtatggacaaaggaaagctacatasagaaaacggaagtgaggcacagaaacagccagattggttacagctggtgtctggcttattcaaacacagtttgaacaggtggaccctgtgtgtgattgaagtatggttgtcgtaatgggatgagacttggctacttgttacaagagtaggctatactctgtttacacatccagttaggttacagttcactatgtatggaaaaacctttaggccaaacttaaaacacataagacagcatctttaggctaaacttaattcaacatttctgtttcgtttctggcataactattatatatagaatgtaaatagttctaatatattttaagtgtttctttatgtatgacatattatgagtgaactttagttaaaactgaaatgaacatggtaatgagaaaaatttacacacaagtgattttgaaaacagaatggattgcttacaaattacaggaaatgttataacacaaaccagaagaattcaatggaaggcaataagggattctgaaatgaaaattataaaagtatcaagaccaatgaaggttatttgaatatcaaagctattatg

SEQ ID NO: 811789 - DNA, 614 bp, Homo sapiens
gggccaaaacttttatcagattatgatagaagtttataaatttaaaatagttaataatyactgctttatgacttgatttaaaacagtaacaacatctcataaattaagctaacattcaaatatctttaagatgactgaatttgcttattttcatcaagtgtcatctttttctatataaaggaatgatacactgtgattctgaggcaagttcataggagtggttaatctaaccctgctatcaatctttcacggtaccctcaaattgtttctcatcaccaatcaccatgcatctcatcaatataaagggtgactcctatgaggacagcagaataagggggagccaatctaccttccctctctcctaagatgagcagaaaagctttcacagggaaaactattctcctatgcctgacatctctcacatggaccgatctggaaagaagagaacagagtgtaagtagtgtgcctgttcctacagaagaaccacaaccagctgttccttacggggcccagtcagataaaaagcaagttagtgcagctctcacaagaatatcttctattgctaatcacatattactgcccaatgctgcaactgctctgcgtaacaacttccc

SEQ ID NO: 811790 - DNA, 614 bp, Homo sapiens
gggccaaaacttttatcagattatgatagaagtttataaatttaaaatagttaataatcactgctttatgacttgattwaaaacagtaacaacatctcataaattaagctaacattcaaatatctttaagatgactgaatttgcttattttcatcaagtgtcatctttttctatataaaggaatgatacactgtgattctgaggcaagttcataggagtggttaatctaaccctgctatcaatctttcacggtaccctcaaattgtttctcatcaccaatcaccatgcatctcatcaatataaagggtgactcctatgaggacagcagaataagggggagccaatctaccttccctctctcctaagatgagcagaaaagctttcacagggaaaactattctcctatgcctgacatctctcacatggaccgatctggaaagaagagaacagagtgtaagtagtgtgcctgttcctacagaagaaccacaaccagctgttccttacggggcccagtcagataaaaagcaagttagtgcagctctcacaagaatatcttctattgctaatcacatattactgcccaatgctgcaactgctctgcgtaacaacttccc

SEQ ID NO: 811791 - DNA, 569 bp, Homo sapiens
catcaccccagaaattcctttgtggtatccttttgcaatcagcccctcccacctaattctaacctctggcagctactaacttgatctgtacctctgtaagtatgcctgttacagaatgtcttataagtggcattatttggtattagtcccttgagttttggcttctttgacgtagcaaaatgcatttaagatttattcacattgttgcatagatcaatacttcctttctttttatcagtgagtagtactcaattgtacggatataccacacttatttatcaatttaccagttgaaagttacctaagtagtttccagcttttgatgcttacaaatgaacctgctataaatgttcctgtacaggtttttatgtgagcacaccttttcatttctcttgagtaaatacccagggacgagatgcctggaccatgtgggagatacatgtttaacattatcagaaagttctcactttcccatgggagatgaaacattttgcattaccacaagtaaagaaatccagttgctctgtgacsttgcttgaactttgtgtggtcagcttgttgctttgttg

SEQ ID NO: 811792 - DNA, 348 bp, Homo sapiens
gacttggcagataaataccccagccctcaaccctaagataggataactttgaggcacatgttccaccctgtctttctgatttcccagggcccacactggtcacttgaytaacagcacatcctgtattggcttcccttaccttccatatctcatagggtagtcacggtaacgccctggaagaactccaagtacctagagaggaacaatgaaggcctctgctgctgtgctttggaatccatggcagcgtttgcgtgcaatcacaccttcctactcctagccaataacgggagtatggcagggatactagcgcaggcctcgccctggcaggtgtgggaccttgctggtagc

SEQ ID NO: 811793 - DNA, 348 bp, Homo sapiens
gacttggcagataaataccccagccctcaaccctaagataggataactttgaggcacatgttccaccctgtctttctgatttcccagggcccacactggtcacttgattaacagcacatcctgtattggcttcccttaccttccatatctcatagggtagtcacggtaacgccctggaagaactccaagtacctagagaggaacaatgaaggcctctgctgctgtgctttggaatccayggcagcgtttgcgtgcaatcacaccttcctactcctagccaataacgggagtatggcagggatactagcgcaggcctcgccctggcaggtgtgggaccttgctggtagc

SEQ ID NO: 811794 - DNA, 466 bp, Homo sapiens
cagatgcgttctcagttcctcagtgagacctgcacactttagcacagacagctctactgactcgaatgcactaattcctcaggaatttgtgtcaaagtatgatattgatggtcaatatacacaccatcacacctatacaaaatataggtcaaatgtgactcttcaaatttagagcctgtttctctgaaggcaattttccactccacacattgaagcactaaaatatttcaatgcagaaacataaaagttgctctctctctctctctctctctctatatatatatatatatataatttattatagtttgatatataaatatataaagaaaaataaatgagttattacagtttgaaaaaagtcaytgaggctctttttattgacatgggtggaactggctagactcagtctccttaatgattcttcagttacattctacagcttcattagtagaaccttatgaattta

SEQ ID NO: 811795 - DNA, 532 bp, Homo sapiens
catccaaatacagacaataaaagatatggttaatgcacaaagttaatggcttaccctcaacacctgcatgggtgtctgatgggatgggtgcactgggggcctcatattaggtggcaaaggaggtcccaggtttcccatagggatgaaaccctgcagaatgtgctgataacggaagtaaggccagtctgtccatttaagacatccccaagaaggtttctagatgaaaaatgcctgccattcactgccaacatttttcatttcccaattcttgctctctgaaacacacgaaaggtgttcccattaaaatagtatgttgtgtgaattctggaaaactgaaccaaggaacagacccttattctctctcccaaatccctctcaagagaattctaatttaaaaaatgaacttaagagttggctggacctgcctyttctcctcaaggatccctggcacttttgcaggctaaagttcttgagaagacttgtaagccagggaaagggctaccttcactgttattcaacggtctggaaaaaa

SEQ ID NO: 811796 - DNA, 581 bp, Homo sapiens
tggatgagactggagaccattattctaagtgaagtaactcaggaatggaaaacaaaacaccatatgttctcactgatatatgggagctaagctatgaggaaacaaaggcataagaatgatacaatggattttggggacttgaggggaagggtgggagggaccaagagattaaagactacaaatgtgatgcagtgtacgctgctcaggtaatggctgcaccaaaatctcacaaatcaccactaaagaacttacttatgtaaccaaacaccacctgtaccccaataacctatggaaattttttaaaattttaatttaatttaattttaaaaaagaaatggcaaataagcatatgaaaaaatgctcctcagcaccagtcattacgaaatgtaaatcaaaatcatgatgagataccagttcacactatccttttagctatctttttttaattttaggatagstaaaataaaaaagatgaagtgtttgtgaagacctgaagaaaatggaagtctcatacattgctagtttggtgtaaaatggtacaaccactctggaaaatagtttgacaactcctcaaaatctta

SEQ ID NO: 811797 - DNA, 573 bp, Homo sapiens
attcccaacagcaatgcagaagagttctaggtgttccccatccttgccactagtattattctgtagctatgcagagcaggtaaaatgcctaacyctaatgtctgaacaaactggtttcagggctgaataaaatcacatattgcattttcttaaaataaaaattcagtccttctaattcacttttcagattttttttcttcttttttaagagataggatcttgttctgtcacccaggctggagggcagtggtgcaatcatagctcactgcagcctctaactcctgggctcaagcagtcctcttgcctcagcctcccgaataactgggaccataggtgcaagccaccagctttttagattatttagtgctcagagtaatcagatacatcacccgtacgtgcggaagacagtgagtaaaccccaagataatgctgctacctcaataacagcttagtctatgacctaatacaacaccagctaacactcgctaagtattactccatgccagccactattcatgggttatcccatgtaatcctctcaatgacattgggggtgtgtgctatcttatctct

SEQ ID NO: 811798 - DNA, 573 bp, Homo sapiens
attcccaacagcaatgcagaagagttctaggtgttccccatccttgccactagtattattctgtagctatgcagagcaggtaaaatgcctaactctaatrtctgaacaaactggtttcagggctgaataaaatcacatattgcattttcttaaaataaaaattcagtccttctaattcacttttcagattttttttcttcttttttaagagataggatcttgttctgtcacccaggctggagggcagtggtgcaatcatagctcactgcagcctctaactcctgggctcaagcagtcctcttgcctcagcctcccgaataactgggaccataggtgcaagccaccagctttttagattatttagtgctcagagtaatcagatacatcacccgtacgtgcggaagacagtgagtaaaccccaagataatgctgctacctcaataacagcttagtctatgacctaatacaacaccagctaacactcgctaagtattactccatgccagccactattcatgggttatcccatgtaatcctctcaatgacattgggggtgtgtgctatcttatctct

SEQ ID NO: 811799 - DNA, 573 bp, Homo sapiens
attcccaacagcaatgcagaagagttctaggtgttccccatccttgccactagtattattctgtagctatgcagagcaggtaaaatgcctaactctaatgtctgaacraactggtttcagggctgaataaaatcacatattgcattttcttaaaataaaaattcagtccttctaattcacttttcagattttttttcttcttttttaagagataggatcttgttctgtcacccaggctggagggcagtggtgcaatcatagctcactgcagcctctaactcctgggctcaagcagtcctcttgcctcagcctcccgaataactgggaccataggtgcaagccaccagctttttagattatttagtgctcagagtaatcagatacatcacccgtacgtgcggaagacagtgagtaaaccccaagataatgctgctacctcaataacagcttagtctatgacctaatacaacaccagctaacactcgctaagtattactccatgccagccactattcatgggttatcccatgtaatcctctcaatgacattgggggtgtgtgctatcttatctct

SEQ ID NO: 811800 - DNA, 578 bp, Homo sapiens
cttgtcctctgatctttcttctgcgcatttgaactttcttttttatacgagtaggatcaccacattttgtacactaacaaagtttaacaaattgttagactttcccatgacattagggccttttccatttaacgagagctgcacatgctgttttggggacctgaatggcgtatcgaacccctgtccgcctctgactctggtctcccaccctcttccctccccaccgttccccgctgtccttggtctttgttgtcctagccacaccggcttcccagcactggctggactcacaccccacagcaggaggaccgggcagggtgaggggtcccaaaggtctgggcttaccactgaagttccacttctccaaccggcttgccctggccctgtcactgccttctctacggtcccacgcgctctggagatgcttgtctgtgggcccgggtggttggcttgggggaggctgccrtgcgtgtggttttagcacggcacaggtctttgcagatacacggcacgtgtcacagtcatttgagcaccgtcctcctgtttgtcaccgagtcatctctttttaacagaagctc

SEQ ID NO: 811801 - DNA, 569 bp, Homo sapiens
aacggactgtactatactgacagtaaaacgaactaatctggcatccatacactgtgtctgtcaaactcagtgatgcacacaggtttaaacattgttttttatgtgttttaatttttcatagccttctaacgtgacctgtgagacgtctctgcagagttgatgccatgaggtagtgagctcacctaagaatgtcatcgtcatatagtcagcaagaataagatatagaagacgatgccttcgtggctttacacacctcaaaatgtggagctgtatcatttatgtgattcttttaagacataatcactcaattgaaagcttggagcagataatgcatcttagtagccagagcttcgcggctgccattgtatttccgctccttcgtgaaggggagcgaggcgtgctctgcagagcagcaggtgtgtgccatgtgagggctggagggcacagccyacgagagctgcttcgtggggctctcaccagttctgtggctccatgtccagaccagttctgtggctccgtgtccgtagcaaagctggatctggccacagctgtcgggaatgtctgaggga

SEQ ID NO: 811802 - DNA, 569 bp, Homo sapiens
aacggactgtactatactgacagtaaaacgaactaatctggcatccatacactgtgtctgtcaaactcagtgatgcacacaggtttaaacattgttttttatgtgttttaatttttcatagccttctaacgtgacctgtgagacgtctctgcagagttgatgccatgaggtagtgagctcacctaagaatgtcatcgtcatatagtcagcaagaataagatatagaagacgatgccttcgtggctttacacacctcaaaatgtggagctgtatcatttatgtgattcttttaagacataatcactcaattgaaagcttggagcagataatgcatcttagtagccagagcttcgcggctgccattgtatttccgctccttcgtgaaggggagcgaggcgtgctctgcagagcagcaggtgtgtgccatgtgagggctggagggcacagcccacgagagctgcttcgtgggkctctcaccagttctgtggctccatgtccagaccagttctgtggctccgtgtccgtagcaaagctggatctggccacagctgtcgggaatgtctgaggga

SEQ ID NO: 811803 - DNA, 632 bp, Homo sapiens
ctgatattagagatattagtttcttttcctcagtattattctatcttgtgaatattctacaatcatttgtttatttcatgctgaygaacgtttgagttgtttctagatgttggctatttatacagaattactaaaaatgtttccaatgggtatagacttgggggggtaataacaaactagcatatatgtgtgttcacctttggccaataacaacacaaatttttctaatttggttatatcaatttaaagtctccaatgcaattaactggagttcctgatgcttacaaattaagatatttagtattgtttaaaagtttaggccgggcgcggtggctcacacctgtaatcccagcactttgggaggccaaggagggcggatcacgaggtcaggagatcgagaccatcctggataacacggtgaaaccccgtctctactaaaaatacaaaacaaaattaactgggcattgtggcgggcgcctgtagtcccagctactcaggaggctgaagcaggagaatggcgtgaacccgggaggtggagcttgcagtgagccaagattgcaccactgtactccaacctgggcgacagagccagactccgtgtcaaaaaaaaaaaaaaaaaaagtgtagccatt

SEQ ID NO: 811804 - DNA, 594 bp, Homo sapiens
ctcgattcgcattcggttgttctcttcccattccattttgtgttagtttcttatatggcacaatttccacaaacttatgccttaraacagacatttattattttactgtttttgtggaccaggtgtctgggcatggcctagcccatcggcgtgtcagcctaggctgtggtctgggctgagattcaggcttcttgtgcaagctcgaatactgttggcagaagtctttttatcgcagctatagaactcaggatggtttacttcttcagggatggcaggagagacagcctttgttgctacaaatctcaaatctctgtatcctcttttaaaggggtcatctgcctaactcaggcccactaaggatggtcactcttctgacctaaaatcaactaattggagacctgtgagcatcagttgtatgtgtccatttggcaaggctaccttcttgggttggccaatcaaacattaacttaggtgttgtatggaagtattttatagacaagattaaactccataataaattgactttatttatttatttgtttgtttgttttttccaagacatagtcttgctctgtcgcccaggctgaagtgcag

SEQ ID NO: 811805 - DNA, 620 bp, Homo sapiens
tgaaaaaatgcaaggatttgattggtattaaacagcatttccctaaaatgtttcaaagaatattagcatatactacacacaagcaatgttccatagtcaaggaagtttatacaattctaatttagacaaaggtaaggccaggtgcagtggctaatgctgtaatcccagcactttcggaggccgaggcaggtggatcatttgaggtcaggagttcaagaccagcctggccaacatggtgaaaccccatctctactaaaaatatttaaaaacaattagccaggtgtggtggcacacacctgtagtcccaactacttggaagggtaacagaattgcttgagcccaggaggtggaggttgcagtgagccgagattgtgccactgcactccagcctgggtgagagagcgagaatctgtgtcaaaaaaaaaaaataaatcaacaaaggtaagcttctttactacagttcttctcaaccattactatgctaatatccaattatgaaatcccaaaaggggrgctatataatatagtacagggtatcacctgcttgccaaatcaattcagatactttttagatgaatcccttaatatgtaaaatacagaaatcaaataagatttagata

SEQ ID NO: 811806 - DNA, 339 bp, Homo sapiens
aggtgtggtgatgggcgcctgtaatcccagctactcaggagtctgaggcaggagaattgcttgaacccaggggktggaggttgcagtgagctgagatcacaccactgcactccagcctgggtgacagagtgagactccgtctcaaaaataaaaaatatatatatagatatatatagtcacatttattgatcttttcaaatcttactaatgctgtttatattacagcctaggctgttgattctgttccattgttctgttccaatttcacactgtcttcaaacatcatgtttttaaaaggtatcttagatccctgagtctgtaataagactgaaaaagggg

SEQ ID NO: 811807 - DNA, 516 bp, Homo sapiens
ttttttgagatggaggtctcactagtaattggtagattaaaaataaccacaaacaatgtgcagtaactctcatcaaaaggtggrgtctctttgctcataccttaatctagactggctttgttagttgccctaaccaacagaacatggcagtagagatactgtataaattttaagcctaatcatttttttgactgtcatatgaggaagactgggatagcctactagattctttactaatctgatagccagcagtcagcaccaatcaacagacatagatgatcatcttatatcttctagccacagctgaggtgacagatactgtagctccatgaatgactctaagcaaaggcagcaaaacaattatccaaccgattccagtacaaagtactaataattgttgtgctaagctactacattttggagtgacttgtaatataggaacagatgacaaggcgtactagtctcctatgatctgttacaaggacgttatggttgtatctatttctacagctccat

SEQ ID NO: 811808 - DNA, 516 bp, Homo sapiens
ttttttgagatggaggtctcactagtaattggtagattaaaaataaccacaaacaatgtgcagtaactctcatcaaaaggtggagtctctttgctcataccttaatctagactggctttgttagttgccctaaccaacagaacatggcagtagagatactgtataaattttaagcctaatcatttttttgactgtcatatgaggaagactgggatagcctactagattctttactaatctgatagccagcagtcagcaccaatcaacagacatagatgatcatcttatatcttctagccacagctgaggtgacagatactgtagctccatgaatgactctaagcaaaggcagcaaaacaattatccaaccgattccagtacaaagtactaataattgttgtgctaagctactacattttggagtgacttgtaatatagsaacagatgacaaggcgtactagtctcctatgatctgttacaaggacgttatggttgtatctatttctacagctccat

SEQ ID NO: 811809 - DNA, 606 bp, Homo sapiens
aaaatatattttaacattcagttttgtttgtaagtcgcatggaacttaraaaccacctgccattcttattttaaaaagttgtatttctgtttttgtccctaagtgattaggggttaataagatttgctttcttaccaccatgtcccttaatgaatatatattaaaacaaactttcttctctctcaaatcatgtttttttttgtttttgtttttttcagaatttcctatttgtaatgtcatcacttttctctctggtccagaagaatagagcaacatacttgtcttttgctcttctgcctactttaatcctcttacctatttaatcattaagactcgctttttccctttaaaaacagcctcttcattcctattgctaattacttggttcaagttcttattccttataatacaactatattataacattcatatgacctcctggcttccagctcctaatttattttttataccatgttcacattaattggggtgagtgataaatttctccattaaactgtttcagcaggataaatcgataaccctggagtatgggtttacatctgctcttgactcttttcctccatcaaccccttcttgtctgtccca

SEQ ID NO: 811810 - DNA, 616 bp, Homo sapiens
tggaatgctgctcagccataaaaaggaatgaattaatggcatttactgcaacctggatgggattggagagacataaaaatgatacaatgaactttgggcactcaggggaaaaggtgggaaatctcacaagttaccactaaaagaacttactcatgtcaccaaataccacctgttcctccaaaatctatagaaaaaaaaaaaactttaattacaaaatgggcagtaggctagggctatagtttgctaacccctattcaaaaaccatcactttggctgggcgcggtggctcatgcctgtaattccagcactttgggaggccaagacgggcagatctcttgaggtcaggagtttgagaccagcctggccaacatagtgaaaccttgtccctactaaaaatacaaataattagctgggtttggtggcacacacctgtaatcccagctcctcagggggctgaggcaggagaatcacttgaactgggaaggctgaggttgcagtgagccaagattgccccactgcactccagctttggtgacagagagaaactctgtctcaaaaagaaacaaacaaaaaaccatctcttggtaataatgycttgaatcaataaatgtcaaga

SEQ ID NO: 811811 - DNA, 612 bp, Homo sapiens
cactttgggaggttgggatgggaggatcacttgagcccaggagttcaagaccagcctcgaaacattgtgagactccatctctatacaaaacaaaaaattggctgggcatagtggcatacaacagtagtcccagcaacttgggaggctgaggtgggaggatcgcttgagcctgggaaattgaggctgcagtaagccatgctctccggcctgggcaacagagtgagaccgtcaaaaacaaaacataacaaaaacaaacaaaaaaccctcttcaggcagctctttttctaacaactgtcagaaagaatgttttcatagcaacatttctaaaattaaaaaatcattttggtaaaatacccaaaatgtactttgtactcaagaataccattcaacaaactaaatagttaccaggaatatattacacagtaattcattcacaaataaaagtgcactggcagccagatagtaccctaagaagattcaaacattttataaaatgatataaactgtatrtctaaaatgactatgtataaaaatactttagcttaaataatatttgatttctgaaaaatctctgcaatgactgaacctgcaatttcttcaaatggttttcac

SEQ ID NO: 811812 - DNA, 570 bp, Homo sapiens
caagtgctatagcaaaagataaatatattcaactattttaggatatatacaaccttaagttatctgtgaaagccagatgagttctggagacattggtaygcaagatcatgcccctgagactatttgttttccaaagctccttcatagcatccagtcctcaaacaacaaacattcttttgctattgaaactggttcagaacagaacagaaagaacaaggcttgctggttgaagcattggaggtaagccgaccatttgcttcacaaagcaaagcttcaccctacctcttcaaggcgctttcatctgaaaactggatttggaaccaagtagaaacaagctctctccagtgggattcatcacttcctgatttcagatgggcacaaacaatagactcttgtattttcctgctattcacgtttttagtcaggtctgaaactgaaggtgtgcttaaataatgatggcttatacacatttctttttctccaacctgggattcagagtcatactttcccagataaaggtgatactgtttttcaggtcagttcactcaaagatggtgcaaaataatatga

SEQ ID NO: 811813 - DNA, 570 bp, Homo sapiens
caagtgctatagcaaaagataaatatattcaactattttaggatatatacaaccttaagttatctgtgaaagccagatgagttctggagacattggtatgcaagakcatgcccctgagactatttgttttccaaagctccttcatagcatccagtcctcaaacaacaaacattcttttgctattgaaactggttcagaacagaacagaaagaacaaggcttgctggttgaagcattggaggtaagccgaccatttgcttcacaaagcaaagcttcaccctacctcttcaaggcgctttcatctgaaaactggatttggaaccaagtagaaacaagctctctccagtgggattcatcacttcctgatttcagatgggcacaaacaatagactcttgtattttcctgctattcacgtttttagtcaggtctgaaactgaaggtgtgcttaaataatgatggcttatacacatttctttttctccaacctgggattcagagtcatactttcccagataaaggtgatactgtttttcaggtcagttcactcaaagatggtgcaaaataatatga

SEQ ID NO: 811814 - DNA, 398 bp, Homo sapiens
gggcctatgaaaacctaggaccaaacctcttagttaarctgtgcatgttagaccaaaagccagataagaatcccacagcctttatggaaaagctgagagaggcactaataaaacacatctctttattccctgattcagtcaaggaacagctcatcctcaaggacaagtttattatataggcagctcccagtattagaaggaaattgcagaagcaggctataggaccagatagcaccttggaaaacctcctgagggaggccacctcggtcttttataaaagagaccaggaggacgcccaagataaagaaaggaaacacaagaggaagacagaggcttctagtagctgctctgcgggcttgcaaagtccaggatccccaaggtgcatccactagttgcta

SEQ ID NO: 811815 - DNA, 530 bp, Homo sapiens
atgactctattctaagtgtaactcaaatgttggcagacttcatcaatgtttaaaytaaacatgaggtcacgtggacaccaatgtcatcagcaaattcccttcttttctacccagcccaggaagaactccatctttctcctttggcatcatttcaccccaaaatatttcagttcatttctttggtgggcagaataatggccccctaaagatgttcctaatccccagaacgtgtgaatatgttatcttacatggacaaaatgactttgcagatgtgattaaggttaaggactttgagatgagggtatcatatcagattatctaggtgtgctcaacctaatcacatgagtccttaaaagaaacttttccagctgaggtcagagtcagagagggaggctgggcacagtggctcatgcttataatcccagaactttgggaagctgaggcaggaggattgcttcagcctaagagtttgatagcagcctgggcaacatagcaagactccatctctacaaaagaaaaatttaaaaatt

SEQ ID NO: 811816 - DNA, 477 bp, Homo sapiens
cactgcactccagcttgggcaasagagcaagaccccgtctgaaaaaaaaaaagagtcagagagggagctgtgattatgggagaattgtcagagagatgcaatgttgctggatttgaaaacagagaaaggggtatgaactgagaaaagtgatgtgagcagcctctagaagctgaaaagggcaaggaaatagactatcccccagggcaggggtcctcaaccctcaggccatggcctcttaggactggatggcacagcaggaagtgagtggagggcgagcaagtgaagcttcatctggatttacaattgaaccccttcactcacattccttccagagctccacctcctgtcagatcagcagtggcattagattctcacaggaatgtgagccctattttgaactgcgcatgcaagggatctgggttgcatgctccttatgagaatctaatgcctgataatctgtcactgtctcccatcagc

SEQ ID NO: 811817 - DNA, 597 bp, Homo sapiens
aacctctgtgttccaatggatactgtcccatgactggcctcagtgatgctttggtgactcacagccctacctccccccagggcgggtggggtggaagyttcccaaaccaatacacattatagccactttgggaggctgaagcggcagatcacaaggtcaagagattgagaccatcctggccaacatggtgaaaccgccccccctactaaaaatacaaaagttagccaggcgtggtggtgtgcacctgtagtcccagctgttgtgtgcagccctcccctaagacacacaacagcacagggaccacaggccaccactcaccccttttctttgcaggtagagaaacggagccacagatcaaggtcacccagtgagtgagaagcaaagtctggagctgaggcaagtttttcaaattcctcttccaaggctttctcttggaaagcccaaagcttattaaatccttaaagggcattatcaacgggacgtgcattgagtttccttaatcctgcaagaggattaggagaattcagccaagataagctccttcagggacaaaccagccgcctctcaccaacccgtgctcttagcgggctgggacaa

SEQ ID NO: 811818 - DNA, 607 bp, Homo sapiens
tttttttttttgtatttttagtagagacggggttttactatgttgaccaggctggtcttgaactcctgaccttgtgacccacccacctcagcctcccaaagtgctgggattacaggcatgagctaccgygcctggtcagcttaccctatttttgaacatatctacattgctggaaaacatcctctttggttctgctggcgatagtcaaccaaagtactgctccagtgagtctcatgaggtttcagagctatggagctccttgggggaggatctgggtaacccacttgttttacagatgagaaaattctggcagaaagaggccccaagactcacccaaggtcacagagatggtgggcagcagcgcctggaccagcttcctgtgaaatgctctttggagtgaaccacatggacaccttggctttattcagcaatatgctttaaatctgaatgcgtaaatatgttactgctcagcagatatgggctgcaagatgggaagcagacttgtagttacttttaactcagtcatacactgttgtagttcacccaactttctctatttcccctattatttgattagactctgtcgaatcatcctgccagtgcccat

SEQ ID NO: 811819 - DNA, 632 bp, Homo sapiens
acatgataaatgttgagcactatactaaattccatagattcataacacttggaagaagttagctcagcacttttagacttttcaayagcattcgagacagataatcatctactatctgcctagtcaccagcagtaaagatgaatcatatcagtcgtatcactatgccagttattcaactatgctcactattgaattaaaatgtgttacatctaccacacttcattctatcttctttttgtggattcaaatgctaataattaaaataataatactaacagaaataatacttcagcatgattattatcatccatgatatggcaaacctcaaatattcatgagagtttacatacctctcttatttcttcctgaatttacattgaatatctgtagttcattagtgacataacttggctctgagaccctccaccatcttagagtccttttttctgcataacatgactatactaagtgcattaatacagttgaggtactagggcaacaccatgaggtggctaagaatttggcttccagagtaagagttatgtttgatccagagcaaggtgtttaatctctgaatccatttcctcattggtaaaatgaaaacaatgatgataataatatcaatcatctg

SEQ ID NO: 811820 - DNA, 632 bp, Homo sapiens
acatgataaatgttgagcactatactaaattccatagattcataacacttggaagaagttagctcagcacttttagacttttcaacagcattcgagacagataatcatctactatctgccyagtcaccagcagtaaagatgaatcatatcagtcgtatcactatgccagttattcaactatgctcactattgaattaaaatgtgttacatctaccacacttcattctatcttctttttgtggattcaaatgctaataattaaaataataatactaacagaaataatacttcagcatgattattatcatccatgatatggcaaacctcaaatattcatgagagtttacatacctctcttatttcttcctgaatttacattgaatatctgtagttcattagtgacataacttggctctgagaccctccaccatcttagagtccttttttctgcataacatgactatactaagtgcattaatacagttgaggtactagggcaacaccatgaggtggctaagaatttggcttccagagtaagagttatgtttgatccagagcaaggtgtttaatctctgaatccatttcctcattggtaaaatgaaaacaatgatgataataatatcaatcatctg

SEQ ID NO: 811821 - DNA, 608 bp, Homo sapiens
tagctgttgaaaaccaggttcgagccctagctgtccagaaacaactttgatttatgtatatgaaattaagatactgctctaccatcaagcagcattataggaaaattatatatacttagggagactagakttagtaagcaagtattttggatgtctttgatgttatggtaacaggtggtaatttagggaatgcttgcttggcaggtgtcctgaatataggcaattttgcagcttaatgagtatatttccacctactgtttcaagaattgctcctgccagaggctatgagaaattgtataagatattgaaatttatcatgttctgtcattttagactgtgaattagtgggccactggaggtataagctttaagttcttcaaatctttctgaaaatataatattcctcttaaggaataatggtcatgatcaacataattccatgtattcatactattatatatttttcccacgtaccttccttatacatttatataactcaataactagattattagtatctttggaggatgatttgaggcatgtgacaatgttagaaccttgtaaaattcagtttcaaggaacactagtgatgaaataatatatagagt

SEQ ID NO: 811822 - DNA, 578 bp, Homo sapiens
accatcatacgtgcatataaataacaatgacatttgtatgtgtgtgtttgtggtggtattccaaatatgtgcttataaatcacactaaaatgtgattaaaaggtgaygacgtggagatacttcggtgtttggaatcatacacagctgagagccaagctgcagccctacacctagtctttaaaaattagacttatgtccttcttaggggaccccactcctcagttcctcactgagctatcaggattacatgaagttgataaaagatatcggagaggctgtacaaatgagaaaaataagttttgtacctccaaggagctgacagtctagtagaaaatatgtacagctaataattaatggccatatattataataggtgctaataaaaaggcaggcccatgtatacacaggccccaagaaaggaacggcctggcaatatcatcacaggcatgcacccagacaccttttgtggtatcaagtctggtggcagcagaaagcaaactggaagaaatagttctcatcatatgactttaaaatgtaaaactataaatgaagagcaatgagtttgttaaaaaaaaaaa

SEQ ID NO: 811823 - DNA, 520 bp, Homo sapiens
ttcagaaaaggaaaaagttactcagtgcccataaggtcaaacaaagccttgaagatgtgatggggcaagatattatgaagaaataagatatgagaaacaagtttcacagaatagtcaacaattctagatatcaggtttccatactgcttgcagggtaagtgacctatctgcaccatgctgcagatgacctcaggaaattaattctgcatctggaagttgtgcaaactcagaaagttgtagccccagggaaataactctcttttgacccttgtgactcagaagcattgatactgctcgagaagattgtcccacatcacagaacaatacagctcaggtcctggacaaactcaactcaagtggtgcccaatgctcctcccagaggagagctgggctgcccacttggaaccctgccatagctgaacaggggcatgatggggcttagcgcttcacctggaaggaatcagtcatcggccagccacgttaastcacttgagagtctcacagaagctctttggctctc

SEQ ID NO: 811824 - DNA, 600 bp, Homo sapiens
gaatctgtctcaaaaaaataaaataaaataaaataagattatgtattcattacaaccacytcatgttacagatgaaatatctgaggctcagaaaggaagtgagtgccctgctcaaggttataaagcaagttgatatctccagcaaagcctggcatttgtactctccttctcctgcttctttaatgcctcagcaccaactccagacacattgcagatccagcactgactgtatcagcaacacgtccttaacttctctgtatttgttttataatggatttaatgatggtaaaatggatttaatgatggtatttacctaatacggttttcatgagtacttaaaattaaaatatatttagtactttgaacacttcctgcacctagtaggtgcaatatcatgtctaaccatgacagtgcctgctgcctgcattttctcaagcctgctacatctccctgttgacatattccaataggaaaaagaaagggtcaaaatggaatactatttgaaagaaaagaggatcacagactggaaatttcatttattcttgccccactaactattgttctattttagtgtaagagcttatgagggaagatatagat

SEQ ID NO: 811825 - DNA, 600 bp, Homo sapiens
gaatctgtctcaaaaaaataaaataaaataaaataagattatgtattcattacaaccacctcatgttacagatgaaatatctgagrctcagaaaggaagtgagtgccctgctcaaggttataaagcaagttgatatctccagcaaagcctggcatttgtactctccttctcctgcttctttaatgcctcagcaccaactccagacacattgcagatccagcactgactgtatcagcaacacgtccttaacttctctgtatttgttttataatggatttaatgatggtaaaatggatttaatgatggtatttacctaatacggttttcatgagtacttaaaattaaaatatatttagtactttgaacacttcctgcacctagtaggtgcaatatcatgtctaaccatgacagtgcctgctgcctgcattttctcaagcctgctacatctccctgttgacatattccaataggaaaaagaaagggtcaaaatggaatactatttgaaagaaaagaggatcacagactggaaatttcatttattcttgccccactaactattgttctattttagtgtaagagcttatgagggaagatatagat

SEQ ID NO: 811826 - DNA, 586 bp, Homo sapiens
attcaaataagttttttaatacaacactctgaatattcattgtcagatatattctaaaggcaaaaaaaaaaaatcaaagaaatagtaaacttcatttagtgggcttactattagttgtaataatagtattgtgatcctgacactatttatacatatcataggataaagcaaacaatatgcattaatattaaagaattaagatttttactgttggagaaaacagatgcaaatataaaattttaaaggtaaaaagttgtgcaatgttaaattttaattttcctggacattaatttttcctctggaggtcttttagtatcagtattaactcatgattaaataatatatatatatatgtgtgggcaactgtttgtgtatatttctaaactctgtacactaatagagcctaagagcaacagtatctcagtaacaataaacatgcttaacatcagataccagatcttggtctctatataataaaagaaaacaagtcttcttggtgaaattattaatttcctkatgtggggcaggaaaggtacaaggtgagactaggacaatttgttatcctaagaaacaagaaagctcaaag

SEQ ID NO: 811827 - DNA, 575 bp, Homo sapiens
taatgttttaaaaaaacttcccaagagtctgtggcttcttttgaaagttacacgtgcggtacacctcactcagcagatttgctgctcgtaactgcccgcttagtaactgttaccamaagtctatcaggacttttgaattttcagttacacttcactgtaatgaatgcatgacagttatattttataataatataagcaaatttggagaatgcaaatttcaggatatatctcactgacataatggatctaatgtatgcaaatccaggaagaaaatccagtgttcccttccccatcttcttttgagcaaaagtctcaaaagaaaagatgttttaaagaactaagaaaagattggggaagaagatgggaaaaaattaaagcacaaataaaacacacaagtaatctttctgggggttgagctggagagagctaacagaccaggtttaggagtgtcgacctaaaggaaaaaactgaggcaaacttaatataagtgaagagtttatttggttgaagtttgaggactagaaccagagagcatatattcaacttgccccgaatatacactcccattagcagtg

SEQ ID NO: 811828 - DNA, 630 bp, Homo sapiens
tgttttaattgaaaattttatagaaatcatattagactgaattattataccataatgccatacatgcatacatatactagtgcttaatgtcatgttattcgatagagaataaaaatggtaaagtaacagtaaataatttttaagagagcctatgactaaaaattttcatattaaatgacattcaagctattttacttggtttatctcctgagtgaggaaaggaattcatgatgggagtgtaccttcagggtggaataggtagattcagataggtttctaactctttagatgtgaagggcagggctgggcgcggtggctcacgcctgtaatcccagaactttgggaggctgaggcaggcggatcacgaggtcagaagatcgagaccatcctagctaacacggtgaaaccccatctctactaaaaatacaaaaaaaaattagctgggcgttgtggcgggcgcctgtagtcccagctactcgggaggctgaggcaggagaatggcgtgaacccgggaggcagagtttgcagtgagccgagatcgcacttctgcactccagcctgggcaacagagygagactccgtctcagaaaaaaaaaaaatgtgaagggcagggccaaggcttattttaag

SEQ ID NO: 811829 - DNA, 659 bp, Homo sapiens
aaaaatctcagactccatgaaataaaaggtaagaatgagataagccaacaaagtgatatgagagagttgacacagttaagaaaataatgtgactggacrtggtggctcacacctgtaatcccagcactttgggaggccaaggtgggtggatcatctgaggtcaggagtttgagaccaacctggccaatgtggtaaaaccccatctctactaaaaatacaaaaattagccagacacagtggcgtgcatctgtagtcccacctacttgggaggctgaggcagaagaatcgcttgaacctgggaggcagaggttgcagagagcagatatcaggccactgcactctagcctgggtgacaaaaggagactctgtatcaaataataataataatgacatggaagaattgtaaataaacttagcaaccacagtggttacaactggcaatggaagataattcaatcagtgaaaagaaagctaagcataggactgtattctgtaatgcaaaagaaaaggacaaagattagctgggcatggtagcaagtgcctgtggtcccagctacttgggaggctgaggtagaaggattgtttgagcctgggaggcagaggttgcagtgagctgagttgtgccactgcacaccagcctgggtgacagagcaagaacc

SEQ ID NO: 811830 - DNA, 568 bp, Homo sapiens
ttaaacagcaaaatcaccaacaaaacacaccaaaatgcaaaaaaaatgtggcactatatagacagttgaaagggtacttgtttatagtataagagctgaaacaggaaggcagagtgtcaccattgtggagctcagctgggaatgtgtgtgttgaccagcgcaacttttttgctgctctgcgcatgcgcaggcatgaccaaaagtgctctgagtattgactttggggttacaaacaccttttagtgagtaggtgaatttgcaaatgtggaatccaggaataatgacgacagactgtttatcgtgaagccatccatttctgtctccactgccatcccttgtctgggggttggcaaactttttctgtaaaggtccacgtggtgcatatttgaggctttgcaggccatctggtctctgccgccgttactgaagttgtagagtgaaagctgcacagacaatacatacacgagtcacgtggtgggaggggcgtgkgggggggggggcgtgttccggcaaaatcttactcctaaaagcagacttgggtttgaatttggtgtccagtctgtagttt

SEQ ID NO: 811831 - DNA, 667 bp, Homo sapiens
ccaaacggggcaccagacagaattcagggagtccagaaattcctgtgggtaaactcacacaaatgcaggagcttgtcgactcagagatgcacagagccacagctgtatggtgatggatatgatttcwcacacacacacacacacacacacacacacacacacacacctacctttcttctctgtgtgacagatgtgttatgaggcaaggccgtctaaattgtccttccagtgtaaagtccattgaatttttctccctccctttcttttctacctcagggacatggagttaattaataacacgactcttgtcaattcacgacatcctgccatcactggtccttgagaggccatcttttattaactaatgaatcaatagaaataatataaaagatgctgaagaaacaaatacactcatgacacccagagcacgacggatacttatcattacctgcgttgttctcatctgccatgtccttgaccttcccattcccaggtaactgctgacctgaatcgtagcttcattttcttgcttttagttttataaagctttaccaaagctccattttcctaccagaaattatgacttcttggtttaagttgtttttaagcttatacaaagattttatgctatctgtcatcttttgggagttaacctttgcactcgtat

SEQ ID NO: 811832 - DNA, 598 bp, Homo sapiens
catttataaatttttttttctgtccatctccccatttgcatctttccccattctytcttcaagaaggcatatattttacagtgttaaatctgcagcacccatacacctggcacgtggtaagggctcaacaaatatttttaaaggagtaaatgaatggaggaatgaatgattttttctcttttcaccttcgtctgcctccacgggggaaatctctcttctgacctactatataacacctactatctgtgatacacaacagcagtcctcaacatttttggcaccagggaccagtttcgtggaagacagtttttgcatgggaggtgggggatggttttgggatgaaaccgttccacctcagatcatcaggcattagagtctcataaggagtgcgcaacctaggtccctcgcatgtgcagttcacaatagggtttgtgattctatgagaagctaatgctgtggctgattggacaggaggtggagctcaggtggtaatgttcctttgcagctactcacctcctgctgtgtgacctggttcctaataggccacagacccataccggtccacagcccagggggttggggacccctgatacacaat

SEQ ID NO: 811833 - DNA, 672 bp, Homo sapiens
agacagggtctggctctattgcctaggatgaagtgcagtggcatgatcacagctcattgcagccttgacctcactggctcaagtgatcctcctacctcagcctgctgagtagctgggattacaggcatgtgccaccaggcttgactaatttttttgtattttttttatagagacagggtttcctcatattgctgaggccggtctccaattcctgtgctcaagtgatccgcctgccttggcatcccaaagtgctgggattataggtgtgagccaccacgcctggccagataatttctttatgtccggtttttacacagatgtggcagagagacaattggagtagtatttttaggttttgtggctggcattggcgaaaagaggtctggtttctgtgacccttcttagggaagagggattctagttttttttaattgttgtcgttgtttgtttgttttgagactgagtctcgctgtgttgccaggctggagtgcagtgatatgatatcggctcactacaatctctgcctcctgggttcaagygattcccctgcctcagcctcctgagtagctgggactacaggcacgcaccaccacgcctggctaatttttcttattttagtagagacgaggattcaccatgttggccaggatggtctcgatctcctgaccttgt

SEQ ID NO: 811834 - DNA, 594 bp, Homo sapiens
ggataattgggtaattttcrttaggggagttaagataggcctcttttaggaagtaaattggagctaagaccagagtgatgagaaagggaaaacttaatgaagacctgggccaagaacattccaagtacaaaggagaaggaactcagtacggcctgagaacagacttgggaggtttaaggtcaaaggttgcccagtgtaataggaggtaagatccttgctgtacagtcttatcaactgaagtaaagtttaaattttatttgattgcagtgggaaatcactgggcagttttaagcaagcagttgatacctggttttatgcttaataaaaaaactgaaaagaagttaagggtagctgggcatggtggtgcatgcctgtaatccaagctactccagaggcaggagaattgcttgaatccaggaggcagaggttgcagtgagccaagattgcaccactgaattccattcagggcaacagagcgagactctgtctcaaaaaaaataaataaaataataaaaacaaaaacgggcagggcgggcgggggggtgcaattagagatggaagccaggaaaccagttaagatattgttgtggtcat

SEQ ID NO: 811835 - DNA, 594 bp, Homo sapiens
ggataattgggtaattttcgttaggggagttaagataggcctcttttaggaagtaaattggagctragaccagagtgatgagaaagggaaaacttaatgaagacctgggccaagaacattccaagtacaaaggagaaggaactcagtacggcctgagaacagacttgggaggtttaaggtcaaaggttgcccagtgtaataggaggtaagatccttgctgtacagtcttatcaactgaagtaaagtttaaattttatttgattgcagtgggaaatcactgggcagttttaagcaagcagttgatacctggttttatgcttaataaaaaaactgaaaagaagttaagggtagctgggcatggtggtgcatgcctgtaatccaagctactccagaggcaggagaattgcttgaatccaggaggcagaggttgcagtgagccaagattgcaccactgaattccattcagggcaacagagcgagactctgtctcaaaaaaaataaataaaataataaaaacaaaaacgggcagggcgggcgggggggtgcaattagagatggaagccaggaaaccagttaagatattgttgtggtcat

SEQ ID NO: 811836 - DNA, 595 bp, Homo sapiens
ggacaagatgtggaggtggaagacagtgatactgacaatgctgacctgygtgggccttggctagtgtatgtgtttctgtcttagtttttaacaaaaagtttaaaaagtaaataataaaattaagatttaaaaacagaaaacagcatatagaataaaaatataaagaaaggaaataattttgtacagttgcacaatgtgttttaagctaagtctcaataaagtaaaatagttacaggaagctagggttaatttttatcagagaaaaatatttttcaataaattttatgtagcctaagtgtatagtgattataaagtctacagtagtgtatcctaatgttctaggccttcacatttgcttagcactcactcactgtctcacccagggcaacttacagttctgtaagctccattcatgataagctccctataaaagtgtatcattttttatctgtcatacttccaccttccaccaacttttctaagtttagataaaccaatattcgccattgttttacaattgcctaccatatttagtacatgatgtacaggtttgtggcctagaagcaataggctataccatatagtttaggtgtgt

SEQ ID NO: 811837 - DNA, 610 bp, Homo sapiens
taaaatggaataacattaagtagagtatttatttttaccactgatataaggactccagtttcagctcagacatgtaaagacctgggaagtcgttatatctgccccacagcaacaagaratctgagcaaaatgaaaatcaatgacttttcttggacccatcagaaaactgaggttgtagcatttgttagtctgcattgctatgaaggaatacttgagactgagtaatttataaagttagttggtatattttggctcatacttctgcaggctgcatgggaagtgtggtgatctgcttctgatgagggcctcaggaagcttacaatcatgacagaaggtgaaggggagccattgtcatgtgtcaagagagggcacaagagagaaggggctaattttgtgtttttagtagaggcaaggtttcaccatgtttgtcaggctggtctcaaactcctgacctaagggatctgcccccctcagcctcccaaagtgctgggattacaggcgtgagccaccctgcctagcatggtggtgcatgcctgtaatctcagctacttgggagactgaggcaggagaatcacttgaaccagggagacagaagttgcagtgagctgag

SEQ ID NO: 811838 - DNA, 605 bp, Homo sapiens
tagcaatttttacagtagaataaatactaaatatcctttagggaaatggcccattattctttgataccttagaaataatacacaaaagaatcctcaaagatagataaaatctrtaactgttagtgctgtatttttaataaaatattcccactgatatctaaggtagattcttgacttaaaagagtgacaaagactttattctgattggctgtgttgagtagaatggtacggcaaggaagtagattcagaagagaggcagagaaagaacatggtttatggtacttgcaagactcaaagcttctgtgtgccacaatttccttatctccaaaagagagaacaaaaacaactgctggtctttgcactgggactgaccttagagtggaaaatgacctctttagtttcagataacaagtttccaatcttgttccaagataaaccagcttagttagcttttctattctatgagatgtctgtgaagtaaggacaattatgccttccttataatttatgaatgaaaaaggctgtatcagttaataatgctttcagctgtgtggagccgagagcgactccaactttccccttaacaaatatggctgtatttccct

SEQ ID NO: 811839 - DNA, 606 bp, Homo sapiens
atgtatttggatgggtgaaactgggggatgttacaattcaggtaagagatgagagctgagccaaggtaatgttagtggagtggaggggaagggtatgagagacaggaggtcactgtgcatttgttgtggaggatwagggtgtaaagctggtcaaaggtgctgacaagacttcaagttgagtggaaggtccaactttcatggtaggagaaacaagctttggaagaaagatatagagttaaatgacagaccagataagttgaaattgcctctggaaatgcaggtagatgagttccccagaaagaaagacatatggtgactgaaactggcaataaatgatgtttctttctggatggaattccagaatttgaagaaactaaggccgaggaaataaactgtggaacattgatattcaacaggcaggcagatgaaagtgaatcaggagaggaaagtaaaaagtagagaagagaaggggaaaggttaaaaaaaaaaaaaaagaaaagaaacagatgccacagaagtcaaactaggagagaacttctttgtttatctcatagcatggttaaatgttaatagcatgtagtgggtgagagaatagtctccagaaat

SEQ ID NO: 811840 - DNA, 656 bp, Homo sapiens
ctcatcttgtttcatggttttaaataccaatgattttctgactttctggctttcagtttatgtctcctgcctggacttctttcctgaattgcagacctagatagccagctctttatttatcatctccacttgggtgtctactaggttgtttaaatttaacgtgtccaaaaatgaactcttgattgccacccaactgttcctttggcagcgtcccctgtttcagtaaaaggcaactgcattattttgttcaggcataataccttgaagttattcctgattcttctctctcaaatcgcatatatccatcagtatatcttgtcagcttctacctttgaaatatgccaaggatccaatcaaccttccatttctcaccaactccactgccatcaccccagtctaagttgccactggtttgcctggattattgtgatagccttgtaacaggtcttcgggtttccatccatgcttctccttcaaaatattcagggtttggggagagtgggtggaggtacaggtgaattaagattggccatgtattggctgggcacagcggctcatgcctgtaatcytagcactttgggaggctgaggggcaggcagatcacttggggtcacgtgttcgagatcagcctggccaacatggcaaaaccctgtctc

SEQ ID NO: 811841 - DNA, 551 bp, Homo sapiens
gaactgccaggagacctccttacctaaggggaccccaccgtcctcagttacccaggggcgggagtcaggctggtggtgtgagggctcttgtgaccagcaccctttgaggactcatgtccaggctgtgccagagtcagaggtacccacccccaagagctcaccattcaggaacttcgcaagctccttgtcatccaaagttagaacacttaacatttttcgatttttttaagacagaggctcactctgttggccaggctggagtgcagtgctgcgatctcagctcactgcaacctccccctcccaggttcaagcaattctcctgcgttggcctcctgagtagcagggattttacaggttcctgccagcatgcctggctaatttttacattttttagtggagacggggtttcaccatgttagccaggctggtctcaaactcctgacctcagatgacccacccacctccgcctcccaaagtgctggrattacaggtgtgagccacggcacccacccagaaagcgtataattaaataaaatttaaaattttaaagc

SEQ ID NO: 811842 - DNA, 283 bp, Homo sapiens
agaggcaggaggatcacttgaamccaggagttcaagaccagcctgggcaacatagtgagaccaccagggggaaaaaaatgtaaagcaaaggcagtacttgaaactcacttcctaaatgttttctccatttcactctcacctctgctctcaaggttagtctcctctcctgcatctgtacaggggacacacagtttaacaaggtcccactgcacatctgttcccaactcagcactcactgacatcacattgggagctcacatcagccatcgtgagactgtttaca

SEQ ID NO: 811843 - DNA, 552 bp, Homo sapiens
gcgggccttaactctgtgtgtgaggggctctttgtccctgaggatttctgcagaggagtggcaggatctgacttggacattcacggggttgccctggccaccctcactgagggagaccaggtggacgtgggggcagtgagaggctgtcatcctgatctgtgggaccagcgtgttaggagtggagatgctgggaagcggtcagatcctagaaatgttgtgaaagtgttgatgttgaaaataccatttttgagacaggcagacatgggtgtgatctgttcaactggaaaaggagtcaactatcttttaggaaccatgttttgaatgtgagcaaaaagaatggtggtggcatatggtaatgacactaacatgtaatgagcgtttctctctaattaaaggggatttatttttattgcccttatctctgttttctagaatgcgcattattttcatgggaaaaagagtcttagaaaagacattgcttctttctctaagtaattttactgcatgmtctttattctatgaagtttactcatttgcattgggttttataga

SEQ ID NO: 811844 - DNA, 616 bp, Homo sapiens
aataggaacatgatatattatttgaatttgttgttaatatccaaatgttcttttttaaaaagacaagcattttagatataacttggatgraaatctcctgcattttatatggtaaattatttgtcaattgaagtataaatgataacctttatcatttaaaggttaaaatgctgcaataattagtgatgcttgtgaaaatttttaattttacatacacaacggttatcaggtacaagatatgtggggaaatagtgacagtaaaaacatttagcagagtatgttggcacataactttactataacttaatagagagaagtttatttttttgagccttcaactctttgtattgtttacataacaataaaaaacagaataacagagattagattatatgatctttctaatcaggctggaattatttggtgaactaacggttgcagacatacactaaggtgaccctcggtgagtcacatccttgtataatcccctctccttgagtgcagtggaaactgtcttgcctttgtccaaaagaattgacaaagtaagatgccactccttggtaaggttattttatgtgccaaaggctatgctatgtcattcccttgatggcactat

SEQ ID NO: 811845 - DNA, 619 bp, Homo sapiens
ttagtaaattcaaagtatattctggaaccctcatttctcaatraagatttttactaacccaaataaaaccacaaaataagttcctttacattgaaagtctctgtgacttggctttgccaagtatcctatcagaggaaagtaacctctatttaggggagcttcttatggtttggactcattgcttctgtgacgcagctaccaccctttctgagaagcaagtattggcttgttcctggggtcttgccaaaaccgaactcccggcccatggacgacttgtaacgctactgctgagcgtttccatttgagtgtatgtcaactcagactcaataactaccaggatgggaggttactgagttaccaaccagccttgcttgtccaatgccaatgatatttttaacaacatccctgacctcagaggtatcttggctttacaagaatagctgacagttatccctctgtgggaagctttatctccactctttttatgtacagaaaagctggctccaaggggtccttgattcacagatgttccctaaaagctttgactgggttcattgacagtttagctaagctgaagcttaatgttgtccattggactaccacagccatttaacctcag

SEQ ID NO: 811846 - DNA, 599 bp, Homo sapiens
taggtgtcaccaatcattagagaaatgcaaatcaaacctatcgtgaaatctctcataatttatctttgaattcrtgttttgtaaatgaagtccaatgggatattggagcatatacttgggtctaggagcctcagtttacatgtgatttgcctctctcagcttctctgcctccttgcgagggattctcagctgtcactaccccaccaccacgcaataactggtgcctctgttgccctgcccactgtggggtcctgggtgcagctatagggaaggtggaagtcaggcacatgccctgtgtggtgaatctcagtcaatctgagcacatggaagggtctgcacttgcctatgactatccctatgcccaagagaggttatattcaatggcaaataaattcaatggctttatgaagggttaaaagagatccctaggattagaaaaaaagaaatctttttcctgctttgtgaacaaagggcctcacaaattttgtgaccaaccctatataaaaagttcatttcagtagtttaaggaatcagtgcatagttaggatataaaaagggcaagactaagctgttctcttatgtaaaggaggatattgaag

SEQ ID NO: 811847 - DNA, 629 bp, Homo sapiens
aacttcaacagaaagatgaaactttgaaggagagctcaataaaaatattatacagagaaaatacaataacagagaagaaaaaatgccttcaaaaggctsataagtagacttgaaacagctaaagaatcagtaaacatgaagataggttcataaaaaaataagccaaaaaaactgcaagtagaaaagaaagtgttcttgtttttgttttaaaaggaacagagcatgcatgagctgtgggataatatgaaatcacttaatataagtgtagtggcaatttccacagatgaaagaaaaccaagagaaagaatgatggagaagagatagtccaagaattttcaacttgaaaaaatgcacaagtgattcatgacactcagagaacagcaatcaagacaaataacaaaataaaacaataaaaacagaaatacttagacgtctaatattgcaacttctgaacacaaaaaaataaaaacacattgcttaaaagtagctagataaaaatggcacacctatacaaaggaaaagagaactacagcatatttctctacagaaaatatgcaatctgaaagaaaaatggaattaggttgttaaattctgaaacaaattgtcaacccggaattcaattccttaaa

SEQ ID NO: 811848 - DNA, 516 bp, Homo sapiens
caagagtgagaagatttattaagatggaatgaaagcattaattacatcccaaatgaatataaataacactggaaaatatgatgcctagaaaataaagattaagaataacaccgtggaaataatatataaagrtgttaccatggagttgggctgtcgaaattcataaagaaaagtaaggagaggagcagaaggaagtgcagttgaaatgtgcatccaagtgtaataagtcagccatgtgaattaaataacacatggtgtgtctgagccttggtaggtggtgctttgtaaaagatctgtctttccccaggggtccctgagttctagtgcagggaacaaatgaaggagcaacttggcttgtaaaagcttgtggtgtatgttgtacacgtttttactaaagacctgagcaaactttagaccccaaaccattggatgatgtgactccactatttcacatacaccttatagcagcaacaataataaaacaccattttcagttatataagtgacattggctca

SEQ ID NO: 811849 - DNA, 590 bp, Homo sapiens
ttgaagaacaagtgaatggtatagtggtattcytattgatattcactcaaaagagtcgggctgtttgattgctgcattatgtttcatccagcaaactggaagtcttcctgcttcaacctttttctttaaaggaccaaattcccaacttgggtacgcttacaggaacacattccacatccttgtgaatatacagagaagtctgagcccctcttccctcccttgtcatttattccagttcttgctgggtgagtgtggtgtggtgggaagagagtaagtcttatggaccgtcacacttgctctacatcccttctctgctactagtgatgcctgcgtgatcttggaggctacagagtctctctgaatctctggttcctcctctgagaaaggagatgacaatatttaagtgagaaaagcatgtaaagttcccagcctgacactgacttggccctctgcccatccaggccctccctgggcagccaggcaggaagcagaacatgatgtggccatctcaggccaggctgcagttgggtctcagcctttccaccctttcccatccacctttggataacatttctgtgctccccagcgga

SEQ ID NO: 811850 - DNA, 635 bp, Homo sapiens
atcttctcacccaaatgtttttctttattttctaattcttcactcccatacttcccacacagttgggataaattctgaattgcagatttagcttcctgtgtatacagccaatcaatacttagcaccctctttagagaggtatggctttccttaagccaaccccagagaggatctcagtaccccggattgaatatttaatacttctgaaatgacatctggaaaaatacccaagcttttcctcagaaacaaaaacaaacagttgtaatctcctgaattcaacagagattgctgagagcctactctctgctagtatatgtgctagatgctagatagaatttatgcagttgatatttgttctgttcctgctgtctgtcgtgtgctgtggtcaaattcagagcctttaaggaatatactagttagtgggagaggcagtgaagtggataattaaggcctagtgtggtaagcagtatcattaagtggcacatccacagacttaggggagcttgggggaaatgcatctgactgcctggaggttggaatatggggagcattcagaaaagtctctctgaaggaactcacccygtacttcagctttctgaaggatatggttaggatgaaatccaataaccagacag

SEQ ID NO: 811851 - DNA, 583 bp, Homo sapiens
acatgaatacataattggcagttcccctacctgctcccttgctcttgcaacatgtggatarttataccctccctctctcccctccagcccactttccttttttaaacattgaggccctcaatttcatctttggagaaaggtgtagaccatagactgtttctgtgattccatgttattttcttctgatcatgcccttagactaggcaaaataaacttctaagttgattgaggcctgtgtcagacactttttggtttattactgtctctagagcaccaacagtgcgtgccgatactgtggaggacttgcatgtgccaggtgtcattaactcatctaatccacataacttcaggaaatggggcattataacttcattttacatgaggagattatggcacatagatttcctggaactcacctgaggtcacacagatacgaaacaccatacccaggattcctgggatcagagagcatgtgctgaacctctccatcacgctgcctctctgcttttagggcagctctcacgggggtatcgtgaggatcaggaaacacagtgtctgcgaaacactctacagctgagctcac

SEQ ID NO: 811852 - DNA, 583 bp, Homo sapiens
acatgaatacataattggcagttcccctacctgctcccttgctcttgcaacatgtggataattataccctccctctctcccctccagcccactttccttttttaaacattgaggccctcaatttcatctttggagaaaggtgtagaccatagactgtttctgtgattccatgttattttcttctgatcatgcccttagactaggcaaaataaacttctaagttgattgaggcctgtgtcagacactttttggtttattactgtctctagagcaccaacagtgcgtgccgatactgtggaggacttgcatgtgccaggtgtcattaactcatctaatccacataacttcaggaaatggggcattataacttcattttacatgaggagattatggcacatagatttcctggaactcacctgaggtcacacagatacgaaacaccatacccaggattcctgggatcagagagcatgtgcygaacctctccatcacgctgcctctctgcttttagggcagctctcacgggggtatcgtgaggatcaggaaacacagtgtctgcgaaacactctacagctgagctcac

SEQ ID NO: 811853 - DNA, 528 bp, Homo sapiens
ttaggaccaatatgttggtgttagaaatgatatcaattaagataaaggattaagtaaarcacatagaacaacaaaaataaaaaacagacatcttaatacaatgtttttgccacgtgattaaaaagtctgctaacaagaaacgaatccataagttcaatttttgtctgtgagctgatgttaagataaccttccatttgagcagttagaagtacagctgaatcctctggagaattgctgctctgtaaattagatggactgagagcaactctccatagtagatcccattgtctctttacatgtgaatccagaaaacatttgttgggcacctattttgggttggacaatgtgccaagtacttaattcacactatgttgtgcaattcttatacaaccctgctgaattcatactgttatcccattttatggattagaaaactgaggccagagaataatcactcaatttcactaagcagtgagtagtggagccagagttccaggtggacctgactccaacacccgggctccttca

SEQ ID NO: 811854 - DNA, 542 bp, Homo sapiens
atgacttatcatttttcctggaatagcagaagaaatttgtagaattctatgtcccatgaagtaatacattctttatttaaactatggcataaccaaaaaaaaaaatttagttatctgatatgttgaaaaatctgccatcttaagctggtgtcggctgtgtgatctcctgtgtacagatgaggtgttcagttgcaaggactgaggaggacaagccttgacaacctccatgtccactccagatccaccctgctccagcctaagtctcctgagtcttcattcaggaaggtatgagtgaggtcacagagggcacctatccatacacggcaggccacagcccccacaacaatggagaagacaatggggctgggtgaaaattatgtttggaaagggtttcttcttaatagaaaattcaaaattattatgtggcrctgtcaatgaccctttacacctgtgatagatggaatgacgcccactcaatctctttttgtcctctggccttccttatttcaggaccatgaggggaagcatcagaagtcttagca

SEQ ID NO: 811855 - DNA, 535 bp, Homo sapiens
aaatcttaggaccaatatgttggtgttagaaatgatatcaattaagataaaggattaagtaaarcacatagaacaacaaaaataaaaaacagacatcttaatacaatgtttttgccacgtgattaaaaagcctgctaacaagaaacgaatccataagttcaatttttgcgtgtgtgagctgatgttgataaccttccatttgagcagttagaagtacagctgaatcctctggagaattgctgctctgtaaattagatggactgagagcaactctccatagtagatcccattgtctctttacatgtgaatccagaaaacatttgttgggcacctattttgggttggacaatgtgccaagtacttaattcacactatgttgtgcaattcttatacaaccctgctgaattcatactgttatcccattttatggattagaaaactgaggccagagaataatcactcaatttcactaagcagtgagtggtggagccagagttccaggtggacctgactccaacacccgggctccttcaca

SEQ ID NO: 811856 - DNA, 635 bp, Homo sapiens
agtgaggggaagctattgccttacacactttctctcaggattggwtggcacaaagtagacaagcagtcaagggttctcacgtttggtaaaagaagaaaaaaatgccattgagtgtagagagctttagtatatcttactgtcaaacgaagttgtctttccttttgaaaatcacttcctcctcatccattgtggactttctcaatgtttttcagaattgccctctctgacattgatccttaacacaagtccactcaaaaaagatcccacattttgttttcagagtgcattgtaaactttatcctagaggcaaactactatagctaacagctacagttgtataatggggatggagaaagctatttctgctccagttacaagaatatttttaattaaatcatctttatttactttggttaattaattagttaatatataaatatatagtagtataattagttgtaaattagtatcataaattggatcataactcctcaattcatttttcatctctgtgctcattcaatctgagcttggagtttttctgcacctccaccaggaaaagttctcactgcaatagattttttctgtagactgtgagtttctctcttttggtttctgtgtcattcttatccttt

SEQ ID NO: 811857 - DNA, 539 bp, Homo sapiens
tgttggaatactgatctgcacatatgtgagataaaattgcctgagatagtagaaataaaaaccaggaaacctttaggccaaacaatctctggagctcacacaaaaatgagaatagtgctttatatagctcaaaaaaaacaacaactcataatacatggggtatagaaaacaaccttcaaagatttatatataaaggtttcgtatatatatatatatatatatatatatatatattttacattttatataacaaaaaagattatcttaattgataattcatcactaattgatgatgcaaattatctgataaatgtaacaacaatgcatggcaaaaaaagaaacaaaactctcagctaacttagagggaaacctcattgtcctgataaaaagcatatatgtctaacctacatgyaaaatcaatcaaaaatcatacttcatacaaccaaaatcatagttaataatgaaagactaatacctacccattataattgaaaaaaagacaaggatattctctcaaacaaattttatttaacattgtg

SEQ ID NO: 811858 - DNA, 577 bp, Homo sapiens
tgcaaagagtacaaaatgggagtatagtgaaagttaaattttcttctctcctgttttcttgttcctttccccacaggcagttgcctttaccagttttcttatgcatctttccagagatccaatatgcaaatagaatcacacattttttacataaataatacctaatatgccccctgttatttattttgtcttttccattaacaatatattatagttggttccatattagtacatagcgatttattggccttattggctgcattttgtatctgtactgtaattccagttctttcctggagtttgaagttatttttagtcatttgctacaaacaatgtcacaatgaatctccatgcccgtaagtctttgtatgtataaatatacaataaggctgggtgcagtggctcatacctgtactcccagcactttgggaggctgaggcaggtggatcacttgagtccaggaattctagactagcctggacaacatggcaaaactctgtccctacaaaaaatataaaaatmagccaggtgtggtagcatgtgcctgtagtcccagctacttaggaggctgaggtgg

SEQ ID NO: 811859 - DNA, 627 bp, Homo sapiens
gttcaagacttccaactgctacacatgttcaccaacacttgttattttctggcttttggataatgaccattctaacaagtgtgaggtgacatatcattgtgattttgatttgcatttctctgatgactagtgatgttgagcatcttttcatatactggttagccatttatatgtcttctttggggaaatgtctattcaaatcttttgccaattttttcattgggttatttgtggcttttggccattatgttatagaagttccttatatatttcagacattaatcccttatcagatgcacaatttgcaaatattttctgccattttgtaggtttccttttcacactattggttgtttactccactgtgcagaagtctttcagtttaattaatcctacttgtctattcttgttttagttgcctgtgcttttggtgtcatgtccaagaaatcactgccaagaccaatgtcatgaagattttcccatatgttttcttctaggagttttacagttttaagtcttatgtttaactttttaatccattttgagttgatttttgtgtatggmgcaagattaggatccaatctcttttacacatggatatccagtttttccaataccattcattga

SEQ ID NO: 811860 - DNA, 604 bp, Homo sapiens
caagtcagggtgttcaggggatccacctgaatggacttatcatttataagtgttagagactttttaagccctctcttctagctattttgaaatacacaatatattgttgttaaytgtagtcaccttactctgctatctaatgacggaacttatttcttctatctaactgtatgtttgtacccattaaacaacctcatttcatttcacccctcacacacacaaacccttcccattctctggtaactgtcattctattatctacctccatgagatcaattcttttagctcccacatatgagtgagaacatataatgtttgtccttctattcttggcttattttacctaacataatgacctccagttccacatatgttgctgcagatggagaatttcattctgtttcaatggccaagtagtattcctttggttatacgcaccacattttctttattcattcaaatctcggtgtacacttaggttgatttcatatctttgctattgtgaatagtgccataataaacacgggggtccaggtttcccttggatgtactgattttctttcctttcaataaatacccagtagtgggattgctggattttatg

SEQ ID NO: 811861 - DNA, 610 bp, Homo sapiens
acctgtttttttctgtattttctagcttgtatgcacagaggtgttcatagtagtctctgagggttttttaatatttctgtggagtcagtggtaytgtcccctttgtcatttctgattttgtttatttggatctttttttctttattagtctagctagcagtctctctcattctttcaaagaattaatgcagggattcgttaatcttttatggttttttgcatctcagtttctttcaggtcagctctgattttatttttgttatttcttgtcttctgctagctttggagttagtttgctcttgtttctctagtccctctatatgtgatgttagtttgttatctgagatcggatttttatgtggacctttagagcttgtaaatttccctcttaacactgctttagctgtgtcccatagaatctagtatgttgtatctttagtcccatagtttcaaagaatttcttgatttctgccttaatttcatggtttacgcaaatgccattcaggagcaggttgtttaatttccatgtaattatatggttttcagcaattttcttagtattgatttcaatttttattgtactgtggtccaagagtgtggttggcatgat

SEQ ID NO: 811862 - DNA, 610 bp, Homo sapiens
acctgtttttttctgtattttctagcttgtatgcacagaggtgttcatagtagtctctgagggttttttaatatttctgtggagtcagtggtactgtcccctttgtcatttctgattttgtttatttggatctttttttctttattagtctagctagcagtctctctcattctttcaaagaattaatgcagggattcgttaatcttttatggttttttgcatctcagtttctttcaggtcagctctgattttatttttgttatttcttgtcttctgctagctttggagttagtttgctcttgtttctctagtccctctatatgtgatgttagtttgttatctgagatcggatttttatgtggacctttagagcttgtaaatttccctcttaacactgctttagctgtgtcccatagaatctagtatgttgtatctttagtcccatagtttcaaagaatttcttgatttctgccttaatttcatggtttacscaaatgccattcaggagcaggttgtttaatttccatgtaattatatggttttcagcaattttcttagtattgatttcaatttttattgtactgtggtccaagagtgtggttggcatgat

SEQ ID NO: 811863 - DNA, 614 bp, Homo sapiens
agtggttattgccattattctaaggatgtttttcctatctctcctgtgtctccttccctcactcctcccagccacrttccctgcctgtgtgatattcttccaccttgggttctcagaaaactttgaacagacttctctcattgcagtttattcacttaaaaaaaatccatccactgaagcatttatcctttaagtaacaaataatccaattacattctttaagttatttaaaaatatacaattaagttattattcactatagtcagtattcacttattttcttatactccacttcatcattaagaagatttgaggacaacaacaacaaaagtaaacaaaattaggttgaagttagttgaatcaaggtgggagatcaatagaattgataagataggttcctatttatttactagagttttgttgcaaattagctttcagcttttaagctgctaattcaacaggagagagaaaccaattatactattaagagtatttaagatgcaccgaagccagttgtttagaaggacatagtattcctaagtcttattgacattcctttccaaattttgaataaagagatttctgtgacgtagtatacagcatcctaaatgata

SEQ ID NO: 811864 - DNA, 614 bp, Homo sapiens
agtggttattgccattattctaaggatgtttttcctatctctcctgtgtctccttccctcactcctcccagccacattccctgcctgtgtgatattcttccaccttgggttctcagaaaactttgaacagacttctctcattgcagtttattcacttaaaaaaaatccatccactgaagcatttatcctttaagtaacaaataatccaattacattctttaagttatttaaaaatatacaattaagttattattcactatagtcagtattcacttattttcttatactccacttcatcattaagaagatttgaggacaacaacaacaaaagtaaacaaaattaggttgaagttagttgaatcaaggtgggagatcaatagaattgataagataggttcctatttatttactagagttttgttgcaaattagctttcagcttttaagctgctaattcaacaggagagagaaaccaattatactattmagagtatttaagatgcaccgaagccagttgtttagaaggacatagtattcctaagtcttattgacattcctttccaaattttgaataaagagatttctgtgacgtagtatacagcatcctaaatgata

SEQ ID NO: 811865 - DNA, 626 bp, Homo sapiens
ggtacataggaggcaaacagttgcatttttttgagtctgatcagcttttctcatgagagaaggggtagaggaacwgtcacttatgcattcacctagctcagtggatctgcacttttacagaaggtaaaataaacatagggcagaggaagcaatcagatatgcatttgtctcgggggagcagagggatggctttgagttctgttctttgtcctgtacctattaagagaagctatcaatatactttgtcaggataaaattcaacagaactgttttagactaaagattttagggaccacaaggaatttcccagtgggcaaattgtgagggaggtatttagcttttaaaaaaatctttgtagctatctcatttagaaataaaatgggaggcagattgcctgatgcagctcctaacttgacttttcccttttacttcataattttggggtcctgaggtttattttcctttcacagaatataaacatgtacgtacatttattattaaaaactctgaaggaaataacaggttttgtgaaagagaacacagaagggaatccgatttagatcaatgttcagacagccctggttgaggaagtaacaacagaagagggaaggaggatccaggcctca

SEQ ID NO: 811866 - DNA, 578 bp, Homo sapiens
atgttggctattattacaagtgcacataccaagaactcaataaatgctaactgtaattactgtcttccttctgttgaaaagaactgttagcaaagtactttatgcacacagaatattacctaccgcttgatgaatgaatgagatgaggataaattatcagtctcaggagacaatgaagagaatgaactgactatggtagaagcacggttataggttgtagaaggaactgagtttagattgtaaaaagggacttatttgtggacggttttgacagtcagaaagatgacttcatgtgtgatggaggagagaaaagaccatttattattttctgatgaagaatagctaatggaatccccaaaggtctccaaacatttaatggtttactctcctaattctccaaaaaagagcatagaagggaaactaaaatgtagagaggctgctctatcccaccaggacctttgctgtcttcagtgcatgatgaacaatgtttgctgatgctgcctccaaataccacccccgattctcaggcctttaggctcagactgaattayaccactggctttcctggtttgtgtaat

SEQ ID NO: 811867 - DNA, 617 bp, Homo sapiens
ccaaagatgggcagggtattgtggtgttgtataccatatgttgatgttatacttgacaatttatagcatacagggtgggggagttggtaaatgaacaaagatacctacaagatttctacattttacatgaagtggtacaatataactttaagtagactgaaaaaataaggatgtaaagcagacaaaaaatgagaggtatagcaaaatgctaacaaaaatttatatacatatatatgtgtgtatatatatacacacatatatagtttgttttttgaggtggggatctcactctgtagcccaggttgaagtgcagtggtgcaatcctaaatcactgcaaccttgaactcctagtgtcaagagatcctcctgcctctgcctaccaagtatctgggatcacaggcacatgccaccatgcccagctacatttttaaaattaaaatataattcttaaaattcaatagaattagtaagagacagactggtacatgcataaaaatgactgaaaactaggagatgtgtgagaaattacttaagaactaagtgggaaaagaaaaagaaatgaatataataaacaaaatgtcaaggaagacrgatccaagaaatactacatagatgta

SEQ ID NO: 811868 - DNA, 645 bp, Homo sapiens
caaagataacaggactccccaggtmtatcatccactacctttccaggacaatgtcctcaagtaagtgagaccatggatggagcatgaattttggagccagcttgcctggattccaatcccacaatctagcaactgccaactatgtaactttaacaaattactcaatctctatgcttctgtgtcctcatctaaagaaaataaaaataagcataataacagcatctatctcatgggattgttaaaaagattagcctaatacatgtaaatcccttatgtatcagctctttttactaccattcaagttgattaagatgttactcaaaataaagtactctggaacagccttccccaacctttttggcaccagggaccagtttcattaaaagtagtttttccatggactaaggcaggtgggtggtttcatgatgaaactaatccacctcagatcatcataaggagcacacaacctagattctttgcatgtacagttcacaatagaatttgtactcttgtgagaatctaatgcaaccactgatctgacaggaggcagagcttaggtggtaatccccatttgcccattcaccgctcacctcctagtgtatggcccactgcctaataggccatggactgaagccgggggttggg

SEQ ID NO: 811869 - DNA, 636 bp, Homo sapiens
caatatgatcaaatacagggattataggagggttcaggtttgaaggtggagatggagaaagtaagaagtgatggacaaatagagtctcaacctgtaagagttgaatttatgagacttgcgtatggtctaattcaggagaaatgtctttattgaaggtacaaattaaaggattatttgcattttagtgattaatgaagtcttggaagtggtgaactaacccaagtaaagaattcacttttctatgttattggcaactttgataaaatggaaaaagtctctgaaaacttcttagataaatcttctaaatgtgtcatattaaatatatagggtctgaaagaaaaccatttattaaaatataattaccaaaatatttataaacatatttgagttatgatcatacatctgcatctttactaacaacctgaataacaagctctgtggaaaatcaaactactataactttaaactagtgatgggtgtaaaaggtatactgagtatctataataacgatcacatgatatcaacatactcaatttctatcagtgacagatatacgtactgtaatactattgtggcttcttgtctatattcaaaatttaagttataarttaataaaaatataacatatatatatat

SEQ ID NO: 811870 - DNA, 619 bp, Homo sapiens
aattgctcaataatttaaatccttaccaactttggctttaatcatgagaggatagctacttcctaaatttaacaaagtgccatacgggagcttttccaytggttttaaatcaatgaatcagtgggacataagctggaaggctaggagagattcagaaaagacatgatattattgcactccccttgaaaagaataatgatcataaaatatgggatttgataggccttcagatctctttgggtccaattctcctcttttacaggagaggaaactaacaaaatagatcaccatcactaatttctgggcaggccatttacaggcctttccactggacttcctggctttgtcacaaaacagacgtgcttcaattcccagctaggttaattactggctccatgattttgggaaaataatttttttctacaccttagttttctcacctatgaaatgaggatgccatagcacctaccccacagagtggttgagagaatcaaataatgtgtcatgtgtgaagcacatagcacagtgcctggcagcattctgcatgtgcgcttacatgtatacgtgcatgaacacacacacatgtgcacaggggtaatggtttccataactgtgtgccc

SEQ ID NO: 811871 - DNA, 610 bp, Homo sapiens
caaaaagataagtaaactatggtacatctctaaaatgaaatattatttggtgataaagggaaatgagctattaaacgtgatccccagtgttggaggtggggcatagtggaaagtgttagggtcatggggtgtatctctcatgaatggcttggtgccatccccttcatgatgagtgagttctcactccattagttcacatgtgagcttgttgtttaacctcctcccctctctcttgctcctttcctctccatgtgacatgctttctcctcctgcaccatgattgtaagtttcctgaggccctcgccagaagtagatgccagcactatgcttcttgtacagtctgcaaaccatgagccaaaataaacctcgttcctatataaattaccctgtctcaggtattcatttatagcaatacaaaacaaactaatgaatacaaacatgtagaggatgacatagaaaatctaggtaactttgtgtttcctgatgagattttagatacactgccaaaagtgaaatccatacaagaaaagaaaaatgataatytggacattaaatttaaaacttatgtgcaaaagatactgttaagagaataaaaagatatgctacagcc

SEQ ID NO: 811872 - DNA, 541 bp, Homo sapiens
ccgggcacggtggcacatgcctgtgatcccagcacttttggcggccaaggcgggcgaatcacctgaggtcaggagtttgagacaagcctggccaacatgaggaaacyctgtttctactaaaaatacaaaaattagccgggtgtggtggtgcatgcctgtaatcccagctacttgggaggctgaggcaggagaatctcttgaacccgggaggcggaggttgcagtgagcaactgcactccaacctgggcaacacagtgaagctccatctcaaaaaaaaaaaaaaaaaaaaagctttgtcctattctcacaataaagtttctgaatatgacctgaaggcagaaggcaggtctgtcttgattactaactacctgtaactgagctctaatgacactctcctcattctaactgtttagtttcttggttttgtggatttctatttttgttatagaattgtatttatttttctatagttcttaaaaatatttttgctgggtatgcagttctaaacaggtattttctctgggcagtttgaagcttttat

SEQ ID NO: 811873 - DNA, 584 bp, Homo sapiens
tctttgcatcgtaatcatggcactattttattcaaactgaatcccctcatccaacatatatacacacagcatatagaataaaataaaatctacaataagatatttaatcctaccttttaagataacatagttcaataacagcatccttgtccccacttacaaactacacacatacacacaaatatcaggccctcatgtttccaaatgtcttgcaccacaaaggaatctgtcattatatgagtgggaaacaaggaagttttcaaacggaatgtgacttgtaccaaatatcctagccattgaagaatagaaactggaaagcctcttcggtcttctgaaagtgtagttttaagctcatttctcaatattatttaccactgtatctgtactacttagtaagattcctctaacatttgaatcaagttcttcaatctatttttatattatatttgacattgtrtaatccaacaaatcatcaaactcacatttattacctgatataaataattttaaaacacttcaaaatgaaatagtttatttataacaattaagaaataagtcatactctaagaacatattttaagaag

SEQ ID NO: 811874 - DNA, 668 bp, Homo sapiens
agccggaaaatctgaggggagaactgactccgtagaagcactttcccaatgcgctgtgtcaagctcattctctcatccaaaaacaggctctccaccctgccttccacaccccactacacagcacaggacagggtgtttgtacatgatacagtagctatgtggtttgttgcttgtagttatctattagtgtattttataaccctagcatttctgcaaaccctaacacctgctgcattaggacaacacataagagatagcaataataaagctcatttcattgtcatcattattgttgatgcatgaaagccctataaaaatacttctcactcttaggcaaacctgataataaaagaaaacacagttcactgcagggagaggaggggaacccaaagtggcatttccattcacttctcaaagcacggggggcgatagggctcagacgcatctcagaacttgcggtggtggtccaagtgcagggccccatgtcgggtgattcaacccagcactgtgtgggaatgggggaacctcaggctgacaggcacctcctgagcagactggcaagagacacacaaagctcaggggtgggggagtggggtcccccaccagtgctctccctctggggctcttctttggccattaatggatccsagcttctctccctgtgtagt

SEQ ID NO: 811875 - DNA, 625 bp, Homo sapiens
acatactgattaatagtggtgttttataattatgagtttgaagagtttgggcttatttgtatcagcttgtcactatttgtttattaacaacaagagcattgattattttcatttggttttgatgagaccctccaagaaagatgtgcctttgagactggttatgtagaaaaaaaaatgtgcttatgtaatcaagacggtaaaacactgggataaaactctgtattgcactttctgtttctgaggtgtgctgtgcacatgttagttgaccttaagaaaaaaaggatgtattcagtgtggcctttacaagagaagacaactggaactcatgcttatcatttctcacctcttgccatgaggcagtctttgtcattgatacatatccttactttgttattattttgttattactattctacaataaaacataaatttgtaagcattgtgactttggattttgtgagtcttcttttgccatcaaactctgtctaattgttgctgctagtgaaagcaagataaaaattaaaaaaaaaacaggaataataagtattgataatacttggaayaacaggaattttcatacagagctatttggagtatggattgatatggctaattttaaaagtga

SEQ ID NO: 811876 - DNA, 613 bp, Homo sapiens
ttagaactataaaagttacttcattgaaaaaggcgaataaaatgaacagaagtctggcaagattaagtaaaaacattggaggccatatagtaaatataagttatcatattaataatgtaaataaactaacaggtttttattgaattaggcttcgtctgtatgcgtatctgctgcctcccgatacattatctattcttaacctgcagaattgaatgcaactttttaaacaaagacattctgatgcactagttttttgttgtggttgttgttccactttgaggcaaggttgtagtattttccaattgagatgaaaaatgttaacattatttttatctctctcatggattcatgattcttccctttttttggtctttacaaaaatttcttaagataaaaaagctgaaactataaaagaaaagctaccatagttttaagatctgtttctcaacagacattatgtagagattgaaaagaagacaagccctaggaaatgatatttgtaataaataaaaccagcaaagaattagtgcagaaattgtacttaataaaaacttttakgaaccaataaaaaaagacaatccaatataaaaatgggcaaaatatgtgaacaaac

SEQ ID NO: 811877 - DNA, 649 bp, Homo sapiens
atatatatatatataatagtgggaaagactaatrtaagtgtagttgggggacctaagaaaagaagagcaagggagttagggtagaagcagccttagagaaagtggacaaattctttaagaaacacaactcaataaaattgaaacaaaaataaatagtcctagatctatgaaagaactgaaacctgttattaaaaacctcaccacaaagtaaaactccaggcttaaatggcttcactgacaaagtgtttcaaacacttgaagagtaaataacattaatcttacacgaatacttccaaaaaaaaaaaaagagagagaaaacatggaacacttctcatcttgttttatgaagccaccaaaaccaaaacttgtaaaggacattccaagaaataaaaatcacattaataatgtgtgtgtgtgtgtgtgtgtaaatctaacttagtgatatttaacaatgctaatatatcacaaccacatgaagcttatggaaaattaattcatttaacttataatttactatattaacaggaaaaaaggacagaaaatcatatgatcacctcactagatgcagaaaagatatttaataaaattctactttcagttgtgatttgaaaaaaaaaaagaaagcctcttagcaaacttagaagacaag

SEQ ID NO: 811878 - DNA, 515 bp, Homo sapiens
gttgcttcggctggagtgcaatggtgagatcctggttcactgtagccctgacctcccaggctcaggtgatcctcccaactcagcatcccaagtaactgggaccacaggtgtgcaccaccatgcccagccagttttttttgttgtagagttgcagtctcactatgttgcccaggttggtcttggactgggctcaagcaatcctcccacctcaacctcccaaagtgctgggattacaggtgtgagccgctgtgctcagcccattttaacaatttttaagcatataatgtagtggcactaagtatattcacaaagttttgcaacaatcaccaccatctatttccagaacttcttcattatcccaaacagaaactctgtactcattataccataactccctattttcccttctccctagcctctggttactttyaatctactttctttataaatttaccaattctaggtacctcctatcaagggaattgtagaatatttgttcttttgtgtctggctta

SEQ ID NO: 811879 - DNA, 565 bp, Homo sapiens
aaaacgttaagatgtattagtctaggatgacaggatatagcacttaaaactatccacaactaagtatttttggagaggcggggggaggaaattaccagatagatacaattattataaaattatcacaaaaaaattatctcatctggggacaggatgttgctttctacggctgcatgccatcacttgatggaaaatgagaatgtccctggaccagcatgactttttccatggaataaaacaggcaagtaatctgtagtcaggccttaaaacataaatttaagaaatgtaggccaggcgcggtggctcattcctgtaatcctagcattttgggaggccaaggttggcagatcgcttgagcctaggagtttgagaccagcctgggcaacatagtgagatcctgtctctacaaaaaaattaaaaggttagctgggtgtagtggcacatgcctgtagtcccagttactcaggaggctgaggtgtgaggatcgcctsagctgggaggttgagtttgcagtgagccatgagccatgattgttaacactgcactccagcctgggtgacagagt

SEQ ID NO: 811880 - DNA, 532 bp, Homo sapiens
acaagcgactccttctgggacaaagagtcttcaaccaacccagacagaaaaccaggtttctcgactgggacctgctggcttccccatgccctgcaaagcacctctgtctctccaggccagctgggttcacgcgtcttccgcgtgaattcactgtcaagatggctccttcctgggactgccccacttctaatcctggactagacgttccttgagggcatgggatgttttgcttttattccctcttttacccccagtttcttgggggtaaaacccaaactcattaaagcctaaaacccagtgtctccaccatatagtgcacctgccactgccatttcccaacacacacacacacacacacacacacacacacacagacacacagacacatatatagatacacacacacgtacagacacacacacatagagacacatagacacatcatacagacacatgcacatacagacacatacacatatagatacacacacacasacatataggtacacacatacagacacacacccaggaa

SEQ ID NO: 811881 - DNA, 617 bp, Homo sapiens
ccacaggcaatgtatgagagaggtggtttctccccatcctctccagcattttgtgctgtcactgttttttgttatctatactaagaagtgtgtagtgatatctcattgtggtcttaatttgcatttccctaatggacagttctgttgaatattttttcatgtgcttatttgctacctatatatcctttgcagtggaatgtctgttcatgtcttttgcccattttctaattgaattatttgttattttgagttctttgtatattctagataataatcctttgtagaatatgtgatttctgaatattttctcccagtctatatattgtctattcatcctcttaatagtcttttgcagagcaaaaggttttaattttgttagagtcgaattatcaatttttttcttttatagtgtcatgttatacctaaggattctttgcccagccccataatctgaagattttctcatgctttttttctaagttttatagttttatatttaagtccatyacccattttgagttaatttttatgtaagagatgagatttaagttgaggttcattttatgtctatgaatgttcaattactccaatgccattgtcaaaatgctacccttcct

SEQ ID NO: 811882 - DNA, 514 bp, Homo sapiens
aaagcaggactagtttctaaatttaatccgaaaataccaacatgcagatcyttaaaaataagacaggggaacaatattaagattaatcaggtaatatcaacacatgttaagctttgactacagacaggaaaagtctatgtcatggtgtagattctgatttggccactaggtgaaaggaataaaatcaccaagtacacagatggaataaaatcaaacatcatctttcaatactgttccttgttttcagaaatagttgcgctggaattgcagattcaatggtttaaaaaggagacatgtattatgtacatagatgatatggtagttggaaaagtgagcatcaattagaaaaatgttgcagaggttgataaactacagaaggcaaagaatagcccatagaacaattaattacaagcaaggggtgaggaaaagagcaaaggttaagaacagatcacactaggtaggccaagagcaaaatctaggaagaagattaagaaacaggagcagcataacatcg

SEQ ID NO: 811883 - DNA, 514 bp, Homo sapiens
aaagcaggactagtttctaaatttaatccgaaaataccaacatgcagatccttaawaataagacaggggaacaatattaagattaatcaggtaatatcaacacatgttaagctttgactacagacaggaaaagtctatgtcatggtgtagattctgatttggccactaggtgaaaggaataaaatcaccaagtacacagatggaataaaatcaaacatcatctttcaatactgttccttgttttcagaaatagttgcgctggaattgcagattcaatggtttaaaaaggagacatgtattatgtacatagatgatatggtagttggaaaagtgagcatcaattagaaaaatgttgcagaggttgataaactacagaaggcaaagaatagcccatagaacaattaattacaagcaaggggtgaggaaaagagcaaaggttaagaacagatcacactaggtaggccaagagcaaaatctaggaagaagattaagaaacaggagcagcataacatcg

SEQ ID NO: 811884 - DNA, 647 bp, Homo sapiens
gcccattcctgaaactcatctctatattagtaagatggagtgcaactaacrtgtagatttagtgcttactgttcactgtgctggtgacccacactaaatactttacatgcataatctcacttcattctcgcagcaatctgatgaaaaaccactgtttttctatttctctttttatttgacaagtgagaaaactgaattacataaagatgtcacaggtggcccaaaaatcgcacctagcaagttgcaaagcaggatttgagtccagagcttaagtgcttaatctctgtgctgctgctcttctgcttgtgagcaacagaaaagaaaactgcagctggtgactctattcacctattgctgcataacaagccactccaaactgagtggcttataccaatagcaatgattgtttgctcacaagtctgtgatttggcagggctcagcagggtcagcttatgcctgctccacatggcatcaactgggacagctggattgaggcaggaagatctacttccaaactgcctcactcatattgctggttagtcagtgctggctgttcattcttctccacttgggtgcccctgtgggcagctcggacatctcctcaacataggggctgggttctaagagaaaagcaccatgagaaagaa

SEQ ID NO: 811885 - DNA, 539 bp, Homo sapiens
cgttctgaaagggcaacatgcacgccccgcctagtggcctgacccagggaagggaccccgtggctgtggggcccatctgggctcaagtctctttgacgcggccgcccagggtgagcttgtcgaacaggtactcagccaggccggcttccggggaacaaatcttgcgcaggttgctcacgtagccacccagctctttgatggtcttgacttgctcgtgcaggtagtggctctccaggaagtggcacagctgggggtcgcccttctccacggccagctggtacagatccagcaggctctggttgacgttcttctccaggtggaaggcggactccatggccacgagcccgctctcccagccttggcactctggcttcctgatatcgtgaaggcagatgtggccaccgcgcaggttytgcagcctcatcagcttctgggcatgctccattttgtcgtccgacaggcgcaggaagtagcggaagaagttctccagggccacgtcgtcccggttgaagtagaaggccatagacaggtacaggtag

SEQ ID NO: 811886 - DNA, 571 bp, Homo sapiens
ttaaacttaagagcttcttcatagcaaaagaaactgtcaacagagtaaatagacaaactagagaatgggagaaaatatttgcaacttatgcatgtaacaaaggtcttacatccagcatccagcaccgataaggaacttaaacacatatacaagaaaaaaatatcattaaaatttgggcaaaggacatgaacagacacttttcaaaagaagacatacatgtggccaacaagcatataaaacaaagcccaatatcactgatcattagagaaatgcgaatcaaaaccacaatgaaatatcatctcacaccaggcagaatgggtatttcattaaaaagaaaaaaatagcaggtactggcaagattgcagacaaaagggaatacttatacactgttggtgggggtgtaaattagttcaaccattgtgaacagcagtgtggcaattcctcaaagagctgaaagcagaaataccatttgacccagcaatctcattactggatatatacccaaagaaatatacatcattctaccawaaagacacatgcatgcaaatgttcattgcagcactattcacaa

SEQ ID NO: 811887 - DNA, 559 bp, Homo sapiens
taaaataaaagtggtgaggttagatttggctcaatcccacgcttttgagtgcaaaatgtctgccaagtcaaattaggctataaattgaagaggcatgttgtgggtattattcatgggcaaatgtttcccaatattcttaccacattttgtatagaaataagtgattatcgaatgaactatctcaaatgtgaaatatatatatatataattactctcaacataagaaatgtttattgactgagtagtttgaagacatgctattattgtttttccacatgaagataattttctgtttccccaaattaatcacatggcatgatttaacacaataattatttactactaaagtattcccaaaggtagtcgggttagaggtaagagttgataaaaggcaccccagtattcccataccagccatgcaaagcattttgatgccttccttattatcaaatccacttaccacactyccttcaaccaaaacatctggttttgcgactctggttccaagcttgagagaagatgccaatgagttgtcatgccccaccccacattatcaaag

SEQ ID NO: 811888 - DNA, 587 bp, Homo sapiens
agtacaagaaaggaaacacaaatacaacactggacattatgtcgctcgaggaggaatactattgacaccatcataataaagtaggatgaacactgaactaataaatatgtcatttatattacagttggttgagatgggtatgtgtctatattgtggagagtaacggtgggcagtgtaagaaagctaaatccttatcttccatagttggaagtcaattttcctaagacttaaaaaataaaaattaaaaagcaatgttagtatgttacaggtctagcatccctaatcccaaaatccaaaatccaaaatgctccaaagtctgaaacttgttgagtgccaacatgaaatagtgacacctttgctttctgggggttcgatgtacacaaactttgtttcatgcacagagttatttaaaaattaccttcaggctatgtgtacaaagtgtatatgaaacataaatgaattttgrtttagacttgggtaccaaccccaagataactcattatgtatatgcaaatattccaaaaaaaaaaaaaaaactctaaaattcgaaacatgtctggtccaggtatgtgagataaaggatccgc

SEQ ID NO: 811889 - DNA, 611 bp, Homo sapiens
atgtagtcttttctttcttcttcttttttttttttctttcttttgagacagagtcttgctcagtcacccaggctggagtgcagtggcatgatcttggcttatggcaacctctgtctcctgggttcaagagattctcctgcctcagcctcccaagtagctgggattacaggcacatgccaccatgcctggctaatttttgtattttttagtagagacggggtttcaccatgttggccaggctggtcttgaactcctgacctcatgatccacccacctgtaatcccacccaaagtgctggaattacaggtgtgagccaccagtccggccaggaatggagtcttaatcttgcaagctgcccccttgcctgctgtatttccatatttcagtaccctggatagtatttttacctttagtcttggccctctgcagtctgttttccaaatagcaatcagaggaattgtaaaatgtgaagctgaagctatcactcccytgtttaaaatcttccctcccccatttctgtggagtcaagtctaacgtctgaagtgtgcctggcaaagctccacacagttggccacagtctgcttcctgccccctttgctggtctctgtgct

SEQ ID NO: 811890 - DNA, 578 bp, Homo sapiens
atatttttagtagggatggggtttcgccatattgtccaggctggtctcraactccggagctcaggtgatccgcccaccttggcctcccaaagtgctaggattataggcatgagccactgtgccaggccaattttttaattttttgtagatacgggatctccctatgttgcccaagctggtctccaattcctgggctcaagcaatcctcctgcctcagcctcccaaagtgctgggattacagatgtgaggcaccatacccagccaaaaggaacaaatttttcaaagttctgagataactgctttataaaaagtgcatttctgtgcccatcagtggagcacaccattgtccaccttcccatacctacaccaagacagccttctagatttttttaaatgctctatcctacagctctttcaaacttgtagtgcactgggaggatataaggcagtagggaaacagtgatggagcacaaaaacccctttcctctagtcaggcttatccttgccactaagaaacagtctcaagaatctgggaaagaaactaaatagcaaggatccttctatgaatgcccaaaaag

SEQ ID NO: 811891 - DNA, 589 bp, Homo sapiens
taataaatattttatgagagtagtacagaagtatgactccatttttctcttatatttcatttcagtgtggaaggctctttaraaacactattaacataacagcattatgtcaaaaagcgccaataacattctcaccaacttttctttttaaaggaattaggtatagctagactgtaaaaggcaagtggtgtgaagcccaaacctaagatcctaagatctaggatgagtcaagacttcatagtctacatgagtagaggcagcatctagaggaaaacaaaagtatgtggctatcaaattccaaagaagccccattttattacagagaaaatacaaagccgtttcctcacagggaaaagtacagtttcccttctccagggtgacagatgagccttttccgaagttctcagctttctcttctatcgaaacttcccatgtcggttaaagtgtttgtagagatagcggatgcgtttattaaggttgtgcaggtcatcagcgaacattctacttccaaccattttcctctttcggatacaacgttgcaattcattccctttccaacctcgaagccatatgggccccctgatcagtt

SEQ ID NO: 811892 - DNA, 602 bp, Homo sapiens
tagtgagccgagatcgtgccactgcacttcagcctgggtgacagagcgagactccatctattttttttttttttttaaaaaagatggtgaaaccccgtctctactaaaaaatagaaaaattagctaggtgtggtggcaggcacctgtaatcccagctactcgggaggctgaggcactgaattgcttgaacccaggaggcagaggttgcagtgagctaacatcatgccactgcactccagcctgggcgacagagcgagactccgtctcaaaaatatgtatatatatttgtgagggtggagccctcataacctaaacacctcccattagactccaccttccaacactgtcatgttggggattatatttccaacacatgaattatgaggggcacattcaaaccatacagcgtgctaagtgttgttctgactggtttgcatggactatctcattcagttttgacatatatatatacatatatatatatatatatatatatatatatatatakatatagatatatatatatatatataccattggtccttgaacaacgtgggggttagggatgacaacccctgtgcagtcaaaaatctgcatatgta

SEQ ID NO: 811893 - DNA, 602 bp, Homo sapiens
tagtgagccgagatcgtgccactgcacttcagcctgggtgacagagcgagactccatctattttttttttttttttaaaaaagatggtgaaaccccgtctctactaaaaaatagaaaaattagctaggtgtggtggcaggcacctgtaatcccagctactcgggaggctgaggcactgaattgcttgaacccaggaggcagaggttgcagtgagctaacatcatgccactgcactccagcctgggcgacagagcgagactccgtctcaaaaatatgtatatatatttgtgagggtggagccctcataacctaaacacctcccattagactccaccttccaacactgtcatgttggggattatatttccaacacatgaattatgaggggcacattcaaaccatacagcgtgctaagtgttgttctgactggtttgcatggactatctcattcagttttgacatatatatatacatatatatatatatatatatatatatatatatatagatatasatatatatatatatatataccattggtccttgaacaacgtgggggttagggatgacaacccctgtgcagtcaaaaatctgcatatgta

SEQ ID NO: 811894 - DNA, 450 bp, Homo sapiens
tattaatagctagaagctaagattggaaatgtggacaaaaggttgcaggcaggcrgtatccctatttcaaagtgttagaataagtgttgcatccccacctcccatatggtaacagatctcagtagagcagatacagttgagtaccccttatccaaaatgctggggactggaagcatttcagtcccaagcattttttcagttttggaatatttgtattatatttatcatatttggaaactgattttttcagttttagaatacttgtattatacttatcattgaacatccctcatctgaaaatctgaaatccagaacccttcagtgaacgtttcctttgagcaccagtgctgaaaaagttccagattttggagaatttgggattttggatttttggattatggatattcaacctgcactgctgcatttgttgacccggatgacaagtgagaa

SEQ ID NO: 811895 - DNA, 549 bp, Homo sapiens
aacgcaaaaagcatataaaggaatyttaaaaaatggaaagttgttgatcccaggtttgggatgaatagtgcagttctggttacttactttgtcactgtgttccatgtgaattctgtttccagagcccaccctccagcactagcacctcctgcggcccacacaggtgggagctgggggcagaggacttgggaagaaaggaaggctgtggccaactttgccattaacccacaggcctctcagtcattttgatgaagtagaaatcctataggcctgggctctctaggctgaaagacgtggtgaagtttcctttctctcaacttggatgaaatggaatttgcattctgtacaggtaacatgcttttgggtcaaagattggttgaaaatgcacaacagagctcccatctgtccctgatggcttgtgcagaatcaggttacaagcaggtgtggaacaggtttggttcaaacttggccttggcaagcactatttagtgtctttgttcaatgtgcttcacccctcggacccccagttttctcatttataaacaaaaa

SEQ ID NO: 811896 - DNA, 574 bp, Homo sapiens
catttggttaccagcctggatagtgaagatgtgtgcgtttggggcctttttcaaatgttgatgcaaaatagagaggaaaaaaagtagtttctgacttcaactcacattcacatgagataaaaaataaaaaaagacaaaccatctataaaccaagtactgacatatggggcacattaatttgtcagggagtggaacatgttctttgggcaactgataaattgcaggtaacctggagcttctcaatctggagtaaccacagagaacagaaataagagcttcatgtcctcactcaaatctccttcaccaccccaaataactaccactcttcccaaaaaccaaattcaaaacacaggcacttgaagttttacatggggaatattttgctctggcaaatgttgaactgaaaattattattgctgaggaggaaaagaggtgccaaaagtggcagggaaggaaatacactttaacaaccctgtctctgtgaattcrgcaaatatgtgctaacacgacaaatattcaccaaggaaagaatcaagtctgacattcattcaatttttatttgttgctacacaat

SEQ ID NO: 811897 - DNA, 378 bp, Homo sapiens
agacaaatttgggttaccacgaccaggaaagaaaactgattttgtaaatataatgtaatgcttatattatagaaaggacttcataaatttttcaaaataagataactcgctgtatttaactaacaaaagtttcttattcagtcaatgaaattattgatcatctgtcatgttcattgcactgttgggctctggagatcacatcaagatatgtgaggcacaggagcttcctaaaaggagctcaccgtctaatcttggaaataagaggaaagagcaaagtagatagattrtgctgggtagtactgatcagaggagaactttctgtcttggggaagagtaagacattaggaatatacatatacacacatttaataatagaat

SEQ ID NO: 811898 - DNA, 467 bp, Homo sapiens
tttctggatgaaagagttctaatattttaktctttcttgtaagggtatcgctctattcttatgagaatctaaatacacttttctgggtaaacattagcttatgtctcagttaaattttgaaatgaacataggcacaaaacaggcaagatgtgttgccagaagtataaaaatgcaggttgtatttattcctgtggcctatctaattatggctaatatttggaggactttggtgcattcagcactaacctagtaatatggttgttgggaaaaataatttttgaagagtttatatcactgttttaagtcataatttaggttagacagaaatgtctttcgggtatttgtggctgggtattttattttgaattgcttctctcctaggaggagcatgtagggaaaattactatatcttataggatccatactcttaaaaatgggattttacatgactgaacctgaggacaatt

SEQ ID NO: 811899 - DNA, 563 bp, Homo sapiens
acaggtttgattatgattcctttgattatggaacattttcagctttattgctggatatgttctcattttcatccagaatattatttatttgtgtcttctttacatttcttgatcaatcttktcaatggcttatcatttattggtattttttttgaaaaagaaattttggctttgttcatcttctctgtgatgtcgtttttaactagttcattgatttacattttatgctattttggttgttttcctttttcttattcacttaggtgaacacttagttcatttatttttaggttttattcttgtttaatatttaaatattaaaggctatttaaagtgtgtacattttatcaaagatcattttataacaccccacaagtcttgatatgtaatattttcattataattgagttacacattttttccttaacattagagattcttccattttggtcttccaagtcagtatatcttctgcagcttatctcacttattgtgtactttaatgactatatgctctattattaatttagtatcagatattatgcctgcttgtgtctcctacc

SEQ ID NO: 811900 - DNA, 614 bp, Homo sapiens
ttcattaatagagttcaatgtaataatgtaaaaaagtgcagcgtatttctatatatgtctgtagatgtagacttctgtatatatctacttttcacaaacttgaaatcatttcacatgtgttgtcttattcaaacctctctaaaccgaaaactttgagagttgcccagaagagatccgttgctcctattttatacattacaaaaccgaagtacagacagatgaactattttaagaccttgaggctaattagggatgcacgtggcgtgaaaattttgggcgtctgaacttcctacaatagggcactactgattctgtattcctttgttgcctgaggcattcctttctctgggagaaaccaaagctgtacatatttatcttcaagagaaacttccactttgcctatgaagaaatagttagaattgttttctgtggttgcctcaagttagaggtgctaatatacatggaagttaaacaagaccacacatgtgcaaaactcttgatgaatcacgttattatrctaaaccaacgttatactaaaccaacattagctagggttattagttcagattatagttatgcaggtcttccgtgttaagtctcatgtaaatatcttc

SEQ ID NO: 811901 - DNA, 592 bp, Homo sapiens
ctttgatgctctgttccttcttcttcaagctgtatttgattgtgaatgttccttgtgaagtgttttaaatcacaggtatcaaatcccctttgcttggtttgagggatttgsctctgttgccctcatattttcagcctaagagggccctccccattcctcccagggacatctaaaaacgtttatcttcttgtgtgcagtctggaaggttcttcttacgagcatctagcctcacaccaagcagccaaagttgtcttaaaaaaaaaatagcatctttgatatgatccacttggccacagcagcttcatcaccccctccccaatactctaatgtccagttaacgtatattctcagtccctccaacaagcatgatctttgtgccccaggacatttgcacatgctgtttcctgaaaggctacattccacagttcctaccctggtgcctgcttggttggtatattcagccttgctcagcttggacatctcctctttaaggacatacttcctgattcaccttccaaatcagaacaaagcttcctgttctttgccgtattccagtaagttgccaactcactggacattttctcatggtgtg

SEQ ID NO: 811902 - DNA, 554 bp, Homo sapiens
gaatgaatgaattcgtttacataatgtgtactaggagccaagccctgtgtgtgtgtgtgtgtgtgtgtgtgtgtgtgtgtgtstgtgtctgtgtctgtgtctgtgtgtggtttttggtgatgtgatttttaattagatccttacaataatatggtgaagctactcatcattggtcccattaaacagaagcaaaaactagtgcttggagtatcacaataacttgtctaagattacacagccagtctgcaaaagagctggatttcaaaatcttccaagtcatcatcagttatggtatttttaagatcgatttgcagttaaccacacagctttattacaaattcatgctctcttgatgtactcacagtatttttcaaaatttacctattgctatctctctatctctttaaacttttttcatccatcctctgtatcttcccttttatccctgaatgtttgccctcccctcttaagaaaaaataagatagtagcaagctccctgctggattttataactttgcataccatatatttagtttagtaatgaaaaattccag

SEQ ID NO: 811903 - DNA, 662 bp, Homo sapiens
tataaactgactttttaaccaagcattaggcaagatctgggtgcaagccattctataataaacagtgacatggctatattaaaatatttacttagtgtgctaaagtgacttataggaagagtggctactacatagaagtcctaagtattaaggcgtcaggtgccacgggcagcataaatattccatgtgcacttgtttataggaaaaccccatctggattcggctaaaacagcaggcaccctggtgaccccagttttgctattggaaaatataacacaagtgttcactcatctagaataactacagtgctaagtgccaaatgacagatgggaggggattggcttttctcaataaaatccaggcactccattgtgaagggtttcattgtaaggcctcctccacatttatagactctcagagtagacacgcagctagacaaggcaaggtgctgggtcagactgaccaaagcctgcctagtcaggcagttaaggttaggattagggttagggccttgcctatacacaatgtgcaagctcgacaggatttggaagacttggcctggaacartccatcagcgtcatcaatccccacccttaactccacttcccctctaacttagttatgctgaatgatgattaagcagataagctgaggaccaagcc

SEQ ID NO: 811904 - DNA, 618 bp, Homo sapiens
aattatattaactaagaaactgagttcagagagtttgagtgtttttccaacataaactttaaaaaatgatagaatatggaacagtttttacatcatagaaattatctgttccttgraagtttgaaagaatgcttctataagagtgtctagaattggatcctctattgttggtaatagcttgacttttttccatttttcccttgactaaatatttatttcaagttttctacttcagtaaacttttctaatttatatttgtctaaagttttcaaatttaatagctttgcgtgcgccttatcattttttagtatttcatctacttcatatctgtgattatattactttctaatgcctaaatgtatgtttttgagtgatctctattttttcattagacaagctaaatattttactattttattactgtattatttgtaaatcctaattcactaattttcatttttatattattcaatatattattttattttcctatttcattttccttatttcgtgatttattttttgttttctttcctttttttctaatttcttgaattagtacagtttattttgatttcactttagtcattaaaatacctaagattatgagttaacttt

SEQ ID NO: 811905 - DNA, 594 bp, Homo sapiens
ccatgttagccaggatcttgatctcctgacctcttgatccgccygcctcggcctcccaaagtgctggatgattcctaatcttatttgaccactgttttggactgggccctctagaaagcaaagcctgaaaaaaaaaaagagatgaaagcctggcactttatttgcaagatacaagcccagagcagcgaggtgaagaaagggaaaagagagcaaactgaaatgggaagcagtatcacagtgccgtctttacaacgaggctgctcagcaggtatgctggctgagcctacaggatttctcccgaatgtctacgaggaggcaaagcactccagagtttccccactaaagaaagagggaaaatatatgtgtccagctccttcccaggtcccattggtcaaatttccctccacaagaaactgactccatctggttgtgtcatctggttcctttgtagccactccaaattctatatctgaaggtatgagcttccattgaagtctaaaagagaaagagtgtcccagcaaggtgggacaccagcctagagggaggaagaaaaggatagtgaagggaatctgagcagacacacgggttcatgtt

SEQ ID NO: 811906 - DNA, 521 bp, Homo sapiens
catgaatggcttcagccaattcatggtgatatgtgagctcttgctctgagttcatatgagatctggttgtaaaaagtgtgtgacgtggccagatgcagtggcttacacctgtaatcccagcactttgkgaggcagaggcaggcggatcactttaagtcaggagtttgagaccgggtcaatgtggcaaaaccccatctctactaaaaatacaaagactatccgggcatggtggtgggcacctgtaattccagctacttgagaggctgaggcaggagaatcacttgaaccctggaggcggaggttgcagtgagccaagatcacgccattacactccaggctggacaacagagcaagactccatctcaaaaaaagaaaaggaagaaagaaaagaaaaatgaaaaaagagtgtgtggcttctctctctctctctgtctctttctctttcttgcttgatctcattctcactatctcgctatgtgatgtgcctgctcccactttgccttctgccctgattgggagct

SEQ ID NO: 811907 - DNA, 604 bp, Homo sapiens
aacgcaaatgaggggcaaagtcacgtcttacatggcagcaggcaacagagcttgtgcaggggaacccccatktataaaaccatcagatcctgtgagccttattcactcccacgagaacagtatgggggaaaaccccccacaacacacacacaccatggttcaattatctctacctggccctgcccttggcacatggggattattacaattcaaggtgagatttgagtagggacacagccaaactgtatcgtgtctctcccctgaatctttctgctgtggctgccttctttctgctctcccctgattggctttatcggtaaggtggattccatgtgacctggctactgcagcttcgtagattgatattttacagcttcagctaccagaaggcctggctgtctttctcagtgccagtcccacatttctcaggaagagaccaggagcctgcctttgaccaatcaaatgtggccaggaaggcagcagggttttgttatataaaatggttgtttctatgatagtcacacggtggtgggggctagggggtggcaggatgggaaactggactgggcagacacatctactgtccaggtcccagatcttgggc

SEQ ID NO: 811908 - DNA, 604 bp, Homo sapiens
aacgcaaatgaggggcaaagtcacgtcttacatggcagcaggcaacagagcttgtgcaggggaacccccatttataaaaccatcagatcctgtgagcyttattcactcccacgagaacagtatgggggaaaaccccccacaacacacacacaccatggttcaattatctctacctggccctgcccttggcacatggggattattacaattcaaggtgagatttgagtagggacacagccaaactgtatcgtgtctctcccctgaatctttctgctgtggctgccttctttctgctctcccctgattggctttatcggtaaggtggattccatgtgacctggctactgcagcttcgtagattgatattttacagcttcagctaccagaaggcctggctgtctttctcagtgccagtcccacatttctcaggaagagaccaggagcctgcctttgaccaatcaaatgtggccaggaaggcagcagggttttgttatataaaatggttgtttctatgatagtcacacggtggtgggggctagggggtggcaggatgggaaactggactgggcagacacatctactgtccaggtcccagatcttgggc

SEQ ID NO: 811909 - DNA, 577 bp, Homo sapiens
cagttaccaggattgaggcatttttgcagaatagaaagcttgtcctgtgccagttaatgctgcgttgggttactttcctctctactgcakttttattccagacagggattatatcttcttcccagagagaggcaaagggtttatttactccagtggagcggtgcttctcaaacttccacgtgcacctgaattctggtggggggatcttgttaagatgtccattccaattctgcaggtctggggtggggctccaggtgctgcctttcttcccagcacccagatggagctgataaagctggttcctggcccacaccctgagtggcagggccctggaggacaggggggccaggggaggggcccacagggtgagaatcccttcagtgggtgtctctggctgcttttgtcagggatagggggcctggggggcacgtccccatctttgacttcaggagcgtcagaatcagaagctcctggggcccggggcctccccagcatctgggggatcagctgccagggttgacaacctagcagggaggggacaaggacctcgaagggcccactggccccttgttcattt

SEQ ID NO: 811910 - DNA, 577 bp, Homo sapiens
cagttaccaggattgaggcatttttgcagaatagaaagcttgtcctgtgccagttaatgctgcgttgggttactttcctctctactgcatttttattccagacagggattatatcttcttcccagagagaggcaaagggtttatttactccagtggagcggtgcttctcaaacttccacgtgcacctgaattctggtggggggatcttgttaagatgtccattccaattctgcaggtctggggtggggctccaggtgctgcctttcttcccagcacccagatggagctgataaagctggttcctggcccacaccctgagtggcagggccctggaggacaggggggccaggggaggggcccacagggtgagaatcccttcagtgggtgtctctggctgcttttgtcagggatagggggcctggggggcacgtccccatctttgacttcaggagcgkcagaatcagaagctcctggggcccggggcctccccagcatctgggggatcagctgccagggttgacaacctagcagggaggggacaaggacctcgaagggcccactggccccttgttcattt

SEQ ID NO: 811911 - DNA, 577 bp, Homo sapiens
cagttaccaggattgaggcatttttgcagaatagaaagcttgtcctgtgccagttaatgctgcgttgggttactttcctctctactgcatttttattccagacagggattatatcttcttcccagagagaggcaaagggtttatttactccagtggagcggtgcttctcaaacttccacgtgcacctgaattctggtggggggatcttgttaagatgtccattccaattctgcaggtctggggtggggctccaggtgctgcctttcttcccagcacccagatggagctgataaagctggttcctggcccacaccctgagtggcagggccctggaggacaggggggccaggggaggggcccacagggtgagaatcccttcagtgggtgtctctggctgcttttgtcagggatagggggcctggggggcacgtccccatctttgacttcaggagcgtcagaatcagaagytcctggggcccggggcctccccagcatctgggggatcagctgccagggttgacaacctagcagggaggggacaaggacctcgaagggcccactggccccttgttcattt

SEQ ID NO: 811912 - DNA, 511 bp, Homo sapiens
tcagaggttatctggctcctcctcatgtcttcaggtagttaggtacttcastcatacttgatagaggacagtgtctgcccctttcctcaaaaagccctcaaggggaaatttgctcttttaatcaccttggaagtagactttattatcgccctgattctcaccagtcttaatggaatctgagacatagagacgtcaaactaacttgttcaagataaacaaaaaaaaaaaaaacaccctggcaagtggtgaggtcaaaattcaaaactcaggttgttctggctccagattccttgtgttcttataactcctgtgctatacttcctccctaacctggtgccctgacttaagccaaacatgttttcttctgagcctcagtctcctcctttgtaaaatcagggtcataagaggacacactttgctgaatatctttgtccaccaaagtgatagtgaaaaatcaaaacaataaaattagcaatgatcatcatagccaattctttttattcaccaagtc

SEQ ID NO: 811913 - DNA, 645 bp, Homo sapiens
attatgattcaaaactcacattttaaatcagaatgagcaaattcaacaaaaacaaagataaacagatgggacttaattaaactaaaaagcttctgcacagcaaaagaaataaatcagcagagttaatagacaacccacagagtgggagaaaatcttcacaatctatatatccaacaaaggacgagtatccaaaatctaaaaagaactcaaatcagcaagaaaaaataaagcaatcctatcaaaaagtgggctaaggacatgaatagactattctcaaaatcagatatataaatggccaagaagcatatggaaaaatgctccacatcactaaatatcagggaaatacaaatcaaaaccacaatgcaataccaccccactcctgctagaatggccataataaaaaaattaaaaaataatagatgttggcatggatgctgtgaaaagggaacacttttacaccgttggtgggaatgtaaacttgtacaaccactatggaaaacagtgtggcgattmcttaaagaactaaaagtagatctactgtttaatccatcaatcccacttctcggtatctacctagaggaaaagagttattatagaaaaaagatacttgtgcacacatgtttacagcagcacaatttgcaattg

SEQ ID NO: 811914 - DNA, 480 bp, Homo sapiens
gcaagagcacataggtgaagaggaagcggtggctgatctgggcggaagctggaggtcactgggagtcaggaatgcagcactcatcagtacgaaacccggaaacagctcctrgaaggccctctgagctttgaaatctgctgctttacaaactttcttcaggactctcctttgccttccagcaataatcagcatgtcaacgatggtggccttcatctttctttttccttgtcctgtcaccccaaatgagttttgcggggttttttttaatagagatggggtctcttcacgttgcctaggctggtctcagactcctggactcacacaatcctcctaccttggcctcctaaagtgccgggattacaggtgtgggtcaccgcacctggccccaaatgcgttttaatttcctcagtaactcctccctgctccatacacacaggactggggaaccttcttcctccggcagccaaagccgccaagacc

SEQ ID NO: 811915 - DNA, 597 bp, Homo sapiens
ttaggttaatagggttttttttttttccttacaacactataaatattccctctactgttttcccttgaataatttctcaaagaagtstgatgtaattcttatccttactcctttataggaaaggaatttatttccctgtggcttctctcaagattttctctttgtctttgattttctgtagtttattgtatgcttacatgtagttttgttctgtttttgttttttgctatttatcctacctggtattctgtgagctccccagaactgtgtttggcatctgtcatcagttttggaaaattctcagttcattattgtttcagatactttttctgctcatttctgcctgtcatcatcttctggattcccattatgcatatttatgcctttctaattgtcccacagttcttggatattctgttccatcttgttcattcttttctctctgagtttcagtttgggaagttgctactgacattttttttcaagctcattgattctttcctttgactgtatctaatcgatgaatccatcaaaggcattcttcacttttcttagttttttttgtttctagcatttccttttgattctttgagtctt

SEQ ID NO: 811916 - DNA, 597 bp, Homo sapiens
ttaggttaatagggttttttttttttccttacaacactataaatattccctctactgttttcccttgaataatttctcaaagaagtgtgatgtaattcttatccttactcctttataggaaaggaatttatttccctgtggcttctctcaagattttctctttgtctttgattttctgtagtttattgtatgcttacatgtagttttgttctgtttttgttttttgctatttatcctacctggtattctgtgagctccccagaactgtgtttggcatctgtcatcagttttggaaaattctcagttcattattgtttcagatactttttctgctcatttctgcctgtcatcatcttctggattcccattatgcatatttatgcctttctaattgtcccacagttcttggatattctgttccatcttgttcattcttttctctctgagtttcagtttgggaagttgctmctgacattttttttcaagctcattgattctttcctttgactgtatctaatcgatgaatccatcaaaggcattcttcacttttcttagttttttttgtttctagcatttccttttgattctttgagtctt

SEQ ID NO: 811917 - DNA, 528 bp, Homo sapiens
ggacacacttgagtcaatgcatgaacatagggctcgatgcctccacagtccttcggtgtcctctccagatgcacttgagggtccaataattagaaatatattgggctcatcagaartgtctctgatgtcaggcacggtggctcatggctacaaccccagcattttgggaggtcaagacaggaggatcccatgagcccaggagtttgagatcagcatagtgagaccacatctctacagataattaaaaaattaggcaactgtagtggcactcgcctgtagtcccagctactggggaggttcaggagggaggcccacctgagctccggtggtccaggctgcaatgagtggtggtcacaccactgcactcctgcctggatgatgggagtagaatcctctatttaaaaaaaaagtctctgataagattagagggagattatcaaaagcaagccaccccttattgcttgggttcttaacacctgagtggcaggtctggtttagacagctggagtaaactgacctagtgcttct

SEQ ID NO: 811918 - DNA, 613 bp, Homo sapiens
ggaatgcagtggcacaatctcagctcactgcaacctctgcctcctgggttcacgtgattctcccacctcagcctcctgagtagctgggactacaagcgcccaccaagcctggttaayttctgaattttttgtagagacagggtttcaccgtgttggccagatttgaagtgatttcacttgaaatcactcttgatttcaagtaacttgcccgcctcagcctcccacagtgctgggattacaggcatgagctacaaggcccagcctgatttctgtttttatatttactattcccatccttttactatattgggtataattttctttttttctagttttaaaggagaaacttggattattcactttaaatctctctaacatttcaaccagtaaatttacagcatctatagctatacattcactctgttttttagccggatcccataagccttgagatatcatcattcagtccaaaatactttctaatttctcttgtgatatctgcattaatgtgagagtcatttagaagtattctatttaatttccaaaattttggtacttttataggtacgttataattactgactcctaattttattccattgttgccagaaaa

SEQ ID NO: 811919 - DNA, 698 bp, Homo sapiens
atcaggtactatcaatgctgattttgtgtgtatgtttgagacagagtcttgctctttcactggaatgcagtggcacaatctcagctcactgcaacctctgcctcctgggttcacgtgattctcccacctcagcctcctgagtagctgggactacaagcgcccaccaagcctggttaacttctgaattttttgtagagacagggtttcaccgtgttggccagatttgaagtgatttcacttgaaatcactcttgatttcaagtaacttgcccgcctcagcctcccacagtgctgggattacaggcatgagctacaaggcccagcctgatttctgtttttatatttactattcccatccttttactatattgggtataattttctttttttctagttttaaaggagaaacttggattattcactttaaatctctctaacatttcaaccagtaaatttacagcatctatagctatacattcactctgttttttagccggatcccataagccttgagatatcatcattcagtccaaaatactttctaatttctcttgtgatatctgcattaatgtgagagtcatttagaagtattcyatttaatttccaaaattttggtacttttataggtacgttataattactgactcctaattttattccattgttgccagaaaacatagttaacaatatttcaaaaat

SEQ ID NO: 811920 - DNA, 585 bp, Homo sapiens
caagggtgcacctttgctaactgctttgckagaatcaggaatctttcctttaggtcacctatcccagttagctcagatagtaattagaggtttgctattgtgatgatgtgatttcctcttccacccatgtcactaacctcctctcctgaccccactcaactgtatgctcctaggtaacaggttctctgtcactttcgcccattgtttaacagtggcaccagctccttaccccaacactgagtaggacctggatacatttgaaatgaatgaatgtgttatcagaaccactgcctccaaggaattctcttatgtaccactcttacgtatgtgatttctccttcattagactcttgagtttttagtctgtaccaaagagtactacactttttcctttgaatgtatcatgtacatctgttttctctgtccatttaaatgagtagagttcttgaggattgaatcaataccttatttatttcacctcatctctgctatacccaaacataagccaggaccccataatctctgtctagctgtactagacggtgagaatacacagagtaaacgtgtgtctaaaaactgcattcg

SEQ ID NO: 811921 - DNA, 541 bp, Homo sapiens
ctcacggatccattcagttgtcttcattcccatagccattattcccacccaaagtgcccatcagcctgcaaccgccctctaactgatgttcctctcctctctccttccaccgcaatccattctccacactgcagggagagttatctttctaaatagaaaatttgatccacttcaatggttcccaattgtccttaaagtaaaagctaaactccttaacttgccttaacagggccctaagttatctggtctctaggttcattgactgtggctcttcccaatcatcaatgataaacttgaataatcgcagccactctagaggctgagatgggaatattgcttgagcccagaacttcagaacagcagtaagctatgaccatgccaatgcactccagcctggaagacagggtgagacacccatatctagggggaaaaacaaagcttgaatagatgcacactcttacacacgcacacacatacacacacactaatccatgttcttttctaaaaatacrcaattctcttttacagaaatacataattc

SEQ ID NO: 811922 - DNA, 633 bp, Homo sapiens
tcatccaaattctcagtattaaagtgcatgctacagcctgattccttctagggcagtggttctcaaactcagaygtgcagaagagttgcctagggtgcttatgaaatacggagctacctttccaggtgggatgactcaggaggtctgtggttccccaggaaagaagcattcctacaatcactccaggagctgttctttgagaaccactgctctaaggtatccagtctggtccaatcacctatgaataaggtacatatgggacatagggactttagagggaaaattttatataggagcaaggagtaaatgaccaccaactccatctcacaggccacaacctccaccctctggtctgttggctggcttctctcagataatctcaacatcctgggcttatttctaccacattaagcttagcacttaccacactgcagcaaaatctccttgttgttgtccatccttgagagatttccccaaaagtttagaaagagaggaaataatatctaagagttcagtcttatgaccagcacaaaatggttcaagacaaataaagctactttaaagagacaaaatgtcttccagaacagtatgagttatttgactatattctaataacaataattggctcatctg

SEQ ID NO: 811923 - DNA, 587 bp, Homo sapiens
ttggtctttctgtctcaggggtggcagaggcagaagaaaatscacatctaagtggataagtgtaaccatgtagttcaaacctgtattgttcaagggtcaacggtgtgtgtatgtacacatatacatttacatatttatataaatatatatctgtaagattaatttctgaaactgcaaagttaaagaagggtttctaacactcgtgccactacaatgctatcgctgtattgatctttgtcaaatttatgtgacaaactacataaaaatagcgtcccatataaagatcgcactccatataacaacaggcaaataaatgttccatgaaggaataaagaaatgcatgtaaaaattaacagagatggatgatgttaatattaattccactctcttccttgaattttccatgttgattcactggctcctggctctgctgccccttccagtcaactgtaagtcatatctccttctccctacataaatggggagcccgcccttcaacctagagaaggaagggaatgaaagagagaggcaaaactgctgacgatcacattcaacctggggcagattcagatgtcctcaattcaaac

SEQ ID NO: 811924 - DNA, 555 bp, Homo sapiens
aaacaaatttttaaagacatacaaagagacttgaatacccacccaataatagcgggagactttaatacctcactgccaatattagacagatcatcgagaaagaaaatttagaaagatattcaggacttgaactcagccctggatcaactggacctgacagagatctacataagtctccacccaaaaccaacagaacatacatttttctcagtaccacatggcacttactctaaaattgatcacataattagaagtaaaccactgctcagcaaatgcaaaagaactgaaatcataacagtctctcagtccacagcacaatcaaattagaactcaagattaagaaattcactcaaaaacacgtaactacatggaaattgaacaacctgctcctgcatgacttctggataaataataaaactgaggcagaaaccaagaaattctttgaaactaatgagaacgaagagacaacrtaccagactctctgggatgcagctaaagcagtgttaagagggaaatttacagcactaaatagatccaacaaaaagctagaaagat

SEQ ID NO: 811925 - DNA, 555 bp, Homo sapiens
aggtttgatttggtgagatgaatccacaaatagcaaagtattttcatataaaacttgtttctagtttttatcgcaggatttttttattacaggccttaatgggctcagaaatgtctctttgtagattctataaaaaagtgtttcccatctgttgaatcaaaacagaggtttaacactgtgaggttaatccacacatcacaaagcattttcacagatagcttgtttctagtttttatagggcaatgttcaattttttactgtagtcctcaatgggctcagaaatgtccctttgtagattttacaaaaagagtgtttctaacttggtgagtcaaaacacagtttccattctgtgagataaatccacacatcacaaagcatattcccagatttttttccttctttttatcacaggatattaggtttttcactatatgggctcagtgatgtcccttctcaattatacaaaattgagtgtttccaatcagttgaataaaaacaaaggyttaaacctgtgagatgaatcctcacatctcaaagcattttaactgagaggct

SEQ ID NO: 811926 - DNA, 463 bp, Homo sapiens
cagtttttcactgtaggcctcaaaggactcagaaatatcccttcgtgaattctacaaaaaaagggtttccaatctggtgaataaaaataacagtgtgacttggtgaggtaaatgcacacatcaaaaagtatttttgcagatagcttgttcccacttttcatcacaggatatttggattttcctgtaggcctcattgcgctcagaaatgtccctttatagagtgtacaataaaagtgtttccagcctgatgaatcaaaacacaggttccattcagtgacatgaatctacacatcagaaagtattttcaccaataatttgtttctagttttcattgcaaaatattctgtttttcagtactggcaycaatggtctcaaaaatgtcccttcattgatcctacaaaaaaagtgtttccaatctggtgaatcaaaaccatggtttaactcttttagataaatccatgca

SEQ ID NO: 811927 - DNA, 584 bp, Homo sapiens
aagtggaatcatactgtatatattattttgagacttrctcctttaactcatcatatttttcagatttatccatgttaataaatatagctatagttcattctttgtcttttggtaaaatgttaaaatcaaaatacaacacacatacaacaagacacatcaaagtgtaaagcttgatgaagttttacaaaatgtatatatctgtgaaatctctttccaggtcaagatagagaatatagctacctccccagaaactctttcttgctctctcccagtcatttatcacctcttgaagaaggaaccactattctgtattatgttaccatagattcgttttcattgtttttgattcataaagcgtgttcccttttgtttctgtcttcttttgctcaacattatgttgtgagattgatccatgttgttgcatttagcaatggatttttaaaattattgtatgaatatatcacaatttatatatccattgtaccatggttggacttttggtttttgacattacaagtgattctactgtgaatactcttttacatgtctcttagtacacaagtatacacatttttttgagtgtt

SEQ ID NO: 811928 - DNA, 584 bp, Homo sapiens
aagtggaatcatactgtatatattattttgagacttactcctttaactcatcatatttttcagatttatccatgttaataaatatagctatagttcattctttgtcttttggtaaaatgttaaaatcaaaatacaacacacatacaacaagacacatcaaagtgtaaagcttgatgaagttttacaaaatgtatatatctgtgaaatctctttccaggtcaagatagagaatatagctacctccccagaaactctttcttgctctctcccagtcatttatcacctcttgaagaaggaaccactattctgtattatgttaccatagattcgttttcattgtttttgattcataaagcgtgttcccttttgtttctgtcttcttttgctcaacattatgttgtgagattgatccatgttgttgcatttagcaatggatttttaaaattattgtatgaatatatcacaatttatatatccattgtaccatggttrgacttttggtttttgacattacaagtgattctactgtgaatactcttttacatgtctcttagtacacaagtatacacatttttttgagtgtt

SEQ ID NO: 811929 - DNA, 513 bp, Homo sapiens
gagatcatatggcctgtgaagcctaaagtatatactctctggcctttaacagaaaaggtttgttggtccttcttttagactaaagcaggtgctattataggtctttgtaattgaatgtttcattttataaaaaayaaaatttctaatagttcttctgtatttatagaacggcagaggtgtgctctttggattagaaagctgtgcgaaccttcaggaacaggtgcaggaataatggggaggaagaatcggaacctgtatgcaaaattgttattgcatatgcttaaacgaggtgcgcttgaaggcccttttacacaccgacctgaacccgggacactaaaaattctaccttcatacatggtaggtatcaatgaacaaaaggtatatattagtttcatttaaaaaaaagcgtcaagttatcatccctttggggaatggtaatactattaggttgtatgtgctagataatatattaaaattgttttttttcttcctgattcaatttttttccacctt

SEQ ID NO: 811930 - DNA, 607 bp, Homo sapiens
tgagttaaaaataaaagacttaggctgggcacagtaactcacgcctgtaatgccagcactttgggaggctgaggtgggcggatcacctgaggtcaggagtttgtgaccagcctggccaacatggcaaaaccccatcttgactaaaaatataaaaattagccgggtgtggtggctcatgtctgtagtcccagctactggggaaactgaggcatgagaatcaattgaacccgggaggcggaggttgcagtgagccaagactgtgccgctgcactccaattaaagatggcaatggctaatttaattgtagcactcaattaacaacagtcatatttaagtagagaatcctgggtgagaccctgtctccaacaacaacaaccagaaaaaagacttagcagcctgcttatatggcatcattgaaaaatgaggtattcaatcaagtgactttcacaaataactaatccatcaatatttatgagttaaaactgcttaamttttcaaaggttttccatttttttgtttttttctaaagatggcatagacccttcttcaaatgaaaatcccatttggaatctgatatatattttaaaaagtagagctgcaccagttg

SEQ ID NO: 811931 - DNA, 597 bp, Homo sapiens
ttttaacatactctaatcactaactcccctattaagtgagggctccttgagggcaaggacagttctcctacagatgtttccccaggactgttacacatatacattcaaaaaatattggcactgtaacttaaatggcatacttactcatttcaaaacaatataatacaaaatagctatggtacataaagtttcataaaatttcaatgtcaaaataagggctttcaaaataaaattctcaaaatcgtgataaaacaatttgtatagatcttattctagtaattttatttcctgttttaaaacgtttaactgtaaatggtcaaatgaacaataggccactttataaggtactagatactacccaatccattttctagatcaactctacctactccatttcaaccaacttcccactctccaacaaactaataattacttcaaaacgccacattcatcactaagtttatcaaagatgttttaaagctacccayatcactaccaaataataaactatgttatttcaaaaagttctcaggattaacagagttataaatcaatcaaaacacctcccaatttcagtttactttaaaatgttactat

SEQ ID NO: 811932 - DNA, 539 bp, Homo sapiens
acaactcactctccagaatgggcttggcagtgtcccagtggaagactatggtagatgatcaagaaaacaaaaagtctgcggaaggagttgagggtcgcagagggaggagaatctattgcagaatacacagtgcagacagaatactcaagggcatggatgaagtgtccttacaatgaaggctgagggtctgagaattggatatgaggccattcaggagaggatgggagtctgaatctgttttctgcttagaagtccctccaggacaccagcttgagacaaaggttggaggtataggcattgcaggatgagggtcagccttttccagtggccaggtctggcaaaggtaagatgagagcagcttgctgtcaatgtggctctggcttgggtattgtgagcattgtcagggaaggctacagagagtcagatgagacctgcaggagcccatggcctcctagagacaaggcatcaatttagctaggtgttatagtgtcaccactatgacctgggagttwcagtgtcaccactagagacccaacagc

SEQ ID NO: 811933 - DNA, 593 bp, Homo sapiens
gcccggctaatttttttgtatttttagtagagacggggtttcactgcgttcgccaggatggtctcgatctcctgacgtcgtgatccacccgcctcggcctctcaaagtgctgggattacaggtgtgagccactgcgactggctgcagattcctcttcttacattgtccatgccttgtaatgtgtaactctgagtcatggaagcaaagagaactaatctctaataactgtgagttttgaggaaggtcctgttccatcctgctttttgttgggtattgcttctcagtcttctgactatggcaatagcaaatgctgtgactgatattaactagttagtcctcacgacaacacactttggataaaattcttctttccattgaacagatgaggaggctgtgtcctggataggtcagcaatatacctgcagtcccataacttgcaagtggcatatccatgacatccattcattttcagaatcagcagggrgagattctcacatgggaatgtcaggctcagagatccagaggttagaatcaccagttcaataagaaatgggcaaaatgtttcatccagacctgtgtgctggtcgtccttg

SEQ ID NO: 811934 - DNA, 576 bp, Homo sapiens
agtattcttttcaaatattaacttcttgtcctctgggtagatacccagtagtgggattgctgaatcaaattgtagttttatttttagttcttttaaaaatctccacactgttttccatagcagccatactagtttacattcccaacagcagtatagaagtgtttcctgatcacctcatccatgccaaaatccttttttatttattattttttattatggccattcttgcaggaatgaggtggtactgcattattgttttgatttgcatttccctaataattagtgatgctgagcattttttcatgtgcttgttggccatttgtatgtcttcttttgagaattgtctattcatgtccctagcccgctttttgatgtggttgcttttttcttgctgatttgtttgagttccttgtagattctgaatcttagtcttctgtcagatgcatagtttgtgaatattttttcccactctgtgagtggtctgtttactctgctgattatttcttttactgcacagaagaygtttagtttagatagatctcatttatttattttcgttgcatttgcttttgggtt

SEQ ID NO: 811935 - DNA, 631 bp, Homo sapiens
caaggaaagtacaggccaatattcttgatgaacatagatgcaaaaatcmtcaacaaaatactagcaaatcaaattcaacagcacattaaaatggtcactcaccatgatcaagtgggatttatcccttggttacaaagatggttcaatacatgcaaacctataaatgtaatacaccatattaacagaatgaaggacaaaaaccatatgatcatctcaatagatgcataaaaagaatttgacaaaattcagcattctttcatgattaaaaactgtcaagaaattacgtatagaggtaatgtgcctcagcacaataaaggctatatatgacaagcccacagctaacattatactcaatgttaaaaagttgaaaacatttcctctaagatctggaacaagagaattatgcccacttttactacttcaactcgactgagtattagaagttcccatcagaacaattgagcaagagaaagacgtaaaaggcattcaaataggaaaggacagagtaaaattgtcactatttgctggtgacattatcttatatatagaaaaccctaaagaccccaccaaaaaccttttagaactaataagcaaatacagtaaacttacaggatacaaattcaacattaaa

SEQ ID NO: 811936 - DNA, 631 bp, Homo sapiens
caaggaaagtacaggccaatattcttgatgaacatagatgcaaaaatcatcaacaaaatactagcaaatcaaattcaacagcacattaaaatggtcactcaccatgatcaagtgggatttatcccttggttacaaagatggttcaatacatgcaaacctataaatgtaatacaccatattaacagaatgaaggacaaaaaccatatgatcatctcaatagatgcataaaaagaatttgacaaaattcagcattctttcatgattaaaaactgtcaagaaattacgtatagaggtaatgtgcctcagcacaataaaggctatatatgacaagcccacagctaacattatactcaatgttaaaaagttgaaaacatttcctctaagatctggaacaagagaattatgcccacttttactacttcaactcgactgagtattagaagttcccatcagaacaattgagcaagagaaagacgtaaaaggcattcaaataggaaaggacagagtaaaattgtcactatttgctggtgacattatcttatatatagaaaaccctaaagaccccaccaaaaaccttttagaactaataarcaaatacagtaaacttacaggatacaaattcaacattaaa

SEQ ID NO: 811937 - DNA, 616 bp, Homo sapiens
gccaaccccaatactcccacccacgccaggagatgcctacctttccccattttagagaagcaaaggaactagatctgtttggcctgagagtccaaragtggctcagtttaaccaaaagcccatgtcacccaggcagtgagacgttcacctttgcccattttggagaagcgtagggactagacctgctcaacccaggagatcaaacagcagctcaactcaatcaaaatcttgcccctttgctttgcccaaataggtaggcaatcttcaactgtgcatttctaaagagcatagtctctgatcccacccgtcttgagcagcaccctcacctaacctcagagcccagcttgcagacttgtccagccacaaattccaaataacagaaccatccaacaaaggaatatatcctgcaaccagcctgacaagaggctattacagtacccagctaacagtttcaactaatagcaaagcccagcaactaatctctccagataggggaacccagatagaagccccaccaaacatcagagcaaagtttcccagccaactagtgaacccacaacaagctctgcctaccaggggttgtcactagctgctccttccagaattatagtctata

SEQ ID NO: 811938 - DNA, 308 bp, Homo sapiens
aggacataggtatttcacggtactcaaagcaggtaatacgatagggcctcaggaaagattagaatgagtgagaggaaacaaaagaagcttcactctccaggtccatgggcctgaatgtccttttctttctgctcccaacttctcttgttttggtcaactttagtggagccaggaccatcttcatatggcgtctcaacttkttggttctttgaagcatgaatttgaatttggtgggaagcagtgatgagcatctccaatatgtctcgcactctgagacccgggtctcagatgagtcattctagaaaatt

SEQ ID NO: 811939 - DNA, 631 bp, Homo sapiens
gtgtttttgtttttgagacagagtctccctctgttgcccaggctggagggcagtggcgcaatctctgcttactgcaacctctatctcctggcttcaagcaactgccctgtctcagcctcccaagtagctggggttacaggcatgcaccaccacgccatgctaatttttgtatttttagcagagacagggtttcatcatgttggccaggctggtctcaaagtcctgacctcaggtgatccgcttgcctcggcctcctgaagagctagaattacaggtgtgagccactgcgcctggcctccaattattattttaatttgcatttccccaattacaaatggcattgaatatcactccatgtattttccatctatgtttttgaagttctgtttagatattttgtcaatgttttattgggttattttcttctgattgaattttaagaatttttacatattctagatcaagttctttatcagatacatgatttgaaaatattttctcccagtctgtggtttgtcttttttwaatttttttatttttatttaagttctgggatacatgtgcagaacatgcacatttgttacataagtatacgtgtgccgtggtggtttgctgcacctatcaacccatc

SEQ ID NO: 811940 - DNA, 626 bp, Homo sapiens
ccatattaaaactcattatattatttgaagcatataaataaatttataaaaatgtacgttttcctctaccaggcaaaatgctayaaaaaaaccttcaaaagatcattcaaaattaaatttcctaaatttgagaggagctaacatgagcgtgccatatttacgtttaaccatttgaaagaatatattaccttgttttgaaaatttgatttaactaaataatgaaataacatttctttagtttgcaaaattaaggatcaaattgttacattttactattaaaaagttgtaaagtaaataaacaaccagcacaatataaagtaatatgattatcgtatcctatgatatactataaaccaatagaaccacactcaagcaatcattttgaattaatgcatacttacatgatgggttgtttggagtttttctatcaataaactcgttgaaatttaaaagaaattcagtgttattatccgatattttcaggtcattgcagtaatctctgaaaaaaaaacattttgagatattagatattaaaatcaaaactttacagggtaattaaaggtagtgaaaacactattttttttttttattagccacaagactttgcaaactattgagcttcttgt

SEQ ID NO: 811941 - DNA, 638 bp, Homo sapiens
tggtctgactgtagtcagagagacataatctattcatgactgatgctttgacacttcctcctaatgcttttaagtgaatgattaactccaacctttctgggccctgtgcttttccatttagccctgagaaaaacccaggtagaagattccaactctctttacacatcaccaattctcagaataagtcaacagtcaagattcatttcttattcttccttattctgcttcagaccactggtaaaaggtgtcaaaagaagtgtttattcaagttcaaattcctctttccacaaaagaaccacatttttttttttctttttgagacggagacttactctgtcacccaggctggagtacagtcacactatttcggctcactgaagcctctgcctcccgggttcaagcaattctcctgcctcagcctcccgagtagctgggattacaggcatgcgccaccacgcccggctatctttttatatttttggtagacatggggtttcaccacgttggccaggctggcctcgaactcctgacctcaagtgatctgcccaccayggcctcccaaagtgctgggattacaggcatgagccacagtgcccaatcaggaaacacatttaagtgccttatactaccatatgtgg

SEQ ID NO: 811942 - DNA, 635 bp, Homo sapiens
ctgatggatcccttatgcatcctacctacwcccttacattcttactcttcatcacgtcccttcataagttgccctggtctccttcttctccctttcaccttctgctggagcacacatggccaaacacctcatactcactggaatttccttgtcttgtgttatcattaaagaaaattatatataatatatatgttatatattatatatgttaatatattaatatatattgtatataatatatatattatgtaataaaaattgtattttttagtgatgaagtctcgctaccttgcccaagctggtctggaactcctggcctcaagcgatcttctcacctcagcctcccaagtagctgggattagagagcatgtttttattccccactacactgagctcctggaaggaaggacctctgttttattcatcccagaattctagtgctgacaaagattctcttattgaccgaattttactcaggttcccttgagctctttttcaactaggcctggagttttggatttctgagtttgtctctgcattgtccgatttcagcaaggaaattgctaagtcctgctaagtctatttagtcatcccccatatccaagcactctcaatatctaatctggttcctcatc

SEQ ID NO: 811943 - DNA, 575 bp, Homo sapiens
accacttattcagtcttgcattgagtttgtaggcagcccaataaaaaacaagcagggaaggattggaaaagaaatcaaacaaaatgagatttttagaaaaatacaagagtagaactatatggctggatataagatcaatgaacagcaattaaaaaataatttaaaaaacaattttaaataacaaatagtaaagaatattatgtgctgttaactggctgaactatgtgtttccccaaattctacccccatgaagttctataccctgtacctcagaatgtgactgcatttggagatagtctttaaagaggtaattaaggttaaatgaggtcatatggatgagccttaattcaacatgactggtgtttttataagagaagaagattaagacacagagatgcaaagaggaaagactatgtgaagacaaagggagaagatgactgtcacaagccgaggagtgaggcctyggaatgaaaccggcttggctgacaccttgatctcagaggaaataaatttttgttgtttaagccacctgttctctggtactttgctatggcagacctagaaaactaatacag

SEQ ID NO: 811944 - DNA, 575 bp, Homo sapiens
accacttattcagtcttgcattgagtttgtaggcagcccaataaaaaacaagcagggaaggattggaaaagaaatcaaacaaaatgagatttttagaaaaatacaagagtagaactatatggctggatataagatcaatgaacagcaattaaaaaataatttaaaaaacaattttaaataacaaatagtaaagaatattatgtgctgttaactggctgaactatgtgtttccccaaattctacccccatgaagttctataccctgtacctcagaatgtgactgcatttggagatagtctttaaagaggtaattaaggttaaatgaggtcatatggatgagccttaattcaacatgactggtgtttttataagagaagaagattaagacacagagatgcaaagaggaaagactatgtgaagacaaagggagaagatgactgtcacaagccgaggagtgaggcctcggaatgaarccggcttggctgacaccttgatctcagaggaaataaatttttgttgtttaagccacctgttctctggtactttgctatggcagacctagaaaactaatacag

SEQ ID NO: 811945 - DNA, 612 bp, Homo sapiens
tggattgaaaatggtgcctgttggacccataataaatttcacctcagaggctgtgaggatgyagtgagaaaacatatataaaatttttttaatatatatgaatgaagataattagaatgtacagagcataggaacgaagaccagtagctataggaagaagctggtctagaaacaaaggtgtcaggggaagagaaaataaaagaggttagatgagcttgaggaaaagttaaactttgtgctattttgaatggaaaacactgctcctctctaagtcctattatcactgtatttaagaatttaaaatgatgttgatgggtttttttctggttttagatgaggctgaaaggtcatttttttcctcctgctattatgatttgtctccccagggcgttgtgaatggcccagcattccctgtactaaactaagggtaagtctttcatcctttgtaaaaatgctgtctatttaggctctttctaatacccacttgttccaccccacaggatactctggtttgtgcttgcaaagattattttctacatatcaaaaaatttaaatagaataaagagcaattctagtcacctcgccaaccaactgataagttgattacatgca

SEQ ID NO: 811946 - DNA, 617 bp, Homo sapiens
tttttgttttgttttgtttttattttttatttttttcataaagaaagtttaagccatcttgtaagggaaagctttgttttaaggttcatgaagttgcatctgtgctaaggtggccttgtgtctagagtagccagggtttttgtcatagagaccattgtcatagagacctggtaatctcctggccagggctggaaatccccaggccaggttgcatcatcttgctcggcaacacatagtgtaggacttgtaagatgtttgagtgagcctgtggctattcttaatcttctagccacttattagccacttgagccaatcttaatcttataaagagacatagagatatgtcttttatagttataccataactttaaatgtcatctatttgtttcgctaaaattttcagtgtttaaagaatggtgttttggttacccagaggcaatgttttaaatttagaacttttaatgttgaggtactgccatattccttttgttttaaagacagtgtatactctctctaagtatgctgtttcactccrgcaacttccctaatgaagtaaatttaaagaaacagttcttatttaaaaagtttaatgacttaaatttgtaagcaaatgatat

SEQ ID NO: 811947 - DNA, 564 bp, Homo sapiens
atatcaggtgaaattcacctctgatatttcatgtatgttcttttctattttccctaagtgttggctggtctgagaaataaagggacagagtacaaaagacagaaattttaaagctgagtgtccrgaggagacatcacatgtgggcaggttccgtgatgccccgcaagccgcaaaaccagcaagtttttattagtgattttcaaaaggggagggattgtacgaatagggtgtgagtcacagagatcacatgtgtcacaaggtaataagatatcacaaggtaaacagagtcagggtgagatcacaggaccacaggaccagggcaaaattaaaattgctaatgaagtttcaggcaggcattgtcattgataacatcttatcaggaactagagtttgagagcagacaatcggtctgaccaaaatttattaggcaggaatttcctcgtcctaataagcctaggagcgctacaggagaccggggcttatttcattccacagctatgatcataaaagacagccgtccccaaagcggccattttcgaggcctcccctcagggatgcattctc

SEQ ID NO: 811948 - DNA, 400 bp, Homo sapiens
atacaattatgttatatccttcataatcagattcaaaccatcactttcattctccccgtttaaactatacaaatggaatttatttgcttgcttgtttctttgtgtttatgatctcaaagaattaaaattattttcttcatttgctttcatactcttggatgttatatagtattttcctgaaaactctgctttacaggccttacaaactgtacttgtactttcagataatcatgaattgtctttaaaaccataattttctcttgttcttaaatcgagttttaataraaaattaagacaaattgaatataatgatttttaaatgactaacactcatggatcacttactgtgtactgggcagggtgcggtgctttacatcatggtttcttagtccttacaacg

SEQ ID NO: 811949 - DNA, 626 bp, Homo sapiens
aaattgataagtatcaattgctgctttgaaragcaaattgatttgagatttaggatgaggaaaatgaatatcaataaagtcattcacagtaatattttattaaatttttataaatgtgttaacttcaacagtttagaccttggaggcactttgtttctttgggacctctttacaatttaaaaattattttgttgttactgttatggtcaggaaaaaatgaaacccacaaggcttaaacctaagagattacacacatatattctaaaatctcacaattgtattattttctgttgaattcattagaggtaagatcttacagaattttatttggctcttagtacatggctataaggcatgcaaacccaagtaaaatgttaacagtgttgctttgttgaacagggattataaactatatactctcagtgtattttagcaatgcaaacataatgtttaaaccgctacaaaataaaaatgtaggtactgtaatttatatttactgacaaatagcttagctcagctctacaactaatttctgatgataatcgtaatttgtttggtgtgtggagaaatatcattggccatcataaagaggtttggaagtagattagcatttaatcaaatataag

SEQ ID NO: 811950 - DNA, 626 bp, Homo sapiens
aaattgataagtatcaattgctgctttgaagagcaaattgatttgagatttaggatgaggaaaatgaatatcaataaagtcattcacagtaatattttattaaatttttataaatgtgttaacttcaacagtttagaccttggaggcactttgtttctttgggacctctttacaatttaaaaattattttgttgttactgttatggtcaggaaaaaatgaaacccacaaggcttaaacctaagagattacacacatatattctaaaatctcacaattgtattattttctgttgaattcattagaggtaagatcttacagaattttatttggctcttagtacatggctataaggcatgcaaacccaagtaaaatgttaacagtgttgctttgttgaacagggattataaactatatactctcagtgtattttagcaatgcaaacataatgtttaaaccgctacaaaataaaaatgtaggtactgtaatttatatttactgacaaatagcttagctcagctctacaactaatttctgatgataatygtaatttgtttggtgtgtggagaaatatcattggccatcataaagaggtttggaagtagattagcatttaatcaaatataag

SEQ ID NO: 811951 - DNA, 603 bp, Homo sapiens
actaaatgaaataaaccatcttaaaagtctacatacggcatgatttcaactatatgacattctggaaaaagcaaaattatgatgacaatattagtggttgccacaggttagcagacaggaaggtatgagtatgcagatcacagaaaatttgtaaggcagagaaactgttctgtatgatactacagcagtggataggagtcattataacattgatctaaatccatagaatgtacgccacctcaagtaaatcctaatgtaaactatgggctttgacaacaatttgtagatgtacttccattgattgtaacaaatttatcactatggtttgggatgttgatagtgaggaaggttgtggtgtttagaaacagaggtatatgggaattctaactgtatgttctgctgaacactgctgtgaacctaaaactgctctaaaaaagtttattaatttaaaaaagaattattcaatcccttaattatgagtgcatgaawactgttgaaatctgaataattccaatgaatttcaccaatgtcaatttcttggtttgattttttagtatattattacaaaaagttattgaagaaactgggtaaaaaaatacaaca

SEQ ID NO: 811952 - DNA, 604 bp, Homo sapiens
aattaacactactccatttttttcttgcatttttatctgtcctacttagttaacattattagcactgataacacaaaagcaatggtgggaaaaactaccagcacattagcaccaatgaaaacagtggtgtcaaattctaagagcaatcattgtgttctttgccatcttgcacttaaaaaaaaagccagtttaatttcagaatttccttggtgagacagtaaaaaatattaattttactaaatttcaacaattgtatacatgcttttaaatattgtgtgtagtaaagtgggaaatttgcccaaaacaattctgccacacaacaaactacaatgattttttcacacacacacacacacacacacacacacacaacactcttatttgtgttacaagttgaactggtcacttgttttttcatgtaaaattatttttacttgaaagaacaactgacaaaaaacccctataatttagagttaaatatttggctgaaactttctcmaaaatgaatgaagtaaacctgtatcctcaataaaaatgtgttgtctttgataaagtgagctttcaggcaaaaattaggactttggaaaaattacatccacagtgt

SEQ ID NO: 811953 - DNA, 624 bp, Homo sapiens
ttggagacgctttagtcgggaacatccggggagtacttgaccaaagggcatctgcgccctcgctcgctcctttccttgttggtctgggagaagggaaaggggcaaggaagaaggaagggaagcgtggtggtttttgttgtagcgttttggaagaggaatgggcgacgcctttttcttcgccggggaatcgcgacgttccgtctgatggaagtgtgcatccttttagatttagagggaaagttggagtcaaacagcagccacaaagctggctgtctgaaatgtggttaaggcaaaacactcgggggatctctttgtagtagtgggcttggctcgctttggaaaggccggatttgactcgtgctgggcatttaaccaggagtgcggtccccagggtgtttcctcccggcttctgcccaacgagcctggagttaatgcgttaatgggctaccctggtagcgcacgggccgttttcggcactgtttctccttctctgatgactcgagttcaacctcctgggctgagttgctttgcctccgtcacagtgcaaggagggaagttgacaggaggaggagacgccgcgctgtrgcagggagctttgggatccaggggactggaagagagccg

SEQ ID NO: 811954 - DNA, 605 bp, Homo sapiens
tccgaagtttcactaatgatcttttctggttgcccctggmactttcccctaccccatctacccttgtggaagaatttttatagcataaaagcagagataaggctttccttaattccaaaatcctggtcctgggggattcatggcatgaaaatattggtgggcgatgtaagaacaaggcttcctgctcaagggagaagaaattgagaaaagatgcaaagtagtttttgacaggggtgtttctagggtgggccctgataaattaagaggatcggaaagcaaagatgtctgtgccttctgtttcaagatagggcacatggaggcagtgacaccctggagcttctctgcaccatgacagagcacaggactcattctgttctctacatcgcactcaacataggaggttccactatgctgtatcagacctacccatccagattcatcagatttgcttgcagagagccccaagaaaggaacagaaatagcaagaaagtgtctctggcccaaagaggcacattcaatgagcttgaaggacagtgcagcacttgttctcctgaatggatcaataaccaaggacggacagagtgacatactcatcagcagatgcc

SEQ ID NO: 811955 - DNA, 643 bp, Homo sapiens
tccttcacctggatctgctttgcactgaggctcrtgggctgtggtgagggaccatggagcaataggccctgggaatcccatcatttattttattttatttatgtatttgtttttaaaatagagacaccatctcactatgttgctcgggctggtctcgaacccccggactcaagcaatccacttgcctcagcctcctaaagtgctgggattacaggcgtgagccaccatacccggctaaccacaccattttgactcatgtatggatgctgttgagaagaaattttgtactgcttttcctatttccctgcatccgaaaatgtagttggcttttttacttatgtgacactgacaagtttgttagtaatgaatgtgacactgagaattttgttagtaatgagcatttttttatttgacactagaaaacttaaagacaacaatttgccccgccccacccctatatatatcaggctttgtgttgtgacgttaacacgtgttttcttttgaccttctcgtgtatgtctaatttatgtttatttgcagtgttgtatgacactcataagcttctttgatctctgggaataaggcagggtgtgaaaacattaagtgtcctgttttcgtgccttgtatggttaactcttccaat

SEQ ID NO: 811956 - DNA, 625 bp, Homo sapiens
ccaggggaaagcaaaactgatggattctctgacagatttggccatgtggaaaattgcactgtgtgttttacaaagcatttagragttgtaggaagactttgccagatagccaaaggaaactaaacaaataaaaaatgcagcatttactaatgcaaggaaaaacaaaaagctgcatgaggcagaagttcaatcataataattcatttagctcaatagtgaataatatttacatattctcaataaggaaaatatgaagtatacttcaatatattaaaaatatatattgtatactatgtaaaaggaatggaagagagtgagtgagacctaaaatgctgatctactgtagtaggaagacaattcatagtctcaaaaataatcaagatacagtagactggaaacattgtctttttaatgctggtaaatacaacaagaaacaaggagttgacaatggctgcctccgaggacaggagacagagagggaggaggaaaggactaggaggctgcttattttcctttcttttaatactatttggctctttatactatctgcacatattcccctgataagaatataagagaagctttaaaaaaaagaaagtcgagcattgtggctcacgcctgtaat

SEQ ID NO: 811957 - DNA, 647 bp, Homo sapiens
cacccaagcacagttttattgtttttcacataattaactgacatcatatccattattttcatccattattatctgtcccctactagtagatgagaattttgtctgtcttattcaccactgtcctcctagtgcctggaacactgccttggcacaagggaagtgtttaataacacatattactgactggatggcctaagaggacaaggttggtatcacatggataatcaagtcccagagagagttatctctaaagggcacctatacagatgcaaatgtgaatcagccaaggagctctgtgcacaagcaactctaaggaaatgtaccaaagcaggcccactgcaggaagtgggcagggagattggggaggcacagaaagagaacagcatggcagttggaaaaggagttagaaaagaagcctcaaacacaggaaagtggagctctgtcagcaatcagcaaactacacttggtgtgaggcagacagatctgagctcaaatttagaacattacctacatgtgagggccctttaaygagcaaaaattctgcctgcctgcagctcccgcgcttgatttacagagaaagtaaatcagaaaaacagattgcccattctcaggattactttgaacattgactcctggctgggcacggt

SEQ ID NO: 811958 - DNA, 535 bp, Homo sapiens
tgattgtcctgcctcagtctccctagtagctgagattacaggcagatgccatgacgcccagctaatttttgtatttgtagtagagacagggtttcaccaygttggtcaggctggtttcgaactcctaacctcaggtgatccgctggcctcggcctcccaaagtgctgggattacaggtgtgagccaccatgccaagcctctgttggagttcttacagtgaattttgtgttattcttcctcattcactgtagaaggcaagaagaaagagcttcgagaacaacatcccagtctgagagatgaggggactagtgatgacaaggtcttccttgcatgcagaggggccggccagtgccccctatctgccccagctgggactatggacaggacccgggtgcttcaagcatcccaggctgggccaccctttttttgctacacctgtggcaaatgtttcagcaggcgctcctacctctatagccaccagtttgttcacaatcccaagctgactaacagctgcagtcagtgtgggaagttgttt

SEQ ID NO: 811959 - DNA, 484 bp, Homo sapiens
ttcagcctttcctcggatgactttcacatttcttcttaaagagtgatataaacagttttgctaaatcagacattttctataataagcattattcaaaaaacaaaaaagtgcacagagtcatccaggccagacaactgtctctttttgtctcttttaaaagcacacctgaggactccatttaaattggatagtgctgatctcagagcagaaccagctaattgtctcagagctaaaagactagaaattaaaagcctcaaaccttttcctgatcctgccacttgctgtgttacttgaacgtcacttaacctcttcggacttttattgatctataaatggcaactatttggcaaacratagggtgatttatggaatgggcactttaagagcattgactaaaagtggttaaattaaaagttaagttgtatttttaaactctaaatagagatattgaggtctttaacactcttttcagacacaatttcct

SEQ ID NO: 811960 - DNA, 401 bp, Homo sapiens
tgcatattcccaggcccaagctccagcaattctgattcagtagattggagaagactctaagaataagtgcctttaacaagcactccagggatcaacaaataatctgcacartgatatttaaacacttctttaggactgcaaacttctgcttttttggaatctgtgtgtgtgtgtgtgtgtgtgtgtgtgtgtgtgtgtgtcagagagagacagagagagagtgagagacagagagagagagagaaaggtaggtgacaggggtagggatgagttatattttctaactaccttctcagctctcaaatgtcttttaaaggaatcgaacataatgtcaccctacctgtattcagctactcttccttcacattttctaggcaaattcacattgtaagtaaatggca

SEQ ID NO: 811961 - DNA, 574 bp, Homo sapiens
ttatgacctctatccatatttctgatttttagtgacttatacaagctctgtatacatcctacacaataatcagtcatccattaaataggctacaaagagttttctcagcacattactcatcttttaactttatcatgctttttattgtgcaaagatgatttttaatttttatggggttttatttgtcgatcatttcttttatggcttctggtacttatgtcttgtttaagaaggcctttttcacctccaatcttataaaaatgtgctccaatataatcaccaaatacttttaaatttcttttatgttcagctgcttaactcacctgaagtttatttttgtgggtgatataaagtaatagtctactttcccttttttatctacccgtaactaattttcctaacactattaattgcataggttatacttacctccatggatttgaaatatcacctttattataacctaaatttctactgatgatgcatggatctctcttggtctctctattgcattgatttccactccagtytaccacactattttgatcacatctctagcatacattttaatgta

SEQ ID NO: 811962 - DNA, 622 bp, Homo sapiens
tctttcattatattttggggggttctgcgtttctttttttttaagagatggggtctcactstatcacccaggctggagtgcaatggcatgatcatagctcactgcagcctcaaactcctgggttcaagtaatcctcccacctcagcctcctaagtagctgggactataggcacaagccattacacctgtatattttttaatgaataaatgaatggatagataaatataattcaagtataaaattcaaacatttcagaaatatacaatataaaaaataaaaatcatccataatcctaccaccaccccgcccagggaaaacaattttcagcagttttctaactgttccttacaaagcaaaccttcaccaggcagtgtcatgaagtacattcggtatgtgactgattccatgaacgttggggacctcatgaggataagaaatattccactcaggacaatgcattacattggtacgttcttcactcacctctgctgccaccacacaaatgcttatgtgtggcttaatatgaacagatgatgaataaacagatgtttatcaccaaagcagtaaataacatcatacacaatatctgtggtgaaaaaaaggaactatagtctcaataag

SEQ ID NO: 811963 - DNA, 528 bp, Homo sapiens
cctttccactgtgatgaagattgaaaatattgatgcaagagtactttttccccagattcaagagaggaagagtcacttgcttcctggattgtgttcatcaggaaagttgaaagaggagagactatattcataggaaaagaggcaaagaatgaaagaatgggtctgggggtggggaggagtggaatagagcctgagggaaagagaaagataggagctagcacgagttgagactttaaagaattttgagacagagaagagaagatattaggggtagctgccacagtgtgatatgcaaggtgctgggagagaatggagaaagaggattttagacaattttgctacatataaaggcatttccatcaggagccttgttgaaagacatcagtgaaagctaaatggcttttctagggatttttttggatattagcctaatacttctttaatgcaacactgtgttgagactattyagaacatgctaagattaatatgttatccattccatctaatgctgaagagaatgaaatcctt

SEQ ID NO: 811964 - DNA, 590 bp, Homo sapiens
tgtcacttgtctcttcaccctcggctccatgccctgttcggctttgtgtgccagggatgcacatgtccctggtgacatggccccgtagcttcctgttacaacatgaataactgacagaagcctggcaatttataaacgggaatatgtatgggtgttttttcctctctctttctgtttcaggggcacctgtggcaatggctgtactttttctgaagttccagtctacatgggacagttcatcccttcatggtctcagctcctgtctaatgaccttggcttctgggcaggtgacagcaccaccccctgtattttttccattccagggctggtaatggtttcctgccattgagaacatttaggttgcctcactgtctcccacttggctgtcttctttagcactgatgggaggatctgggcagcatatcacagtatccccaaagaggatcagaccctggaatgtggccaccccacaggttgtctccctctcttatttctaactttgtgttccttcacatgccacacacrcagagagacacataaaaattcactgaggactgcaaaaaaaattaaaatgcaacatattatttggc

SEQ ID NO: 811965 - DNA, 520 bp, Homo sapiens
gaagtttggcattattctagatccatttgtaaaaaccactcacctttttagtcatttcaaactgtmcagtactcacgaaacttatacatgggctgaaaggcattatgccaattaacttacagaaaattaaagacgaaacagcctggtcatacaaagtaaaacaggttcagtaaatttcattttcaaatatcaccctgatggtagaaaaaaatcaggggacatctggtattacaggaaatagggtgtacagaggtatttgtataatgtgaacaatgttttgcctcataaactgagaaaaacgtgttaaaacaaaatgctgtaaaaaacttacaagaaccttaagaagaatacttaagattaaattaaaagtgttattttcaattatagaaggattttgttttaatctgctattattttattagagtaggcttaactatgagttctagaaattattataatagattttcctaacgcaatgactatattgtcagcttggcctgacacaacaaaataccataga

SEQ ID NO: 811966 - DNA, 540 bp, Homo sapiens
tttttttttttttgtatttytggcagagatgaggtttcatcatgttgcccagactggccttgaacccctgagctcaagtgatccacccacctcagtctcccaaagggatggaattacaggcgtgagccactgtgcccagctccaattctttcttgttctctacatctttggttaattactctctcatgtaggagagcacctctttctcattctcctgcaagaacatttgtgggttcttgtgactttgcccttgaagacttgctcttctccgcttttactctcttttccaagatttcagttattctcatggcttcaattatttgttctgcatggatgattgcaaagtgtgtaccaccaggcttgacttttctctgttcttttcagtcccatgtaggaactttgtttgggagcaaaataatgatatatacaatatataatgaaattagtatgtttgaatttaaattaagaagatccaatatctgagagaagctgtgctgctgtacccccaaataggcaaaaacagtgaaatttacaaagaaa

SEQ ID NO: 811967 - DNA, 576 bp, Homo sapiens
tttacttttaatacatatgttaacatttttaatgtaataactaatgtataaaaatcacaataacatttacataagttatataaggcatatctgtgactccatcactgatcttacctcagtcagcccttgcaggaatgtgattgtccccaagcccagcctgtgcctccgttttaagaggtaactaactcctctcctaaattttatgcttgtcattctcttacatttttagaagtagtttagttctttttagttaatgtttccccaacaataacattgtatacttttgcttgattttgaacattctatttgtatcatgctatatgtcatcttctgtgacttatttcatttcacattatgtttctaaaatgtctttctatgcttgtgagtagctttagttcattcatttttaggttgtgtaatattccactgcataattattctataatataattcatttagtcactctcytgttgttggaaattggaaggtttttctttttttcttttcaatttttactgatacgaaggatactgtgatacatgttttattcatttctcttggtatacatgcccaaca

SEQ ID NO: 811968 - DNA, 367 bp, Homo sapiens
gatgtcaattaactttgcccaagaccacaacccaagtaaatggcagagcaggcctttgatgctaggcagtgtggatagcacacatatgctcttaaccgcatcactacctgtggaatcaatrtgagaaaataactctaggtatgagaaaaaggtgtccaattcactgcaccatgaatagtccaggttagttagaacctaatatataagaagagaagtaatggaaagaagggacagatacatagaaaatttccatataaagaagggtctggggtagaaatatggtgaagggttgcaagaggttgctaaaggttgttaacttgatgtttcatttacaaaataaacactctgtttatacttagtgtattac

SEQ ID NO: 811969 - DNA, 587 bp, Homo sapiens
ccttgtccatgtctctgttatgaatgggaaaaagtgggaattgggatttggaggaaaaggctcagaccctgcaagagctattcaagtcctaaaagaggcagcagcagctgtctgggaatgacagaatgggkgagagggaaacttggaaatacaagaagagtacagagttttttgctttgtgtttttgtggggtttttttcagagcatttccagaggtattgcctgaggtgcaaatttaatgaaaaaaataaacatttttcatttcagaagatcttagcatgtgctttaggatagttggagacaataaatatatttataaatgttatatttgaattctcttgatttaatctatcattatttcatctttaatcctggatttttcctgtgtttactttattggggtgttaattacagaccattttgtgaaagcaaccaagtgagagagaatgggagacaagaaactaattagaaaataactaattcattcaaatggtaacttaaacgcttgtttagcacagaggctgggagcatgggtttcagattcaaacacaggtgggttcaaagcccagccctgccaattatttcta

SEQ ID NO: 811970 - DNA, 523 bp, Homo sapiens
tactcactgaaagaatcatttgggcaaggaataatacaaaaagtaatgttagtctgttccctaaatatagaaaattttggagtgggtctatttatttgtagttcttacaaaattccaaagttatgmgacctcagggttatcttgctctcctatcctacctgccttctttgaatagagaggtaccactctagttgtctgcaataaataaaattatcttgctgcaaagatgcaaagcacattagaaattcaccaatcatgttctatgggaaagtaatttcaagagagacaaaagggagatggatgttagagaggcaatccaaaaatgtctgatatacaagacaatacaccttcatcaaaaacaccattcaagttgctcattaggaacctgtagaatctctaagagctgcaaatattgtcagaagacagaccctcattttcagatgtctgagatttcttcttgaacatcccacaagtttagcacattcaaatgtttaaaataaaactgaccttccctctcaaaagt

SEQ ID NO: 811971 - DNA, 613 bp, Homo sapiens
cttttaacaacaatttggaaatattcatcaaaattaaagggccacatatcttgttactcttctaggaagctgtattatataaatactcaacatgtacacagatacatgtccaaaaaagattataacaggtttgtttataataaatagaaaaacaaacaaaaaagaatagtccaacaacccatctgctggagaagtatgggtggagcaaaagacacagtgattcagctgaaaggggatgtggaatcaaaaaagattttaaatagcaattaaaaaataaaaatagctcaagtgttataatcaagctattgctttaaatagttcatctataataaaatacagccattaaaaatgatgcttttgaatatttacttaaataggaaaagattcatggtataccaattagaatgaggctatcatagcatatgttaggtatgacccatatttgcaacatacatactccaaggaaggatacacacaagtatgtgaacaatggatctctctgggtcrggtaggaaagaggttacaaggtagtttaatttatactttatgtttgtattttccaatttcttcaatagtcacaattaacttttgtaattaagaaagtgaaagctta

SEQ ID NO: 811972 - DNA, 408 bp, Homo sapiens
gaagctactcagcaaaactaattcatctcagccatgtgaatgtattcgtctcctatgaccctcacattgtgcaagacagtagctccaaaagaactaaaggaattagggcacgtcatcattttctagtttaattarattttttatagatattaattgaaaacagtataatatagtgtgctcaaattaatatagcctgcattgtatacaagtgtcaaaatgagtgatttgggattctctatgcaagcatttgctttcttacatgagcctatctgtatagtataatatccatatagtatagtaattctgtctaaaaatgtggagaacacctaaaataaaggcatgaatgggacaaatcttcaatgaaaacattttatagaaaccaatttaagttttaatttgattaatgta

SEQ ID NO: 811973 - DNA, 616 bp, Homo sapiens
tctcaggcagactgagcaaagtgtgagggaaaaagtcttggatgagacactgaaccaaataaggatggaaggaacagaaggcattgaggtaggaacagaaagacagctagaaagatatcatactaaaaratggtaacatttaacaattgctatttttctattcttctccattgtatcttcttaataatgtcatggatcttatctcacatgctgtcttaggttgtgttcccaaaaagaccctaaaatgaggtgtgcaaatgatttgttaaggaagtgatctcaggaaacactggtaaagttggggggatcaggacaaggaaggaggggaaaagacaaataaggatgcaatctcaggcaaaatcccctagagggtagcttcagcctgatcctacagtgaactttagattataaattaacccctagatgtaccctgatagagtcgagggacctgggcttttatatccttgtacctgtcaaatattggtcaatggctatctgaagaaataagttcccaggcacatctggttctctgttgtgttgatgaaatagctccattagctaatgacagtaatctgatgataaccacaaataaaaaaatgtcaggaataaaagccca

SEQ ID NO: 811974 - DNA, 599 bp, Homo sapiens
ttaattatgttatacttttattactaatgaggttgaaaactttttatatgtgtattgaaatgtatgtcctcttttgtgaaagtctaatcatatttcttgcctattttttctagtgggatgtttgcatttttcttgttgatgtgtgggacttctcatatatttaccaactctcttgtacagtgtcacagattaatgattccaggaaatggttggagtttctcttggtcatcttatcagaacttcttgatatagaaatgaattttctgatgagtagatgataaaataatggatacaataatagagtaagatgctaaaactggtggatattctgtaatataaacaaaacaaaacaaaaattctctttaaatggcatgtgttttctcaataaatgaatgtcagataatagcttctcatttacatttagaatgtattattttgtttaccttttgaaaaagatatgccacaattttttaaaaatcaacaatrgtgaagaaggaagagcaacaaccctaatttcccctaattggagcagactcatataaaatgttgaaatgaagtaatgcctgttcatgccttactatatatgtcagcattccact

SEQ ID NO: 811975 - DNA, 523 bp, Homo sapiens
accaaagtatgtctgaccacagcggaccagctcaactaaactaccacgagttaccttccttatttaggctgtgaaatrtggcagaataagtgattccattgttaagggaaatcacacccataaagaaaatcagagttgatggttttcttacatagatttgggcttcgtgttaaaattctagctgcaattttgccaactggagaaaaattagaaaagtttatagagcaatgattctactgacagcatctcgatgaactagtctcagattgttagacttgtgtggtatttatgggtgaataatatgaagtcccatcaactgtgatgtctgactctgcctaaatgctaattaataataacttaaaatattacttcataaagattaccaaaaggtgttattcagaaataaaattataatgtttattaaaatacacttacgatgttaaatcagtattctaagaaaatttggctccagttaacatttggtggtttttcaaaactctcaggatgtatcacataggcaatt

SEQ ID NO: 811976 - DNA, 707 bp, Homo sapiens
tgctttttgtattatttactatgaatttaaaaatatatctttttaaaaattaactttaaaaaaataaaacaggccgggcgcrgtggctcacgcctgtaatcccagcactttgggaggctgaggcgggcggatcaggaagtcaggagatcgagaccatcctggctaacacagtgaaaccccgtctctactaaaaatacaaaaaaaattagccaggcgtggtggcgggcgcctgtagtcccagctacaggggaggctgaggcaggagaatggtgtgaacctgggaggcggacttacagtgagccaagatcaggccactgcactccagcctgggccacagaagcaagactccgtctcaaaaaaaaaaaaaaataaataaataaaacaaatagccaggtgcggtggctcacgcctgtaatcccagcactttgggaggccaaggcaggtggttcacctcaggtcaggagtttgagaccagcctggccaacatggcaaaaccccatctctactaaaaatacaaaaaaattatctgggtgtggtggcgggtgcctgtaatcccagctactcgggaggctgaggcaggagaatcacttgaacctgggaggcggaggttgcagtgaaccaagatcatgccaaggtggcagtgagccaagatcagcctgagcgatagagtgcgactctgtgtcaaaaaaataaataaataaaataaa

SEQ ID NO: 811977 - DNA, 601 bp, Homo sapiens
cagatcacggctcactgcagcctccaattcctgggctcaagggatcctcccactcagcttccttcactttmaattttttgtagagacgggttcttgctgtgtttctcaggctggtctcaaacgcctggcctcaagcgatccttccacctcagccgctgagagtactgggattacaggcgtgggccatcgctcctggctttcatttattattattatttttttaattatttttttgagacggagtttcgctcttgttgcccaggctggagtgcaatgccgcgatctcggctcactgcaacctccgcctcccgggttcaagcgattctcctgcctcagcctcctgagtagctgggattacaggcacgtgccaccatgcctggttaattttgtatttttagtagagacggggtttctccatgttggtcaggctgttctcactcaggtgaaccgcccgcctcggcctcccaaagtgctgggattacaggcgtgagccactgcacctggccccttcatttatttttaaggctgaatcatattccattgtatggatatgccacgttttgttcacccattcatctgtcaatggacatttgggttgctt

SEQ ID NO: 811978 - DNA, 431 bp, Homo sapiens
tggctggagcacaatgctactgaggttggaggggcagtctggygttggattatgcaataccttgtgggacgaggcattaatgttaggattttaccctgagcaaaatagggagcagttgaaggatgtgaggtgctgagaaatcacttccagtttgcattacaaggaaggacaaatggaagtggagctgttggcacaatacaggtgagagatgatggtgacttgtgagggagcatgagtatgggaagaagtaaaggcactgaagccattctctggatgtagaatcaatagaaattggatatgacaagggagcaagaaagagacatcaagagcttttcccaaaataaatggatagttgatgatatcatttattaagatgagaatagagcagtttgaggaggaaaatcaacaattcactgttgaacatgtgaaag

SEQ ID NO: 811979 - DNA, 589 bp, Homo sapiens
aaacataaggaggaataaattggtgcttggctgaacatcgaaagcaggtcgtgaggacaagcccagcctaatgctttcactctcccttgcctcagcacatatctgtatccctcaggagctaattctgtggaaagttagtggtggtttgtccttttgaacaagaggaatgactcaagataagccaatgttatcatattctgttaaatccatttctccttagatgttggacactgagttgcgatcaagatggatttaggcaatgaggactctctgttttaaaaaatgcaaccacataaatcaattgactttgttcaatggattcacctactatgaggccaatctctattcttgtaaaattttcccccaatttaggggtttctatacctggtttactgagtgatatttggaaaattactcacactctctggtcttgatctcaaactcttgatttcaaagtatctggagaatgacaaacgtgcctacttttccactgagctttctatgagaactaatcaagtrttgagcaactattttgaactagctgttttaattagtagaagagaccagtgaggggtataatccaagaaaa

SEQ ID NO: 811980 - DNA, 595 bp, Homo sapiens
aaaagtttgctgagggtcccaaattttactctgtagtataacttctgtaaagctgtggggactccctcttttacaagtggctcccagaacttcaggaatggcttggacagtagctgttcctttactccaagccattcggacataactgagactgttggcaatctcactagaggcatcaaaatccctgccaagagctcctttcccaaaccccttctgcatagctgtaaattgacatgaagagtaatgtttatttcagagactatccagtttcaaccactattcacctgagaagataggaaacaaacacgatccccatggtggactgtggcaagtagtatgcaccttaccgatatgttctggaggtcccgctaagggagacagctatggaaaaacagaaaaagccctggacctggagccaggagacaggcatttgggtccaggttgggcctcttacttgctgtgtgtcccctyaggcaacttacttcttctctctgagccttagtttactggtctagaaagggagatttgtaatatatacccttttcagctgccttgttagattgctcagaagttccctgtaaattacaaagttctg

SEQ ID NO: 811981 - DNA, 547 bp, Homo sapiens
ctttagaccaccaaagacaaagagagtgtcttaaaagcagcacagagaaaagagaaattaccttcaagggattaacaggttatttctcatcagtgatgaacaagacagaaggcagtggtaaaataccttcaacatgctaaaatcatgtcactgtcttctgagaattctatacttaaaaagatatcctttaagaacaagagaaataaagacattatctgacaaaaaaaaaacctgggagttggccacatggagactctcactgaaaatgaaaattttaaaagatagacatcaaacagaaaaagacagaatctaggtgaaagatctgagattaaggaagaaatgaaaaacaaagaagctgaaaatggattttctcagtgtgttgttgaaaaagttacagattggtagtcagacatgcttatactggtatcttgctgccatctcttgctatctgagaaacttcaatcaaattacttaatctstcagagtcttgatttcttcatcttaaaaattcatctaacagtgtcacttatatgagcatttttttgag

SEQ ID NO: 811982 - DNA, 646 bp, Homo sapiens
ctggagaagtggaaaataaacagtcaaaggcactgttgacagagagatcctatttccagtggttcagaggccagaaagggagggatgaaaattaactcttcaggtagatgaaatgctagagtccccaggttgcagagcagtaacataagctcagatatccgggccctaagtgcctctatagattctggcacctgacaacctcccaccctaacagacaacctggggaactgcctgcgttttgcaggcactaagcagtagttgggatcgaggcagggaggactaagcagctgggatgccagggctgatcttacatgtagctgaggttttcagttcctcatacagcccaatttatgtctcactcattccagtagcagggcttgctattctctttttggatactaatgtctttgggctctcctccttagaatcttttttaagttttgtattttcctgagtaagaaaacccactgtgtctaggtgctgggctttggggtcagacagatgtgagtttacatccttctttgctatttaagcttcgacaggtcacaatcttagctttagactgcttatttgcaaacttcggttgatgacgcccagtccactgatggacrccagtccattatttcagtgttaattgaaataatgt

SEQ ID NO: 811983 - DNA, 612 bp, Homo sapiens
ctccttaagttggtttacaatcatgaagtcagcataagccacagawtcagaatcagcttaccgtataacctcttggtagagggtccagcaatgctaagaagctgcagaaaacacaaatgtctttggcataaaacctatgctccaatcttatgaaaagccacttaaaaataagtaagacagtgtctaaattcttagatacgcagccacacggtgagagaattcaaatagccaggtgcttggcctgtagtgctgacaaatggaagccaagcaattaaagctgagaaaatgggttacaaaatcttacagcaggagactcagatcagttacaaggaatttactgtttgggtttagaaataactgagacatccttttacctgagatggatcaagtagagctcaatataggaaggagacaggaggaaagagagagatgtaagtccccaaaccaccttccatcctagagtttctgaagacatgagaagtaaactaccactgctaaaaagtcaaggttaaaacatgaactttcaacttctctcctggatattcagggctcacctctcccggcatatattactcacactaatcaggcagcccgcaaataattatgtatttc

SEQ ID NO: 811984 - DNA, 605 bp, Homo sapiens
aatttgacccttggccctcttcttttcttaatgtacatacgctccctggtcatcttcttcattcctatagtttctattaccccacattttctaacaactccaaaacctttgtctctagtctacaccactcttctsaactcctgacccatatgtcaactgctgtatatcaactaatactccctttccatcatccctaaagatgtccctactgatattcccttagtcaagtaaaacaagccaaaaacttgggagttatctttctcatctcccttattcactccatcgcatacaataagtgaggcgccaagccctaccattctataatcttaatacctcaaaactctcttctttgctccaacacagcagataccactttgggtcaggcaacccaacgtgtctcagtttaattactgaaacaatttcctaaactggtctctctgctatgaactgggatttcaattactgagattttgtgttggacacttctttgttgtgaaaggcttcttctttgttgtgtcatgcattgtaggatgtttagcatcctggcttctatccagtagatgccaggagcacccccaccctgccatattaacaatcaaaaatga

SEQ ID NO: 811985 - DNA, 589 bp, Homo sapiens
gtccttcaaaaaaatacatttcaattcagacatttatggcaccccaaagcaattcaagtcccttcagcacagatggggtagggcatgtgggctcgggccactcacaccccaccccgcctcctcctggcgtkgggaggcctgactctgcccacctttactcatgagcccaccgtttgaccagcgaactctctgaggaggcccatgtgctaggtttgggggctgaggcatttctgtgctcttctctggttcagtctccctcccaaggtgaaaaacagcctggaaaaccaagtagaaagtgttgcagcagtatgtacttctgtgccctaaagagcaaaattgttacacaaattgctttgagattccttagaagtgaaagctttctctttgcttagcaggagccggtggcccttactttctctcaactttccatgtgttccagaaattccagccctatccccttagaggggctgtcatccaggaaggtgatttcatttttcttttagagagacagggtcttgctgtgttgcccaggctcgactctgaacttaggggctcaagtgatccttctgcctcagcctcccaagtagct

SEQ ID NO: 811986 - DNA, 457 bp, Homo sapiens
ttactgactgatgatcattgattgggtttgcttccccatgaggcttcaagccaatagcacgtgcatttgcatccatttatatacacctgggggactgcctycctcacacacacctgggggactgcctccctcacacacacctggggaactgcatcccttcacatacatagggaactgtgtccctcacacacctggaagattagcctcagaggtgtctgcagtaccagattccaccagggagtgaacgtctgattatgggtgattcagggtgcccacgtctatatgaaatcgagagcgggtcacctccctttcctccctactctctgtggggtggtgtttggggagctgtcttaagtgttagtcacccgaggagaaaatggtgagggtgggactctgtatctgggagaaaggagaccttggaggcaggggacagactgacagagccttgagcgatgga

SEQ ID NO: 811987 - DNA, 663 bp, Homo sapiens
taaatgagggatcctcaccccattccaggatcaggrtgggtttaatcttttaacagcttttttgagatataattcttatgttatatataattgaccaattcaaagtctacattcagtgttttttagtatattcgcagtgttgcactaccatcaccatgatctaactttatagtatttttgttccccttgaaagaaacccatacccattagcagtcacccctactctgtaccctaaaaaaacactaattagctttctatctctatgaatatatctgttctggatataaaataatacaatatgcatgggggggttgtgactggattctttcatttagtgcatttttaaggttcatacatgtggtagtatgtttcagtacttcatatatttttatttttgaataatattcaattatattgatacagcacattttatttatccattcattagttggtgggcatttaggttgattctacttttggttattatgaataatgttgctatgaacatttcaatacaagtttttgtgtagaaatatgtttcatttcttaggtatataactaggagtaaaattacaggatcatatggtaactccatggttagctttttgaggaacttttttccaaagtgactggaccattttatatttccacaagcaaaatatg

SEQ ID NO: 811988 - DNA, 642 bp, Homo sapiens
ggatcctcaccccattccaggatcagggtgggtttaatcttttaacagcttttttgagatataattcttatgttatatataattgaccaattcaaagtctacatycagtgttttttagtatattcgcagtgttgcactaccatcaccatgatctaactttatagtatttttgttccccttgaaagaaacccatacccattagcagtcacccctactctgtaccctaaaaaaacactaattagctttctatctctatgaatatatctgttctggatataaaataatacaatatgcatgggggggttgtgactggattctttcatttagtgcatttttaaggttcatacatgtggtagtatgtttcagtacttcatatatttttatttttgaataatattcaattatattgatacagcacattttatttatccattcattagttggtgggcatttaggttgattctacttttggttattatgaataatgttgctatgaacatttcaatacaagtttttgtgtagaaatatgtttcatttcttaggtatataactaggagtaaaattacaggatcatatggtaactccatggttagctttttgaggaacttttttccaaagtgactggaccattttatatttcca

SEQ ID NO: 811989 - DNA, 533 bp, Homo sapiens
acatgttattaaatgtgttctaaaactacacattttattcccattattataaatccaatattattataaatgcaaacttatcatttatrgagtttatctgtaacaaatgtcatgtatgaacataaactctgaaagctgaaataagagcaaacagttttatctggatcatggaaaaggggccaatgataggtgtttttttaaagctgtcaatttaatcatttgattctaccttgccatataatcttttaaagaataaaaaaaacgtaaacaataataaaaattatctacaaaaataaaaacttttttttaaaagaacaaacaaaaaaattaaaaacataaaattttgtgatgcatcattttcttgtaattttaccgtatcaggagaaatattgcttttaaatgagaatggagtctcaatataatgggagaagaaaaaaaaatcaaggaaggagcaaaataaccagaggagaatagggagaaaacagaagaggatgggatagatttgaagaaactccttttctccatttctcttg

SEQ ID NO: 811990 - DNA, 676 bp, Homo sapiens
ttatttctaatcaatgaaaaagactaagttctcctagaatgatcttcctctattgggatcaatctttcccagtgttactacatcagaagtagggtcttatttcctattggtttacttgtctaaggtcaggaaagcaaaagatttggttcctatggacccaacttgaaaaaaaaaattttagaaatatgtaaatatagctaccaacacactttcagcatcacaagtcacgagtacaagattattttcacttaattaccccaaacatggttgatatctgtactctttgcccatttcttaaggtgttaaaataaaagaacaggtatttaagaaatctctctctctctctctctctcacacacacacacacacacacacacacacggagagagacatacacaaacatcagcaggtagagtgacagtgacaggggacagttgatgtgaatttctcagtgttttaatccactctcttaagctggcctctggctactcagagagtatttctggtagaatgacagcaatgttgccctagctgaggaacacatttgaagccaatctttaggccctggatgaataaatatatggctaggattatggraatgcctgctcagggtctgcagatctagtaaccaaaaagtcatcaagagcagatcagttaagccattggtgacagaaga

SEQ ID NO: 811991 - DNA, 633 bp, Homo sapiens
gggtgaaacagtacacaaaattgccacaagcacagcaacaagtaaaaaacaagtgttctattgacaatgcacctaatacatcttcattaataagtcaaagtatgtgtagtaatttgattacccattaatttagttcaatgcaatgtagctgcaattttaaaatgcatttgaattgttcatctgtggctttttccttcaaaaatatataacgtattcaacttgtctaatgtattgctattagtaattccaggtaccaatagtagaaggtacagagaaattggatatgcagggttaaagacacagttcaacttgagtcttaccagctgtgtgaacttgggcaagtcatggaaccatttggacctatcttcatttacctctagattggaaataacattttttctactcatacatccggctatattaagagaaatgtggtacaatatttattacaagtatttgtgcactgaaaagtgctatgcagtattaatactaagtctttagtggtgatggtttamaaaggaaaacattatctcattttatgtaacccctggattatcctccacatctggaaaacctggctatattttatctcagcaaaaaataatcactgtaggtttatttttcaacacaaaa

SEQ ID NO: 811992 - DNA, 594 bp, Homo sapiens
tttactgactttcacatatgtaaaataaatattatctaagagcttattacaatgatgattatatataaatattkgtttaaaatcatatacattttacaatgtatttaaactggtggaagaaattccttctaactttttagcagatataggaagggaaaaataacatggagcattcacatgaacagaacttaaaaattctgaattttcaattctgatttattcctaactgtatattgctgatgacttttccttgtggtgcttgtagatttcttttgagcatcggtttcactgtttcactcagtagtcaatttataaggaatattatgtaaaatgtgacagattaaaatcaggccaaatgttaaagctgggtaaaaaggccaaaataaatataaaaattatgtctgggaggcattatagtgtgatttacttagtaatggagagaagtaaactatgaaaaggaaaacagctataaaagtaatgaatgttttactgaaaacataaggtgttttctcctcccattttcataccatggaaacaaactgactctcaatgagaatgaatcgcattccattttagactgatgaacaatacaat

SEQ ID NO: 811993 - DNA, 621 bp, Homo sapiens
aatagttggaagacacagacatcaggaaacaaagaacaactattcctgagagactggaaacaaacaaggggaaatctaggatttccagagtttatcccctggagagactttcctggccacagcataccatgtggagggagaatccaggcatggcatggctctggaggctctctggaatggagatgacaatctataaagaccaacacggttattgttcttcaaaaaacatatcggagacaagagagctgcacagagaaagaaccttggagatcagcagagggtctccctcaagtattctgctaattactggtcagcagattcatgtaagaacacactacccaaggcttggaaagaatcactgaataagattagagggaatggtgcctagtattcaatctatggagggcttgatcaaattttatttttattggtacttaaagcagaagcagtaaaccctgtgttgtgtaaacacagtgcaagctccaactttgtaggagccaagggtagaaaagtttccccctttttatctttttctttgtcattatcctccctgcaaycctctctatcttcttttagagaaaaaatatgactttctataaaaatacatatatgggatattac

SEQ ID NO: 811994 - DNA, 635 bp, Homo sapiens
tttagtacatttacaccactgggtaaccactattacaaatgagttttagaaccttcatattaccctgaaaagttcctcgggtcttgtttgcggtcaaaccctgcctcacttccagccacaaatgaccactgattttccttctgtctccacacattttccttttctagaaatttcatgtaactggaatgatacaacttgcctttcacatctggtttcttttacctagcatcacgtatttgaggtttgctattttaggggggcatatatcagtattccattccattttattactgaactccatgtagcatattttgtttacttattattcacaagttgatggacatttagattattttctggttagggctagtataaataatcctgctatgaacattcatatactaatctttgggtggatacatggttttatatttttcttaagaagaaatctgactggaattgttggtttgttaagtttacattttttatggttttttgtaataaaccgtcaagctattttcaacatattggcaccattttacrttcccagcagtgatgttttagagttctagtttctccatattctcaccaacacctagtattgtcagtctacttaattatagccattctaatag

SEQ ID NO: 811995 - DNA, 597 bp, Homo sapiens
atgataagggggtcaattcagcaagaggatatgacaattgtaaatatttttgcacccaacactggaacaaccaaatatataaagcaaatgttattagagctaaaaagagagaaagacctgagtacaataatagctgaagacttcagcattggctagatcttccagacagaaaattggcaaagaaacattaaacttaagcttcactatagaacagatagagctaataggtatttacagaacatttcatccaattgctgcagaatatacattcttcctcacagcatatggatcgttctcaaggatagaccatatgttaggtcacaaaacaagtcttaaaacatttaggaaaatggaaataatgtccagcatcttctctgaccataatggaataaaactagaaatcaataagagaaattctggaaactatacacacggaaattaaacaatatgcttctgaatgacaagtgagtcaatgaggaaataaagaaggaaattgaaaactttcttgaaacaaatcgtgatggaaacacacacaacataccaaaacctstgggatacagctaaagcagtactaagaggaaaatttatagctattag

SEQ ID NO: 811996 - DNA, 495 bp, Homo sapiens
caagatggtttactgaatattttaagtaaacctactgctcaggagaaaaagaaagattcctttcaaaatattactgctcattaacaaagtacctggtcatccaagagctctaatgraggtatacaaagagattaatgttgttttcatgcctgctaacacaacatccactctgcagtccagggaccaaggagtatttcaactttcagtcttaatagttaacaaacacattttggaagtctatacctgtcatagatagtgatttctgtgatggatctgggtaaaaaaaattgaaaatcatctggaaaagattcaccattgtagatgccattaagagcatttgtgattgacgggagaatgtcaaaacatccacgttcacaggagtttgaaagaagttgattccaatccttgtggatgactttgaggggttcaaggcttcagtggaagaagtaactgtagatgtggtggaaatagcaagggaactagaattagaattgg

SEQ ID NO: 811997 - DNA, 646 bp, Homo sapiens
aaattaaaccattaaatttacatcattcaaacatacttctattcatgctaatcaactaattgaggaacaatttgtgaagtctcctaattagcacttacttccccaaataaccattttcaatgaataatttatcacttaaatgtttcttaaagaaaaatgaaagcctgaatcataaaaatttggtgggttttccacacttgctattgatttaatgatacgtaaacacatgatacaattgtaaggctctctaggaaaataattattagaacatattgcaatttatttgatagaaaattcttatcaagtgcactcacttaaacaggtaaactcaaccaagtatgacaaatacacaatcacttgttgctttattaggatagttacattagatagttggttgccaaatcaaagttatgtaatcgatttttatttctcaagttgaagagagaggcagtatgaattgagtgcttctaaataggaacaagtcctataaatgtcttctgtctagtggttgctctcaaactatttcaaaaagaggcagaagaggaaagaatactttataactcattctatgagatatgtattacyctgaaaaaacgataaaagatatcacaagaaaagaagctacatggcaatatcccttatgaat

SEQ ID NO: 811998 - DNA, 577 bp, Homo sapiens
acaatgaaacatttccacctaagataaagaacaggacaagaatgtctgctttcaccatttattcaacatttcactggaagttgtaacttgaaaattaaattaggttagattacaggcacggtggctcacgcctgtaatcccagcactttgggaggccactatttgggaggtgggtggatcacttgaggtcaggagtttgagatcaacctgaccaacatggcaaaacaccgtctctactaaaaatacaaaagtgagctgggcatggtggcagatctgtaatcccagctacttgggaggctgaggcaggaaaatcgcttgaatccggggtgcagaggttgcagtgagccaagattgcatcactgcactccagcctgggtgacagagcgagactctatctcaaaaaaaattttttttaaattaaatgaggtgagaaaaaagaaatraaaggcatctaaattggaaagtaagtaaaactatctctatttgcagatgaaatgatcttccacatagaaaattccaaagaatacacagaaaagttacgagagctaacaaatgtattaatcaaaggttcaggata

SEQ ID NO: 811999 - DNA, 583 bp, Homo sapiens
taaggggacatttttaaccttgtgacaccataaaattccatgcaygcaaagttatttgtttttatttttctgacattcattcttgaccagatattttccatgggctttctcatgttactcaactagaggcataattttaatagtttattttaataccttgattaataggagcaatctgtttaaaaatagtattagtgttggcatttcgtaatgaattgcagaagctgagcagacatgctcttttgtgcctttttcaatttcctttgaaaatgtgttgaactcctcagtatttgttcaaacctaccaagttttaacatgaactaagcattaaatggatttggaatctgagaagggtgttcgcctacaatgtagcgatatggggagaaaaggtttgggttgagaccggcgactttcagaattataagtgctggcaagtaagaaccacagcccggcaattttggaggcccccagcatagccactgctgctaaccaaccaattttaaaagaccaaagactaggttttctcccaaagtgacagtagttgcaaatttgccatctaactcacagtggcactagcccaatc

SEQ ID NO: 812000 - DNA, 413 bp, Homo sapiens
gcctatgtatgtcctattcgtctggcactatttgttggaatggctgcctttttttcattgaatttcttttttgtacatttgtcagaatcaatcaggcttatttttgtgggtctctttctgggttgtctattgtgttctatttatccaggtccatcctatcatcacagtcttgattaccatagctgtataatgttttgatatcatgtaaactgatttctcccaatttttctcctttttcagaacagttttaactattctagttctgttgacttaccttaaaattgcttaatggtctttatctayagccataaaaaatctttctgagattttggtagaaatttcataaaacttgtatatcaatttgtgaataattgacatctatactatgatgagttttcaaaagagggaacata

SEQ ID NO: 812001 - DNA, 558 bp, Homo sapiens
attgaaacgaattggcttacactattgtgagggttggctatggtagtccaaaatccatagggcaggcctttaggaaaagcaacctggaaactctcaggcagaagttgacgctcttgtccacaggcacaatctttcttttctttttgtcagcttttattaagatataattcacgtatcatgcaattctctcatttaaattgtacaacccaatggttttcagtatgttctcagggttgtgcaactatcaccacaatcaattttagagcatttttatcacccaagaaagaaacatcataaccattagcaatcattcccaacttctccatctccctcaatttttttcttcttcagaaatactcagttctaccttaagaccttgtaactaattaaataaggcccctacaaaatattaggggtaatctcctttactttaagttaattgattatagctckctccttaatatgcttgaataatatttcatgtatgaatatagcacatattgtttatccattcatccgcttatgaagatttgagttgtttccactttttggctgtta

SEQ ID NO: 812002 - DNA, 585 bp, Homo sapiens
tcaaattttcttgttttttttttaattgttgaattgtaaaagtgatttatattttttgtattttgattaatatagctttgtagtaaacttatraattgggaagtatgagcggcccaattttgtcttgctcttttaagattgttttggcaaaaatgggtcttttcagttttaatatcaatgtgtcaatttctgcaaaaagtgcagctgggattataaacgggattaatagggattacagtgaatttgtagataagtttgtagagtatagctattttcacaaaatgaaatattttgattcataaatactgaattttttattgattttggttttttcttctttcaacagtgttttgtagtattcagtatataaacgttacttttttattaaattgatttctaattattatttttgatgctaatataaatggattgttttcacaaattcatgtttgcattgctcattgctaaagtataggtaaataactgatttttgtatactgatctgtactatacagattttctgaattcatatattagttccaattgaatttttgtggatgacttagaattttctgtgtaccaggc

SEQ ID NO: 812003 - DNA, 550 bp, Homo sapiens
caaaaaattaaaaatagaactaccatatgatccagcaatcccagtgytgggtacatatccagaggacgtgaaatcagaatgtcaaggagatatgtgcactcccatgtttattgcagcactattcataatagccaagacatcaaatcaacctaggtgtccaatgacagattaatgcctaaatagaatgtggtgcagatacacaatggaatattattcagccataaaaagagtaaaatattgtcttttgtgccaacatggatgaacctggaggacctcaaattaagtgaaataaaccaaacacagaaagataaataacacgtgatctcattcatatgcagaatcttaaaaacaaaaaagttgatataatagaaacaagtagaaccgtggttaccagaaactgtggaagggagtggggaagagagaatgagaagaggttcatcaatggataccaagttaaaattatgaatgctgagtcagttctggcattctattgttaagtagaataatgatggttgacagagagatattattgtatattacaaaattacta

SEQ ID NO: 812004 - DNA, 602 bp, Homo sapiens
atgtaagcacctattttgtaaatgaagcatgggaagccatgtatatagaaggcagatctcttaactggtggtctttaaacatttcatgggcaaaagcrgtaattaattacctccatcttagcttcaacaattgctttgatttgcatttttagcatggaacaatggagtaaaaagcctaaaatatcaataatgacacgactcaacagcaaaaataataataataacagctgacatttatggtactcctattctgtgccaagcaccatagtgaatacttgggcaggtatttgttcattaaatcatcaaaaaatccctagagctattgccagcaataaacccatttgaatggatgaagaaaatgaggctgagaaagatgaagcaacttacccagtgccccaaagctgaccagcatgagagccagagttccagcctctcattctcaaccatttcactgtcgccatcggagtggcctggttgaagcatcttgcttgcagctaataaagactcttggtctattggtgtgtgttaaatatgacacacttcaggtcggtgcttgagtgctgccaccgcctatttaatcttagcaaagcaccccttaattc

SEQ ID NO: 812005 - DNA, 558 bp, Homo sapiens
ttaactcttactgctctgtgttgaatctgcagtgaatgtagatattaaacctaggtcttttgtctcacagccttagagtttgtttagccacaatgtctttactttaaaagcctactgttaaaatcagtagttccaatgcaacttatccattgagcaaatcatgtataatctttcttaaaacttggaaacaaaaatctggtgatctatccacctagttaccttctcatggaacataagactataagactcatgaagaagcctcttgctaagaagaaagtcaaaattgaagtaatataaattaatttctgctcagaatgtaggttatgcccaagcagcagaagggcaaagtattccaggctgcatctgggaatggggccagttggctgagattagagttccagtgggcttggggtccaaaataaatcagaggtctggatccaggaggcaagcaagatgagaagaggttctgtrgccttataccagagggagagatcagtgttaaagtcaaggagtttgaggccaagaaacgtccacctcttccctagaatatatattctc

SEQ ID NO: 812006 - DNA, 654 bp, Homo sapiens
ccccagtatggattctcttatgttccttaagctgggaatcatgaatgaaggccttcccacatgcctcacaaatgtaaggtttctctcctgtgtgtaatttaygatgaacattaagtgctgatctacgactgaaacctttcccacattgctcacatttgaatggtttctctccagtgtggactctctgatgagtttgcagatgtgagctttgactaaattccttgccacacacatcacacataaagagtttctctcccacgtggactctctgatgaacatgaagagctgagatgtaacagatgctttttccacactcatcacatgtataagacttctcttctgagtataactgctgaggaagatcaaagatgggaacatcactgatggactgtttacacttcccaccctgggaaggtttctgtcctgtatgaattgtgggtagtcctgcttcaacctgggaggggacatcaccattttcaaagaactgagagttatttatgatagagtcctgagacctggttaagtcttttgcaatttgttcccagatttgctggcaggaccactcttcatgtgctcctgcttctggaacagactccaactcagtttggatcttgcctcctataaagacacagatttaagagatgtgtacaggtg

SEQ ID NO: 812007 - DNA, 584 bp, Homo sapiens
gcccctgttatgacacttcaacacttctgtggtatccacaccaacaatgcataatctgaacctaaacatgaaatacataaatcccaaatgactatctttctataaaatactttgcctatatacttcaaggatgtcaagaataaaaagacaaagcctgttgaatctttctagattaaagaagactacagaaatgtgacacctaaaagcagtacataaaattggactttggactgggggatgggggaaaacagttacaagaactttaaaaagcacaacaaatttaaatatgggagtttggatagaaaagatgatggtgtctagccatatctaataggtaacagaattaactaatattaatagtcttttaattgatatctagtatttaatagtgatattacttaatattatatctaatactacctagcatcttatatgaaactctatagccagcccttcctaaatgcctcttaccaagacactccatgatcaccttgctatgtgggsttccttgatgcagaaagctacaataagttgtttctcattataagtttgttcccagtggtatttggctgatgggtgttaac

SEQ ID NO: 812008 - DNA, 609 bp, Homo sapiens
tcaacaagaagacctaactatgctaaacatatatgcacccaacacaggagtacccagattcataaagcaagttcttagagaccttcaaagagacttaggcwcccacacaataatagtgggagactacaacaccctactgacagtattacaaactttattgaggtagaaaattaacagatatgttcaggacctaaactcaaaattggaccaaatggatataatagacctgtacagaactctccaccccaaaacaagagaatatacattcttctcatagccacgtggcacatactctaaaattaaccacacaatcagacatacgacaatccttagcaaatgcaaattaatggaactcataccaaacacactcttggaccatcacacagtaaaaatagacatcaagactttaaaaaattgctgaaaaccatgcaattacatgaaaattaacctgctcctgaatgacttttgggtaaataataaagttaaagcaaaaataaagaagttctttgaaactaatgagaacaaacacacaacataccagaatccctgggacacagctaaggcagtgttaagagggaaatttatagcactaaacacccacatcaagaa

SEQ ID NO: 812009 - DNA, 593 bp, Homo sapiens
acactgcgagaaagcggtcgcacaggtagggtggagagaggcaggctgagcgaggtcaaagtcctggaaacgctcacagcagggcacagaggaccccgccaattccaacccccgggatgcgagcacagcacccccatcccagaaagcttccgtggacgggaaaaaaaccccattccccgcccccaccaaacctccgctctccgccaaggcttcttttcccttgcttggatcatcgatcatcgggtcgttgcgaccccaagcgaaggtgacaagttcagaaggacccgccagacgcagaaatggctcaaactacgcggttatgtagcaaccgcaggctcacacaccggaagtgctcgcgtctccacagagcgtctggactccacttcccagaattccccggttcaactgcttgagccaaagggtccgccattccatgaagttgatggactacagttcccagaattcaytcgtccacccgcctgagccaacttgcccgcgactcagagtgtgtctggactccgcttcctccaatgccaaaggaaaatgtctataatctcactcttcagcgggaagcgttggactccgcggtggtc

SEQ ID NO: 812010 - DNA, 593 bp, Homo sapiens
acactgcgagaaagcggtcgcacaggtagggtggagagaggcaggctgagcgaggtcaaagtcctggaaacgctcacagcagggcacagaggaccccgccaattccaacccccgggatgcgagcacagcacccccatcccagaaagcttccgtggacgggaaaaaaaccccattccccgcccccaccaaacctccgctctccgccaaggcttcttttcccttgcttggatcatcgatcatcgggtcgttgcgaccccaagcgaaggtgacaagttcagaaggacccgccagacgcagaaatggctcaaactacgcggttatgtagcaaccgcaggctcacacaccggaagtgctcgcgtctccacagagcgtctggactccacttcccagaattccccggttcaactgcttgagccaaagggtccgccattccatgaagttgatggactacagttcccagaattcactcgtccacccgcctgagccaacttgcccgcgactcagagtgtgtctggactccrcttcctccaatgccaaaggaaaatgtctataatctcactcttcagcgggaagcgttggactccgcggtggtc

SEQ ID NO: 812011 - DNA, 468 bp, Homo sapiens
ttagaatactggctctggtatgaaagctggattcaggtactgttcctgcctcttgacctcaccaagcctcagcttcctcgcctgttaaatggatacaattgtcgycattatcatctgttgagaactccctaaaatgccaggtactatgccaagggcattgcataaattcactcattgattcctcacagtaatcctatgattaacatcctgttttcatttcccttcttatagctgagcataggcacagaagtttaggtgtttggaccaaggtcacacaactgatacaacagtagcttcttcacaggtatgtgtgaagtaccttaatgaaacatcatgtgccaagttcttcataaggtccctaatatgtatttagttaaatatcaccatttttgttgttattattgtgcttcctatagcttgttaatttcagtgacattatctaatttatagttgcataaatcttgcaga

SEQ ID NO: 812012 - DNA, 502 bp, Homo sapiens
ttatatgttctggatagatatctttgtcagttatgtgttttgcaaatattgtataccattatgtggcttgtgtttttattccattaacagtatttttcacacaagaaatttttttwaatgaagttccttttttgtctttgatggattgtgcttttggtttcaaatataagaactctgcctaatccaaggtcacaaagattttctcccacttttttatcacaaattttatgttttcaggctttatatttaggtctatgatatatttgagttagtatttatataagatgtgaatctttatataagggaggtccactatttgcatatgagaatccaattctttcagtattgccatggcacctttgtgaatccattaaccatacatgtatgggtctttttctggcctcagtgcagtttcattgatttatgtgtctatcattttgccaaatattgcacatcttgacttttgtatctgtatataatgtcttgaaaccagatactgtga

SEQ ID NO: 812013 - DNA, 625 bp, Homo sapiens
ataaattagagagacaaataattatttcactgaggcaaataaattgtaaaggttgaaaacaaacagtatcttatattaacatacatggacaatgctccacctgtagtaaggagaaaaaaaagtatttgaaatgcaatggttatgccaggaaaactgactgtgtgatcctcaaagggaaaaattctaaagataaaagaaaatggaaagttgtaaaaatccattcagtaagggtaagggcagacaggaagagtttgggcatggagtttagagtgaaaaaagagacaaaattaaatagaagtaaaaataaagatgcagaaaaaatagatattgaatatttacaagccattgtttgagaacacagtagaacataagcaaaaaatagctggatttagaatattttctttactcattatttttgtctgaagtttagagaacatgtcttccaatcatgttttttgctggggcctaggagtagtagtttgtttaagttgttacctagtgctaatctgtgactccagtgtgaaaaagttcttgtgtataatcctcgtgcaataaatttgttgaaaattttatgttggctggcatgcctaccrtatgggagatccaggtaaaattaatgccccat

SEQ ID NO: 812014 - DNA, 635 bp, Homo sapiens
aaaggagggggaaaatggaattgcaatgaaaaataaatccactttctctacatgccagtaaattataactctgcagccgcctcagaaaaagaacaaaagacacatggtggaacatttttctggctgaaaaaattgacaaagccgtggaaccaaattctttgcagcattgatgggggtggagggcagggatggggaacaagtgcaattctgcagaactgtgttctcacaattaccctaactcgataccaaaagtgttcacaggacacctttggggtaggaggaaaatgtctgctcctctccacacaaccttataaagacagaaaagaggaacacctttacatatccaaaatagaagataatattcaaataatacattcagggctttgtgttccaatgacacaaaatattctgctgctcatagtgtttctccttgaggaactctttctagccctgtggtcaggtctccccttcaaatcatcttgaagatcactctaaaatgtctgttctagcgatgtgagtcggtctgactgctgcaatggaggaagcggcaacacagaagctaggcagcctgggcttgcatcttagcccatcacttctctrctctgcccttcggcaagttactcaacctctccgaa

SEQ ID NO: 812015 - DNA, 568 bp, Homo sapiens
taacggtagtcaccatgttgtacactagtctccagaaatgattcattttctagctgctgaaccttcgcactttttgactgacatcttcctatttccaccccagcccctcagcccctggcaatgaccattctattccctgcttctgtgaggtcgattttttgagatgtcacatatgagtgagatcatgcagtgtttgtctttctatgcctggcttatttcatgtagcgtaatatcctccagattcattcgtgttgttgcaaatgacagaactttcttctttttaaggcttaatagtattccagtttgtacaatatcacattttctttatccattcatccactgatggacatttagggtgatcgcatatcttggctattgtgaatcatgctgcagtgaacactggagtgcggatacctcttcaacatactgatgtcatytccttcaggtatagacccagcagaggaattgctggatcatacggcagttctatttttaattttttgaggaaactccatactgtttcctatagcggccgcaccttttacatccccaccaacagtgtgtaggg

SEQ ID NO: 812016 - DNA, 650 bp, Homo sapiens
cacatggtgcgggactggcaggcagctccaccagcagccctggtgcaggatccactaggtgaagccagctgggctcctgagtcaggtggggacttggagaacctttatgtctagctaaaggactgtaaacacaccaatcagcactctgtgtctacctcaagatttgtaaacacaccaatcagcactctgtgtctacctcaaggtttgtaaacacaccaatcagcactctgtgtctagctcaaggtttctaaatgcaccaatcagcactctgtgtctacctaaaggtttctaaatgcactatcagtgctctgtgtctagctaatatagtggggacttggagaactttcatgtctagctagaggattgtaaatgcaccaatcagcactctgtgtctagctcagggattgtaaatgcaccaatcagtgctctgtgtctagttaatctagtgggaacttggagaacttttgtgtctacctaaaggattgtaaatgcaccaatcagcactctgtgtctagctcaaggtttgtaaaygcaccaatcagcaccctgtcaaaaaggaccaatcagctctctgtaaaacagaccaatcagctctctgtaaagtgggccaatcagcaggatgtgggtgtggtcagataagggaataaaag

SEQ ID NO: 812017 - DNA, 632 bp, Homo sapiens
ttcatttaggcaaaatgataatgaaaagatttcaaaaagaaaaaaacctttactctttgaaatggaagagactcagattccaagtaatcaaaagatctaataaagacagcatgagggccsggcgcggtggcacacgcctgtaatcccagcactttgagggggctgaggtgagtggatcacgaggtcaagagattgaggccatcctagccaacatggtgaaaccccatctctacgaaaaatacaaaaatcagctgggtgtggtagcacatgcctgtagtcccagctactatggaggctgaggcaggagaatcacttgaaccctggaggcgaaggttgcagtgagccaagatcgcgccactgcactccagcctgggacagagcaaaactctgtctcaaaaaaaaaaaaaaaaaaaaaaaaaggagcatgaggcacacaggatttctctctctctctcgcccctcttttttttcccctgcagtttactcaaaaggtgaacaaaaatctttttcttacaatctcttattaatactacacaaaaatattgtttaaaagagaagatcaattcctaaagtcacatgaacttgaaaagcatttggactatttatttaatttatgactacttgtatattta

SEQ ID NO: 812018 - DNA, 345 bp, Homo sapiens
ccaaccaatacaagaacgaatttacatattttattttaattcaaatttagaaagaataaaargacaaaaaagatgcttaccaccttcactcaattgggctctttagggagaggtattggaaaactgacctggtagagaaattcttaccttttttggagagctgttcatcagttgtcccaagatcaccttcataggctccacaatgaagagaatgatttgttatcctacttacagagccaaaactctagggagtcaatattttcccctgaaggcttgataatttaagcctgtaaaaaactgctaatagacagattaaaaagagaaaagggcacacacatttattaa

SEQ ID NO: 812019 - DNA, 586 bp, Homo sapiens
ccttctctttcaattccattactatttcacatttcagttttcatgtaggaaaaaaaaaataagtaggtttgatgttgtttcctgttctcagggaaggatttgtttctttatgtttaaagtgctttakattggacattgatgaaatagtggttcatattttgagtttacttcatgtttaaagaaatatgtatcaagatactgtcatccatcaagtgagtaaatggtgatgatgggtcaaaaccagcacctgaggatgtagactgaccttttctaattttatgtcaagaggatgatggacctagcaagagagagttggatcacagacgccatagaagaactgaaataagttctgtttttcttctattgttacatctctagcacaaaagtatctcctaagaagaccctttttcttatagctggttgtaattttttgttattgccttttaaatgtgggacacgttcattcatcaattcatttttttcatttgttgaatcaaggaggacgaaatgtttgatgtatttcttagattcaaatatcagattcataaggctgggagagaccttgtattgtttgttttcattctac

SEQ ID NO: 812020 - DNA, 575 bp, Homo sapiens
tgtccagaatttgaccactgcagagcttctcccttgccaccaccttcatccaagccaccgtcatctcttgcttggatcggggctgcaagtccctgttcctgagcttgttctcctctagtctacctaagagacagagtgatgctttgaaaatacaaaccacatcatcttagtcatcctttaaagcactccagtggttccccgatcttacttggtgtgaaaaacagttatttcatggtgggtcacgcctctaatcccagcactttaggaggcggagacaggatggtcccttgagtcctggagttcaagaacagcctgggcaacacagggagaccccacttctacaaaaaattgaaaattagctgggtgtggtagcgcaagccagtagtcccagctattcaagggctgaggtgagaggatcgcttgagccctggaggttgaggttgcagtgagccatgactgcaccactgcactccagcttgggtgagagagtgagamcttgtctcaaaaataaatagacacatgaatgaatgaatgaatgaatgaatacataaataaataaatgaaactgttaattc

SEQ ID NO: 812021 - DNA, 623 bp, Homo sapiens
gaaatccaggtgagagattatatcatccaaatgtagcacagaaataagaaaaacaytgaagatgataggaaggacaatttcacattacccacttcacctcttcccttccccaagctcacacagcacagtgtggtgagagatgccttccaagtgggggaaggagaacaaagtgagcacccaacttcactgtggacccagcaccagccctgccagtgactcatggtaccaaactgaccactgtgaaccaggcttcaggcccaccccagggccaagctggcccctaaggccccaagctccaaggcaatccctgcagacccgggcaccagtctagccccaccaacccagactataggcccactctagcaccaggctggccaccatagtgtgaggttcctggcccaccctattgccaggccatcccctactgacccagacccccaagccaaccccatggacccagacaacagactgaccctcagatacctagcttccagaccagcctctgcagacctaaactctagaactattccagtaccagaccaggcttggaatccccacatgccagaatggcacccacagaccaatgctccaggcccactccagtggacctcatcactaggttg

SEQ ID NO: 812022 - DNA, 541 bp, Homo sapiens
gtcttgcctctgtcttactgagtaagtgtaaacaaggcactttgccctgccacatctccattttctcaaatacaaaacagggaaaataatttctgcccagcctcctccacatgrcccctacaggattcagaggatgctgctggcagtgcagcactttgaaagtttatgaagttttccacataggcaagatgctgtacatgtctaagatctctcccctcccactttctttgcttacacaaccaggaagtgaaaagcagatgtggaaaccactctcaaactttgtgccagaccctcaaatcttgtgcctaggaaatgtcctccaactttccctcacaccaacagcatcattatcttggcatagaagaaaaaaaatctatacatctcttcaaatagacatctaatttccaattggcttcacctggaatgtgaaccataggaaacagaccacaaccaaattttccacaagcactgttttccatgcacacccaaaaccaagcaggaaagagaggaaatggaaaattcccctgggcacttagctctt

SEQ ID NO: 812023 - DNA, 541 bp, Homo sapiens
gtcttgcctctgtcttactgagtaagtgtaaacaaggcactttgccctgccacatctccattttctcaaatacaaaacagggaaaataatttctgcccagcctcctccacatggcccctacaggattcagaggatgctgctggcagtgcagcactttgaaagtttatgaagttttccacataggcaagatgctgtacatgtctaagatctctcccctcccactttctttgcttacacaaccaggaagtgaaaagcagatgtggaaaccactctcaaactttgtgccagaccctcaaatcttgtgcctaggaaatgtcctccaactttccctcacaccaacagcatcattatcttggcatagaagaaaaaaaatctatacatctcttcaaatagacatctaatttccaattggcttcacctggamtgtgaaccataggaaacagaccacaaccaaattttccacaagcactgttttccatgcacacccaaaaccaagcaggaaagagaggaaatggaaaattcccctgggcacttagctctt

SEQ ID NO: 812024 - DNA, 541 bp, Homo sapiens
gtcttgcctctgtcttactgagtaagtgtaaacaaggcactttgccctgccacatctccattttctcaaatacaaaacagggaaaataatttctgcccagcctcctccacatggcccctacaggattcagaggatgctgctggcagtgcagcactttgaaagtttatgaagttttccacataggcaagatgctgtacatgtctaagatctctcccctcccactttctttgcttacacaaccaggaagtgaaaagcagatgtggaaaccactctcaaactttgtgccagaccctcaaatcttgtgcctaggaaatgtcctccaactttccctcacaccaacagcatcattatcttggcatagaagaaaaaaaatctatacatctcttcaaatagacatctaatttccaattggcttcacctggaatgtgaaccataggaaacagaccacaaccaaattttccacaagcactgttttccatgcacacccaaaaccaagcaggaaagagaggaaatggaaaaytcccctgggcacttagctctt

SEQ ID NO: 812025 - DNA, 554 bp, Homo sapiens
ttctataactatatatttctccagattctaggaactgtccactgaaatcattttacattttaaatccattgtatttaggtttygtctttcccctacaagaactgaatctatctataaactaactacctagtattttcttggtgagtagccacttttattttcctaaagtgtacaggatggaaatttgaagaagatgtgcaaatcacaactacaaggcaggcaagtgagtaggggaggcttctaccctttcttctgttcctaatagaacccccttaaagctcaagaaagagatgtaagcagctagacattagagttcttccttcttttgcaaggaaaaaagggggaggggaagagagagagagactgattttctgagcactgacaggctttgtccttgatgaatttcattcttcctttgttctatgtgtgtaagaaggagggagagaattagaagaaagagtgacaaagaaattgacatccaatgggtatgcaaaagagaccctggctgaacttaccatttgagggcagggcgccaatgatctgtggccacccgt

SEQ ID NO: 812026 - DNA, 603 bp, Homo sapiens
tgtgccaagaaattaccacaaatccagcttttgctatccttgtattttcatttagattctaagagcaacaaaaccccttgatgttattatctcctatgaatactaattatctcactacaactgtgtgtctgctaatcttccagaaataatgtgagaattactgggatgcgataggagcagaatggaattagaaacctattttgtgaatttgtcaaaactaccagctttctaagagtggtaaaagcacacatccagaaattctttcataaaaggacaaattaccgcaatgaagataaatgatgattcttaatggctcactttgagtacagatgagttgctaggtcagggccagcattctgtgagttcttttatccttacaataagtttatttcacagaacctagtattttcatctcagagcaccagcttcaactccagataagacctggttttaatcatgcctaatggttctggttcctaggagaataagcatgaaggtgaaaatctcctctccagcagggaggggaataarcttgttctggggacgaggacctaatctgcccctctaaaagcaggaaaatatttatcacagcacagtgtctga

SEQ ID NO: 812027 - DNA, 543 bp, Homo sapiens
ccagccttttgggaggctgaagcaggcagattatgaggtcaagagatcaagaccatcctggccaacatggtgaaaccccatctctactaaaaatataaaaaattagccaggcatggtggctcacgcctgtagtccagctactcgggaggctgaggcaggagaaccacttgaacccaggaagcagaggttgcagtgagccgagatcatgccactgcactccaacctggtgacaaagtgagattctatctcaaaaaaacagaaaatggcaccgattaaaaaaaaagaatgaaataacataaacatcaaaaaacttctaaaattatcaaatagcttctaaaattatgcagaaatgaaaaactcattaggatagacgatagagtgaagagatatctcccaaaagacaaaaaggtgkaaaggagaaaaatatgttagcagacatgtccagaaggtataatatttaaacaaaaggaatttcagaaaggggacctgagaaaatgatgaaaggaacaattgactaaaaatcccaaaactgaaggatccaca

SEQ ID NO: 812028 - DNA, 552 bp, Homo sapiens
cccgatttctttcttaatacttagctcagatcagattaatagtataataggaacttaaggtgatgaagggaatggatcagaatgactttagagtctgcctctttagataggcaaatcagatacctctgatacccctctaccaccacctcttcttttagtctaatgactaaaagggtgccacttaggggaacaaattagacctatttgtcaagtgctatgatgggagatttagatggtattgtgggcagagaacctagtcaccagacaggatgaagaataggaaagagggcaaggaagtataaacaaattcaccatttaaaaatatggggcagggggcgggtgggccaggtgcagtggctcacgcctgcaatcccaccactttgggaggccgagatgggaggatcgctcaaggccaggagtttgagatagcctgcacaacatagygagaccctatctctatattaaaaaaaaaaaaaaaaaaaaaaaaaaatatatatatatatatatatatatatataaataaaataaaaatatatgggacaaaggaaggtg

SEQ ID NO: 812029 - DNA, 552 bp, Homo sapiens
cccgatttctttcttaatacttagctcagatcagattaatagtataataggaacttaaggtgatgaagggaatggatcagaatgactttagagtctgcctctttagataggcaaatcagatacctctgatacccctctaccaccacctcttcttttagtctaatgactaaaagggtgccacttaggggaacaaattagacctatttgtcaagtgctatgatgggagatttagatggtattgtgggcagagaacctagtcaccagacaggatgaagaataggaaagagggcaaggaagtataaacaaattcaccatttaaaaatatggggcagggggcgggtgggccaggtgcagtggctcacgcctgcaatcccaccactttgggaggccgagatgggaggatcgctcaaggccaggagtttgagatagcctgcacaacatagcgagaccctatctctatattaaaaaaaaaaaaaaaaaaaaaaaaaaatatatatatatatatwtatatatatataaataaaataaaaatatatgggacaaaggaaggtg

SEQ ID NO: 812030 - DNA, 448 bp, Homo sapiens
aatacagattcaaaatccaacaccttcagttaaaatctcaaacaaatgtacactctcttctcacatccttatgagccatgtgtgttcagttccctgacaagtactgtcacatggacatgtgtacacttcagaagccattctcccacacaatagcaaaaagtgaagaacaggttcatgacttgtctgcctatcacattccaggactgaaaacagaataaggtacacctatggtttagtgcgagttacctttggagattatgatattggtgggcctaaggagctggcaatctcaaattaggtgctagacaggtaaagaagactctgaagaggacaaagacagaaataagtgtgtgggtatgccatagtgactgtcatgttggtatytgtttctggatgctggttccagatcaatggggacacacagactgatgaccacatccatagtgct

SEQ ID NO: 812031 - DNA, 516 bp, Homo sapiens
gaatgcttttccctacggaggtttactgggaaggttcctttggagagagatgagctccacctccacaccagtctgcctgagtacactcaggcgtcytgactatgggttttggctcagagtcgttcccaggtggcccagatgagcacctcacatgagagggtaaatacaggcaggcagcccaagtgcactgctcacagaaagaaagcgatcgtctccaccagtaaatacccttcagtgctcacctccctcaggtctatgtcgtccatgcattccaccaggctgggtggacattttacagcaatgttcagtgtttacgtaagggaaaaggaggttgatattataaagtgctcagaataatgccgggcacaccataagtgttatatcaatgtttcttaaatgaatctttgcaaagccgtctcagtgaggatgacagcatggcactactttcttacagaatgccaaaaagactgaggaaatgatgcgagtagaagaaacaagtaaaggccctttgtagtg

SEQ ID NO: 812032 - DNA, 567 bp, Homo sapiens
tgagggaaggatcctgcatcgtcacctttctcttgtgcttgagagagggcctggacacagacaagtccccttgaagctaaaggaacctcccaggctctgcaactaccatctccccccgwgggaaaacaccaaattccacaaagccacaggccaatcctctcccctcccactccctgggcccggggagaggaagtcccacctttcccaagggtcaaggcttgcctgctttccaaatggccacttccaggatggctttccagaaaagtctccatgcaggcacacctatatgtttccagaaaagtctcaacgcagtccctgcagtctaaggccagcatcggcccatctcccaaagtcagtgtggtgtggcttaacacaccggctcaccctaaatgtgcactgaaggggccctgaactacaatgaaggggacgccccgagccagcaaaccccgaggggctgggcgtgccaggcagctgtggagccggtggaagcagtgaagttggcagcactggcatcgaatgccagccagggaaccaagaaaaggccactcttagtaagaaagtggtgac

SEQ ID NO: 812033 - DNA, 496 bp, Homo sapiens
ttacacagtactttacagattgctaagcaatcttcatatgcagtgtgctacttaatccttatcacaattcaattaggaccttcaatctgagttcttttccagacttcaytcactgcagttgtaggaaaaattcttcccttcaccttgaaaatattaactcagtcacttcatcttatagaaagaatacagcattgtctaatgactagaaaggtcagggaaacagaacaattttcaaagagaaagaaggattcagacatcaaaatatttattcaatggtgagaaaaaaaaatttgctatgaaaggacaaaaatttgtgtggatttccaaatgtttcctgcttgggtctggctggccctttgagctaataaggttcccctctagctggaagagaagcctgaagcctccaagtgatattttaattcaattagtgtcttaccaatttgatgcagcaaccaaggacctatggtgtctgattaatatgctgatgctaagacac

SEQ ID NO: 812034 - DNA, 386 bp, Homo sapiens
gaaccactttttttctgaaaaaaacaaaacccgaatgcatttttcatattagataaygcaacttgatttcttccattttttgtttcatttttatttaaagtttttcacaattgttactgcttgctaagagcataactatagcattatataagtgtttgctgtaatcatgactttttgtgcttttgtggaagaattaagtgtgggcaggaaggcaccttgggtggagcagaatgtacagatttgctagtcataagagcttttcctggtgtctgtagcacccactcccatcatggctctttacacagcatacaatgagctgttgcttacatttctgtctctcccatttgagggtgcataatgcaagatgaggcaagggctttcctagg

SEQ ID NO: 812035 - DNA, 552 bp, Homo sapiens
ttctatgccggtgtcatcctaaaacatactattatgtctttttagsccatgggagagaaatccttttctgttcataataatggtggggcagtgtcatttcaggtatgtatgctctttgtgtaaagcctcctagaatttctctctaccatgtaaaagggtaatttttttttagaggaattttgaatttaggaataacaacttaggtatgccctgtatcagtcacttaaatgcagtagctctccttataacaagcccacaaggtggatattgttacccatctacttatcaaatcagaagtctctgagagtgaataactttgtgactatctagtgtaggtgacacggtacagtttccaacccagtcctgcctggctgttcccatgacccctttgccccaatcccatgctacctcccattcaaagtgtgccagaagcatagtaccccattctgaaaggaccattgatgatgatttacggtgatgttgtaattttagagatgatttcacctagactcagaggctttgagtgacctgcttagctgtcagagttattaa

SEQ ID NO: 812036 - DNA, 523 bp, Homo sapiens
atccttttctgttcataataatggtggggcagtgtcatttcaggtatgtatgctctttgtgtaaagcctcctagaatttctctctaccatgtaaaagggtaatttttttttagaggaattttgaatttaggaataacaacttaggtatgccctgtatcagtcacttaaatgcagtagctctccttataacaagcccacaaggtggatattgttacccatctacttatcaaatcagaagtctctgagagtgaataactttgtgactatctagtgtaggtgacacggtacagtttccaacccagtcctgcctggctgttcccatgacccctttgccccaatcccatgctacctcccattcaaagtgtgccagaagcatagtaccccattctgaaaggaccattgatgatgatttayggtgatgttgtaattttagagatgatttcacctagactcagaggctttgagtgacctgcttagctgtcagagttattaattgcccatgagtgtttaggggcagcataat

SEQ ID NO: 812037 - DNA, 641 bp, Homo sapiens
gaaaagaggtttaattgattcacagttctgcagtatgtggcatcacaccarcatgttcttggcttctgataaaggcctcaggaaggttacaatcatagtggaaggcaaaagagagcaggcactctacatggtgaggcactctacacgggagccagagagagagagagagaagggggaggtcctagactcttttagacaactagatcttgcataaactgagcaagaactcactcgtcacccaggggatagtactgagccattcatgagggatctgctcccatgatctaatcatctcccaccaggctccatgtccaacattgggaaccacattccaacataagattaagaggggacaaatatccaaactatatcaatcacctacttttgttctgtagatagttgtgatcactaccggtagttttctgtggctttagaaattccctgccctaaagacaagaaataacaaaaatcagagctgaactgaaggagacacaaaaaatcactcaaaagatcaaagaaataggagtttgctttttgaaagaattaataaaatagactgctagctagactaataaagaagaaaagagagaaaatccaaataaacacagaaacaataagggggatgttaccactgaccccac

SEQ ID NO: 812038 - DNA, 618 bp, Homo sapiens
caatgtaaaacaacctcactgaattttattattatttataataataataatatttgtatttattacccttcttaaaacctacattctgtctgctgagtgcttatattattgagtagttactgtatacctaatactggtactatggtttggatattgtttgcttgtttcaccaaatctcatgttgaaatttgatccccagtggggagtgttgggaagtcttagtgggaggtgtttgggtcatagaggcagatccctcacaaatggcttggtgcccttttcacagtagtgtgtttgttcttgctctcacaagactggattggctctagggactagattagtttgcccaagagtagattgatataaggccaggttgtcccttggatttggtccctctttgccagggcccactttccctttgaccttctccatcatttttagatgcagcatgaaaagccctcaccagaagctaagcagacgctggtgtcatgcttyttgtacagcctgcagaaccatgggctaagtaaacctctcttttttaaattacccagcttcagatattcccttatggaaacacaaaatggactaagacactatgctaaatgcttgcatgtattagtt

SEQ ID NO: 812039 - DNA, 609 bp, Homo sapiens
catttcttgacaggattctattttgaaagaatgatgctcaatctgtaccttttatgcttcttgtttcttctccatcaataatatgtcagtcaactgcttgtcagagacacttagctgctgacaggtcctcataacctgactcaggtaaactgccaagagatgcttgcactggaatataaaacacacacacctattagaaacaggcagggccagggctggccagtctaaccaagatttctcattaccatcttatttggcaggagaagactagagcatacagattacggggtctctaactgattgtctaaaaagtgcagatgggccgggcatggtggctcacacctgtcatcccagcactttgggaggctgaggcggatggatcacttgagatcaggagttcgagaccagtctggctgatatggcaaaaccctgtctccactaaaaatacaaaaattagctgggtgtggcggtacatgcctgtaattccagctactcaggaggctgagscatgagaatcgcttgaacccaggaggtggaggttgcagtgagccgagatcacgccactgcactacagcctgggtgacagagccagactgtctcaaaaaataa

SEQ ID NO: 812040 - DNA, 592 bp, Homo sapiens
gatttccttgaggatggcagagctggacatgttcaggaaacctcagaaaaagagctgtatgtcactaagtcaggaagagggcccagaggtcagggtttctcatctggggccatcaataccggcctccttctagctctgtcagacacttggccccttctgggtactctggcagagtttggtaccattctctcacactgaagagagaccctcataggtagaggcattgcaagctgcaggctgtggctcacattgcaatgtagctgtatcagccatgatttttagttacaggcatcagccaactctggctgactgaagccgaagagagtttgatgcaaagaacactgggtggctggagaatcagtaggaatgctgacagtaaggctggagaataagcagcctggagcagcaccgagaatcacatggtggaaggagtctggagaaacttctactgcttcagccattgaatgttgggcactatcattggcatcacagtcacctctgtgcacaaacttgaacctgcagtagggagasagagaactccacccttcctgtgtctagctccagagtcaaaacccagggtggcacatggtgg

SEQ ID NO: 812041 - DNA, 498 bp, Homo sapiens
attatttcttcacattttttttttggacttcttcctgccctcttagggattccaattacatgtatattaggctccttaaatatgtgccacagctcactgatgctctgtttatttttactttttaaaaatatattttattttatttatttattttttgagacagagtctaactctgtcatctagactggagtgcagtggcatgattttggctcactgcaacctctgcctcctgagttcaaggtattctcctgtctcagccccgccgagtagctgggattacaggcactcgcccagctacatttttgtatttttggtagagactgggtttcaccatattggcaaggctggtctcgaactcctgacctcaggtgatccgcccacctcggcctcccagactgctggtattacaggcatgagccactgcacctggcctrtttttactttttttctgtttcacatttcatagattctattgctatgtctttgagttcattaatc

SEQ ID NO: 812042 - DNA, 503 bp, Homo sapiens
aactatatatttcaaaggtgtttttcattcatttaaccaatatttatttaatgaatactctgtgtaaatgtgtactactctgtgtgtatggtataccggagaatataatattggacaaaatagacatggtttctgccctaagcaaatacaacttactagaaaaggaaagtggtaaatgattctaaaataaacaatgattatcaacatagttcttataagagaaattgaagatcacttaagtccattttgtggcattagagattctttggagaatcatctaactgagatttgaaggatagataagaacaaggaaacctaagggaaaaaggaaagattattcttagtaaagagaatagcttgtgacatttaactgaawgggtagatgtaggtaagacgtaggagacaaattatagtaagacatgagaaacttaataaagaattgtttatttatgtgcctttcaaactaaaagaaatagaagttattgaaataagctttaagtgtc

SEQ ID NO: 812043 - DNA, 595 bp, Homo sapiens
tcctctctactccaataacctgaatacaatcattgccttaattgttgagatttttgtcttccatacttccatctatctcttagcttagtgttttttggaacccctggccatttccttttatattgtgctatttaccatttcatagctgctcctttctttagggggcaattttttctccttattttggttctaacatgtacaccattgtagtatgcacgttctttctttctttctttcttttttttttttttgaggtggagtctcgctctgctgcccaggctggagtgcagtggcatgatatcagctcactgcaacctcttcctcccaggttcaagagattctcctggctcagaatcccgagtagctggaattacaggcatggaccaccatgcctggctaatttttgtatttttagtagagttggggtttcaccatgttggccaggctggtctcgaactcctgacctcaggtgtaccacccacctttgcstcccagagtgttaggattacaggcgtgagccactgagtaggcacttttatgtgtatttttccacaataaaatctgaagttttctatatcaggaaccaatgccacat

SEQ ID NO: 812044 - DNA, 616 bp, Homo sapiens
tttgtgtaacggggtcatgtccaaaagattgtgttaatcctccacagctctgagaagtgttgttctaaagcaagaactcatagcttagtttgtttagtctgaaaaccgctaacaacawggaaattcatagataaatcttcaagtgaattcaccttcaagttacccttcaaaacctgggcttcttgtcaagccctccatctcctctgcctcaatctcttcttcctttcgttacagtataattagatctttcttctctgacattctaccaacactattttcatgatgccaccaatgtacacttttgcacctccctgctttgtaagtgcatctgaggattaaggtacattcaagacctgcccttctgtagaacatacttgctaggagtccttgtttcctctttgtgaagatctaatgacagctgacacattgaacactgtgttatttctctccaggtgcagggactttcttgagcctctagaactgctcttgtaaacggttttaatggtaggcctttgctactaatgttcacgtaataaatgcctacctgggtaatagaagacttatgtgtaaaagaagacattcaccataatctggtagtggagtttgggggatatca

SEQ ID NO: 812045 - DNA, 302 bp, Homo sapiens
acatgagatttggacagggacaaatatccaagctatatcacattgataaccaaaaaaaaaaagcaaacgagaaacagaaagaagcttccttaacctgataaaaggccatctatgaaaaaccaataggtaatatcacacttaatagtgacagactaaatgtatctatccttaagttcaggaacaagacaagaatgcacactctcatcacttctattaaacaycgtagcagaggtcctagccagggtaattggcaagaaaaataaataaaaggcatacagttggaaagaaaaaaaataaaacta

SEQ ID NO: 812046 - DNA, 554 bp, Homo sapiens
ttaaagctactgagattcaaggggtggtgacatagatcccacttctcaatgagaaaatrtcaaataatttgaggccatttttaatccactgtaccagctaagatgatctcctgggaggcaaaacatttatttcctattagcatatatactccctcctaaatatctttattatttatataatacttatagtgaaaataattaatttttactgtactgccaatacagaatatgaaatattggcatattcattcttaaagaccataaattattttcattcttaacacttcaaaaataatatgcaattttagctacattaacttcaattacattgaataactgttaaacccacatgaaagcttcaagatgaaataaaactgaaagatgtacttgcaaattccagaccacctagtttgcagctgtgctaggtgttaaaaacatctctcctgttctgacacccagcatacaccagcaaccttcttgaaggattttgaactttagagatacaccacacactgaatctgggaaatctcaccaacctgcaaatttttctattt

SEQ ID NO: 812047 - DNA, 480 bp, Homo sapiens
gcaggaatggtgttaaaaggawtcttagaggtggtgccggttaggaggaggaaggaagccgttgcatgccaggtatggtgtcaccacacatatttcgtcctggtagtgatcctgtgaattaccctccgtgaccatgctttgtggttgagcacagtgagtccctgtctgggcaagggatgatgtagcagcaaatggccgagctggctaggagtcacacccaggcctcctttgtctacgttggattactttttctgtgtctaccagcattagaaaatgagaaaagtgtcattatttgcaggaacatagggcatttcaggttaggaaggaagcaagagtgaaagtctaggatagaggtgaacatgaaccaggatattcggggaacgatgatcagacagtccagctggagtggggagtgctggtgtagggtggggaaggaaaggttggcaagaagtcacgcccttctgcccgactgaggaattg

SEQ ID NO: 812048 - DNA, 597 bp, Homo sapiens
tttctctgcaatattcactcataatctttcattctatytgaagttaaatttagattccataaacattatagtatgcattttattcttcaaagcacctgtgtgcccacatatgcaggtaagtgtatccatgtgttgttccatttgtgtgtggatcttcgtgttctctgtaggaatgtctgtttaattcataattaaagaataatacatatgctacatatgcgcatagctcagataaaacaacagggaaggagaagaagatggtacattgattaatggtctaaaagtctaaagcttggcagcatcactgacagaaataaaaatgtggcagaggcggttttaaaagaggcctaggtgtctaacactgtgattactaagactgaattgactagaatattgccaagtgaaggatgtttccccttagtttcccttatgtccatgttatattaacttactattctttttttaaatgtatccacacaacttaggttctatactcagaaactagatagctgctatttaatatccaaccaccatttgattggatcacttctataggttatcaaaacaatgttattattcttttgcaatgtagtaaac

SEQ ID NO: 812049 - DNA, 597 bp, Homo sapiens
tttctctgcaatattcactcataatctttcattctatttgaagttaaatttagattccataaacattatagtatgcattttattcttcaaagcacctgtgtgcccacatatgcaggtaagtgtatccatgtgttgttccatttgtgtgtggatcttcgtgttctctgtaggaatgtctgtttaattcataattaaagaataatacatatgctacatatgcgcatagctcagataaaacaacagggaaggagaagaagatggtacattgattaatggtctaaaagtctaaagcttggcagcatcactgacagaaataaaaatgtggcagaggcggttttaaaagaggcctaggtgtctaacactgtgattactaagactgaattgactagaatattgccaagtgaaggatgtttccccttagtttcccttatgtccatgttatattaacttactattctttttttaaatgtatccacamaacttaggttctatactcagaaactagatagctgctatttaatatccaaccaccatttgattggatcacttctataggttatcaaaacaatgttattattcttttgcaatgtagtaaac

SEQ ID NO: 812050 - DNA, 572 bp, Homo sapiens
ataaagccaactgactaaacttaactcacatcacagttaaaggaacattagccctcacacataagaaagtttcaatccaagaactcgaatctcaaaargccagtgtgttcccttaactgcaaaagaacccactagaaccctagaaatggttcttggtcagactgagatgactgaaatgatggacatagaattcagaatctggatggcaagaaagctcatcaggattaaggagaaagttgaaaccaaatccaaggaatgtaataaatttgtaaaaaatgatctaggagctaaaagatgaaatagccattttacaaaataacaaaactaagcttctagaactgaagaatttacgtcaagaatttcacaatacagttagaagcatcaacattagactagatcaagctgaagaaagaatttcagagattgaaggctggtttttcaaatcaactcagtcagacaaaaataaagaaaaaagaattcagaaacctgaacaaaacctctgagaaatatgcgattacataaagagaccaaatatatgactcactggcatttctgagagagaagaagagaga

SEQ ID NO: 812051 - DNA, 334 bp, Homo sapiens
tgtgcttaaaggcagacgttatgttatgtgtggttatcacacattaaaatattaaagccagttgaaactttaagaggtgatgggtatgtccctcgccgtaatggtggtgatggtttcaaggatgtatgcctgtttcaaaactcatcatgtgtatacattaaatgtctacagcttttacattttaatcatacttcaataaagtggttaaaacataaggaaagtraatttaaaaaaaagatccctttgcctctataaccttgtggacaccaagggatccataaaatctccaaagtttcttcaagggaggcacattccagagagaagattgctgagt

SEQ ID NO: 812052 - DNA, 504 bp, Homo sapiens
agacctctccttgtctgtgcacggactggtggctgactctggagcccagactgttgctggtgaatccttcatagtctggtgagtgtgtatatatatatwtttttttcgcttcggcgacttcccgttgcaatttgcttattatatcaatgtgcttttttttttttttttttttttttttttttatggagtcttgctctgtctcccaggctggagtgcagtggcgcgatctcagctcactgcaacctccgcctcccaggttcaagcgattcttccgcttcagtctcccaagtagctgggattacaggcacgggccaccacacccttctaatttttgtatttttagtagagacagggtttcaccgtgttagccaggatggtctcgatctcctgacctcgtgatctgcctgccttggcctcccaaagtgctgggattacaggcatgagccaccgcgccgggcctcaatttgcttattatagtaatttgcttattatatcatttgctta

SEQ ID NO: 812053 - DNA, 566 bp, Homo sapiens
atacatgcatacaatgtgtataatagtcaaatcagggtaattagcacatccatcacctaaaacatttatcatttctytatgtggtgaagattcaaaatcctctcctctagcttttcaaaaacacacaatagatttttttttttctagccacttatgtagctacaaaaatagtactggagtaggggcagggtcttgctctgtcacccaggctggagtgcagtggcacaatcatagctcactgcagccttaaaaccctgggctcaagtgatcctccacctcagtctctggagtagctgaggcatgtgcagccacactccttttatttatttatttgttttgtggaaacaaggtcacactatgttgcccaggcaaactcctggcctcaagatacagagaattaaaaagcacaatcaagtaacctaactgacatttataaaccatttcttacacctaagagtaggatatttcacataatacccaatataattcttttcaagtgctgggttataaaataagttttaataaaaatctaaggctttaaattatactaagtatattccatgacc

SEQ ID NO: 812054 - DNA, 566 bp, Homo sapiens
atacatgcatacaatgtgtataatagtcaaatcagggtaattagcacatccatcacctaaaacatttatcatttctctrtgtggtgaagattcaaaatcctctcctctagcttttcaaaaacacacaatagatttttttttttctagccacttatgtagctacaaaaatagtactggagtaggggcagggtcttgctctgtcacccaggctggagtgcagtggcacaatcatagctcactgcagccttaaaaccctgggctcaagtgatcctccacctcagtctctggagtagctgaggcatgtgcagccacactccttttatttatttatttgttttgtggaaacaaggtcacactatgttgcccaggcaaactcctggcctcaagatacagagaattaaaaagcacaatcaagtaacctaactgacatttataaaccatttcttacacctaagagtaggatatttcacataatacccaatataattcttttcaagtgctgggttataaaataagttttaataaaaatctaaggctttaaattatactaagtatattccatgacc

SEQ ID NO: 812055 - DNA, 542 bp, Homo sapiens
gagggggaggggatataaagagcaaagcagaacaaagaataaaaagaaatattggaaacaaagctcgatccaggagtttttcaaaaatattatcccagtgaaaaagagggaataaaggataatgtaaaacttaaaaagacatttttcaatctagcttcaaatgagggcagtttctatgtgtcaaatcatcagccagttaataaatagtgccttgcctagaattcagagcccagagcccaggacgacctagggtattacaattgaaaaggagatgggaatggaaagagagctcaataggagagggccatgaggctccgagaagtcagtttacagagatgcaagcaagcaggctttcttctctgtctgatggcaattttgaatgttaggtttatcttctgactgcaaaggaagagcaattgaaattcacaagcatttctttacttaytttgaatatgataccattcagagagtaatcacgaaccctcccactcagacataatcactgctctctgagtttagctcctaaaatgttaattaaaaca

SEQ ID NO: 812056 - DNA, 625 bp, Homo sapiens
caatgagaaaaataggaaaaattgtaataaaagtactaacctattcacttcccattgctacttgtccttgctgtgctttggttatagcagttgtagtataagcaaaattatgtaagggaagaaattgctgttgtgtaagaaacaaaacactgtaccttaattctttgtggcctttcatataatcaaaagttaatgttgttcattaatcttgtgtatttttatgaaaggctaaatatttgtttgcccagaccaaccagaatcttttgtttcctctagattgtgataccattcttcagtctcttaatcaaagatatttatttcctcaatgagggttgtgccaaccgccttcccaatggccatgtcaattttgaggtgagtgtgataaagtaggatacaaaaatccaagcacaaggagaggggcagcttctccagcaccgcattcctggccaggcagccaaagccaattctgcagtttcagaacaaattatctctttccatattattttgttagaaattaacaataccaagtagaagagaatagctgagccattatgatgatgattattactatytgagggaacttgagaacatttttttacctcacaaatagagttttattaaatga

SEQ ID NO: 812057 - DNA, 644 bp, Homo sapiens
tgaagaacaacagaatcatgggttaatccagtcagtatggtcaatcttgtagctttatgtagacacmgcttccaagtttttgttttctcatacacaagctcttaaaaacggtcacaaccaacaaacaaacaaatcttagatagacttacaactttcacctctacctccttataacatttggcaatttagagagttattaccagcttctccagtcttcctgcaaaatccctacttcttccttaaatttagaagaaaatgtcagaattccgaaggagactgcattccacattccatttcattgtaaaaacagcagtgccatctgatttatgctccctctgtgacatgtaaaaggaaggcactgctcatagagcaacacattaattaccaccgctgtcttctctatgcacattagagctttctcttagtttctgatcaaaggaaaaaggaacaataagaaatgatttggaacctgaagcccaggaaatgaagaatgtttcgtttggaaatatctcgcacagtcgttttgaatctatatcccagtcctggattactggggactgatagaccgtggttgttcctgtgtcattcaataaatgcaagcaaatatttaaaagaatccactgtgactgaatgttgatttggcc

SEQ ID NO: 812058 - DNA, 607 bp, Homo sapiens
ttctgagtggccagtgtttcatttaacagctcatctgccaatggattgtgtcacagaaatatgtgaascagacaatgtgttgtgaaatgaatggatttaccaaccaggggaccagccctgtgccctgctcattaggaacaatttgcatgcagaacatccgtgcgacaggcccagcaagggatttgtttagctcatttagagtaatggagacaagagattaatcacttgaacacttgtgtgccttgcctctgcagccccactgtgcactgtgacccagctgagcctgatttgatgggatcttgtctctgatttcagtgcactgacagtgctctcacttgtgtctcaaaccttcggggtctggcctggggcttccacccacaaacagtgtggacctacccaccacatggaccagaggagtgactcagaaatcagtcacatcagtcacatttgtcttcagttcttccctagctcatttcttaattcctcatattcactgggttttgaatcacaagtggccttcaggtcaggttttctctaactcacatgggcaccctacctgtgcctgctccagttcttcacttcttctctccaatgcagcagaaacagt

SEQ ID NO: 812059 - DNA, 616 bp, Homo sapiens
tattgcgagtaatatcatccccgccccccggataatacgaacaatatgatagaggaatgtacaccctctgcagtattgggactaatattattccctttctccctgcatattacgtacaatatcactgcggggtgcacacaccctgtgatattggatgtaatatcatcccctctccttctaatattacaaaccatattatagggagtgtattcccactgtgatattgagggtaatatcatctcctcccctcctggatattatgaaaaatgtaacagagggtgtacaccttctgcgatattggaggtaatatcatccctttgtctaataagaagaagtaatatcatcttcttctcccactgaatattattaacaacatcacagggggtttacacaccctgtgatattgggagtaatatcatcctctcgccccctagatattaccaacaatatcacaagcagacgtacacctcctatgaacaatatcacaggaaggagtacaccccctacgatattgagagtgatatyatccccttttttttctagatattttgaagaatatcacaggggagtatacaccccctgcgatattggaagtaatatcattccctacccttcc

SEQ ID NO: 812060 - DNA, 628 bp, Homo sapiens
gattgctttgtcaatttaggctcttttttggttccctactaattttaggattgtttttctaattctgtggaaaatgactttggtattttgataggagttgcattgtatctgtagattactttgggcagtatgtgcatgttaatgatgtcaattcttctgattcatattcatgggatgtttttctatttgcttgtgtcatctattatttctttcatcagtgttttgtagttttatttgtagagatctttcactgccttggttaaatatattccaaagtattttattttattttttattttttgtagctattgtaactgggattggcttctagatttaattctcagctaggtcattattggtgtatagaaatgctactgattcttgggccgagtgcggtggctcactcctataatcccaacactttgggaggctgaggggggtggggtggatcacgaggtcaggagttcgagacaagcctgaccaacatggtgaaaccctgtctctaaaaaaaaaatacaaaaattagctgggtgcagtggtctgtgcctgtagtcccagctrcttgggaggctgaggtaggagaattgcttggactaagcagaggttgcagtgagcagagactgcacca

SEQ ID NO: 812061 - DNA, 548 bp, Homo sapiens
tttaatgttattttactattcatcttaactgttatctcaggttccattctattcttctgaccataattttccatttaaatattatctgttaaaaatcactatccttggttarttataatagaaacaaacatcttagtatgacatacaagacactttatttcatctgtgaaagacactctcgaagcccaagttgaactataatgaactcttgtaggacttgtagcaaaccctatttgcccataaggtggcagtaaagcattgctctttagaccaacaactttgacaatacttttggccaacttgtcatataacaatatgattttggggaaattgctagatctctatgagctgcagatttcttatcatctaacatggtaatatccttctccccaggaagatgaaagctcctaacatactcagccttgacgtttattcaggtgtcacattggatgagagtattgggaaatgtttctaactaatggaatatttgtaactaacgaatggactaaatattactcttctaatcctatggagtttttttctttctg

SEQ ID NO: 812062 - DNA, 607 bp, Homo sapiens
ggcaaaagctggaaccataccccttgagaaccgaaacaagaccaggatgaccactcccgccattttaattcaacatggtactggaagtcctagccaaagcaatcaggcaagagaaggaaataaaaggcattaaaattggaaaagaagtagtgatactgtctctctttgctgatgaaataattttatacatagaaaaccctaaagactctgtcagaaggctcctgaaactgataaacaaattcaataaagtttcgggattaaaaaaatgtacacaaattagtaacatttctatgcaccactaacattctagctgagaactaaatcaagaacacaattccatttacactagccacaaagaaaataaaatacctaggaatccatctaaccaagaaggtgaaaattctctacaaggagaactacaaaacacttctgaaagaaataagaaatgatacaaacaaatggaagaatattccatgctcatgaattaggagaacaaatagttaaaatcgccatacttccaaaaacaaattgcagastcaatgctatccatttcaaaatgcaatgtcatttttcacgaaattataaaaatttattctaaaatgtattt

SEQ ID NO: 812063 - DNA, 446 bp, Homo sapiens
attgatctgttcatgatggatccacctccatgacccaaacamctcccaagaggcccaacctcccaccctgggggttacatttcaatgtgaggtttgaaggggtcaaacatctaaactaaagcagttgtatcctcagcacgttctatggttactacaactgagaaagcaggaggaagctaggtctcccgccatctgggtgcttgtcctaaagagacgttgtatgtggttacctgtcaatcaagaaatgtgagacaattcatatagaggaactgctatgattagcttcttattggtgtcttgtcttcctccaggtaactccagacacctgcacgttctgattgggacctcagtggtcatcatcccctttgctatcctcctcttctttctccttcatcgctggtgtgccaacaaaaagagtaagtctcacgaagcagaagccagagagc

SEQ ID NO: 812064 - DNA, 446 bp, Homo sapiens
attgatctgttcatgatggatccacctccatgacccaaacaactcccaagaggcccaacctcccaccctgggggttacatttcaatgtgaggtttgaagkggtcaaacatctaaactaaagcagttgtatcctcagcacgttctatggttactacaactgagaaagcaggaggaagctaggtctcccgccatctgggtgcttgtcctaaagagacgttgtatgtggttacctgtcaatcaagaaatgtgagacaattcatatagaggaactgctatgattagcttcttattggtgtcttgtcttcctccaggtaactccagacacctgcacgttctgattgggacctcagtggtcatcatcccctttgctatcctcctcttctttctccttcatcgctggtgtgccaacaaaaagagtaagtctcacgaagcagaagccagagagc

SEQ ID NO: 812065 - DNA, 446 bp, Homo sapiens
attgatctgttcatgatggatccacctccatgacccaaacaactcccaagaggcccaacctcccaccctgggggttacatttcaatgtgaggtttgaaggggtcaaacatctaaactaaagcagttgtatcctcagcacgttctatggttactacaactgagaaagcaggaggaagctaggtctcccgccatctgggtgcttgtcctaaagagacgttgtatgtggttacctgtcaatcaagaaatgtgagacaattcatatagaggaactgctatgattagcttcttattggtgtcttgtcttcctccaggtaactccagayacctgcacgttctgattgggacctcagtggtcatcatcccctttgctatcctcctcttctttctccttcatcgctggtgtgccaacaaaaagagtaagtctcacgaagcagaagccagagagc

SEQ ID NO: 812066 - DNA, 446 bp, Homo sapiens
attgatctgttcatgatggatccacctccatgacccaaacaactcccaagaggcccaacctcccaccctgggggttacatttcaatgtgaggtttgaaggggtcaaacatctaaactaaagcagttgtatcctcagcacgttctatggttactacaactgagaaagcaggaggaagctaggtctcccgccatctgggtgcttgtcctaaagagacgttgtatgtggttacctgtcaatcaagaaatgtgagacaattcatatagaggaactgctatgattagcttcttattggtgtcttgtcttcctccaggtaactccagacacctgcacgytctgattgggacctcagtggtcatcatcccctttgctatcctcctcttctttctccttcatcgctggtgtgccaacaaaaagagtaagtctcacgaagcagaagccagagagc

SEQ ID NO: 812067 - DNA, 623 bp, Homo sapiens
actattatcagccgtatgtctaataaaagggaaatgacaaattaaataatagcatacccacaaagagacattctcaaaaaacactccaagtgacaktttagtgattgtaataaaaatggaaaactcctcatgtaagagaagtataaaaaatgaacatccagaagtatgtgcaattgaaaaatataaaattatgcaaattaaatatttgtatttttatctcattttcttttttaagatatagtatataagatattatctcttattttataggaacttggaaaagatttcaaaataaaaaggtgaagaaaaatgatagccctgaactttctgctgcttagctttttttatcttcatactatgagatagacaaatgtttgtatatatacttatttgatttccttgttctcactttaaacattttgaacaagacatacaaaagagaaaataaaggaaacaaaaagctcgtaattttgccaactagaaatgaccaccactaatattttagagtgtttctttcagcttttcattgcattatattttcatggttgaaatcaggctccgtataccgttattttaacaacaacataaaatgtcaacacaagattagttataggagatacgtt

SEQ ID NO: 812068 - DNA, 623 bp, Homo sapiens
actattatcagccgtatgtctaataaaagggaaatgacaaattaaataatagcatacccacaaagagacattctcaaaaaacactccaagtgacattttagtgattgtaataaaaatggaaaactcctcatgtaagagaagtataaaaaatgaacatccagaagtatgtgcaattgaaaaatataaaattatgcaaattaaatatttgtatttttatctcattttcttttttaagatatagtatataagatattatctcttattttataggaacttggaaaagatttcaaaataaaaaggtgaagaaaaatgatagccctgaactttctgctgcttagctttttttatcttcatactatgagatagacaaatgtttgtatatatacttatttgatttccttgttctcactttaaacattttgaacaagacatacaaaagagaaaataaaggaaacaaaaagctcgtaattttgccaactagaaatgaccaccactaatattttagagtgtttcttwcagcttttcattgcattatattttcatggttgaaatcaggctccgtataccgttattttaacaacaacataaaatgtcaacacaagattagttataggagatacgtt

SEQ ID NO: 812069 - DNA, 598 bp, Homo sapiens
aacacatccaaagcagaattcactacttttcttgctaagccactattatattcttactttctgcaaatagtctcaatttcttaatggtagaaacaactaggatgtttttcactctttcctctccttcacagcctgtcagtaaccaagccctattgattctactgattaaatagctttgaaatcctcccactctctgctgcagccttttttaatttagattttctaattttattttctggaagacggcatcagccttctctctggtctttccaatttcaatttattttcattgtgttattccatctatcacttggttaccagaataggtattcttaaattgaaatctaataggacttcatcctggctcaaaggtgtgctatactttaaacatggctttagaaacaaactgcctgagaactgccacttagtatctttgtgagctcagtggaattatctctcagttcctcaatcgactcatgtggtgaccatsagtatgtgcctctcagatctctggctgcagggaatcacaggacttctctcatagctgtctctggcatgaagatttcccattgaccttgtggaacttcctctgaccgta

SEQ ID NO: 812070 - DNA, 514 bp, Homo sapiens
ctcattttcatatccagctgattatttttagtctgtgtttccacagacctggttatcttcttactctaatactcataaatgaacaatgataatgayaacaaaactttccatttgtgtttatttattaaacaaatttttttgatcacctgcactgttctaagcactgaagaaatagtaacaaacaaaacagacaaaaataaaacaaaacaaatacacaaaggctcacctgcctttatggagctcacataccaggagggtgagatagataacaaataaataaatgcgtaagatgttatatggtgattagtattgtggagaaaggtaggaaaaaaaagcagcaagagaatataaagtcctcagggtccagggagtgtaaacttttaaaatagggaaaaatagagaaagccttactgggaagaagacatttgaagaagtacctgatatagatgaaaggatgaagcagaaggtatctcaagaatggcatatcagacagaaaatactaagtctttgagat

SEQ ID NO: 812071 - DNA, 623 bp, Homo sapiens
ctctaaacggtgaattacaatacacactgaaagaaaccaatggaaaaatgttccatgcttatggattggaagaatcaatatcattaaaatggacatactgcccaaagcaatctataaattcactgctgttcctrtcaagctaccaatgtcattttttcacagaatggaacagaatagagaattcagaaataaagctgcacaactagagccatctggtctttgacaaagttgatgaaaattgcaatggagaaaacactcactagtcaataagtggtactggaataactggctagctgtaagcagaagaatgaaactcaagatggattaaagaaagatttaattgtaagatctcagattataaggatcctagaagaaaacctagaatacactattctggatatcagccttgggaaaacatttatgcctaagtcctcaaaagcaattgcaacaaaaataaaaattgacaagtgagacaaacagtttctgcaagcaaaactatcaacagagtaaacagacaatccacagaatgggagaaaataatcacaaactatgcacctgacaaaggtctaatatgcagaatctataaggaacttagttcaacaagtcaaaaataaccccattga

SEQ ID NO: 812072 - DNA, 531 bp, Homo sapiens
cctcaaaagcaattgcaacaaaaataaaaattgacaagtgagacaaacagtttctgcaagcaaaactatcaacagagtaaacagacaatccacagratgggagaaaataatcacaaactatgcacctgacaaaggtctaatatgcagaatctataaggaacttagttcaacaagtcaaaaataaccccattgaaaaatgggtaaaatacatgaacagacgtctcaaaagaagacatacaagtggccaagaaatgtgaaaacatgctcatcatcactaatcagataaccaaatcaaaaccacagtcagatatatttcacgccagtcagaatggctagtattaaaaacttaagaaaacaacagatgctgctgaggctgtggtgaaaagggaatgctaatacactattggtgggaatgtaagtcattcagttcagccactgtggaaagcagtttggagacttctcaaagaacttagaactggtattggacctggcaatcccattacagggtatatatccaaaagaaaatgaatc

SEQ ID NO: 812073 - DNA, 585 bp, Homo sapiens
ttgtgtatttgtttgtttttctgttktctcctgtatcagtcctcaggcaatcctgaaacaatggggctcacaggactaaatctctgagaaaagataaactcttcggaatagaggagcagtggtcccaagagggtgagacaagctcctatttccttttgttctctgtcttcctgttgcttggtcttgaatgagggcatactcatgggaagtgtgaagctaaaggaagataaataaaacctggctttctggccagaggacagataagagaaacctaagggaaccagaaagggctggagagatcatagagaggaaagagctcaggaaagcaacctcataaagtagtaagctgtgcatgtatagatctgacactaaatagcatatcaaagacattaagatctaaactaaagaatagataagtgccaaagtcccatctagccatttactggtgcacacatggaacacataggagtagcactacaaatgctttgaaaacataactgacactgaaaccaaaactcacaaaaagcaggttaaaatgtatgacctgaatacaactgggtaaattgtatactaaaacaaaaatac

SEQ ID NO: 812074 - DNA, 467 bp, Homo sapiens
ttcttctctttgaaaagaaatacatgtgacagtggggagagagggggaaccccatagatgtgttattatacctatttaccttctgaagtgcctgccgtatwgatgcaagttttaaaaggtttatcaccatgcttatactgcttactaataattcattgctgaccatacctttacggcatctctctacttggtgagccatttcagaaggatgagttgaaacaataatgggagatgtagggcagttattcttgaagactgcgaatggaagctcgctaaattattgtgtatttctgtcagcattttataaacttgttgtccagctttcctccttagtgcaaaaaaatgctgagctgtgaaaactgtttagtagcactcctttgggtctggatagagctgtggattccaatacaaatatgaatggattaaatgcatactaactacccaaagtgggaaactataatgagggg

SEQ ID NO: 812075 - DNA, 620 bp, Homo sapiens
cagacacctgtaatcccagctactcaggaggctgaggcaggagaatcacttgaacccaagaggcggaggttacagtgagccaaaatcgtgccattgcactccagcctaggtggcaagagcaagtctccacctaaaaagaaaggaaggagtggaggggaggggaggggaggggagtcctggtttgcttgggactgttccagctttagccctgaaagccctttgtcccaggaaactcctcaggtccaggcaaactgggactgtcggtcaccataagttaggataattcttccttccccaggaatgtgaagagcatgctcagtggaagcctgtgttgagactgcttctgtagctgaagaaaggttttgcctttatgtgcctgatttccttccttcctgcctgccttccttccttatttccttccttccttccttctcccttccattcccttcgactgttggtcactctgatcctagaggtgagggtgggcggkctgaagtctctctgttgcagaatggaatgcacttcagccagttctagtgagtatataagggaacgaccttcatcattccacaagaattcactgagcacctatgatgtgccaggtgcttggcaataacagt

SEQ ID NO: 812076 - DNA, 607 bp, Homo sapiens
ccccttgtactttctgatcaatttttctgtgacctaaaatttctcaataataataataataatgtacctttgaaaggaataaaaacagaaaaaagaaatatctatctaaaagttgtaattgctgtgctatttatacataacgaggacaatgtgggctagtgaggctaaataccttacccaaattcactcatttagtaactgaggcaaatggaattcaaatataagcagactggcttaagaaattgaagtaatagggaggttccaagatggctgaataggaacagctctagtctacagctcccagcataagcgatgcaggagacgggtgatttctgcatttccaactgagcctccactggtgatacccagggaaacagggtctggagtggacctccagcaaaatccaacagacctgcagctgagggtcctgactgctagaaggaaaactaacaaacagaaaggacatccataccaaraccccatctgtacatcgccatcatcaaagatcaaaggtagataaaaccacaaagatggggaaaaagcagagcagaaaagctgaaaattctaaaaatcagagcgcctcttctcctccaaaggaacgcagctc

SEQ ID NO: 812077 - DNA, 598 bp, Homo sapiens
ggatcctgttgatctgtgaccttacccccaaccctgtgctctctgaaacatgtgctgtgtccactcagggttaaatggattaagggcggtgcaagatgtgctttgttaaacagatgcttgaaggcagcatgctcgttttaagagtcatcaccactccctaacctcaagtacccagggacacaaacactgcggaaggccgcagggttctctgcctaggaaaaccagagacctttgttcacttgtttttctgctgaccttccctccactattgtcctgtgaccctgccaaatacccctctgcaagaaacacccaagaatgatcaataaaaaaattaattaattaattaattaaaaaaaagaaaatctgagcagaataatttatagaaacataaaaaaaagagtcaagacccatcagtgtgctgtattcaggaaacccatctcacgggcagagacacacacaggctcaaaataaagggatggagatctaccragcaaatggaaaacaaacaaacaaaaaaagcagggcttgcaatcttagtctctgataaaacagactttaaaccaacaaagatcaaaagagacaaagaaggccattacat

SEQ ID NO: 812078 - DNA, 661 bp, Homo sapiens
tgttaattgcaaacatgtcaatattttgtagcaggaattctgggttttgaaagcaagagaaaaggacatttcccttaagaacgacaaattcctgaaatacctgtggaagaaaaatgacatcttaactacagtacgactgacccatgaactccacaggtttgaactgtgcagctctacatacatacagcttatttttcgactaaatgccatttggaaatacaatcttctcaggatgcaaaatttgcatattcagagggcatactttttgtaaatgtgtgttttgtagggctgactgctgggcttgagtatgtgcagatttggtcatacctgggggttctgtaaccagtcccccacgtgtaccaagggactgtattttcttcacttgaatatgtgtcatagtacatgatttaaactactttcaatttctgtcttaatcctgttttgaactaaactaagtatgcttctctaggattcaagtgttcactgtatgaggtaaattaactcttccagtgctctagggtagcaattaatgccccagaggaggtaaattgctaaatggtaccccacagctttcggaagactgattctgtgtcgaatggttatgttcctctctggtggagaktagattactcccagtggttctttataggtcaggatccat

SEQ ID NO: 812079 - DNA, 558 bp, Homo sapiens
aaaattcctattgctaattgacatcttgatgattctgaccttgtgtatgccaaggctaataatgtgtatttttgtgtctaagtttttaagaaagaagttttcaaagttaaagttctcaaaatattaaaagcttacagaataacgatagaaagaaaacatttttgtacagctgtacaatgtgcttgtgttttaagctgttatcacaagagtccaaaagttttaaaaaaagtttatataatggaaaagttatagtaaggtaaatttattattgaagaaagaaaaatattctttttttaaatttagtggagcctaagtgcatagtgtttatgaaatctatagtagtgtacagtaatattctaggccttcacattcactcaccactcactcacccactcacccagagcaacttccagtcctgtaagctctgtttatsggaagtgccctatacaagtgtaccatttaaaaatcttttataccatatttttattgtacctttcctatgtttagatatgtttagatatacaaatacttggaattatgttacaattgcttacagta

SEQ ID NO: 812080 - DNA, 623 bp, Homo sapiens
ccctggcaaaaaatcaagtagctctttgctgctgaygcactaggcagtaagcaccgcctggtatgaaattctattaagcagaaagatccttttacttgcacttcgcactttgtcagatcttggtcagtgaagcctaagtgaaatcaaattattaagtggcaaagcagaaaggctcacgcttctccaacattagtctgactttcgtttctctgtgtcaccttttccccttttcttgtcccattcatccacgcccctccactgtcactagggtgacatgatccaggggactgcacattaaagtgtaagggacctcatgtcccttctaaaagaggatgcagagaaagcgcaatgttgaatgaaaggaaaaagttgctaaggatgaaactgtgggaatcaattatatacatatgtgtgtgtgtataacgaggtataaatcagtgcctgtattaagaataagactgtgccagcctttatacccgcttctttggtagggggggtagagtggtagagggtattgatctaattgcctattccataattttcctaagactggcactgcatattcataattacgactagggatactgaactattttttgagtattcatagatattacgctcag

SEQ ID NO: 812081 - DNA, 642 bp, Homo sapiens
tgtagaccacaaccagtctccaaatataagcatagtgagtgttttgaagatcatagaaatgaaaacaatataagaaatctccaaaaatacaagaaatctcccccaccaaattatccmgtcacaggacttctgcacttcccacactgtgcctatttgctatgctatctatttgatgtgctatatcttcacatcatttccaatatgggatgtgtaaattatgtaaggacttttagagttataatttgtttcatgcattttttttgcaaatttgactccacaaaagtgcaatgttgatgttgtgtgtatgtgggtgtacctaaaaatattgaaaaactttctcagtaaagggagagacatctttttcatacatctgcttttgtgaaagataaaatttcttcaggtctcagctttttggtgactgcatatgcagtggtgacccactgaggtttttgatcaacctcatcagaagagttaaattgtctgtcagtatttcagatggccacatttataaagctgagtgcaaacaattacccaccatggtgatacacatttatacattttgctttttgacctatttctttatgtatacattttgtctgctcataaatgttaagccattgcaacagtctttagtatatctga

SEQ ID NO: 812082 - DNA, 604 bp, Homo sapiens
aggtttaaccttgtaggcaggtttagtcctggtcatrtttatttcatttggaattgtatcttttggagaagagggagaatatttcaactgagtttgattcattgaactatatcttttgactaccatgacaatggtcataactttttaaagaaatatcaagataaaattgtttaatactattacatgaagataatatttaacatttttttcaaaggaattctttctcattgtgggaaaacataaaaatgcattaaaaatgaaacataaattgcccataatctactacatagcgttggcttctgttaacattttgatgtatctcttcacagcttataatcttttatataggcaaggcattatacgtataatttggtgatctacattttaaaacttaacattacatcataagtacattctcatgttagtaaaactatattttaaaataattttgtgtatgtaatttttcatcacaaagacatgctattctgcaatttgaggaagccattacatttttatttacttatagagttacctagtcaccttactgaactctcaataatttcagattcacatattacttggaaaaaataatttgagttattta

SEQ ID NO: 812083 - DNA, 561 bp, Homo sapiens
attattctttactctttacttgcatcgacttacttattcctctcaatatccacttttcagtcaagaaacctgagatacagacagttgttataactttgcaatgtgaaccaaycaataaattttggagcccagatagtctgtctgacttcagagatcatcttgaattaagtggaagaaatattgatatgtaaccctttacatgttaaaatgtgtgtgtgtgtgtgtatgtgtatgtgtgcttactggggtgtctgagtacatactggtaaaagagtcacaatcttactttaaaattgatgcttataggaccacaacctttccatttctgaacaacaggtgatccagatatgtgcaatgcattttgataactgagcgactattatctttaacaataatcatcaggggaggaccttccatgtcaacggataggaaatactgttaaatggactcctttcctgattttctataatcctctatcttgtttacttgctgtttctttgttcttcacctgcattaaaacaaaacctgcagctatttttgtatttgcataaattaacacat

SEQ ID NO: 812084 - DNA, 640 bp, Homo sapiens
ttcctagtttactgaagcctctgtttcctgggggataatttttagtgttactgaaaaaacatgaatagagaaagggtgtatattaagcttttgatatacaaaagtaagggtttgcaacgagaaaacagctttgcaatccaaattacttgaatttctagattcctatattcctttttgtatgtcaaactgaaagtaaccgactcattgagttctcccataaaaagaaaaagctggggcaagtaggaaagtcagagaaggctaggacagtttggaaaccacattttcatatttgttattagctctctttttcaaatatcattcacataaatgaaaggttttggtcttttgataataaaataaaaagaataaacatcatgctattgtgcttaacttgccttcatattcaagtcatacttgaatcaatagagacagaattgaatcaaaagggatagtcaaagttaaagtgacagccatatctaaagatgtcatctcaccaagttttctggggaagaascactatgactctcctccactgtgtaaactcactggcatggtaaatacttgctgatgtaaattcctgacaacttggcatacttggaaggcattcctgaaagaaagttaggcacaaatcaaacccagc

SEQ ID NO: 812085 - DNA, 657 bp, Homo sapiens
ctgtgcccttccatcactactctcctacttcctcccatcaatataccatccgctcagcacaaaattatatagagtagcacagacccattccagtctctgaaaatgaatttgagaaaatgacattcaccaggaamggcagtttgtaatgtttaaagaactggaaaagctatcacttagctcttaaagcgctaaagaaagttgttaatgatctcactcaactcaaatttccctgtttggccaattgattagaaattaagctgcatttattatcggtgataatgatcttataaaacacacacttatgtcaaagttaattgagaagtcaccaattagaggctgggcacagtggctcacacatgtaattccaacactttgggaggctgaggcagaaagatcacttgaggccaggagtttgagacaagcctaggcaacacagcaagaccccgtctctacaaaaaatttagccaggtatggtggcgtgtgcctgtagttccagctattctagagactaaagcaagaagactgcctgaccccagaagtttgaggttacagtgagctgtgatcatgccactgcactccggcctgggcgagaaagcaagaccttatttaaaaaaaaaaattaatttaattcaaaaagatggtatcacgagttagagg

SEQ ID NO: 812086 - DNA, 603 bp, Homo sapiens
gtagtccatattctgcaaggaaagcatgagcaaatgaagagtggcagaacacgccaccccaaaacatgctatttaggcctaaggattattttaaagctaaaggcacttgaaaaatagaaacaaaagagataggagaaaagaaacattatcaccagaaacacctgagatgggaaaaaactctcatgtgaaagatgatctccctatagtaggaaagaagaaattttctcgtttctagacatggggagtccagaaaaatttgtaccaacagatcttactaactcttatcttcctttagccacatcatttattttagttacttttccacaacggccactctgttcaacctactaaataaggattcaagatttgccactttttgggtcttcactttcctgtgggggctcctatatatgtgtcaaaatccatatgcttttcttctgttaatctattttacatcaatttaatactcagcctcagctagagaccctaacagggtaaagataaaaaaaactgcctcccttacacaagcactaggagagaaaggcaggagggcagaaggataagaaagaaatctgtwaaaaaaaaaaaaaaaaaaaaaaaaaa

SEQ ID NO: 812087 - DNA, 573 bp, Homo sapiens
agtctgactttttttttttttttttttttttttttttttttttttgagacagagtttcgctctgttgcccaggctggagtgcagtagcatgatccgggctcactgcaacctccgggtttttttgtttttgtttttgtttttgtttttttgagacagagtgtcaccctgttgcactggagtacactggtgcaatctcagctcactgcaacctctgcctcctgggttcaagctattctccttcctcagcctcccgagtagctgggactacaggcgcatgccactacgcccggctaatttatttttgtatttttagtagagatggggtttcaccatgttggccaggctggtctcaatctcctgacctcaggtgatccacccgcctcggcctcccaaagtgctgggattacaggtgtgagccaccgcgcccagccaagtctgacatttcttaaaaaccaaacactataraactcagcaattacaatcctgagtgtttatcccacagaaatgaaaatttacttccacacaaaacacctgtaaataattgttcctagcagctttatttataatagccca

SEQ ID NO: 812088 - DNA, 622 bp, Homo sapiens
tatatatatccacaaaatgttcacaagtgtctactgatcaccaatatttcrttgggcaaataaccatgagtcccctcacaggccagcagcaaagactccagctaagaatagtttattcttttacgtcactctctttgggccaagagttatcacacctgtggggtctggtccataaaaagtcactcatctggaattataggtggcaggagaaaggtaaaggaggccttttttcttccacttctgctagtattgccagtgcttttgttttaaaagcctagacatcaagtttggttaatttaggtggcctcttgcagtttgggaaatagaagaaatctcagtgtgccaggggagaatcagaggagaagcttccagcatcaggtgatcaccaaagaacccagaacatttgccactgagattctactacaagagacgggctgttagcccatacccatgttcaggcttcctatgcctttgggcacatgtggggacagggacagctaatgaaaatggcatcaagccagttggtgggccagcaagttggctggcagggtggaggccatccaagcagctcccagccacgcccagttggggtttaccagaattgagtcagccaggacagcag

SEQ ID NO: 812089 - DNA, 585 bp, Homo sapiens
aacagcctacaaagagtgacaagaggactgcattggtaggcttgagagctagtgcacatccagcctggcctcctggatctcaaggcccaagacatgctagcactcatgaaaatccatgtggctgaaaggaatgaaacagagaatgagtgagatttgtgtggggcttggactttctttccgatgagattcctggtataaaagtctaatgagccacactcctgcattactctcttctatcttcgttggtccaagcggcacagcctgcatcaatataagtcccctggagggctcatgctgggtaggaaactgactttagagaagaaacaggtcctgtgcagactgaatgaagggtggactcacaccatttccagctggtttaggaattaatgagctaaaatggagttctgaaggctcatcctatatttttcttctgaatcacagcatgctctctttgatgcttatgagaaattcccagataagatatttatgacggggtctgaatattggcratttttaaaaatcactgaagaatagaagatagtaaaaaaaaaaaaaaaatcacggcttggatagttctccttgtca

SEQ ID NO: 812090 - DNA, 542 bp, Homo sapiens
cccagggccacgtctgacgagagaagggggcgctgcgaagagggcacattttacagcgcaggtgggttccctcggcttcgcggccccctcccaccttcccagtgttaacgcactgaagttagctccgtgcgggtgtgtgtgcttagtgttatttaggggcttgagcgtcaaataattttttaaaaggttacaatccaaaactatcctactttctgtcttttgcatgtccatgttacataaaccctcaaaaaaaggaaccagagaaaaattacacttttcaacaaaagcagcgacacgactacatgttctgctcagtggttccactctaagtgagactccatcgcagctgcgcacacccgggtctagagcaggaaaagcaaaaggctcacggagtcgcgctgatgtgaaccccagcgcaggcacttccgggcctaagcrtttctgcaggaaccccaaggccacagctgtgtggtttaaggttcacacttgagcctctaactcgcttcctactgtggagctttggcattctcactcatttaatg

SEQ ID NO: 812091 - DNA, 616 bp, Homo sapiens
tatgcagacatatagtaaagtgtgcacttgggaacaacacttctaaggataggaggaaagcaggattgggtactagagaccaaatgcaattgtaatacaattgcaaaagagaggtcacctgccccgtggtttgctttgagagtaatctgacatagaggcaactctcactcctgcattaatgagtgagggggattcctgggaggggataaagctctgagatctcagcagccaaaggtctctctgctgggagaataagtactttggtcctgaatgaacagtgcaccaaaagatctattttattaccacccactcagatccatttgcttcttactgtaatcaacccatccaggaactacttttgcaaaattctgctttgtctcatttcctcaggaaacttaaaagttgaaggtgagtggaacagatcataatctctgttgatgcagcttatctaaaaactcatcatatccttccttttatttcttcatgcccatggacagaacctctgtttctctatgtggcatacctggtgakatgcccctgagctcccagtcactatgccctcatcaagccatggctactgcaccttttcacttattatcaaaattggtcaagagag

SEQ ID NO: 812092 - DNA, 634 bp, Homo sapiens
tccaaaggattaaaacacagtatcctgttaataatattaaatgtataygcagtattatatcatataagaaatacaattattaaacctttaacattcagaattgaggtaacatgttcgtattacttttatataaccattcattttgtcgaaatttcaaatttaaaataaaacttattgtggagataatgtctgttcattaaagaaaccgtaggtaatttaaggaatagcaatatgcagtctttacagcagtaacattaaattttttaagattaaaagttaatgcttctcaaaaacatttaactctaggtggctattatcttactttaaaatgtggaattcagcccgacaccgtggctcacacctgtaatcccagcactttgggaggccaaggcaggcggctcacgatgtcaagagtttgagaccagcctggccagcatggtgaaaccccatctctactaaaaatacaacaattagccatgtgtggtggcggatgcctgtaatcccagctatttgggaggctgaggcagaagaattgcttgaacccaggaggcagaggttttactgagctgagattgcatcgctgcactccagcctgggtgacaaagcaagactctgtctcgaaaaaaaaaaaaaa

SEQ ID NO: 812093 - DNA, 531 bp, Homo sapiens
aaagcacagcctgtactcaaatgctgagcatatatttgtaagttatttgcatattaaaaattagcataaaggtacatattacaaaaaggaaaaattaatggatgaagatgaattgtctgaagtcggaaaaaaataagactcccttctttggtgaaaacatctatatttcattgttcaaagtgtcccacttatgtgggtagtacatactttcatactcaaccaaaattgcttccctccctcccttccttccttccctccctccttttctctctctctctcccttccttctttccttccttcctccctccctccctttctctctccctttctttctttttctttctttctctttctttctttctttctttctttctttctttctttctttctttctttctttctttctttctttcwtttctttcgttcattctttctttcttccttcctcagtaataattttctgaggtctcacagatttttgttaaattgtctttgctcaactcttttacattagaaacacagtatttgttc

SEQ ID NO: 812094 - DNA, 552 bp, Homo sapiens
tctccacagagttcttagtacaactgaatacaaacygattccataggtggttttttttttaggtgaatggatactgcctaggttctcatagtgagttaggaagaaaaaatggaaagaatcaaataaatcccagctagctttcataacagctactcctcagttaactgaccctacactccaggctcaggaatgaaaggatttcttatctaccaaaggtatatttacacaaaaggcactgctaaaatccattctaaagttggaatgtctagaaagagactgaaaatcacaaagtctactcttggctcacaatactttctctaggttgttgtataaaaataacatggcattttccttagttacctgacatttattttaactcatatgcaatgcaataaaagaggctatctagctaggtctgtgctccaacaacagtatcttggtaattggaagtcaatgagagccaatttttataatttaactactataaaccaaggaaatacaccaataaacacatttttaaaaacttattgtatttgtcatcaactcaatggg

SEQ ID NO: 812095 - DNA, 615 bp, Homo sapiens
gtggtgaaacctctccagaaggttttcaatttactttgcccaggtccattaatggaaacagtgtctatggaagctatagccttatgagatgtatttcttaaataacaagatgtggaagttaatattactccttgatccatgggctacagaatagatgttatgttagctggcatgaaaacccattaatctccttgtacatctctacaagaggttttgggtgacaaggtgtattgtcaatgagcaataatattttgaaaggaatctttttctgaacagtgggtctcaacagtgggcttcaaatattcagtacccatgttgtaaacaggtgtgttgtcatctaggctttgtttttcaatttatggaacatgggtagaatagatttagcatgattcttaagggccccagaatttttggaatggcagatgagcactagcttcaatttgaagtcatcagctgcattagcccctaataagacagtcagtctggccttagaatctttgaagccaggcattgaattccctctagataggaaagtcctagayggcatcctgttcaaatagaaagctattttgcctacattaaaaatctgttgtttgggtagctaccctcatcaat

SEQ ID NO: 812096 - DNA, 649 bp, Homo sapiens
ccaagtttactacactagcaaccaaaattgctttagaattccctgacagccagaaactccagatgatcccaaactagggagaacataattctctaaaagagacttattaattaarggtaaaatattgctgtgaattttctgtaaatgttattcgttatctccccaatgatcctcccaaggtagtaagatttctttttgtctgatagtcactaaataaaggccataaaatgacaaagtaatctaaaacataaaaatgtgttattattagtatatttaaaattacacttattattattagctaatcctcactgaaggctttcaatatgccagttactgttttctatgaattgattcagtgaatcctcaaagtctccttatgatataggtattacagttatccctattatacagatgaggaaactgagacatagacatatcaagtaatatgcccaaagtcacaattcagtacaaagagaaactggcacatttatttctcagttgtttccttatcataaaacagaaaatatcattgaaatttgtacaatttaaagtaatgcctacatttactgtgccattttttgctgttactgaaaccaacagagctggtgctataatgggggatctgttatgttgagatgtggatcagaat

SEQ ID NO: 812097 - DNA, 621 bp, Homo sapiens
caataagtggtgctgggttaaccgacttgccrtatgaagaagattgataccggaccccttccttacaccatatacaaaaattaactcaagatggattaaacacataagtctaaaatcaaaaactataaaaaccctgaatgataacctaggaaatactattctggacatagaacccagcaaaggcttcaagacaaagccaccaatagcaattgcaacaaaaacaaaaattgacaaatacaacttaattaaaccaaagagcttctgcatagcaaaacaaaacaaaacaaaacaaaacaaaaaactatcaacaaagtaaagacacaacctaaagaatgggagaaaatatttgcaaactatacaaccaacaaaagtctcatatccagagtctgtaagtagctcaaacaaatttacaagcataaaaacaacaaccccactaatgagggggcaaaggacatgaacagttttcagaagaagacatatgcatggacaacaagcacatgaaaaaaagctcaatatcactaatgattacagaaatgcaaatcaaaccacaatgagataccatctctcactagtcagaatggctgttattaaaaagttaaaaaaaaaacacatgctggcgag

SEQ ID NO: 812098 - DNA, 650 bp, Homo sapiens
tgcacagacagcaaaccacgtagttatattgctttcttgtctcctagtgttaaacccatatggcattttataaataattgaaagaagggattggccacraaaaggaaagcacaggaaagaaacaaaaagtgataatgctgaaagtgaaactgaagtagaaggtaatggaactgaagtagaagacatggccacctgtgggcatgttgacactgccaccataggagagaccctcgctgcagagccagaggaacttaatgaagaccaacctaccaagataaatgagactgaaaaaaatgaatttgtcgagaggaagcaacaccaaccaaaatttcacataaaagagctcttgaagatatttcatgcaaagcataaaatattggaagctgatccaaacttggaaacctgacaatttgccaagacacaggaaaggcacttgctctgtattgtaagttatatggcaagaataaggtcaatgatcttcaagttactcttgattagtttttgcaaagaaataaaacacttcaattctcaatgcctctaaaattttaaattacaagttacaatgtactaaacataatttttactattttgaatttctttatacatttatttaaaaagttagtgaatgtttaatattttcataaaaattt

SEQ ID NO: 812099 - DNA, 607 bp, Homo sapiens
tctcttatctctctgtgcccctattcaatcacaatgcctgcactaccccctctcagaactaaccactggcatgaatggacagttatcattcttctcacacagttctttatatcatgactagattatccctaaacaatacagagcactattttacatgctttaaacttaacataaaaatgataaaagaataaaaatgatacattactggagatctggacatgatattcagtaatttgtggattttttttttttttttttgagacagagtctcgctctgttgccgtctggaatgcagtggtgtgatctcgactcactgcaacctccgcctcccgggttcaagcgattctcctgcctcagcctctccagtagctgggattacaggcacatgctgccacacacagctaattttttttttttcaatttttagtagagaccatgttggccaggatgttctccatctcctgacctcgtgatcygcccacctcgccctcccaaagtgctggaattgcaggagtgagccacctcgcctggccaatttgtggaatttttgcatacacttttgttttacgtaattgcataaattatatttatgaaccccatcataaat

SEQ ID NO: 812100 - DNA, 560 bp, Homo sapiens
gccaattaaacctcttttctttataaattacccagtctcagatatttctttatagcaacacaagaatggcctaatgcagttagtaaaatagcattataaaaacaatttaccagttatttgggaggctgagacaggagaatcgcttgaacccaggaggtagaggttgcagcgagctgagatcatgccattgcactccagcctgagcgacagagcgagacttcattgcaaaaataataataaattaaaatatttctataataactcattgtgtgaccgaatcataatttagtaacccagtatcctatcttgggcatttgaccttttccaaaggttttgccattataaataacattatgacaaatattttattgcaaaatagctttacttgcatttcatgaagatagattgctatcagcggaattagcagatraaatggcatctgtattttctgactctccttttcttacctttcatacaacaaaacataaatttcatgaaataaaatgaaagacaaggggaataaggaaactctgatatctggaaaaaatgccttatattct

SEQ ID NO: 812101 - DNA, 567 bp, Homo sapiens
atatatacacacacatatatctatacatatgtacatgtatagatataagtatatacatatgtacatttatagatatatgtatatctatacatatgtacatgtatagggatacatatatatamttatgtgtgtatagatatacgtatatctatatgtatgtgtgtatatatgtatatctatacatacatgtgtatatatacacgtatatctatacatatgtgtgtatatatacacgtatatctatacgtatgtgtgcacatatatagcgtatatacgtatgtgtgtatatatacgtatatctatacgtatacacatatatacatatatacgcatatatacacatatatacatatatacgcatatatatacacgtatatatataaaaacacacacacatatatatatctcctattagttctgtccctctagagaactctaatacacaactctattaaaaagtgggcaaaggacataaacagacacttttcaaaagacatacaagcagccaacgaacgtgaaaaaatgcttgacatcactaatcatcagagaaatgcaaatcaaaaccac

SEQ ID NO: 812102 - DNA, 623 bp, Homo sapiens
accacaggcttcttgtaggagttcgaggatactgcaggcttgacccagcgctcaactgccaagccaccctaacccccmagacagtccaggtggacacaattgatgggcatttgcttctggtgaagagacaacacttgatgatcctggagaagccagaccatgagcttcactttgagactctggctcaagctgaccagcccaggtaagggtcagggtccacagccaatccccaccgctgttctggttcgcggtgggaagctcaggctgtgccagcatgaccaaggcttaaacatagtgacaggcatcaatgccctcacctgtaagctgagataatacacactggcaaagctataggatcattcaagagctaaatgatataaattgcctagcagtgggcctgacacatggcagtagcttaggaaattcctttactcctaccctctcagtttcttttcctgaaacaggggctcactctgttgcccaggctggcgtgcagtggcacaatcatggctcactgcagcctcaagcgatcctcccacctcagcctcctgagtagctgaggctacaggtgcatgccaccacacctagctaagtttttatttttttgtagagacagggtctcg

SEQ ID NO: 812103 - DNA, 668 bp, Homo sapiens
tcatactttggtcaccagggtttggatccagctcgagtcaacgtccctgtcattggtggccatgctgggaagaccatcatccccctgatctctcaggtacacgcatatgaccytgtgaggggcttcgaggtcaggattccctttaccagggcctgctttgaggtgatcccggtagactggagaaggcctggccatgtgccaggttttggaagggctcctgttgtaggcagccccgcccctctgctgcagggcggtgtcagtcctggagcgaatgtgggtggaagctgctcagggcccagctccagcacgcaaggagaaccactgttgggaacctcaccgggttactggttaggccggagcgggcgaggtgcttttttcaaaaatgagtccagggctggacacagtggctcatacctgtaatcccagcatttgggaggccaaagcgggaggattgcttgagcctgggaggttgaggctgcagcgagctatgatgcaccactgaagcctgggcgacagagccagaccctggcctcaaaaaacaaatgagtaggggactcaccacacttcccaacagagttgatttcacttcgtcttttttttttttatctttttattattatttttttgctgctccttgtggagcagggctaccccataggcagtgtgcc

SEQ ID NO: 812104 - DNA, 555 bp, Homo sapiens
tctggaacacactgtgttgccttctccaaaacatctgcaacctctaacgagtcyttgcagaagccctgaatgctatacatatttccctcctccaccaatttttggctgctctgctctgagccctcagtatctgccagtgcttgcttatcttcttccacagcctccttcagctgctcttctaacttgacttcttccatgagtatcttgtccatagagggagtatctgtcctccatttggtttggatccacatcctcttccaagtgctggcaactgttcttttgttttgtagctgtgtgcagaactgaggagaaggcctggagacaatgccaacaccgggagaccgcgtggcaccagcctcacgcatggagccgccgtggctgccccgggatgatgatttaagtttcccctcgcccatcactatatgcttctatgaaatgttttaaattatttttattccttcagcataattatcaaatacatcttttatctatttttttccttatgacttacagattctgagagctcagagctatttccactgcctcacttctcat

SEQ ID NO: 812105 - DNA, 586 bp, Homo sapiens
atttctctagctgtgtagaattttagagctgaggatgatccttggtgaccagctccatattgctttgtggagaagaaacctgagtcctgggaggtcaagtaacccgttcagactcccacaaccagagcctscggcatctgtactgcccagtcagtacagagctccggtaactaggtgcacttcagttatctagagtaggcgctaataacttatttcttgtcagaggccaggtaataaatattttttaggctttgcatgccaagaagtaaaatctaggatgttatatataacgagaggcaacaagtttccatgttttttgttgatgaaattcaaataaggctggttgcggtggttcacacctgtaatcccagcactttgggaggccaaggcgggagaattgcttgagcccaggtgtttgagaccagcctgggcaacttagccagaccctgtctctataatttgaaatatatatttttaaaagaaattcgagtaataactaataacagttgagtgcaagtttttaatacaggtttgttaataagaagaatggaatgatttttgtagggataacaattttgggccaggt

SEQ ID NO: 812106 - DNA, 506 bp, Homo sapiens
gggatctgtccagacaggtacactggaagcccaatgtgtgttttatttgttaattgattgattgattgagacagtcttgctctgttgcccaggctggagtgcaagtggcacgatcttggctcactgcaacctccgcctcccgggttcaagcgattctcctgcctcagcctcccaaatagctgggattacaggtgtctgccaccatgacctgctcgcagcaccacgcccagctaatttttgtatttttagtagagacggggtttcaccatgttggccaggctggcctcaaactcctgacctcaagtgatatgcctgcctcagcctcccaaagtgctgtgattacaggcgttagccaccacggccggccccaatgtgtgttttaaatctttgcgcttaaatgtttttgatttytgcacattttgtgttgcacgtgtcataatgcattcaccgattcccttcattcccttgagtagttattgcgccctggattctgcgccaaggaagtg

SEQ ID NO: 812107 - DNA, 641 bp, Homo sapiens
aaggccaatcaaacaattttaaaaatagaaaatatgatttttaatccagtttatctttttatttrtagataataaagtgtatccaagccaaaatatgggttcaattccccaaaagagaagcattatatcaaaaaatataaacagttaaggtcattgccaagtctttcaaaacagtggtactaatttacaaaataaccagcaatgtaaaagagatgttgtttcaccaaattcacaccagcaatgttttaatttaaacaaaatttttaagaagaaaagtgaaagaagttgataatatagtcccacttgtctatttttgcatttgtttcccaagctggagtgcagtggcatgatcatgactcactgtagccttgacctcctgggcccgagtgatcctcctgtttcagcctcctgagtagctgagaccacaccacaggcatgcaccatcatgcccagctagtttttttaatgtttttatagagatggaggtctcactacatcttttgtagggatcttgcccaggctagtctcaaattcctgggctcaagcaatcctcctgccttggtttcccaaagcactgggtttacaggtgtgagccagtgtgccagaccagttgtcttgttttacagtgattttacagtgat

SEQ ID NO: 812108 - DNA, 604 bp, Homo sapiens
caaaaaaaaaaaacctaagagtacatctaaccaaggaggtgaaaggtgaattataaacactgctgaaatagatcatagatgacacaaacaaaggaaaaatattccatgctcatggattaggagamtcaaaatcattaaaatagtcatactgttcaaagcattttatagattcaacactattcttatcaaagtaccaacatcatttttcacagaactagaaaaaacagttctaaaataattcatatggaaccaaaaaaagagccctaatagccaaagcaatcctgagcaaaaagaagaaagccagaaaaatcacattacctgacttcaaactttactatggggctacagtaaccaaaacagcatggtactagtacagaaagagacacacaggccaatggaacagaatagagaactcagaaataaagccacacacctacagccgtctgattttcgacaaagtcatcaggaataagcaataggaaaaggactccctattcaataaattgtgctggatagctggatagccatatacagaagaatgaaactggacccctacctttatatataaaatatatatatatatttatacatacatatttatata

SEQ ID NO: 812109 - DNA, 604 bp, Homo sapiens
caaaaaaaaaaaacctaagagtacatctaaccaaggaggtgaaaggtgaattataaacactgctgaaatagatcatagatgacacaaacaaaggaaaaatattccatgctcatggattaggagactcaaaatcattaaaatagtcatactgttcaaagcattttatagattcaacactattcttatcaaagtaccaacatcatttttcacagaactagaaaaaacagttctaaaataattcatatggaaccaaaaaaagagccctaatagccaaagcaatcctgagcaaaaagaagaaagccagaaaaatcacattacctgacttcaaactttactatggggctacagtaaccaaaacagcatggtactagtacagaaagagacacacaggccaatggaacagaatagagaactcagaaataaagccacacacctacagccgtctgattttcgacaaagtcatcaggaataagcaataggaaaaggactccctattcaataaattgtgctggatagctggakagccatatacagaagaatgaaactggacccctacctttatatataaaatatatatatatatttatacatacatatttatata

SEQ ID NO: 812110 - DNA, 511 bp, Homo sapiens
actccatctcaaaaaaaaaaaaaagaatccagtccctggctctgtgagttgatcagtgacagtaagacaacaagaactcgatctcattgtggtcaaaaccgcagcagattttgttctgcatacaacagcggcaccaattttttaaaaatgatttccaaaccccctgcaatactgggttatgcctaccaaatgccaagcaataaatagcaaaatagggggggagaaatatcaaacaaatgggtgtttgagcatcatagagaaaaagtaattagatccagccatatccatctgtgtgtcgagacacaccaacccgtcctgtgctttcattctgagcagagagtactgattaattgccaggttctcaagctctttaaagtctgtttttaaactcaaaggtctcacattttgaaacacaaatgttktgggttttacacatcgtggcctggtgtgtttgtcgtgcaccaattccagacatatcagcagtcccccacaaaaggcaaaaatggaaggg

SEQ ID NO: 812111 - DNA, 668 bp, Homo sapiens
tgtatttttggaaatgctgtaaatgcagaaaaaaagttaagcagatagataacacatcaaacttgaattatcaacaccttattagtctatgaaaaccctcactaagctgtcagagccccaggagaagtagattttttttccaggtattgcaattgtcctggtgggagtgaattcagcaaaggaaataatgtaccatatgtctagcatagtcagtgtttatatttacgctgaatcgtcaattacaggtttattcccttttcatcttgcctcttaaccttctgaaagaagaaaagataagttccagggaaaatttgtgaacaggattatcaagcagatgttgccctaagtctcatatttgaagatatctaagaacattcaccaaagcctcaccttccttgtcactgtgatcagacatgttcattaccatccttggggcttaggtctctgagacgcccccacagaatttctagtggcttcttgttacccagggccaggacacacaatgcatgatcatgcaaaacagtagcacaaactaatgctcactcacaaagcatctctgaaccacctcacaaccattaggatggctcctatcaaarcagtaagtaaaataacaaggatttggagaaattgcaacatttgtgcactattggtgggaatataaagcagtg

SEQ ID NO: 812112 - DNA, 498 bp, Homo sapiens
caagcagatgttgccctaagtctcatatttgaagatatctaagaacattcaccaaagcctcaccttccttgtcactgtgatcagacatgttcattaccatccttggggcttaggtctctgagacgcccccacagaatttctagtggcttcttgttacccagggccaggacacacaatgcatgatcatgcaaaacagtagcacaaactaatgctcactcacaaagcatctctgaaccacctcacaaccattaggatggctcctatcaaaacagtaagtaaaataacaaggatttggagaaattgcaacatttgtgcactattggtgggaatataaagcagtgcagctgccatggaaaaaaatatggtggatcctccaaaacttaaaaatagaattatcrtgtgatccagcaattattccacttctgggtatttgcccaaaagaactgagagcagggggtcaaagagactttttttttttttttgagactaagtcttact

SEQ ID NO: 812113 - DNA, 619 bp, Homo sapiens
atttataaagaaaagaggtttaattggctcatggttctgcaggctgtacaggaagcacggctggggaggcctcaggaaacttgcaatcatggtggaaggcaaaggggaagcaggcatgtcttacatggcagcaggaggaagagaaaagggggaggtgccacacacatttaaacaaccagatgtcatgagaactcactatcacaagaacagcaagggagaaatctgaccccatgatccaatcacctcccactaggcccttcttccaatattggggatgacaatgcaacaggagatttgcatggggacacaaatccaaaccatatcacaagccatggaatttatctggcgaaagagcactccagtcagagaaaatagcaagtgcaaaatccctgaggcatggcatgtttaaggaatagtaaagacagccgtatgcacagggcagagcaagtggtggcaggttgggaggagaagaggttagaggtcagattatgtagggccctmggatcattgtaagaacttcaacttttactctaaatgagatgggaaactgggagaggatttcaagcaaagtagttacatgatcttacctacattttaacaatattacacaggctgatgt

SEQ ID NO: 812114 - DNA, 619 bp, Homo sapiens
atttataaagaaaagaggtttaattggctcatggttctgcaggctgtacaggaagcacggctggggaggcctcaggaaacttgcaatcatggtggaaggcaaaggggaagcaggcatgtcttacatggcagcaggaggaagagaaaagggggaggtgccacacacatttaaacaaccagatgtcatgagaactcactatcacaagaacagcaagggagaaatctgaccccatgatccaatcacctcccactaggcccttcttccaatattggggatgacaatgcaacaggagatttgcatggggacacaaatccaaaccatatcacaagccatggaatttatctggcgaaagagcactccagtcagagaaaatagcaagtgcaaaatccctgaggcatggcatgtttaaggaatagtaaagacagccgtatgcacagggcagagcaagtggtggcaggttgggaggagaagaggttagaggtcagattatgtagggccctcggatcattgtaagaacttcaacttttactctaaatgagatgggaaactgggagaggatttyaagcaaagtagttacatgatcttacctacattttaacaatattacacaggctgatgt

SEQ ID NO: 812115 - DNA, 440 bp, Homo sapiens
aaagttcaaacaaatactgtcagaaatgtacaatgaagcccatgtgcaatttattcaacttcaataattatgaactcatgctaatcttgtttcatctactcccccgctcactttgccactccagtattattttgaggcaaatcttagatatatcatttccttcataaatattttagtatgtatttctaaaagataggaacttgaagccttttgcatttgtggcttgatagctcttttctttcaaaatattatttttatttatattatttattttattattattattttttgagaccgagtctggctgtgttgcccaggctggagtgcagtggcatgatcactgctcactgcaacttccacttcacaggctcaagtcatcctccgacctcagcctcccaagtacctgggactatwagcacatgccaccacacccagttaat

SEQ ID NO: 812116 - DNA, 440 bp, Homo sapiens
aaagttcaaacaaatactgtcagaaatgtacaatgaagcccatgtgcaatttattcaacttcaataattatgaactcatgctaatcttgtttcatctactcccccgctcactttgccactccagtattattttgaggcaaatcttagatatatcatttccttcataaatattttagtatgtatttctaaaagataggaacttgaagccttttgcatttgtggcttgatagctcttttctttcaaaatattatttttatttatattatttattttattattattattttttgagaccgagtctggctgtgttgcccaggctggagtgcagtggcatgatcactgctcactgcaacttccacttcacaggctcaagtcatcctccgacctcagcctcccaagtacctgggactattrgcacatgccaccacacccagttaat

SEQ ID NO: 812117 - DNA, 612 bp, Homo sapiens
aatggaactggtggaaaagaatgaagccttatttatttatttagagatggggtctcactctgtcaccaggctggagtgcaatggcatgatctcggctcactgcaacctccacctcacaggttcaagtgattctcctgcctcagactccccgagtagctgggactataggcacacgccaccacgcacagctaatttttgtatttttcatagagacggggtttcaccatgctggccaggatggtctcgatctcttgaccttgtgatccacccgcctcagcctcccaagtactgggattactcaagttttaattcaggcctaaaaaagattctggaacaaagacaggcaggaagtgaatcaaattcaaaagtgagtttatatagatgttaattaaaatattaataatagtgcatttctggccaggtgtggtggctgatgcctgtaatctcaacactttgggaggctgaggcaggaggatcacttaagcctaggaatttaagactaccctgggcaacgtggtgagaccccatctatattttaagacaaaaaaaaccaaaaactttttttaaattraaagaaataaaaatagtgaatttctaacttaccatggcaac

SEQ ID NO: 812118 - DNA, 661 bp, Homo sapiens
agcaccagaaaataaactgacaggtcttccagggagctaattattgaggctgctatttggttcactgacaggattgcttgtttgtgggaagaaacatatttgtgcgttgctttttccattaccgctatttctatcatcataaataagaatcaataggccattttgcatagcatatgctcaccactattttgtatctgagtgtcagctgtatgcaggctaagcagcagtgccccagtctcctggctgagaattaaaacccagcaaagaaaacacctcaaattccacaagacagtgtatatgtctttgtgagctccttgagagcaagggaggtctgttgtttgtctctctatctgaagcacagtgcctggcacatggtgagcttcaaaatgtataaacaactaaatgaataatgaatgaatggatggatgaatgaaacaaaggaaggttttaagataggatatggaatcaactgtatttactggatcagtcaagggatgtcgttttgataagcacagagctatttataattcgtgatggagacaggaaggaaaagacccggcctgagtccagagggagctggcttttgtttagcagcttaacccacatactcaggtctctacaatattcastattgggtcctcactatagaagacaagaaatc

SEQ ID NO: 812119 - DNA, 589 bp, Homo sapiens
attacttagaagtccatttttaaatttccagctatatggggaagttggggctattttttatagttggtgccacattttattaaacttatttcatggaattttgtgcttcttcttttgcagtcatctagagtaataataccaactaacatttttcaagtatttaccatgtgttaggcactattctaaacagttaatatgttttaacttgttaaagctcacaaacgcacaaggtactatgatgatcagtaatttacgaatgaagcatctgagccatagcaagataaagtaacttaaccaagtaacacagctggcaagcggcagtgctaagacaagcttagtcaaacccatagtctgctcctataaccaccacaaaaaaacctacctctgaatttagtgtgctcgagaaaatggctatttgcgttttcagagcatgcagtcatacacgcatctgtcatatcagcttcagtgagttattgaagtcttctatattttttctaaatattttcatctaatttattaatttctgaggtaaggtgttaacatctcctatttggatagattcatcttwttttgttaatgttttgctttg

SEQ ID NO: 812120 - DNA, 621 bp, Homo sapiens
gtgatgtacaactgctcaacaccactgctaaagcatgaaaccagccacagacaacatataaacagattagcattgttgtgttccaataacattttactgatggacactgaaattttatttatttayttttttttgagatggagttttgctcttgttgccccggctggagtgcaacggcgcaatctcggctcaccgcaacctccacctcccaggttcaagcgattctcctgcctcagcctcccaaatagctgggttacaggcatgcggcaccacacccggccaattttgtatttatagtagagatgtgggtttcaccatgttggccaggctggtctagaactcctgacctcaggtgatccactcccctcagcctcccatgctgagattacaggcatgagctaccgtacctggccaaaatttgtatttcgtgtgattttcatagattatgaaatactattattcctttaacttttttcaagcatttaaaaatgtaaaatccattcttagttcgcaggccatacaaaaatagatggtgggttagatttgttgagggttatagttcagcgataccttaacatatcagctcctatgcttttctggttttttcaactccgtctttgt

SEQ ID NO: 812121 - DNA, 616 bp, Homo sapiens
gattataggaagcataggtttgccagatgcaaaagggatccaagaccttctaggaactcaaaggcaggagcaaaggcactcaagtgagaaactgggaactgttcagagtaactgcaacagagacttcatatataggagaggaagaaaacgaaacggaagggttgcttaggattacatgtagagagtcttaaaatgccgggtcaagagattgagactttattagtagacacgggaaggtattaagggtttctaaatactactttcgggtgttgggcagtggtaggatagaatggaaggcaggagaccaagtagatgactgtaaagcccccaactatccattaagtatattaagggggaaaacagtagattatttatcattacagttgtactttctggggaggtctgtgctttaaatatccaactcggccctctgaggaaaaactcaccctcctgtaaaagggacatatttattatgaagacacaaaaaccatcacatacaaagtacaatactataacatcctgaaatacatatacacacatactgtacayaaatttatattatcaatataaaaatacatcattaacatttctaaggatgacaaatactaaaccaata

SEQ ID NO: 812122 - DNA, 500 bp, Homo sapiens
ttaatctgagaccaagaagttccacatttgttcttccataggaaatccccagagcctcaggtgtagatcccatagaatgatgacactacggaaagcctggatcagtgtcaggaaggcactttgtgaaagcctgagaatttgaatgttatcttgtaggacccaaggagacatagaactttgataagcaggagtatgctgagcacggtggctcatccctgtaatcccagcctgggcagcacagagcaatcccatctccacagaaaaaaaaaatatcaaaaaatgagccaggtgtggtggtgagtagtcccaggtacttgggaggctaaggtgggaggatcccttcagtccaggaggtcgaagctgaggtgggccaagttcacaccactgcactccagcctgagtgacagagtgagamcctgtctctaaaataaataaattaattaaaaaatatatatatatatatagcaggagtatgccatgattcactttgttttcaaaga

SEQ ID NO: 812123 - DNA, 638 bp, Homo sapiens
taaaaatgttacatttatagttaacagatactgacctataaattttctgtcatgtaatgatgctgtgagacaatctaagaagaattaaaatttaaattcatatattcctacttttttctctgttctctaactgtaatatattttaattacagatggaggaacagatagatgttagatagatacataaataatagatagatcatccaaaattcttattctgatggttttatgtagtcagtatttacctctatttttctacatgtttatccttccaatttagttcattactttctgcacctttgatgtcatatatataaacaggaaataacacatggtggctgggatgtagagagagccacaggacttgtgaataaaatccacaggcaaggatgtggagattccttttgcaatattggagggaatgccaaaccctatgtttgctgtggaaaagagtaggtatttcctcaaaacatcaaaatggtattgccttatgattcggcagccccacakctcaagatagcaaaagaattgaaagcagagtcttgaaaaaatatttgcacatccatgtttgcagcagcattattggcaatagctaaaacgtagaagcaattgaagtgttcaaccacagatgaatggat

SEQ ID NO: 812124 - DNA, 451 bp, Homo sapiens
tagcataaatacttatacatgaaagtaaaaaggtaatatatagtatctaaaatttagaagtcaaraattacaataagagtatgttatctgaaaatatggagttaaattacagaagagatagctgaaagaattgaaaatgtgacctgtgggacactggactggagaggtggagtgaaatgaagcagggtacagctgctttccattatgagtctggcagtagtccttgaagttttaaactacatgcatgtctaacaaaaaagtaaatatttttaaaagggcaaaaaatactgtgataactcttgacagtttgcaatgtagaaaagaatggaagaggctgtcttcatcttttgaagctcatttcctggtaatctcccctgcctgctctcagcttcagccattctggcctttttgctgtttttccaacacatggggcttggtcttgtcttaggaa

SEQ ID NO: 812125 - DNA, 496 bp, Homo sapiens
ggtgtgacccagcatagtcccagtggcggtggccacagaagtacttacatcacccctcttccaactccaggcagctcagcacagaaagagagagactctgtttgttgggagaaaagtaaggaaagagaacaagagactctggtaatcaagggaattcttaatcttactcaagactaccaaggtggtacctctacaagtctgcaagaaccacagtgtaactgggcttggggaaaccccctaatacacatatggctgcagtggccaaagatgtggatcacaacacttaatttcctttgaatatctggaaagccttcccaagaaggatggatacaaagaagcccagactgcaaagatttgaattaatacctaggtcttgaatgccaagacattgacaaatatccacaagcatcaagaccatccaggaaaacaggacctcaccaaacaaactaaataaggcaccagtaacaaatctyagagtgacagagatatatgacca

SEQ ID NO: 812126 - DNA, 530 bp, Homo sapiens
gatggggtttcaccatgttggccatatatattatgttttttcttacacattgatacccaagataaaacttaatttataaattaggcctactratagatgaacaatacctaataataaaatagtacaattataacaatatactgtaataaaagttatgcaaatatggtctctctctcaaaatatcttattgtactgtattcacctattttcagaccatggttgatcatagtttattgagactgaggaaagtgaaactatggataaggggagattactatgtttaaaaaccatatgaatagagggaacacagagaatttttagggcagtgaactaccctgtatggtgctatgataatgatgaatatatttcactatacatttctccaaacccatagaatatccaacaccaagagtgagctcatgtgaaaaatgggctttgggtgtttttaaaatgttatgtcaatgtaaattcatcagttataataaatataacactgtggtagggaatgttgatgatgtgggaggctatgc

SEQ ID NO: 812127 - DNA, 520 bp, Homo sapiens
tgactggtatactataagctttaatatttatcattattattgctgccaaaagcaatggttctagttaaaaagcatacatggccaacgttgtttactcacagattaaagtttttcrtgtgatcaaaaagaccacaaaaaaccctaaataaaggtagattttttttccttacaggaaacaaatggtaaaaggaatataaaaccatctaatcattttatagaacagctactggctctgccaagagctcatttaaatgatcccatttgcttctgaatatgttatatgtatttggcatttagctttcctctacttcaaaaaatttagacttttcacagagataatgaaatcactttcaattaatacccagaattgttacaaagtggccagtttgtccttgattgattgcttttgtattttgtcagtattctttcttcactgaaaattttgaatttggttataaaaaataaagacatttaccttttaagatgcttcagggacatagaatgacaaatgaatgagaca

SEQ ID NO: 812128 - DNA, 520 bp, Homo sapiens
tgactggtatactataagctttaatatttatcattattattgctgccaaaagcaatggttctagttaaaaagcatacatggccaacgttgtttactcacagattaaagtttttcatgtgatcaaaaagaccacaaaaaaccctaaataaaggtagattttttttccttacaggaaacaaatggtaaaaggaatataaaaccatctaatcattttatagaacagctactggctctgccaagagctcatttaaatgatcccatttgcttctgaatatgttatatgtatttggcatttagctttcctctacttcaaaaaatttagacttttcacagagataatgaaatcactttcaattaatacccagaattgttacaaagtggccagtttgtccttgattgattgcttttgtattttgtcagtattctttcttcactgaaaattttgaatttggttataaaaaataaagacatttaccttttaagatgcttcagggacawagaatgacaaatgaatgagaca

SEQ ID NO: 812129 - DNA, 634 bp, Homo sapiens
ggacatttaatggtacaatamaaatgcaaacatttaattctttctgccaaacactcaatggcaatacatcacatcacacactaagcaaagctaggcaagaaatttgctatatagttaacagtattcaaaattgttataatatattcttttattttcttcactccttatccttatccttatcttcactccttttttcagcacataatacttttgttccactgatgaagcatataaatataatgtcacttctttctctgatacacatagctaattttatttttagtgagagtaaacatataggtgtatcctaaatctgaactacaactctcaacttctagcttccaaatcacaagcaaattagaaaagaaatcttgatctgtttttatcttttatagaaaaagttgaattgttaactggtttcttttgtttgattgtctctaaactcaagactctacaggctgaaagataatttcttcttggttgctcctcacacttcctatctttcctgttcttttaacattctaggtcttgtgacaaaatgctgcttaattctctatgaaatgatatcatatttaaaagtgttggcaccactgaagtgaacagcaatctgtgttaatgtggccagggtaaagct

SEQ ID NO: 812130 - DNA, 606 bp, Homo sapiens
taagtgaaagaaggattccctaaaacccaaaatatttccctcaccacctgaaactctgctactagatattaattcttttgaaaacatgaaagtttttgatcctcatgaaaccacattaaaaatgtttatttccctgaaagcctaagtgagacttcattggctaatacttttgtggggattagaaagacaggacttctttcatttacactggatttgatttacaatcaaattaatatttggaataaaaaatatttccactttctgtacacatttcctcccattctgttcacagaaggcaccactatgatcacatgcaattgcccactatcaaaggaaaactctttaagttacaaaaaaaaaaaaagtaaaatgaaggactgtctttatattacaattatagttttaaaagagcagctcttgcaggacactaaaaacgtgatacaactttctaacgtcatattgtcttatcgtagaaatacacctactataagaaagcataggacagctgtaacaataaagccacatkgtcctaataaggttcctttaattatggaactcctcatttgctaaatccctttttattgtttggtactctggagtgccttg

SEQ ID NO: 812131 - DNA, 527 bp, Homo sapiens
tcacactacaagtgataaatacagagagacagggttgcctttatgacagttgactctgctagagacaaggatgtctcgaatgctgtctttgctggccatctgcacgatgcagtctccttgtcctcctgagtgtttagtggtttgtgtgtttagatgtcagtttgcctttaactactccgatgcctccgttggtgctccctgtatcctcgaggtaggtttctgccagggtcccttacttttaccttcatgttatccttagcaatcttgtccacttctaagaccttagtcatagaatctccaattctctagtccacagtctcagccctgtctcttagatccaggtgtaacttcatatctactttctacagttttccatatgctagccatttcagaaccaaatccatcaaaatacacctyagccacatctgcttttcactcttggctttcctttctccactcacccctcaggctcaggattctttttgtgttctgacctctgtgcttcctgaacaccctcatccagtctg

SEQ ID NO: 812132 - DNA, 629 bp, Homo sapiens
aattacacacatcttcaatgaaaaccccaaaatgaatttaagaaaacacttcaatttaaaatagcataaaaaaagaaatattaattaatttggaaaatgtgatacaagattttactctgaaaattaaaaattattgtttaaagaatatttaaataattagtaaacaccttacacccatgaattggacgatttgatattgtagtactttacaatttgaactacagatttgatgaaatccctgcaagtatcccaacagacttgtgtctagaaactgacaagctgattctaaaatacacatgaaattgtaagggactcaaaatagccaaaataatcttgaagaaagaaaacatattaggataattcacaccccatgctccaaaccttactgcaaagtatcagtaatcaagacaacacaatattgatgaaggaaaaatatatagattgatggaagagaattgagagtccatatataaaactatgtgtctacagtcaatggattcttaaagtggtgccatgtgcaattcaatgaggaagagacagtctttgaacayactgggtcaacaacgtacacgtggatcaccacttgcaaaataataaattagaacccttaccccaaagcatacaaaaat

SEQ ID NO: 812133 - DNA, 554 bp, Homo sapiens
gtacaataaaaattattgcgatttttaatcttttctgtggagaaaacacaggtgtgatttctagtgtagctgaacatcgtttatttgacagtattgcacttgtgtgtgggtgtgtgcgtgtgtagctactttttaatttggttctcacaaaatgattagatactaacaattaattcagtaaaatgtatgttttgcaatatttctccatgttattatgctttaaattagtttaatcatgcccctataatgtgtacattttaacctttgactataggtctcaatcttactttggttcctgtatttgaatttatgctaataaagtcccacagcttaataagattacataaattttttgtataatttttactagcattctgatgtcattttaaattatgtaatgaaatcaaattttaatttggattattgttatctgagttaaggatataaatttttaattttcttataaatattacwtaattatttctgaaccatacattgactaatctgccctttatatgatgtgtattataagagcttaggattgtttcatttgc

SEQ ID NO: 812134 - DNA, 600 bp, Homo sapiens
ccgggggggaggccaggatgagatatttgtgagtgggtttgttctgatgtagcaaaaactctctcgttgctgtgggctgggaagtggctgactggctgcgtggtcagagtttgcaaarcttttgcagatccttttgctagaggggctttaaaagctgcaagcgctcagcagttcctatcagctgggatttttttcctccagattgaatcctgtcagggttttactggctcatctgttcccagaatgacaccatgtcccctcacctgagcagcacggccttgccacccacggtactccctgctaccagacggctcccggaaggaattcttcaccagccctattttttgtcccctgaacccctctcctgactctctcaaaaccctctggtttctcccagaatttggagccaagcccatcagggacaaaggaatgctgggaccttgtttggatctcagatttggtggtttgctccccttcctggtgtcatggtttgaagcattttcgaaggagcccccgaaaagcaaggacagtgtggagaggctgatgcccagaggcgatgcggtgtgtctgggaaaccagaggggaccctgcctgcaagtt

SEQ ID NO: 812135 - DNA, 613 bp, Homo sapiens
gctgatgcccagaggcgatgcggtgtgtctgggaaaccagaggggaccctgcctgcaagttcccattgcccccaamcccattcctatccctatgagcccctggcccttcttcgccagtgcctgtatcctcagagccctctcagggagcctcacccgccagcctctgggcgtttggcttcccgtcttttgtttggtcaccatgggccctgccactgccaactcaggcaaacagagcttgggccagccctgggctgcccagcctcccggacgcattgcacactgctctgtgtcagcagaaaaagtgtacatgacaagtggcatactagagcgccctctccccccaggcctagctacaaagcctccatgccctgctgagccctgcccaccgggcccagcgtactctccgtactctccgctccgccagcagtgtttcaggaatcctgaggtgcagctcaggtggctctcggtgacgtcatgggaagtgttctgggtcggttccctttgcctccctgcctccacctccttcccagacttgccgaggatgttgcctccaagcccctcccagctcccaaaataccaaccctgcctcctggccctgccagaaaacgcttag

SEQ ID NO: 812136 - DNA, 591 bp, Homo sapiens
aatacttaccattgtgttataattgcctacagtattcagtacagtaacatgctgttcaggtttatagccttggagcaataggctataccacataaccttggtgtgtactaggctacaccatctaggttgtggaagtacactctgatgtctgcatgacgacaaaatcgcctaacgatgcatttctcagaacatatccctgttgttcagtgacatgtgactgtagttccatacaaggaggctttgggtgttgcagggaaaagaggtggtaaaactaatatagactggagttcaggaggtttcattagctgagggacctccacaggctctttctttctgcattctttattgaattcctagagggcaggaactgtttaatgtctaaaacacacttggggtcctgtacttagtaggttctgaaaaactgtttgctgattaaaaaacttaagacatactcaccttcaaagaaacacatgcaaacatccatagtcttgtatacatgatgtgcacctccttgygtatacgccatgtgtatgcccatatgtaataaataaacactcatagtcccatctctcctcctcaatcatcctaaaa

SEQ ID NO: 812137 - DNA, 633 bp, Homo sapiens
tcattgcattatgaagcaataaacctcatgacatttttttaataagcctcctgctttgtcataaatgtttgttgacattacttgatatccctcacatatgtcgtctcctttatttttttatgccartctccctgactgaggtcattacttctaatttgaactaataaaattgcttactaactggtcacctgagcttgtatttacacaacttctatccattttatgtattgtaatctaatccccaaagactccccacacttaaagaattcttatgaatttactttggcagataaggccctccacaacctggttcagacccacattgccatcttgtcttctgttagttctaaaaacataggttctctctaatgcttagaaattctcctgtttgtggacgcgcttttacccgtgctaatatttcctcatttagtactctctttcttcatacaactcaaaattaacatgtatttgaagtgttacctttatttcttcaaccaaaattattgggcttctgtcacatgctaagaaaagtgtgcgatatatgatttaaatataaatatgactcattcagccatcaaagaacttacagaactaagaagaaataacatgaataactagtatccttgatactaa

SEQ ID NO: 812138 - DNA, 501 bp, Homo sapiens
aaattagaacattaaaccttaatgtaggaaatggtaatcaaaatagttcaaactctggcttagcttggttcttaaaggctagtaataaactccctgacatgggggtttattgcaaagaacatgaaggagtttatgagtcagcatctcttttttagtcacactgacattctaggtttcagtattgaaaaggctgggtagtatagctgccttatggagtcataatagtagttcaacataagttactttcactgtttgttgaccctccatttaattatccttcttaagagagagaccttgatttaattggtgttacaaccattcaatatagggtactccctttgaaacaggattttgtatcaagtcatctcagaaaaggctgggctccctcatgaccartgaatttattctcactgggcactgatctctaatctaatcagctagtagcagaggatagaattcacttacagatgattgaatgagcactaatcattttacacagaa

SEQ ID NO: 812139 - DNA, 534 bp, Homo sapiens
ttaggactgaccctgattgcaatgtcctgagggcatagagtacgtcatatttatttttatattactactgtttagttcaagaactggaccacaaaataaatgttgaatgatttartaaaagaataaacaaggtcaaggcagttggaatgtagtgtaggagaaagacgtggaaaatatatagcttgtaaacaggatttggtaactggctggttaagggtcgtgaaagggctggagaaagataagcaaaagtcgaagatagctctagtttataaatggtagtgtgatagagtaaattagggaataccagaggggaggaaagtttaaaggaaatattaattctccctctaaggatatgctgattttgagatacttacgggagtcctataaaatgctcttctaactcactttacagcagtagtacaatgcttgcatagagtagatactcaaaaatatctattgaattaaatttccatactaattcattaaaaatagccatgctgaaagttaaattctgggttcttctatatcagctaa

SEQ ID NO: 812140 - DNA, 489 bp, Homo sapiens
ttcttttcttttctgagacttctatttagtgctgaggctaatttactatcttytataagaactggccagagacccctactgttttcattgatgaatatccaattacaggaaaaaccaatgatactacttcaaagactatttttaaaataaagcaatcatttggaaatcatcttcaaaaagaccactctttcccaaaggactcatgatagtgataatttttttgtgtggattcagcatgaacctgacaaaaggaaatccttttaatatagcctttaaaggtgtatgtaaaattggtggggtaagggaacttaaagcacaatctcttttttttactttcatgaaggttgctcaatattatatagtgccttacgggtctttttccagcagggatccttataggaatcatgaaattcacctagcccagaggaaatgtgcttacctgtgttaagaaatgtactccatccactggcagatgaaatccaattccca

SEQ ID NO: 812141 - DNA, 620 bp, Homo sapiens
aggacagctaagtcagtatatttagagcaatactagcatacgtttttcttaattgttatcagcattgaccaagtggtttggaaggaggcatgctttaatatcacaataattttgatttgtaaaccaagaaattaatcctgtgtttatctaacttcataatagcaattattgcccgaagctatagtggcatatttacaaaagttcttattactgggcggactgataacatttaaaaaataattgtgtttgaccccaaatgactttatacccaattctacataaaaatatagaagatctatctttttttgttaccttcagatgttcactaaataactcagtttttaagcagaagttttcagggcattaaatatatgttgtgtatgaagtatctcaaactggaacataaatttagtgatcaaactgccattcacagtgtaaggcagcacttaaatttcgaacctaaagtttagatgcattgtataaaaaaacctaaaagcagtatctgttatttagctgtaaaccaagttggaagctattcggataatttcttaaatattgatgaactttggagtastgtttcttccttcaaactgaatgtaattaattcatgaataaatgca

SEQ ID NO: 812142 - DNA, 595 bp, Homo sapiens
cagcattcccatatatcccctgtccccacacacgcacagcctccccaactaccaacgttccacataagagtggcatatttgtcacacttgatgagcctaccctggcacatcattattacccaaagtgcatacttcccatcagtggttactgttagtgttgtatattctgtgggttttgacaaatgtataataacatgtagccaccatcatagtatcatattaaagaatttcattggccaggcgtggtggctcacgcctgtaatcccagcactttgggaggccgaggcgggtggatcacaaggtcaggagatcgagaccatcctggctaacatggtgaaaccctgtctctactaaaaatacaaaaaattagccagacgtggtggcgggcacctgtagtcccagctactcgggaggctgaggcagtagaatcgcgagaacccaggaagtggagcttgcagtgggccgagattgcgccactgcactccagcctgggtgacagagcaagactccatttcaaaaaaaaaaaaaaaaagaatwtcattgccctaaaaatcctctgtgatcctcctattcatccttccccgctaaatcttca

SEQ ID NO: 812143 - DNA, 629 bp, Homo sapiens
ggtaatttgcagaaagactttgagaagttattgaagtacataggagagaggcatattttctaaactcctgtacccatcaatgataacctctttgcatcacaatttgtttccttcaaagttctatagatgtagctggcagtggtagcacgcatctgtagttcccagctacttgggaggctgaggcaggaggatcacttgagctcaggactttaatgctgcagagagttataatcacatcagtgcactccagcctgggtaatagggtgagactccatttaaaaaaaaaaaaaaagaaagttctataaatggttaagcagaatgtaaagagtttagggggatcacactgggtttgaatttcagctccattatttacaatctgtgagacaatgaataagtccctgtaccccctgttaaaataggacttcataagacgttggttaagcaaataaaagtgcttcgattcaattaagtgctcagtaaatgttagtgattgtgatgatgtgatgactaaatgacaacatcagtccttttccttctggcatttagttccctagaggacaagatstgtagccaacatgagtttagttcatttgaaggtgatttgctttccccaattcactgtttatagg

SEQ ID NO: 812144 - DNA, 553 bp, Homo sapiens
aaccctctcctatcctcaggctcctctctgaactgatcttgaccctcttgctccatctgcacctacyttgccaatatttgtctaaagtggcagctgccttttctcttatgctccttatgcctcagatcatagaggtagaatagctgtcctcctggctacctgtcatctgctagaaactatctgtcttccttcatctttcagaaatcacaactcttctaaagcacatggcatcttactatttcacccaacattcttttatagccctcttctactagcctcccagtgatgcccctttatttatgagactggtacctggttcatggtctttttcattctactcctgttattattcttggtgacaccaacttggtgacaccattcaacaccctgaatctcagctccttagctttatcacctctaattacttttccctccattccacctcaccatcaatttccttgaccaaaccacgaattgcatctcctctagaataacagtctcaaacattcgtctctctggtcctttctattcttccatctcgtttactctatta

SEQ ID NO: 812145 - DNA, 438 bp, Homo sapiens
tgtaactaagaaaaagatttcaaaccttcagcatggtagttctcaaagtctggattcacagcatcagcatcatctgagaacttactggaaatggaggtttccatgatycaccacagacctgctggatcagaatctctggggatgaggccaggtctcctgccacctagcaagccctctgaaggggtgggttgcccctccaattccatcacaggcttttaaatactctgagattacatctgagcctgcgggaacctttccttttaatgacttaacggctgattgacactcaggattggcgtcttcgtatgccatcaactccactacgcccatctccgccactccggattcggggatctgaacccgactccctttcgatccgctgagggcaagggaggccattgcctgtcccttcggaacggcgctcgcccatctctcagg

SEQ ID NO: 812146 - DNA, 516 bp, Homo sapiens
ctcagatctcaatcatttaggacacccaaatgccaaggacaaagtaggaaatgttgttaagctgtgtgtccaggaggaaaggggaaagaatttggggactccccctctctcttgctggctgggacataacctctctgttttctgttctgcaaagtgggcctaataattgtatctacttatgattattcctactacatttttttcagggatccaaaactggccacactgagaattgacttgaattgtaagagacctgtgaatcagcaagattgccggtttatttccagtagaggctataaacttatcggccaccagctaggacatcttgtttttgactcaagctgtgtaaactgccatacaagccatcagaaggtgatattctgagtagaggrgatcagagaaaaggacataggacagcctgaaggggtgctttttctctagaccaagtgaccaaggtttctaagccttgtcactaccgacattttgggctaaatcattctttgtggcacggccttc

SEQ ID NO: 812147 - DNA, 663 bp, Homo sapiens
acagatgcaatagaaggactagatcagagctgccagatactttcccagcagcacaaacgtcaacttacctagagttgtaaaactgacattttgcccaaaattcttaactttcagggtatttgggagctgttaggattggcaattcagattcaattcaaattatttttttctatagtcctagaagcctatgccccatcatgcagtaaatatgatgtaaatatttgtagaaagaaagcaaaatgcctctgaaggtatcttctccagtatctcctactcaccagaatctcactacagcttaggtagcctccccaccaacccttttcttgcctttttctttgctgcttccctccaacctttgcctccatgccaccgacatgaagccccacttcaagcaggatgagtgagcctctggttggaggcccctggtgctggtgcctgtggctgggcaaggactgaccaaaggctggggcttgacgagcatcttgctccctggtgggtgcccagcccccaccagcctaccgactgggccctccctcccctgcaccctcagcagcacrcactttctccccctttgctcttcctcctcactgtcccaaatccttgtttaattcaagggtgtatgtgaatgatccagtcagagtggcagggaactgctctctggct

SEQ ID NO: 812148 - DNA, 572 bp, Homo sapiens
cagtagcatcttaatgacatgattgcattgaggagattattattttctcctgacatctcctttataagttctttctgcgttgtaaggtaaaccattagcaatgccccagaaacagatgaaacttcaaaaggcttgaaacgacattaaaaattacatattgagtttttcagaataagcagtaatgttcagacacaactttgtaccgtaagcaggggcattgttaaaagtaggaaaaggaaattggtaattatcttccaaacctgactcccatttcatgaaaatgaaattgggatgggactagaagcaagaaacaaaacacctgtggtgctctggaagatttttccaccataaatggcaagaaggaagaacagacaaacacaatcttagattagcagccaataaagtcctcccatcctagtaccagatcatggctcctatgactaaataaagcactatttgtgaagcttcagtaatsgccctctttttaaaaaaaaaatataaagaggtaggttcaccgttgattaaaattgctcattttcaatacatctggcactctggacttcacaaacatg

SEQ ID NO: 812149 - DNA, 572 bp, Homo sapiens
cagtagcatcttaatgacatgattgcattgaggagattattattttctcctgacatctcctttataagttctttctgcgttgtaaggtaaaccattagcaatgccccagaaacagatgaaacttcaaaaggcttgaaacgacattaaaaattacatattgagtttttcagaataagcagtaatgttcagacacaactttgtaccgtaagcaggggcattgttaaaagtaggaaaaggaaattggtaattatcttccaaacctgactcccatttcatgaaaatgaaattgggatgggactagaagcaagaaacaaaacacctgtggtgctctggaagatttttccaccataaatggcaagaaggaagaacagacaaacacaatcttagattagcagccaataaagtcctcccatcctagtaccagatcatggctcctatgactaaataaagcactatttgtgaagcttcagtaatcgccctctttttaaaaaaaaaawataaagaggtaggttcaccgttgattaaaattgctcattttcaatacatctggcactctggacttcacaaacatg

SEQ ID NO: 812150 - DNA, 629 bp, Homo sapiens
agctcaattctcccactcctttttctactgcaaaatctacgttcaagcagtatgctatgtctttatcctctatttgatgctagcataaacagaaaacagaattacaaatgcaagcactgaattatgtagtggtatttcatgatgatgtagtcatccagatggtgagtagagatctgacttttttaaagattatcatcaaaatgataacctccaaataaattcctgagtggcaaacagcaatcctcaaggatatatcctggagctctaggtggagaaccaaggaggtgctcaggcttccccgatgtggatgtgagaacagggtaatgataccagctgtgggacaggcctgccctggctttgccaccatctgctctgggtgaagtctacctgccctcagattctttgaaaagaattctgggtgtccctgatgtctcacctgaactctgagaacaagttctcacagtagtgtcctttttttcttttttcctcctggcacttccccctgaatgctgtctctcctgccaccatttaagacgtgatctgcttcccctttgccttctgccatgattrtaagtttcctgaggccttccaagccatgcagaactgagtcaattaaacctcttttgatt

SEQ ID NO: 812151 - DNA, 583 bp, Homo sapiens
gtattatctcagaaaatagaaaccaacttaattgccctttagctyatgtgacttgagtaattctttaaaaataaactagttttacaattactgataaaaataaaaacagaaatatcttcaaaattgtcagcattaaatataatacagacatacaattttgtctgtttttgccggacaggtttgtgttgtctctgttagatgtttcaggccataaaattataactcccaccgtacagtggaatgcatactaaaaatgaattgcttaattgcttgacgcatgtcagttgtgaaaggaaaaaaagaggctgtaaaagtgttgtgaaaatcttatcttgtgtggtcaaaactgactaaaaatggataacttcacttataaggttttatgaaaaattagttttagttgtacattgacgcaaaagtagaatttggtcttatctgttaaaatgacaaatttttcttggagtattgatctgagaatatgaaggagtttccttgtcttttaagtaattgacctaggaagcaaatattttgtgttttatcaagataatttcttgtgtttcatgttgtcttttattaggtcttt

SEQ ID NO: 812152 - DNA, 625 bp, Homo sapiens
tgggtgtgtgcaggtgtgtgggtgtgcagtgtccctggctgcgtgtgggtgtgcgcagtgtgcaggtgtgtgggtgtacrcagtgtgtgtggctgagtgtgccgcctctctggcggctcgtgtggtgtcaaagcccgcactgccgttcagcccctgggtgcctggacttctcttctaagatgatggagtttgtggtcggggactgagttgccaaatgctcaggtgggcgctggtgaaacattttctattcgacccaaattccagggaggaaacagctctcctgaggggcatcttttttaccacaacgatgatgttttgctgtcagggcctgcggtcatcctggtcatggtctccgggtgctcaccctcgacggctcgctctttccttgtcttcagttccaaaccaggcgacgtgacttcctccgttcaaaggagctgcaggcgcctcctcttggcttcgtagaagcaagcattcagattggacagcagcattttgcccaaataatttttctatctttgtgaaactgaacttgtaggggaagtttagtctcggggcgatgttgggcagcgcagtcacggattaagatgtgatggtgactttcgcatggttccatttccttatgcct

SEQ ID NO: 812153 - DNA, 541 bp, Homo sapiens
tgtggctacgatggcctcaacctgcttccccactcccgaaactcctgtctctatctcacagtatacggaagataccattttctctgacatgttgtgcctggtggccttgggaaggtttcgctgtaattttcatatccgtaccagcccccaccttgtgctcaacctatttacaaaaacccacgggcagtcaaggacatgtgcagtgtagatacagggtgtggcatggctgaggactttatttacaaaggatcatgcagttgtattattacacgcaaagcatcacaaatagagaggaaaaccacgacatattgaacacaagagttcatccggttgacccaagatgtagaccacgagttattcaggaaggtgacacagccgtctcatttgactccatcagaacaaagaatcagtgagcaaaaggtctccaacagtaagaaaagttgrtatcatagaaacttccacaacaggaattcactgagaaagaacgattagtgatacaaaccaacccaggggtcaccgggcgagagcgcaccgtcatgca

SEQ ID NO: 812154 - DNA, 558 bp, Homo sapiens
agaggacagaggcaccaccgggaacccaccggatcctcactcaggctttggaaaggccgagtgatgttttgtgtttgtgaattccacacatactgtaggagtatcaagaacacgtaactgttaaaaaaggaaaagtaaaattactgaacaggaaagaaagaataaagcaggtcctttgtttttttggctgaggaaagcagcctgccctggaacgctgtagaatgtctccctttttgtgaagcacagcatggagctctcggaactgaagatgggaatctaaccctgccctcagctttcaacagctcgaagtttgtctttttaatgaaactaatttgtgtatttatacttaagggttttcaagtccttaaacttgataagaaaacttaagtcgttttctatcaggacaagtttttaagtagtcactggtgggagagcgtgcctctgkggactgtgcccaaggctggcggtcccacgaagtcccagagcccgcgagccggtgcccaaggccatgtctgtgatttgcaggaggttcaggtgacaggaaggcctgctctgttt

SEQ ID NO: 812155 - DNA, 561 bp, Homo sapiens
caatatctgacctgcctttcctccaaatttcttagctggaattctgtaaagayggattttcccttatccactgcttgggtcccagaggtacagtttctgcttcaaaaggccccgcacattcttgtttttcccgagtcccagtgtctagagccactggctggctccctggctcctccgaggaccccgaggtgaccagcggctctgttagttccatcgtgagcccacaagctgtgatcgcacttgtggtgtttcacggttgaggccattgcccttggaagctcggatggccgcatcctggggcgacagactcctcggtgcctgcagttcgtgctggcctcagggcctcggctgctctgggtcctgcctggagaccccaaggctgcctctgtggacggagggagagagtattttttaaagagaaaattcatattaggatatataatataaagaatttatattaatatttccagttcaaatttaggattacagggttttcactatttagattttatatcagatttttttcttttactctgagaatttgaattttttttttttttt

SEQ ID NO: 812156 - DNA, 536 bp, Homo sapiens
gctggtctcaaactcctggtcttaggtgatccacccgcctcggcctcccacagtgctggaattacaggtgtgagcccaccacgtccagccagatttttagttcttaatacataacatagttacttatttgacatatagaaaatttgatatatagaaaatataataatttaaaaatttaaaaaaatttttaaaattcagagagagctcttcgatcctttttctctttctttctttcttttttttttttttttttttgagacggagtctcgctctgtcgcccaggctaaagtgcagtggtgcgatctcggctcactgcaacctccgcctcccagttcaagcgattctcctgcctcagcctcccgagtagctgggattacaggcatgcaccaccacgcccagctaatttttgtatttttagtagagacggagttttgccacgttggccaggctggtctcgaactcctgacctcaggtgatccacccgcctcggcctcccagtgctgggatgacaggggtgagyccccgcgcccggcccc

SEQ ID NO: 812157 - DNA, 592 bp, Homo sapiens
tttttagtacagatgggattctaccatatcagccaggctggtctcaaactcctggtcttaggtgatccacccgcctcggcctcccacagtgctggaattacaggtgtgagcccaccacgtccagccagatttttagttcttaatacataacatagttacttatttgacatatagaaaatttgatatatagaaaatataataatttaaaaatttaaaaaaatttttaaaattcagagagagctcttcgatcctttttctctttctttctttcttttttttttttttttttttgagacggagtctcgctctgtcgcccaggctaaagtgcagtggtgcgatctcggctcactgcaacctccgcctcccagttcaagcgattctcctgcctcagcctcccgagtagctgggattacaggcatgcaccaccacgcccagctaatttttgtatttttagtagagacggagttttgccacgttggccaggctggtctcgaactcctgacctcaggtgatccacccgcctcggcctcccagtgctgggatgacaggggtgagccccygcgcccggccccatggttgttctcaggctgtg

SEQ ID NO: 812158 - DNA, 577 bp, Homo sapiens
attagtggacaaacaaatgaataaatctagtaatagtgacacaagaggaaattaacactacctataggaaggaacataagttggtgtcagtgtttcagtgggtaacaaacattatytacacattttaaatattcatggctgttgattcagaaattacacttgaaaaatgtatacaatgtagacatatttattcaactgtaagactatatatatttacactcacccccacaattatatttactgtagcagtttgcaattaaaaaaaaaaactaaaaagtcaaacagaaggggatagagaaaataaaaacagacactatacaactctttcaaaagatgggatagctctgtatatactcacaaagacatagataacattgaggaaccaatagatatcaatagataaatgtttattaacatttatggagtcttttctatgtttcaggtaaccatctaagcattttaaattcatggaaatatttaatcttcacattatgcctataaggtaggtactattattgctctcattttacaaaagaaattgaggtaaaaacagattagataatttgccaggaatcat

SEQ ID NO: 812159 - DNA, 403 bp, Homo sapiens
agaccaaaaccagggtttggaacaatagatttgtatcacaagcatagctcaggaactaatcttctacttttgactataaatgacatcaaatacttcacactagtgtttgtttaaataactttgtaataatgccatattttaaaagagcctagaatattggaattagatttctttttacctaatcaagttttcatataaacaatgttaatatctgactgtatctttagattgccaaatcattgggcatatttatttattgtgaaatatatsctaagatatttaattctcagattttgcatggctggctacttctcattattcaaatcttggctgagatatcacctgctacgaaaagcctttaatgaatattatcctaaattactatttcctatccagttactct

SEQ ID NO: 812160 - DNA, 523 bp, Homo sapiens
ttcattgctcagatctcaatcatttaggacacccaaatgccaaggacaaagtaggaaatgttgttaagctgtgtgtccaggaggaaaggggaaagaatttggggactccccctctctcttgctggctgggacataacctctctgttttctgttctgcaaagtgggcctaataattgtatctacttatgattattcctactacatttttttcagggatccaaaactggccacactgagaattgacttgaattgtaagagacctgtgaatcagcaagattgccggtttatttccagtagaggctataaacttatcggccaccagctaggacatcttgtttttgactcaagctgtgtaaactgccatacaagccatcagaaggtgatattctgagtagaggrgatcagagaaaaggacataggacagcctgaaggggtgctttttctctagaccaagtgaccaaggtttctaagccttgtcactaccgacattttgggctaaatcattctttgtggcacggccttc

SEQ ID NO: 812161 - DNA, 589 bp, Homo sapiens
tactgagataataatgtaatttttatccttcattctattatgtcgtataccacattcattgatttgcatatgttgaatcatccttgcatcccagggataaatcccactggatcatggcatataatttgtattaaatatgctgttgaattcagttttaaggttttctttaggatttttttatccctgtttattggggatcttggcctgtggttttcttttcctgtggtatttttggctttggtatcagggtgatgctggcctcatagaaaaagtttggaagtgttccttcttctatttttggaagagttttgggatgattcgtattaattcttccttaaatgtttggtagaattcacctgtaaaaccatctggtcctgggctttgctttgttggaaggtttttttttttttaaattactgatttgatctccttatttgttgttgatgagggtctggagaaaagggaatctgtgtacrctgtagtgagaaggtaaattggtgcagctactgtgagtcttcctcaaaaactaaaaatagaactaccgtatgatctgttgatcccacttctggatatatatctaaaagaattg

SEQ ID NO: 812162 - DNA, 455 bp, Homo sapiens
tgtaactaagaaaaagatttcaaaccttcagcatggtagttctcaaagtctggattcacagcatcagcatcatctgagaacttactggaaatggaggtttccatgatycaccacagacctgctggatcagaatctctggggatgaggccaggtctcctgccacctagcaagccctctgaaggggtgggttgcccctccaattccatcacaggcttttaaatactctgagattacatctgagcctgcgggaacctttccttttaatgacttaacggctgattgacactcaggattggcgtcttcgtatgccatcaactccactacgcccatctccgccactccggattcggggatctgaacccgactccctttcgatccgctgagggcaagggaggccattgcctgtcccttcggaacggcgctcgcccatctctcaggaccgactgacccgtgtt

SEQ ID NO: 812163 - DNA, 638 bp, Homo sapiens
gtgacaatctacttttttcatctcagaagtgtcaacaagacaaacatggttaggatctcttaccttagcagggaaagtgcttatatccttttcccatatgaaagggataactttgggactttagtttagaccttgttgctgtttcactgtgttggagacttgcagaagattaggaataccctccactgtgccttgtctagcttccactccacagtcatcaaactgactcatcttctcaatcatttcctcccattagctttccctgtcatcacaatcactcaaagaagctgctccttctgccaccaaaaaaaatgttaatggatagaagggctccccactgccatattctgatcacaacttgttgcctttacttattgacacttgaactctatgccttcctctctctttggttgcagtcacctgctcaactgactttttccttagtgacatcaacgtatggctcagagacctcaactccactcttcctccttgtctcctgtcaacttcaagttctaagagtatgactcttytaacactaaaccttagaatgtatcaatctccctaacttgagtgattacaatactaatattatactttctgctgttctattatactgtgctactttaaagtattttagt

SEQ ID NO: 812164 - DNA, 637 bp, Homo sapiens
aagcatcctttaaatcctttagtatttaaagtatcattttttgcaaaaawatatatatatatatatgaggcccaacttatttttgcctgtcatgaaatcaaaggccaattaaataatcactgccaaatttatattccttttttataggttttgtttattcaaggcattcttgtacagtaaagggcaggaaaaggagagggagagggaaagggagaagaggaagaaggaggaaggtgtgtgtgttgggagtagggagaagctttgcaaatggtaaacctgggttattatttgacttttggttaaaaaaaaaagttgcatcaaattaagcagtaagcaatcatgaagcaggcagtgacatgcatagagcagattttcctaaatcatcttccccagaacgccaattcgctaagatgttaataagcattttccaaataaagattttcatttttcagataaattcaggatcggctgcatctccactcctggtgagtgacaaattcgttttagcatgttaaaggctctggaaaatgctagggtaaaagcaaaatgaaacacaaaacaagaagcttgattgacttcctttagcctggcaccccccagatgctaaacctctgttattgaagtcgctgaggaacag

SEQ ID NO: 812165 - DNA, 629 bp, Homo sapiens
ttaattaagttctcagagttaccatttgacttgacaccatttatacatgtcatgaaatcatttcactacttgctagtagtactttttggagtaataacatgtataaatttggtcataactagacatacatcaaaatctatctggcttccatttcatctcttgaaatatcagaagaccaaatgcttacttcctggtacttttgtataaaaaacaattatagtgggagtagccaagatggccgaataggaacagctctggtctacagctcccagcgtgagcgacgcagaagacgggtgatttctgcatttccatctgaggtaccgggttcatctcactagggagtgccagacagtgggcgcagctcagtgggtgcatgcaacgtgcgcgagctgaagcacggcaaggcattgcctcacttgggaagcgcaaggggtcagggagttccctttcccagtcaaagacaggggtgatggactcacctggaaaatcgggtcactcycacccgaatattgcgcttttcggaccggcttaaaaaacggtgcaccacgagattatatcccgcacctggctcggagggtcctacgcccacagagtctcgctcattgctagcacagcagtctgagatcaca

SEQ ID NO: 812166 - DNA, 671 bp, Homo sapiens
actttgagaatgatataaattggacatgttattaagaatataatcatgtaaacatgtaggtaccttcttattactcttcaactgttgtcaagcaactgmcaccggttccctcttactgtaaccctgattcagtgtccaacatagacctgtacagaaagaattggaagtctacagctttaaattctgagatgttgtcctgaatatctgggttttaggacaactcaggtgagcaatcattacaaatgatggaaaagttgacctttgttcttctctctctcatttgccacgtagtgctctatgtgcaaccgcacagtcccccatctctctgtttacagaaggactgggcttgatgtttttttcagctttcggaatcacgtggttttctgccccacattgcttaggacaagctggaagggagagatcagagccccaccagggctcctcagtgtgattccctcctaatgatccttttccaatcagaagggagtaattttcctccgcctcattattttcctgcctagctttctgccctttgaagctgagttttccctgccattaacaaataactaggaaagtatacttactagaacttcttactaatctccttgtagttttatagctcgacctcttaccaaccttttgacacatgtgatttcttaaaggggcaatgc

SEQ ID NO: 812167 - DNA, 645 bp, Homo sapiens
aggaagagtccccagaagatccctgggaaacagcgacatttcagggataagtaggaaaagaagatattgcttgaaatgacaagcatagatacacaaacattwttctgctttaaactatgttggagatgaatgttcatatggaaagattttcatgatgtattttaagtgaaagaaggcaggcaataaaagggggcaaaacttacaatcacatatgcacacactaatgatctgtgaagtgtgcaattaaaacaatatttttattttcttccttttgcttatctgcacttcctattttttccaaatgtgaacttgcctacattttgtaaataaggggaaaaaaataaaatttttaaaaagataaaagatatcttgcacccatggaactagatacaacagacatgaagagaatgcagttttgaaatttgaaactgcacagaaaatgcagttttgagatttgaaactgttaagacaaaaagcacaattgaacgattttcaactgtaatagaggcagaaaattgggtacttcagaaaactgaagtggctcatcggaagatgagttctgtacattctttcagaatgtggaagaaaagaacaagaaccagaacataatgggtgcaaaggtaagataaatgcaggacagacaaa

SEQ ID NO: 812168 - DNA, 621 bp, Homo sapiens
gggaaacagcgacatttcagggataagtaggaaaagaagatattgcttgaaatgacaagcatagatacacaaacatttttctgctttaaactatgttggagatgaatgttcatatggaaagattttcatgatgtattttaagtgaaagaaggcaggcaataaaagggggcaaaacttacaatcacatatgcacacactaatgatctgtgaagtgtgcaattaaaacaatatttttattttcttccttttgcttatctgcacttcctattttttccaaatgtgaacttgcctacattttgtaaataaggggaaaaaaataaaatttttaaaaagataaaagatatcttgcacccatggaactagatacaacagacatgaagagaatgcagttttgaaatttgaaactgcacagaaaatgcagttttgagatttgaaactgttaagacaaaaagcacaattgaacgattttcaactgtaatagaggcagaaaattgggtacttcagaaaactgaagtggctcatcggaagatgagttctgtacattctttcagaatgtggaagaaaagaacaagaaccagaacataatgggtgcaaaggtaarataaatgcaggacagacaaa

SEQ ID NO: 812169 - DNA, 645 bp, Homo sapiens
taataaataaattcagcaaacttgtagaacacataatcaacatacaaaattcagttgtgcttatatagactgaaaacaagccattcaaaaagaaaattattaaaacaactacatttacaattgcatcagaaaagtaatagactcaagattaatcaaggagataaaagatttgtacactgaaaaaaacgaaatttgtaacaaatgaaattaaagtggatgtaaataaatggaaagacatcccatgttcatggattggaagacttaatattattaaatggtccacattatccaaaggaatctacagattcattcttatctcgccaaaatctcagtggcaagattttgagtggttttttacagaaacataaaaagtcctaaaatttgtgtataaccacaaactaaaaaatccagatagctaaagagattttgagccagaacaaagctgaagatatcaaattccttaatttcaattatgccacaattattcagtaaaacctgaagtatgggtgcagcataaagacaaacatatacaccaatagaacagaataaagagctaaaataataaatccacacatatttgtctttgacaaggacttcccraatacagatgggaaaaagataatctcatcaataaattatgctgga

SEQ ID NO: 812170 - DNA, 633 bp, Homo sapiens
cttaaagtttaaaaataattttacaagtctacccaggttcaagatgaaagaacataaactcacttctcaaagtaacaatgtaacggaaatacaggatgggagatatcattgtggctgtctttggaaaatacaaactatcacacatgtttatttatctattctatatttccctcaagtcttcttaacatacagcatcaaaagtaatacttgcataaatgtattattatttcatttattgctattataagtagactttttagtcactatatttacagtttgtgaaacaaacagaaatgcattattttacaaagttagtagcattattaacatgtctcccaggtgagattgatacagctactgaaggttttgttgaaagcatggcaatgctactaggggtgtggaatctgtgggtggatctactagtagaggatgatggcttgagttctgttgtgatctctgtctccaacatagccctgagaaagacatttaaaattcctgggtcttttattttgatcctcagtaaaaagtcttttttaaaaaattatatacttgwatgatgttgtattctctctctttgactgcagagaagatatttcttctttagagatgaagcaaaaaaaattcaaggagata

SEQ ID NO: 812171 - DNA, 579 bp, Homo sapiens
ctcagggatataagtatgggagttaatagagaagcccagtactatgcactaggggatacatacacttaatgggagaaagaaggattggcacagragaatcaaaactttccccaatacttcctgtttaataccacatttaatatttataattaacattaaatgactatattcttcatttgcctcataattttttctagttgaactgaataattcctaagactttcacatatgtgataatattgtacataataaacaaaaagttgtaattgccagatactttggtcattattagcatgatcaagtcgatttttcctttattatcagatccaaaaacatgtgatttcttttgtaaatggaatctctaagttaatatatttaggataaaatgtctaattgttaacaaagtacacaccaaaatggaagaatctttccccacattctggaataactacttctccaaaagttcctttgcaaatactcctctaaggaggagggttttctaaaccaacagtggtcaattattttttcgacattctttcaaccacgctcacctgtgctgtgccttttaacctctgttgc

SEQ ID NO: 812172 - DNA, 556 bp, Homo sapiens
ctacataagccttttggattggctttgatggacatgtgttccacaaggaatcactgataagaccttttaaagctcagcccagccaagggtttgcatcctcaaataccagcaagttgggtgatcctctcctcctaaggccccaagataaacctggagctcctgcacctgtaagaaagtgacagtctttactgaccacagtcaggaaccctgttcaggactgtgtaggaaagggtatgaggccagtttccccattaactttagtctagttaaataaagtctatttaaacaactcagtcctatgaggttttattggctctatgagtcgagcttgactccttaaagggaagcatacccttccagtcaaagccttggtaaaataaccactttctccaatgtgtcctgttgcaaaacaaaaatggattcttacygcactgatgcaaacaactatattgccataagaataagaatattcacagaggccaggggtggtggctcacgcccgtaatcccagcactttgggaggtggccagatcacctgaggtcaggagtttgagac

SEQ ID NO: 812173 - DNA, 596 bp, Homo sapiens
gtatttgcacattttctcagctgggaggaaaatttcatggcaatggctgtggcagatacatggaaaacacacaaagtaaaactttacaagtttcattgacttttatttccagaaaacatgacccaagaaaatgcattttggaagattaatttttatctatagtttgttgtctttgatgataaaaccttatctgagaattgctgtgaaacttttatgagttcctctgaccattttgaaacatcagtaaagtagaaaatgaaaccacttatttaccagagtgataaagcatacaagatttacatgtagtctctacacagtttttctttaaacaatctggtttctttaaggcgcaatgtaaggggctgatatcagttcatgttggttgagttgtgtttaccatgagatttagtttctttcttaagtactttaaacttagtaggttcaaggatgctcagtgagtccagacactcaataaatgctgtttgatgatgataatgctgaagttgcaacrtgagtgttcttgtattcactcacactgaatgtcttactaaggttcagactggcctggcgcggtagctcatgcctgtaatcccagg

SEQ ID NO: 812174 - DNA, 583 bp, Homo sapiens
atactgtatatggttctctttccaacgattccatcggcttatttcattttttctacaagagggcattctgatgcaatttttcttaaaaatccccttaggggaccaatcaatgatgattccataggaattattttgtaacacctcagccttacttgctataaaattttccccattccaagcatccacaccttcaaaccaaagtctattttgtttacattcgagtttgtctggacagaactgctgagatttagtgctagaatggttatattttaaactttgtcccaaaatcatatgtaaagtagcttgtgatttagttttttctggggattactaccaatcatacttgtgtgctaatttgtaagcaatccagcagcaggtcctaggcatattggaggatatttatatcctattgacatattcatcttcatcccttcctcattaggatgcattggccctcagttatctctgggstcaggcatccaggtactgtcattgttgtgcacctcaatgacagggtccatccaactcacagactcacagggtcctccttcattaaaggaggaaatgggacatatgcccaata

SEQ ID NO: 812175 - DNA, 643 bp, Homo sapiens
tttttctctgtgcatccagctcttaggtactctagtgctgactttttggttggtgggttacactgttkctattatcttttcccttccatcttgcatgcttgaccctttgctggctttagcacttaatcatttgaagaagtgcacctcttgcacatgctaatttagtataagtctttgtttatctggaatagtggaaaattgggtcttctggataatcaaagtagtaattaatagagagttctgacattaaatctgttgattaccaatatcataaaatctgtaacataggattttactaaacgtgatgtaacctcttttgcataactcaacatttccagtgtcttttttttttttgagatgaagtctcgctctgtcgcccaggctggggtgcagtggcacgatcttggctcactgcaagctccgcctaccgggttcacgccattctcctgcctcagcctcctgagtagctgggactgcaggactacaggcgcccgccaccacacccggctaatttttttgtattttttcagtagagacagggtttcaccgtgttagccaggattgtctcgatctcctgacctcgtgatccacctgctttagcctcccaaagtgctgggattacaggcatgagccaccgcgcctg

SEQ ID NO: 812176 - DNA, 622 bp, Homo sapiens
ttcacacttacttccaggcttaytgcatcaaatataattcatattggggcttaacatcacaagatatttaatgatcaatgcaaattaggtcctttcaaggagataggaatgcatgaaagaggaaatatcttatgattctcgtttgaatcataagaaaattagaaataatttagtaataacaaaactaaactatcaaattgtcctcttaatctagtggtaatgaattttttaaaaagagtctaactatgaaatgtagcataaaaaaatgcttgaatagtatttcattgttttgtatatgccacattttctttattcattcacctattgatggatacttgggttgaatctatgtcttggctattatgaatggtgctgcaatggacatgagagtgcagattttaaaaatgaatatacagcaaaagaaactatcatcagaatgaacagacaacctactgaatgggagaaaatttttgcaatctatccatatgacaaaagtctaatatccagaatctacaaggaacttaaacaaatttacaagaaaaaaaacattaaaaagtgggcaaaggatatgaatgaacccttctcaaaagaaaacatttatgtggccaataaacaaatgaaa

SEQ ID NO: 812177 - DNA, 622 bp, Homo sapiens
ttcacacttacttccaggcttattgcatcaaatataattcatattggggcttaacatcacaagatatttaatgatcaatgcaaattaggtcctttcaaggagayaggaatgcatgaaagaggaaatatcttatgattctcgtttgaatcataagaaaattagaaataatttagtaataacaaaactaaactatcaaattgtcctcttaatctagtggtaatgaattttttaaaaagagtctaactatgaaatgtagcataaaaaaatgcttgaatagtatttcattgttttgtatatgccacattttctttattcattcacctattgatggatacttgggttgaatctatgtcttggctattatgaatggtgctgcaatggacatgagagtgcagattttaaaaatgaatatacagcaaaagaaactatcatcagaatgaacagacaacctactgaatgggagaaaatttttgcaatctatccatatgacaaaagtctaatatccagaatctacaaggaacttaaacaaatttacaagaaaaaaaacattaaaaagtgggcaaaggatatgaatgaacccttctcaaaagaaaacatttatgtggccaataaacaaatgaaa

SEQ ID NO: 812178 - DNA, 622 bp, Homo sapiens
ctaaagggcagtttggcatttttcaccttaataaaatgaagcctcctccattatgacataatacgaaatgaaagcttgaacattttcatcacatcatatgacaaatagtatatataataatgaaggctcaggattaaaaatgtttcaaaccatattcgtgtcgaaggaaaatgaatactgggtgactcaaaaaatatggcttctagcatcgtgaaccaacttaaacactgaaagatgtgattgtctataaaacaagaaacaaattaaggaggctttgagatattgaagtctacctgaagtacaatatatacatttctttttgccttcttaaatctctgtagaagaataagattttgtattcctgaaacagactgtgagacaattgataggaatcagatatctggtataaatttttttggtgaagccactgaaattaaagttaaaacagatatctggccaattaaagaactgaccattcatgttttatgatttcaaatatgtgaatcctaaaatggtgtcaggaactagcrtctacctctgtactgtacaggcatcagtgtgtgatgctgagtcacttaaccctgtgcttcagggatgtgttgactaataagccctaataaga

SEQ ID NO: 812179 - DNA, 608 bp, Homo sapiens
aatattgtgtaagaattaggagctattggagctattaggagctagtaggagtccttgtataaggactgggagtactgcttcattaactgccctcagttcctaaattaatctctgttccccatttgatttacttatgggcaaaatagggatgttacgtgggtactgacagggccagttagtactttaaagtctatactttaaaagctttactgtcatgggttgtgggccccattgtgtttctggtctcaaaaattattgtttttttccgtggtaaccaacattgagttttaaacaaaactggactggggttacattagcagctctaccgggaacttccatgtctgaaacagaggactacttgagaagtgatatgcagtggaagagaggtcttttctttacctgtatgaaggcaagcacttagagctagaagtagtattcctgcctggcctattgcatttttatgaggctctcctaattgaactgtggcctgtaagygggaacataagtctcttcccagtaaaggaataggacacttaggcataagcaagaacctgtggaaaaatgtgtggtcccgcatggtacaaccaaaggagtatgtgaatctccta

SEQ ID NO: 812180 - DNA, 543 bp, Homo sapiens
cacctgtaatcccagcactttgagagtctgaggcagacttattgcctgggttcaggagttcaagaccagcctggccaacatgccgaaaccccgtgtctgccaaaaatacaaaaaattagccaggtgtgatgggtgcctgtaatcccggctactggggaagctgaggcacgaggatcattccaggaggcagaggttgcggggagctgagatcgcgccactgcactccagcctcggtgacagaacgagactctgtctcaaacaaaaaagaaaaaacaaaaaagaaaaagaaacactggccaggaacctcaaatgccgcaaacttgaattagtctggacttcctgtgtcattctgggcaaatcccctcctttctctaggcctcagtttccctttctgcagattttgatgcccacatcacagagggagaggggagctccaagtagtagagtctgcacagaagtgcttagagcctggagcttgccccttgaccctacctcatccatctraacaccaatgggatcctggctcctatctcccagcttgga

SEQ ID NO: 812181 - DNA, 531 bp, Homo sapiens
ttaaggggtggcatggaaaagctctatggcattggtctgtgtaatgattttttggacataaacctaaaagcctaggcgacaaaagcaaaaatagacaaatgggatcacatcaaacaaaaaagcttctgcacagccaaggaaacaattaacatagtggagaaaaaacaaaatgagagaaaatatttgcaaaccatatatctgctaaggggtaaatatccaagatatacagggaactcaaacaattcaatagtaagaaaacaaataaccctatttttaaaaatgggcaaaggatctgaatggacatttctcaaaagaagacatacaaatggacaacaggtatataaaaaatgctcaaaatcactaatcatcagagaaatgtaaattaaaacaactcacatctattaggatgactagtaacaaaaagccaaaaaataagtgttggagaggatgtagagaaaaggraacccttgcacaccaaacactgttggtgagagtgtgagttagtatagccgttaaaaaaatcaatatgaa

SEQ ID NO: 812182 - DNA, 531 bp, Homo sapiens
ttaaggggtggcatggaaaagctctatggcattggtctgtgtaatgattttttggacataaacctaaaagcctaggcgacaaaagcaaaaatagacaaatgggatcacatcaaacaaaaaagcttctgcacagccaaggaaacaattaacatagtggagaaaaaacaaaatgagagaaaatatttgcaaaccatatatctgctaaggggtaaatatccaagatatacagggaactcaaacaattcaatagtaagaaaacaaataaccctatttttaaaaatgggcaaaggatctgaatggacatttctcaaaagaagacatacaaatggacaacaggtatataaaaaatgctcaaaatcactaatcatcagagaaatgtaaattaaaacaactcacatctattaggatgactagtaacaaaaagccaaaaaataagtgttggagaggatgtagagaaaagggaacccttgcacaccaaacactgttggtgagartgtgagttagtatagccgttaaaaaaatcaatatgaa

SEQ ID NO: 812183 - DNA, 571 bp, Homo sapiens
aaatccacacctagaggctctcaggcacagagcgatcacaggagaggcagagtgtgcaaacaagctttcattaagagacctgtcagctctgtttcatttctccaggctgctctgcattctgctggcaatccagcyggaaaaataatggaaggacaaacacgtctgaacaggcaaacaaaggtgggaacattccacctacagaacaggacagatcagaaagatgccagggaggggggatgagatggcttttttctgagcaaacaaccatagcccctccccttaactccaaactcatcggaaacatgattttctggctttttatgcagcaacaaaaagacatggggttcagagacagcaccattggttgtctattcccaactctcttacacatcccaagatatgattctgttttggtgttcagccttttagagtctgaatgtctagcgacagggcccttcttcagttcttaagggtgaatcttggtgaacctaaacagatcatggtaataccatctcccttgctaagaaatggttaagacattgccatgtgacatcatcatgtgacaaggtct

SEQ ID NO: 812184 - DNA, 471 bp, Homo sapiens
atctcattccttaatgcggacacctagtgttcctcaatatcaaataaattatatgcaaatacaccttcaagcyccctcccctgttgagttgttgtccctaaaccccttctctataggatggaaattctagcactgcaacaggaaggacatgggagagaagggggagcccttaaagtgctgacatccagccctcatttccctactcacttgctttgtgatcaggataggactctctgatgccccttctggacctaaccagcaatgcttgctctgcatgagtggggagcagcatggcggagccagctcttagtacccgggcatgtgcattcaataacagacactgagtttccccagaagccaatctcttcccagccctcaggctaaacagtgaagaaaggtatgacagagccacagtgggactgggtttagcctggacacatgtcctggaccaggaatgaggggcccccagga

SEQ ID NO: 812185 - DNA, 600 bp, Homo sapiens
agaagaatggtgtgaacctaggaggcagaggttgcagtgcrcagagatagcaccactgcactccaacctgggtgacagagtgagactgcatctcaaaaaaaaaaaaagtgtgtggcacttccctcttcactttctcttcctcctgctccagccatgtaggacatgctggcttccccttcaccatcttccatgattgtaagtttcctgaggcctccgtagccatgccttctgtatggcctgtggaactgtgagtcaattaaacctcttttatctatacgttacccagtttcaggtacttctttatagcagtgcaagaatggactaatacagaaaattggtaccacagaagtggggtattgctataaagatatgtgaaaatgtggaagtgatgttggaactgggtaatgggcagaggttggaatagtttggaaggctcaaaagaagataggaagatgagggaatgttttgaacttcctagacttgttgaatggttgtgaccaaaatgctgatggtgataaggacagggaagtccaggctgaggtggtctcaggtggagacaagaaacttatcgagaagtggagtaaagttcactcttgctat

SEQ ID NO: 812186 - DNA, 531 bp, Homo sapiens
gggttttgagattggtttaaagyaggattttccaacctcactcctatggacatttttacctagataattttttgttgtggggagtctgtcctatgtattgtaggatgtttagcaacattcagggcctctacttaatttttaaaaaatttataaagaaaagaagtttaattgactcatggttctacatggctgaggaggcctcaggaaacttacaatcatggcagaaggtgaagtggaagcaaggcacatcttacatggtagcaggagagagagagagatgaagggaggaagtaccacactttaaaaccatcagcccttgtgagaactcactcactattaggagaatagcaagggaaaaatccactctgtgatcccatcatctctcaccaagggcctctacttacaagatgccatgggtagaggcatttctgttgcagttatgacatcaaaaaatgtcaccaaccattgccaaatgtcccttggagggcaaaagcacttccagttgagaactactgggttaaagcttaaaca

SEQ ID NO: 812187 - DNA, 418 bp, Homo sapiens
gaactgctttggctccatcctctatagcttgatatgttgttttcattacaattcatgtgtaatattttctaatatccctgtggtttattctttggctcataagttattgagaartgaattatttaatttttaaatatttgaggattttatacatatctccttgatttgtattttagcttcattgtactcatataacatactctgaaatgttttaacctctttaaatttaataaaaacttatttttggcctaagatatgatctatcttggtaaacattccatgtaaatttgaaaataatatttattatggaaccactgggaaaatacaagttcagttatgtcagttaataatgttgttcaaataactaattgtcttgtctatttcttctatcaattaatgagaaggcatgttaaaagtg

SEQ ID NO: 812188 - DNA, 418 bp, Homo sapiens
gaactgctttggctccatcctctatagcttgatatgttgttttcattacaattcatgtgtaatattttctaatatccctgtggtttattctttggctcataagttattgagaaatgaattatttaatttttaaatatttgaggattttatacatatctccttgatttgtattttagcttcattgtactcatataacatactctgaaatgttttaacctctttaaatttaataaaaacttatttttggcctaagatatgatctatcttggtaaacattccatgtaaatttgaaaataatatttattatggaaccactgggaaaatacaagttcagttatgtcagttaataatgttgttcaaataactaattgtcttgtctatttcttctatcamttaatgagaaggcatgttaaaagtg

SEQ ID NO: 812189 - DNA, 573 bp, Homo sapiens
ggggcaagatgtaacatattggtactaggcaggtgaggcagaaaactgatgccacaaagaacctggagaaaactgccatttttctaagttaagtctggcaccaacagactacttcaggtgcctcaaatattgcctccctgacagtctctattacctcacagaacaaccccatctttccctaaagtgagcattcttcccgctccattaccagatactgcatttgttatcttatttgttacactctatggaagttttttaacaacagccagctcaaaattcgcatctgcatgaaagtaattcatcatcttatatttccttctatctagattgaggatttgttccatgctttttcccttaaaattctccccatgggtcaactttctcccaatgagttgatttgtatttatcaaaaatgcatttaaaatcacagcatcacatagaagaaaaytagagtgtaatgatgccacttcctattaatctgtaactaggggctgtttcagtcaaagcctaggtacactctctgtgtgaatatgaattcatttgccagctgtgtgtgtttgtgtgtgtgtgtgt

SEQ ID NO: 812190 - DNA, 641 bp, Homo sapiens
cctgcctcagcctttcaaagtgctgggattacaggtgtgagccactgtccctgacctgaattacatacttttcatcaggaatttgcatgtggcctcatcatcaaccattgatatagaaataaaattttcaagtaggaaaaggcacaatttggtttaaaactacattgtggtttttgaaaagttaagcctaccaatgggaggcttaaatgctggtgtgtgcgctcatacaccttatggtcgggtgactagcaggtgaaagggtagaagattctggaggccactaggcttacaaatctaattgtaaagaaagaataaactccatagggagtaaaggccagaggatgaagcctgtgtgtgtgtgtgtgtgtgtgtgtgcgcgcgcgcgcgcgtgtgtgtgtgtgggtgtgtggtggggaagaagggtgatctttgtggatgaggttcaaatgctgagttgtccaggtgaactggtgtgtgtgtgtgtggtagggaagaagggtgatctttgtggatgaggttcaaatgctgagttgtctgggtgaactggtgaccaggttctcactctggctttttaggtgattgctggtgggtrctgtgggtgcctttcgccttctcaccctgggaaaaggcagaattccttt

SEQ ID NO: 812191 - DNA, 527 bp, Homo sapiens
tggaagattgttgtatatcctccctgggtctggcttagcgtgcgatagagagccgtgcttttgatatatcttaactgtgtgtaacctacaacccaggattctctaaactttaraaaaaatacctgtgcagttgaactacagtatcagggctgcagtggaccagacagggaagtaatgcttcagagaagaagagaaaacagggaaagaccaggaacccagaagaccatctctgggagaaaaatcactcttagtgatggaagcagtgagtgaactgaggcaggttcagcagtaacgcggctgggggcagcccctgtctgggtgtgccactgtgagtttcctgacctggccactgtttatgcggatctaggcctgtgttcccacgtagcttccctgtgaccaacagcgagagtgctgctgggttctgtgtggttaggggtgcagtctgtagtcaaggaacagaatgaaattaattagcccccttgggatagctgcagcctatatctttggactcgttagcaaagggctct

SEQ ID NO: 812192 - DNA, 568 bp, Homo sapiens
ctcaaaagaaacgagggaggcatgtgaaattctgaactcttcgataaccccaagggaaactggccacgatgtagacrtcactctagtgatgaagttgttgagaaatgaagatgagaattccttgggccagtttctgtgcccatggatttgatgtctatctgaattttggagttagtaaacacatcagtgttacatagtttgaagggctcttgttgaaagccttgtgatacctgtagtagctgatgtgttattactaattctacacatctcctggatatatacagctcctggatctacataactcctggatgaaattgagtcaaagagaccacagactgtatggtacagtctcttacctagaagtctagatgtgttgttgtccaaagtctgaaagccaatacagcagtggcacagttagcaccaggtgtcctgggtctcagtctagggctctttactggcttggctgcatttgccccagctccattctccttgccctgtgaagctgatctccatggacagcattgcctgagctccctggctttctgccttccacttgggtttggccatt

SEQ ID NO: 812193 - DNA, 625 bp, Homo sapiens
ctttcttattgttgtttttaggatcctttctttattcttgacttttgggagtctgattattaaatgcyttgaggtagtcttcttggggttaaatctgcttggttttctacaaccttcttgtacctgaatgatgatatctttccctaggtttggaaagttctctgttattatccttttgaataaacgttctactcctttctctcaacctcctctttaaggccaataacaaatatgcatttttgagactttttaagatcctgtagagatgctttattttttcttattcttttgtcttctctgacagtgttttcaaataacctgtgttcatgctcactatttctttcttctgcttgatcaattaaaacactctgatgcattcttcagtatgcaagttgcatttttcagctccagaatttcagcttcttttaaattatttcaatctccttaagtttatataatagaattctgaatttcttctgtgttaccttcaatttctttgagtttcctcaacacagctattttgaattatctgtctgaaaggtcacatatctctgtttctccgggattggtccctggttccttatttagttcatttgatgaggtagtattctcctggattgtctta

SEQ ID NO: 812194 - DNA, 572 bp, Homo sapiens
ttattgttgtttttaggatcctttctttattcttgacttttgggagtctgattattaaatgccttgaggtagtcttcttggggttaaatctgcttggttttctmcaaccttcttgtacctgaatgatgatatctttccctaggtttggaaagttctctgttattatccttttgaataaacgttctactcctttctctcaacctcctctttaaggccaataacaaatatgcatttttgagactttttaagatcctgtagagatgctttattttttcttattcttttgtcttctctgacagtgttttcaaataacctgtgttcatgctcactatttctttcttctgcttgatcaattaaaacactctgatgcattcttcagtatgcaagttgcatttttcagctccagaatttcagcttcttttaaattatttcaatctccttaagtttatataatagaattctgaatttcttctgtgttaccttcaatttctttgagtttcctcaacacagctattttgaattatctgtctgaaaggtcacatatctctgtttctccgggattggtccctggt

SEQ ID NO: 812195 - DNA, 627 bp, Homo sapiens
ggtcccttatgttgtactttcatagccacaggcctttcccaacttaaactctggcaaccactarcctgttctctatttctgtaatttttttcatttcaatgaaatataaatggcctcatatgttatataacccttatagcctaattctgtggatcattattcagtttgctgcatttatcattatcttgctcatttttttgctgagtggtatttcatggtatagatgtatcacaatttaagtgttcactcattaacagacaactgggttgtgtccaatttttgtatattatggataagactagtataaacatgtacagattttgtgtgaacagaaatcttcatttctctgagataaatgtctaggattgcaatttctggttttatgttagctgcatgcttagttctttatgaatgtaccaaacacattttccacagtggttgtaccactttcattctcaccagcaatatatttagtgatccagtttctcttattctctctagaatgtggtattgccactatttctattttagccatcttaataggtatacaataatatatcaatttggtttaatttacatttccttaatgacttgtgatgctgaagatcattttatgtgcttacttcc

SEQ ID NO: 812196 - DNA, 633 bp, Homo sapiens
acatatttagcactgctacatcttctttgtaacttaagccttttataattgtataaactccatgtggtaattttttattttttgctctgaagtctgatattaacatagcttctcctgctttcctttgattaatatttctatgaaatatattttccatcctttttactctcaacctgaatatgtcactatatctgaagtgactttactgtcaacagcctatagttgggtggttaattcaatgtgtcaactttcattttttaattggtgaatttagactattcacatttagtgtaattattgatatgttagggttcgagtttgccattttgtttttgtttgttctgtttttcacttccttgtctttttcatgatctctgagttcagtaaacacctttttagaatgttattttgaagttatctatataatggactacatctctttgtaaagatttttgcagtggttgctccaggcattacaatatatgtgtataacttaccacagtttattgatgtccttattttaccagtttgagtatagaaatttatctccctttatgtctckcccatttgtaacataattatcttaaatattttctgactctatagagatatttggtaaattatttctttctt

SEQ ID NO: 812197 - DNA, 645 bp, Homo sapiens
tcagagcaacttatcagttctgagtcgagacctcacgaagccttgcagcttctactcttgctgttgttgaaatcctgccactatgtgaacaagcctgggtggacttgctggagggattacactccagccaaaagtcagccagtcccaagcatccagcagccacctgcggatgcatgagtgagccgctgctgagatgagctgagtctgctccagccccacagaactgccccgctgaactgaacccaaattgccaacccacaaaaatgtaaatgactgttgatttaagcccctgagttttggagtggttggttacgcagcaaatctaactgatagggtggtggaaggagtagtagtgattgcgagacctgttaacatgggctttcagggtatttataataaatctgtttcctgattcaagtgctgatgaaacatatgcattcacattgttaagattcattgagctgcataattatgatatttatgtttttcctatatatacatttatttcaattcaaaaagtaaaaataaaataaaatctttatgactgagatgagataatctyatagatatatttttaagggaaaaaatgagagctcaaaagggggcatatggtatctaccatttgtgtaaaaaaaagatgaaatg

SEQ ID NO: 812198 - DNA, 587 bp, Homo sapiens
agaaatatacccccctgaatgcctttggtggaggtgcagcgtgctttcgtgcagcctctcctggctctgctgctgggcaggtggctctagccagttttttgacctaactcttccgggcaggtaacacaccggctccctctgtcaccaggctgcaagtgccaagtccctttgggcctttctcaggaggccttagtggaaggaagcatatcctcctctctcccacggaagaggcagtgggaatgataccgaactctaacaaatatctccaaaagtatatcacctggcctcctcagcctcccctcttttatatcttcaaggtgtcaccaaaaatcttcagacatctccttttgcacatcttatacatttgcaacacgtttatactaaaaaattatttatggtctgtctgaaattcaaatttaactgggcatgctctattttctctggcaacattacgtacagctggcatagtcctcatgttgaaataaggtctccttgccccctattgtttttttactttggtttgtgggcctcggcagaagaaagtcccatttaaataktgtaatgacgccaaataaatccatcacagg

SEQ ID NO: 812199 - DNA, 494 bp, Homo sapiens
tgattttctttctgtgggggactagggtgatgggaacataatacagaccacatatggagaaggaaagaatattttccagaagttaaattgtatttgtatctttttccctctagaggtatttctgaaaagatttttaaaaatttaaacactatcacttcacagcctcaaaggctggcctatctgggcaaggtgttcgagataggctgtgccaattctgcttcccttctaggcatcccatgggaaaatggcttacatctatagaacactagttttcttcaaagtatgtaataacaatgataataacacttatacaaccctttacagctttcaaaatgcatacatactattttaaaaagctatattatgtttctgattatacacaygttcttgctctttaaaaaaatcaaaactatagaaacatacaatatagacagtatgttccataatcttacaccactagagatagttatagctgttaaccatttagcctctgt

SEQ ID NO: 812200 - DNA, 572 bp, Homo sapiens
ctaaatatgtagtagttgaataagattttctttttaagcattgtgttttagaatgagaaaattagacttttcccagtaatgcctkgccataatcagaaaagtaatggctgatcctcaggttcagagttttgctcacagagaagtgagctcttatactttgttcctggcaggaaatttgttcttgcccaacttgctctctggaatgagaaagtggactttggccttttactaagctcctgtgtcccagtgtaactgaaaattttctttactgttttcccatctagatgttcaaagcaatggtgcctcctcctatctaccccaaaggtttttgtaatgatagctcttcaggacactgagctcttagaagaaaggtatatttagatgaaaagtactatcatatacaaaacagacacttttcagccaagatacattttaaaaccaaaatgaatacagtttctggagtgtcagttaataaatataaatgaatatactgaacttatctgcatcataggggaactgaaagaagtaattgatgcttataaactttctggaagtctttgaattaaagagtc

SEQ ID NO: 812201 - DNA, 614 bp, Homo sapiens
agccaaatcatattattattgaattggggtgaccatttacttagcttctatatttgttaacttttctcagacatgtctatagtagcatctgtacatcaaattgtaagcactgatgttgaataccattcaatcagttgctttcagaataccttaagattagaaacaaattcacgtttgtcttccctattgtgtcagttagatactggctgtcagggtggcccttcatttatcaacgagatggattgatctgcctccaacacgtggcattgtatttaatcccatcaattatcccctctatgacattccctgttgcttcctgattggccaaacaggccacatagctcacatagtcctcctcaaagggccatgcatacaatgaacaattcctaagatcttgggcacccgaaatacttggcatctgtgaaataaaatatgttattaattgttatttcttattaattctcaagggagcactgggatgattttccytgaatgtttttgataaatattgagattatatttttcttccaagtcctgttttttaagtgaaagctgaataactagagtgaaacccgaaagcctgaatcatggcctccaatttaatatttccaggg

SEQ ID NO: 812202 - DNA, 521 bp, Homo sapiens
agagattttaatcatgaataggtgttgagttttgtcgaatgcctttttggtctcaattcctataattatgatggattttattgtatagttttcaaatgttcaaccagccttgtattatgtatccaaaataaattccgcatggttgtgatcaaagttaaggtagaagtaaaaggcagcatgtcaaactacatgctaaatattaaatgcaaatcaaatactctcacacttcatttttttctaacaccaaatgacattccaatcaaaacaaacaaatgaacaaacaaacaagcaaaacctttcctaattataatcttccatagtgaaaatcacaggtaaaaatcacaatctgatgagtatcttttgcaggtgattgggatggacagatactcarttgtcttctctataaatgctaaatgatttcagagtgagaaagaaggccatatggttggttagcagccagtgaacttaagaagacagatttatagggagggttagttttacctgaaactgtgtagttcagt

SEQ ID NO: 812203 - DNA, 577 bp, Homo sapiens
ttaaacctcaccatagtcctatgagactatactattatcagccctcatttacagatggggaaaccaaggcacacagagattaggttacatggcttggaagaatcagagccagaatttaagcatgagcaatctgacttcagaggcctggcactaatcactattctctaaaagaaggatgtaggcccagtatgctgggaactcagaggcaggagaaattaattcccactgggcagactaagggaggcttcctggaggaggtcttttcatctgggcctaaaaaaatcaggagtttgtcaggcaaagttgagcatggggaaagaacagaaggggtcctagtgtatgtgtgtgtgtgtacgtgcgtgcgtgtgtgtgtgtgtgtgtgcatatgtgtgtgcatgcatgtgtgtgtgcatgcgcgcacacacacttgtaaaagagagctctcawctcatcactgcagcctctcccatctcatcactgcagcctctcccatctcttctcttccatcttatttgggtgacaaatgagataacatatacaagcattgaacattcaacaaatatttgctgagcacccc

SEQ ID NO: 812204 - DNA, 577 bp, Homo sapiens
ttaaacctcaccatagtcctatgagactatactattatcagccctcatttacagatggggaaaccaaggcacacagagattaggttacatggcttggaagaatcagagccagaatttaagcatgagcaatctgacttcagaggcctggcactaatcactattctctaaaagaaggatgtaggcccagtatgctgggaactcagaggcaggagaaattaattcccactgggcagactaagggaggcttcctggaggaggtcttttcatctgggcctaaaaaaatcaggagtttgtcaggcaaagttgagcatggggaaagaacagaaggggtcctagtgtatgtgtgtgtgtgtacgtgcgtgcgtgtgtgtgtgtgtgtgtgcatatgtgtgtgcatgcatgtgtgtgtgcatgcgcgcacacacacttgtaaaagagagctctcaactcatcactgcagcctctcccatctcwtcactgcagcctctcccatctcttctcttccatcttatttgggtgacaaatgagataacatatacaagcattgaacattcaacaaatatttgctgagcacccc

SEQ ID NO: 812205 - DNA, 539 bp, Homo sapiens
gctgatgcagaactttatctccataagtcctgggctataaggatcccgtataagtggcttagttagcccttctatttctaggaattcattttccaaacatggtgagtatacayacacacacacacacacacacacacacacacacaccccaaatttgctaaaactggctatgcacatgagttttatattggggagtgaggtcacatatttttaaaacaagggaagaacagaggaaggaaggatggaaaagaaggagagagagagggcaggagacaaggagaaagagagaaagaaggggttggggggaaagagagaggaagagagggaagaaaatggacagacaaaaacaagaaagtgcttttccagtgaactgtcaatgtcacaccctggtttcaggtggttgttttggatctgctggacaagtatggtttggaaactgaaagttaggtgagttcatgattttgtagattgtagatgtcacctggctgggacctggggaaatcactgtcacatgaaaagagcttgtttctgtaaatgtg

SEQ ID NO: 812206 - DNA, 546 bp, Homo sapiens
ttgtgcgtcacgataaggtcttgaggaccttatttcttaccccactgtgccacacactggttatctttttccaatatcctttcttcctatcttgttttatgctgaaatttaggagggcacaggataaagactgcatttcccagcctcccttgtaactaggcaggcttcgtccgtcagttctcaagggtggataactgaagttactggctcctgcactcagaaggagaagcaagtcccccccgcctcctttctctcccttttcccagcagctggaatgtggctatggtgctagggagccaccattgacctgtcgatgatggtaacactgtactggtgtggtgcactcgggatgaaggaggctgggttcctgaaactgtgcaatttccaaatcagccctggtctgcatatactcagctggtacacaggaaagaaattagctttctcttccttaagccactgtwacttttgtctttgtgatgactaaagatcttgaaacttagacacacacaaaggtaatgccaaccctttgtgattaagggttttatt

SEQ ID NO: 812207 - DNA, 537 bp, Homo sapiens
cccctccccgtcgtcacatgctaaaagcagaatctgagaaacagttggctgaattttagcacctaagacctcgacaaaggcaaaaacaaaagcaagaaataatgattccttagttgtcaccaattaaatgtattttgaatgtaattttttaattactggagacctggccaggcagagattcatggttcttcaacagcagagcacacctgaatcacccctgcagcttcttaaaaaaagatgagtacttgtgccctaactctggatttcgaattcaggaagcctgaggaggtgccaggtaactgtgccaaacacacacacacacacacgcacacacacacacacacacatacagttctcatctcagacctgacacttcaaagcatggactttgaagtatctctctccatctgtgaaatgatgataatgatagtaccaaccacacagagctgttgagatggtggcataattcaaaccttgtgcttagcacagarcccagcgtagatgcggcttcagtttccattagctgatgttgccatt

SEQ ID NO: 812208 - DNA, 597 bp, Homo sapiens
ttcttaaaaaatgcttcaggatcttgatccyacttgtttaaaattttcattgaaaacttttttttgtctgcagatgatttggtggacacaatggttttggaactcaacaagtggaaagtttgttaaactttaatttttcattcagaattgtgtaagctgaaccatttgagatgtctgtgatgttggctcttgtttctgctgttaatcatcagtcctcttcaattaaagcacaaacaaggtgaattttttccttgcaagttgatgtgaatggcctgctactgcgggcttcatcttcaacactggatttattccttgttaagacaaattattcatttgtaaactgctgaataatatggggcattatcctcataaattttcataaagcatcaatgatttttatcaattttccaccctagtttcaccataaatttgatgtttgttcttgcttcaattttagcagaattcatgttgttctgataaggattcttttcaaactgatatattgtccttcttagtgccttaaactagattctgttcagacacagtataacacattagtatgagtttattttggtgcaaaaaaaagtgaaaaccatg

SEQ ID NO: 812209 - DNA, 597 bp, Homo sapiens
ttcaattaatgggtcagaatgaaaaatgttccaatgatttcctgtttccaggtagtgaaaaacatagaatactgggacaacgctcatcagctccgcctctgcactccctttggggaggtgggttaggatattgatgccttcctgacttagaactgcagacaagatctcacctacaagcagtcctgaaacaaaaaagatcaaagtagacacattgctttttattaacttctaacagtatgttctcaagagagaagaacaaccatctagagatggttcttccctttttatctaggcagttgacttgcttctcagaaacggggtgagaaaaaaagatccggttaggaacatgaatttgaaagaaacaaaaaaaaaaaagactttaaaaatcactaaaatatggtggtaggtaatgtaatacagtggactgattgctgcaagagaacatggcaaattagttgccattcaacctgttagctttagacattataaaccatatttaccaatcccttccaggaagcaaagcaaagagcctgaacagggagtgctgacatgactgtctataattcamtgtgcaaccttggacatgccactttcttt

SEQ ID NO: 812210 - DNA, 639 bp, Homo sapiens
agtgtaacaacttaagacagaataggatctatagcacaatgttacatatacatagattaaagaggtacatacatacaaaacaacattacctttctattcaaaagtatacagcaaacacatttgagtgggtacayttggaggaaggggaatgggaatggggtccgggatgaaggaaaaaataaaacgagaggggcctgcctaaaccaatgaggatggtgtgtcaggaaatgagggagtgagaaacttaacactctgcatttgagatatgagacgagttgggagaaaagggcttatcagggacagaaagcagaaactaaagactagagctagtcttaagcattgagtctctgtgtttagtctttttttaagctggtgtcacacaattttaattactatatactgtttgttctccctcattgatatattttttcagatttcctttaacattatagtccatttatttttccaaacactttttagcatttttttttaactgaaccctgtaaagtatcatagttgtatagcgatttcaatatataaatatcagaaataggccgggcacagtggctcacgcctgtagtcccagcattttgggagtccaaggctggtgggtcacttgaggtaaggagttccagacca

SEQ ID NO: 812211 - DNA, 641 bp, Homo sapiens
tctggagtcaggtacacactggttcacataccagtaccaccacktattaactctggataaaattagttaatcaaaagagaggttagaagcctccatttcctgagccacacaatggcaaagataatattctaactcatcttgctaattaaatggtgtttcatgtattcttcataaagctctcagcatgatgcctagcatttagtaagtgctcaatagatgacagtgagcatatgcatgctgcagtcattggcctatgttattatgttactaagttactttgtaactatgttactatgttattgctcatattttatttgagattgggaacttaaataatatttgctgcgagagaagactattaagtgggctctaaagtagaatggtttctgtagttagaaaaaagggaggcttccatatttttgacccttttgtggcccttcaggggattaaaagtgaggggggaagagaggatattcctaacactcatgtgcactgctatacctattctgaagcttctagagtctgatatggtcttaacggtgtaagataaaacaattaactcccaaataaaaaattgatacatttatcttcctcaaggaccattcaatggattagcagattgtctctgggactaatttgtc

SEQ ID NO: 812212 - DNA, 599 bp, Homo sapiens
tacagtaagaatacagtactatactcttctgggaccatcgttgtatatgtggtctggtgttgactgctacatggcacatgactgtatcttcataaaggcttgtatccagaatatatagagaactcttacaacctaataagagacaaatgacctaataaaaaatgggcacagccaggctcagtggctcaacacctgtaagctcaacactttgggaggctgaggcaagaggattacttgaggccaggagttcaagacagcctgggcaacataatgagacctcatctctacttaaaaaaattttttaattagcagtcttggtggcgtacacctatagtcccagctacttgggaggctgaggtgggaggatcgcttgagcccaggggttcaaggctgcactgagctatgatcacatcactgtactccagcctgggtagcagagaaagaccttgtctctcttaaaaaaaataaatraataatgaacagatacaatctatgaaagtatcttataaagttaaatcatacttataaaataatttacttataaaccatacttataaagttaccatacaatccacacatttcactcctaggaatttacc

SEQ ID NO: 812213 - DNA, 625 bp, Homo sapiens
caaactaaaaagggctgtgtgtgtgtgtgtgtgtgtgtgtgtgtgaaaaagagagatgggggcccccattccactaagaagatgacagaggccgtgcaggttttttctctgtgatatcccctcctcctacaaatcatgcccagaggagggatcttgaggacctgcccctgcctccccagacccatctccacacccaggccatcctgggcagaggacagcagagctcacatctctgtggagagcagactgggctcactgcaggcctctgtgtcattgttcatcttcacttcataagtctcattctgagacctctcctgacacaccatggctatctggctctcctgggaaaagcacttacaacattcaagatagagaaaatcatcagcagctgccaaccctcctccccttccctcagcaagtaaggcatcacgcatgcacatatgcacacatgcacaaacacatgaacttgtgtatatacacacacacaggcacacacacacatgaacatgcatgcaatttctgtggcctcattttcttgtgatggctgatgaagscatgacgccatggaagtgttaagattagggagagggttccatgtgggaggatgtctggtgtggatccaagg

SEQ ID NO: 812214 - DNA, 571 bp, Homo sapiens
tatgccacagtacagtagtaggcaaggttaaagaagagcaaacagaaaggaataggatgaagaagaatcacaaaattgattttgtttgttcgtgctgggtggcagttttctactccctagagctttcygattttagaatacagttaagtatcctcagttgaaagtctcccaattcaacggacactgagcaattaaaagaagatgatatgcagtggtcaaaagaaaatgatgtctgtctttttaagaaacatgaatccaaggatcaacttcttggaattttactgctatgctggttgttactgtacctgctaagttcctttctgtagaagggtaagggtggattttttttaatggggtttctttcagaagactacacttccatgttcaaggtcatgagtagttattttagaaatgatttttgtacctgtttaatgataagactgatgatatctagtcatatccatttaccatagggaagtatcctaaattcatgaagtggcctggaattaagccctaagaaagaatctatgtatgtcatcaaggtttatggcaatatcttaggccttggaag

SEQ ID NO: 812215 - DNA, 636 bp, Homo sapiens
tcttgactcactgcaacctccgcctcccaggttcaagcgattctcctgcawcagtctctcgagtagctgggattacagacacctgccaccacgcccggctaatttttgtatttttagtagagatggggtttctccatgttggtcaggctggtctcaatctcctgacctcacgtgatctgcccacctcggcctcccaaagtgctgggattacagctgtgaatcactgcacccggcctcaaagacttcttctttatgcaactgtttgtctcttatctacctatgacctggaaacccccttagtttggattgtcctgcctttctggaccgaaccaatgtacatcttacacatatttgttgatgtctcacatctccctgaaatgtataaaagcaagctgtaccccaaccaccttgggcacatgttggtaggacctctggaggctgtcataggtacatccttcaccttggcaacataagctttgcaaattgattgacatctgtctcagatacttttggttcacagtgttttaagaggaagaaattctaatcatctagaaaggcactaaaacagatggaacagaagcgctcagcacatgtgtaacaacaaaacaaacactttttaaggtatattgcttattt

SEQ ID NO: 812216 - DNA, 598 bp, Homo sapiens
cttaaaaaaattaaaaaaaaaaacacaatattttagaccaggcatgayggtgtatgcctgtaatcccagcactttgggaggccaaggcaggaggatcgtgtaagccaggagtttgataccagccagggcaacatggcaagactctgcctcttaaaacaaaaattttttaagaagcaaaataaccattctgtaataaatttcacactccccaccgcacctatcttacctgcaaagatttattttggcaaagaggcagcagattgcagagtaaagaacagtaaattggacgggcatggtggctcacgcctgtaatcccagcactttgggaggccgaggcgggtggatcacttgaggtcaggagttcaagaacagcctggccaacatggcgaaaccccatctctactaaaaatacaaaaattagccaggcgtggtggtgggtgcctgtagtcccagctactcgggaggctgaggcaggagaatggcttgaacccaggaggcagaggttgcagtgagccgagatcgtgccactgcactccaacctgggtgacagagcgagactgtctaaaaaaagaaaaaaaaagaacagtgaattgaaaat

SEQ ID NO: 812217 - DNA, 486 bp, Homo sapiens
aaaattaagaaaaaaagttctacagccaccttgctcaacttcgtcatgtcaaggaaaaaaagtatttaggaacataaattgttctttacttggaaaaaaaaaatctcttgctccaatccaaaaaggcataggaaaaaaggcataaagagctgtgcacattagcaaaggggccctcttgcactgagcggtggccagtgtgtctacactgcaggtgccaggctccgcgctgcgtgcaattaacaggtcaggtgcatggagtttaaaggagagcagaacaagcagcgggtcaaggtgccaggactgagatcacaaagacccacagggggcacatggagcagaggctggaccacagtctgggtggaggggtcggccaggactgagagcacaaaggcccacygggggcactcggagcaggggctggaccacagtctgggtggaggggtcggccaggactgagagcacaaaggcccaccgggggcactcgga

SEQ ID NO: 812218 - DNA, 501 bp, Homo sapiens
caagagaccaatgaattttagtacracagtttgaaaagattattccgtaccacaactaaccttccagaaaccactacgtgtggaacacttgctgttaagatgtcaacaccgcccaaagccatctagacgttcaatgcaatccctatcaagacctaactaaatattttgcagacataggaaaatctatcctaaaattcatatggaatctcaagggacccaaaggtccctcgccaaagcaatcttgaaaagttagaacaaagttgaaagagtcacactttaagtcaaaacttactacaaagccacagtaatcaaaacagtgtggtgctgacagaatgacaggcatatggacccatgaaatacagtagagatcccagaaataaacactttcgtatgctcaaataatttttgacaaaggtgccaaaaccattcaatgaggaatggacaagcttttcaacacatggtgctggaaaactggtctccacatgcaaaagaatgaagttg

SEQ ID NO: 812219 - DNA, 641 bp, Homo sapiens
caaatctgccacacatgcaccccctctcacacaaaccacaaacctccagagccacccmccacgactggccttagggaggccgcgtggctctcactggttgggatgggacatgaccaagcaccacgctcagacctcctgactctaatgacccgcaggccctccagagttcactgccaggtaccggcgtcccaggaggtgaaggcggtgagtcctggtggagcccggcactccgggaccctctcaccctgccttcctcgggaagcaccaagcactcccggagccccgggtggagtacgagcttgtgctgtcctcatccagggtactccagcccaaaacccaggagagctgtgacagaggtggccaccttctgagagaggctgacccgcgcacctcggagggactccagcccttgtgagctgcaagggctgcctcacaacaaccaagagacccttctgtgatgcaggacaagagctggggttggcacggggctccgctcagcaccatcacagccagatgcggcaccgggcctggaactgccagtcccagcgcagacagggcagccagcaggtctttggacttcagacacttaagtctcgccccctaataggtatttccaggtggaactccaaggaacaattgga

SEQ ID NO: 812220 - DNA, 570 bp, Homo sapiens
agcaacagcccccaacagcctcgagatgctctggcgtgtcagctttagggactacatcagargacttccccacaatccaagattgtcaagagctggttaacgtaggaagtttagcaagagctcactgcggctgcgtgggtctaaatagttttaaacacttctgtgtttttatagcattatatttagaaacctctaaataaaactcatggcgagtgttgcaataatatacattttttaaactaattgaatgttgccattacaagtgctattttggacaatctgctaaatatgtaatttaggaattaagattcatatcttacaggatacgctaattattcctttgaatccgtttgggtactttctgaacacacacaagaagtctgagagttggcgacaatatccacccttctccacagcgcagaggtcaggccactagtaagggcacaagcgtgggctcagcacagttgtgagagtgcagacccagctgcgcaggccggaggtggccatgaggcccacgcctttccagtccaggaggctccggctcaaagcagcgggaagttcagtttatta

SEQ ID NO: 812221 - DNA, 540 bp, Homo sapiens
aaatatatttttccccacacatattttttaaattggttttaaaaaagctttttagagcattgtttgtgataccttcttagtgaattagtgacattttaaacgtttttttaaagaaacaatattaggccaggcacggtggctcatgcctgtaatcccagcactttgggaggctgaagtgggtggatcacctgaagtcaggagttcgagaacagcctggccaacatggcgaaacctcatctctactaaaaatgcaaaaattagccgggtgtggtggcacatgcctgtaatcccagctactcaggaggctgagggaggagaattgcttgaacctgggaagcagaggttgtggtaagccgagatcgcaccactgtgctccagcctgggcgacagagcaagactccgtctcagaaaaaaaaaaaaaaaaaaaaaaaaaaawatatatatatatatatatatatataattatatatatatatataattatatatataagtttaataatttgataattttttaagtattggaagccccagattgtgt

SEQ ID NO: 812222 - DNA, 614 bp, Homo sapiens
gcattaatgttatattatagttatagctgcatttttttcccctaagcaaccctttctcttctgaaccctatggcagcccgcggttgtgtagattgagctcakgaatgtcttaaaacattaatttggtttgacatgacttggtgcacaaattaattattcaggcacatattgttccatgtacatgaaaagaatgaaactgtagtgaattgcattttaactaccacatgtgaattgtaatgttattagcaaacagactattaaagaacaaaagctggcaacatatagtaattccgaattgggccagtcccacaaaattagcataaatatgtcaatcaatcagaatagttttggacttcctaggaaagtgtccctattcttatctagctctaaaagaatgtgaaataaactattcatttaaccaagtataaaaatatgcctgctatgccgttataatcatgtgtcattaatcagaaaatactgcagaaactctgacaaattaaaaacacaaggatgtgtctgcaagggtttttttagccattaaaaagctgcttcacctctctggcaagctcttttatggcaacttcttactcagtgtactgacatcttcaaaggct

SEQ ID NO: 812223 - DNA, 267 bp, Homo sapiens
aacgagctgcccctctgctcggcatgttctcctgccgcccacatggccgtgcatcagagctacctgtaaacaggcgacttcccctgaggccaccacttgtgaagggcagggctcaggatttggagacctcaatcaarggagcataacttgacagggcccagtgcagggctctggccctgccactgacttactgggtgaccttggcaaatcctttttcccttgggccagtttcactgtcccggatccagatgatcctagcggtgcccg

SEQ ID NO: 812224 - DNA, 599 bp, Homo sapiens
attacataatctgattttctgattttaaaatatctctcaatgttgtgaaaaatagattatttggggaatgatatatgcagagaaccaattatgaggctattgtagtagcccagtaaggaaacatagactagaataaaaaaccagaatgatacaaagtagttgtgcttagctttactaggtaggggaaaaataaatatttggttcttgcccatggaaatggcagatgtatcatttcattaagtgagataaatttgaaggggcagtcttataaggtgagtgcaagagttgtgtttggatatatatacaatgttaattttcatgtgtcttttagaattttgaggaagttgcatgtttgtaagttcaaaagtgaagaacgaaggaaattagagagacatgtatttgagattaatcatcataaagtggaatttaaagcaccaggactatatgaaagcaagtaaaaagaaaaagaggagatagaaataatacttaagagataatcttgggaaattgggaaattccaaaatttagtgatcaggaaaaaaagtgtatatatatacgtatgtatatacacacatatatatgygtatatatatgcgtat

SEQ ID NO: 812225 - DNA, 490 bp, Homo sapiens
gttttaagctggatccaagaaaaacactaaaggattctttagctgtgcccaagctggggccttcatgtttattagctagtcaaggccaacttctgcrgaaaggatcaaaaccagaaacgggtttgctgagccagcgtggggcaagcctgcgcagctgggagggggccactgccaccttgggggctggcgccattggagggctgaccctagcagtgagaggcagagaccccactgccatgcagggtggccgcccctcacagtctgaagttggcctttggtcccggccagctcactcggtccctctgataaaaagatggcgtgagcctggcctgcgtgagagtgctgatgtggatggttgggtccatgctggactggcatgggcaggagaccacagctagaggcaccacatttgcatggcggcctccgtgtcagagcgcagaatgcagctatgacaatgggaaaacgaggcagcctcctttctacaggaaat

SEQ ID NO: 812226 - DNA, 506 bp, Homo sapiens
gggagtgaggctggagcaggaacaccagggaggaagttctgacactgaaccaggcgagggacgctggtggcccggatgagggcagyggcagtaagaatggagtggctggggaaggccaagggacatttagatggaagaatcaagagacctggccactggctgcagaggggcaaggcggaatcaagggtgaccccaggatcctggcctaaagagctgggagaatgaaatgccaggtactgacggggcgtgggggccagcggaaaagcagcagagatgaactcgtgggtcccgctgagcatgtgtctggtttgaggggcttgggccacagccaaggggaggcaactggtcaacactggttagaacattatgaccgagaatgtgagatgggtgtgtgagggctgccgggtggagatccagaaatgaggcctggcgggcggggatgtgagggtgagtttggaagtaaccagcatggtgataattgagaccatgagagaagatgaaatatt

SEQ ID NO: 812227 - DNA, 346 bp, Homo sapiens
atgtgagatgggtgtgtgagggctgccgggtggagatccaraaatgaggcctggcgggcggggatgtgagggtgagtttggaagtaaccagcatggtgataattgagaccatgagagaagatgaaatattctggaacatggtgagagaggcagacctgggacagagctgaggaatgttaacgttccaagctggcaaaaacaatgggaagatcagaatgtactctgtgatattggatcaaaatcagatgtatcattataaagtcggttttaatatgtagttgtagacagatacataagcgcacatctgtgtgtgtgtacacttatatgtatatgtgtacatatattt

SEQ ID NO: 812228 - DNA, 643 bp, Homo sapiens
aaaaatattctgaagaccagaatatagtacaaggtacatggtacaatctgtgtggtactggcagtgctaacatctgggtttctaacagaatctgtgtttcaggtccctgtggagaccccagactcccacagagcaactctcaccctgcgcccagcgcccccacccccagcagaccctgtgagctccctgcctagcgcccccacccccagcggaccctgtgagctccctgcccagagctctcagagctcccaggtctgccactttctgtggcttgtctttgtttctccagagcctgctcagaggcatcaacgcaggcctgcttccactccagggccccctgtatgaagagcaatcagtgttgctggtggaagtgtattaaaataaaaaaaaaagtccgattcccccagggctaagggaatcgaaccctttaaacagatccaaatcctcctcaagtctgttcaaacaaggacgtgttctcaagcctgtggaatggctgatgaggcggaccagaactatcaggagcaagcagatggaccttgcagcgatcgagtatcatacacggkattcaactctacttaaaatagaaagataagtcccaagtctacacaagtcctgataagacttaatatgtgatgggctcttt

SEQ ID NO: 812229 - DNA, 436 bp, Homo sapiens
tggccaggctacaatcattttcctaggtgaccacatccagttctatcaatatcacctatcatcttagtgctcccagatttatatttctagcattraacttttcttgaaatgtcattttcactgctgattattttacacctccaaatggatgtctaataagcttctcagacataatacatcccaaactgaacacctgcctcccaccctcgctcccaccaagtcttctcaggtctttcctacctagatcaatagtaccactactcacccaatctcctaagtccaaatccaggagataccttggatctcccagagtgaaggactctttccctcatctccatctaatctatctagtccttcaagaatactgacaactcacagaatgggagaaaagatttgcaaactatgtatctaataaatgatcaacatccagaatata

SEQ ID NO: 812230 - DNA, 519 bp, Homo sapiens
atgaaaaaatgcatcctgaaacgtgttgcatgcacagtgagacaaaaacctgtgtctttaggtttcctgcgatctagcttggaggcgggttgggggggtgtggagggaagtgctggagaaattatcccattattgactgagcagcaaagaattttcaagaacagtgattctcctagaaaaagtattgctgctgccatttcaatgcaaaatttggcttttgagtaaaaggcttaggtttttatcttccggggagaaaaaaaaaacccaaaagacaaaaaaaaaaaaaaaaaaggtcatagcgtccctgggtgggctcgaaccaccaacctttcggttaacagccgaacgcgctaaccgattgcgccacagagaccgagtcgactaccggygtagtagtgagccgagtcaatgggagcgagcctggacggcgcagacgccgtaagagatgccgccatcgggcgaaataagtggaacccgggggagaaagggaaggatcctgatgggggagggaggcgaaag

SEQ ID NO: 812231 - DNA, 433 bp, Homo sapiens
ctctattcaactcagattctttaagatgaaaataactgacttcttcccgccgtagcaccctctgcacagtcttgggtttgtttttgtttttgcttttytctgcttgtgcattagactaaagggaaaaggaagaagaacacaaaatctccaaatctaattctgttgcaaacgaaagaaagaaaataattgcacataaactctagttcggaagcccggagagtcataaacctttccgggccttgcagacttcgggcagatgttgacggctcatttgccggaactcagaacctctgcagctgtcctgagcagggaggggcgcgggagggggcagagcttctccgggaatggcctggggttcaaagatgccggaaatccgaaccaagccccccacctcaccccaccccaccccaccccggcgcgaggccaggcctgc

SEQ ID NO: 812232 - DNA, 420 bp, Homo sapiens
aaagctttagaattcactgggtgcggtggctcatgcctgtaatcccagcacttggggaggctgaggcgggcggatcacctgaggtcaggaattcgagaccagcctggccaacatggcaaaaccgtgtctctactgaaaatacaaaaattagtcaggcttggtggcaggtgcctataatcccagctactcagtaggctgaggcaggagtattgcttgaacctgggatacgaaggttgcagtgagccaagaccacaccactgcaccccagactgggcgacaaagcaagactccatctcaaaaaaaaaagctttagaattcaracaactaaaatttctactaacaattaaaacacaaaaatggttatgtgaggtgtctctctagaaggggcaattaaaataaataagatacacgcacatgtgt

SEQ ID NO: 812233 - DNA, 584 bp, Homo sapiens
ctgctaactgcatcatatccagatactgttacgtctgttgcacatagatgaagatacagaagctttaagaagttaaatagcttacctgaagttatttaggaaatggccaaagtaggaatttgagtatggtttgcttagattccgagtattgctctttctgttaaacacctgcaataaccattctcaaaacatttgacatcagtactcctttacattcttcaaagttattgaggatcccaaagtttttgtttctgggggttgtatctttcagtatatactatatttgaaattaaaactgagaaatttttaaaaaacatgaatacataagcatatattgtattggctgttaaagaataaggcacgtaacattttagtattattctgagaattatttaaagctcatagactccctcaaaagggttgaggggagggggtacccagaccgtatattgagaaccactaatctgtaagaagactagtgagtttggcattggacaaattcatctctccattctttttcagtttaatgttctgttagtcttctgattacaatgratactactctaacctactctaacatggtg

SEQ ID NO: 812234 - DNA, 515 bp, Homo sapiens
taacatttccattgaaagctctgctcttgtctgtagctatctgggtgcaatcattttggcaccaaytgagtggcaatttgttcagctttaatttttcagtcagaattgtgtaagctgagcaacttaagatgtctgtggtgttggctattgtttatgctgttaattgcaggttctcttcagttagggcaagtgacaagatgaatttttttctcaaaaatcaatgtggatggtctgctgctacaggtttcttcaacatcacgttgtcctttcttaaaaagaggcatccatttgtaagctgctgatatttggggcattgtccccataaactttgcttcaccattcttccatccaagctttgccataaatttgatgttttgttcttgcttcagttttttagcagaattcatgttgttctgataggggctcttttcaaactgatatcttatacttcttagtgcttcaaatgagatcctgttcatcagacatgttataagaagttagtatgagtttatttt

SEQ ID NO: 812235 - DNA, 631 bp, Homo sapiens
tgggctgcattcccagatggttaaagcagagacaggaggtcggcacaaaatacacgtcataaagaccttgctgataaaacaggttgcagtaaagaagccggccaaaacccaccaaaaccaagatggtgatgagagtgacctctggtagtcctcactgctacactcccaccagcatcatgacagtttacagacgccatggcaacattaggaaattatcccatatgatctaaaaaggggaggcatgaataatccaccccttgtttagcatataatcaagaaataaccacaaaaatgggcaaccagcagccctcagggctgttctgtctatggagtagccattctttcattcctttactttttgcaatctctgctcactgcaagctctgcctcctgagttcaagcgattctacagcctcagcctcctgagtagctgggattataggcgcctgccaccacgcccagctaatttttgtatttttagtagagagtgggttttgccatgttggccaggctggtctcaaactcctgacctcaagtgatccgcccacttcggcctcccaaagtactgggattacaggygtgagtcaccgcgcctggcctcctttacattcttaataaatttgctttcatt

SEQ ID NO: 812236 - DNA, 603 bp, Homo sapiens
agagacggacatggaaatgttagttgaatttccaggagccgtggcactggagacaacagagggtggttgtggtgacggggaagggcagggtgctgtgggagatgggtcagggaaggcctcttctaaggaagggtgtggatggggctgggatgagagactatcagggcagagctgcaggtgtggggaagggacggatgcaaggcaaggcagggctcactggacatgacctgggagcacagagcagagggcagaggggagaccacacagggcctgcgagccaagactcaatcttaaatgcaacagaaaaccatggaaaggtctacactgagagtgacgggatctgactcatgcttattttgttatatttttaattgtggtaaaaaactcatcacataaacttttccattgcactcactttcaaatgtatagtggagtaaagtacgttcacattgtgcaaacatcacaccatccatttccaggttattctcatctggcaaaactgaaactctgyccccattaaatatgaactccccattctccccagcccctgacaaccaccgttctttcagtctctaggaatttgactcctagactcctcatata

SEQ ID NO: 812237 - DNA, 609 bp, Homo sapiens
aaggcctctcgagtgctgcaacatgggtatttggagccagataattctctgtgcaccataagttgtttagcaacatctttggcctctacccagaagatggcaggagcacctgacacccagytgtgacaaccaaaaatgtctccagacattgccaaatatctgtgggggtgcagggtgcaaagttccctcatttaagaaccactgacctagggtggttccactacttacttttcacatgaccttggacaaacaaccttgtcctcaaggtcctctgtgcccccatgtcctcacctgtaaaatggaaaaataataacatgtgaggttaatgtgaggaataaataagaatccaggaaagcaattggcccatcatgtaagagctactttgcccataaccctagggtgccttccctccaaacacaaagctgtgcacagaggaggtacacagtgaagatctgctgttgtatagctgtggggatgaatcaattaaccatttcagtaataaatgaacaaaaaactgaatgtcctgatctgtgcactagtgcatttgctgactgaagatatcctggcatcctctctcaccatcaaagagcagttaggattaaagactcc

SEQ ID NO: 812238 - DNA, 557 bp, Homo sapiens
acccacttgaggaggcagtctaagagctcgagcgctgtgctgggagaatcctccttttcaggatctgctgctgtcttcagagccagcaagcagaaatgtttaagtccactgaggctgtgcccacagctgccccttcccccaagtgctctgtcccagggagatgggagttttatctataaccccctgactggggctgctgcctttctttcagagattccctgcccagtgaggaggaatctagaatggcagtctggccacaaccgctttgctgcactctgttgagttctgctcagtccaaactttccagcctctttagcactgtcagagaaaaactgactactgaagcctcagtaatggtggacaccccttcccttaccaagctcaatcatcccaggttgacttcagactgctgtgctggcagtgagaatttcgagccagtggttcttagcttggtggcctccatgggagtgggacccgcttatcgagaccacttggcgccctggattcagtcctytttccaggggagtgaacagttctgtctcgctggggttccaggt

SEQ ID NO: 812239 - DNA, 460 bp, Homo sapiens
tgccatctacttctaggaatgaaacacacagagaaaaacactgcagtaatattttaacaataaagaagtgtgtgtgtggtggcagggggagactttccaggtgcaacaatgggaggtaggctaagcttatcatgatacacctataaaaatattattcagccattgaaaattagtttttaaagttctgacacacagaaatgcttgccatagcattagatgaagaaagtatacaaaatgaatatgctattacaactatgcctaagatgcagaaaatataacaaaatttaacgatggtgatgtcctcttaaaatgccatatactccttcatatttttttttttttgagatggagtctcgctgtcacccagtctggagtgcagtggcrcgatcttagcttactgcaggctctgccccccggggttcacgccattctgctgcctcagcctcctgagtagctggga

SEQ ID NO: 812240 - DNA, 412 bp, Homo sapiens
ttttgttgattcttagtaagctcaggtaatagcaaataaaaaggcagcaaatatagagcaaaaaaaattattygaaatagaaataatgtggattaagatattctgtcaattaaagtaaaaatatttttatctcatactaatcatcttacctatagtcgtataatatcaaatgctaccttttattaacaattgtacttcatataagtattccatttatatcacccttcttcactgtttcaatgccttctgcacttcatatcagtgaaaaacaggctggctggtaccaggaaatggatgtggtgctattgctactttaagagtaatgatgaagagcacttgtctgaattggtcccatgtggcaaacactgttatatggtctaaagtaaacacatttattattttcttctaaatt

SEQ ID NO: 812241 - DNA, 583 bp, Homo sapiens
ggagaaattagttattttgccaaggctttggctggaatgacgtgctttcctttaaggaatcaaacttgacttatagagccaataaaagccccttgggaaaactggctttatgccttgtctacacagtccctatacagggttcctaacctggggtaagtaaataatgtcactttttgacaggttcatgagccccaagttatcccgtggtatcaaaaaagaaatttatgcaactcatatttgagggtatagactcatggctggctcagctttaaaaagtcttatctgagattcattttatggaacagtttcatcaaatccaatttttaaaacctatgtaaaaataattattcttgctgcacttcgtacaaataatcaggccaagtataataaagcaacttggtcataccatgatttgtctttagtaaaatggcagactggggagagtaaaaaattatactttaagaactatggtacatctgttattaaattctagatttatctgttgttgttgaacttttttttgaaagaagttgaayctttgaataagccaatgacaagttctaaaattgaggcagtaataaat

SEQ ID NO: 812242 - DNA, 598 bp, Homo sapiens
aattagcgtgtagtgattcctgaggacaaccagaggtccctttcattcccaccttggtttcggtrgatttttgtggcttctttactgcaaactgttttatcagcaaggtctttgtaaaatggatcttgttccaatcttctatttatcctgtgacttagaaagccgggcctcatggaaatgcagtcctgtaggtctcagccccattttacccagcacctattccagatgcagtttctctgcttcagacgcctctgacatagctacagggtgctggaatgtggctagtgtgaacttcagtgtgctagaaaggtaaaatacaagattacattcagagatttagcttcaaaaatgtatgtgctttattaaccattacatagtaatcacatattaaaataataatattttggatatattgggctgattaagttgttgcaatcaattccacctgttattccacctgtttctttcttttttattttgagacagagtttctctgtcgccaggctggggtgctgtggtgtgatctcggctcactgcaacctctgcctcttgggttcaagcgattctcctgtctcagcctccctagtagctgggatca

SEQ ID NO: 812243 - DNA, 561 bp, Homo sapiens
gcctgggggtgatgatcaggtggtgtgtccctgggtctcaggcctcagtggctccctaggaactgggcagtcactgggcaccggcaggggcccagggaccacttgtgtgcatctgcccatgggttgtgttcccaccccagcttctcagccctcactgggagaggccagggctccctgcctgctctgtttccagctctgacccctcacctggtgactctgatgacttcctcactccagcctgggtcctcctctgttagacacgggtcccaggcttcctgcagacagaaaccaaccaccagccacaccttgtgggcccacctggacctcgttaccccactgaccagtgagacccaactggccagtactggtgtcctatttgtatactgcccttttacccggtgtgttttctgtaatgactgctgtgtggagcgtccatataagtgcagaatacagcatgtcctctatcccacagagcccccmccatggtccccctggggatggtcatgccttgctcaacttggtgtaaatggctgctgttggccgggtgcagtggctcacacc

SEQ ID NO: 812244 - DNA, 576 bp, Homo sapiens
tactgcctcaattttagaacttgtcattggcttattcaaagrttcaacttctttcaaaaaaaagttcaacaacaacagataaatctagaatttaataacagatgtaccatagttcttaaagtataattttttactctccccagtctgccattttactaaagacaaatcatggtatgaccaagttgctttattatacttggcctgattatttgtacgaagtgcagcaagaataattatttttacataggttttaaaaattggatttgatgaaactgttccataaaatgaatctcagataagactttttaaagctgagccagccatgagtctataccctcaaatatgagttgcataaatttcttttttgataccacgggataacttggggctcatgaacctgtcaaaaagtgacattatttacttaccccaggttaggaaccctgtatagggactgtgtagacaaggcataaagccagttttcccaaggggcttttattggctctataagtcaagtttgattccttaaaggaaagcacgtcattccagccaaagccttggcaaaataactaatttctc

SEQ ID NO: 812245 - DNA, 559 bp, Homo sapiens
tcttcttttgagaattgtctattcatatccttagcttggtttttgataggattgtttttttttttcttttcttgctgatttgtttaaactctttgtagattgtgcatattagtcctttgtcagatatayagattgtgaagattttctcccaaactgtagttatctgttagctctgatgatgatttcttctcctttgcaggagcattttagtttaattaagttccatatatttatctttatttttgttgcatttgcttttgtgtttttaatcatgaagcctttgcttaagccaaaggctagaagggtttttccaatgttatcttccagaatgtttatgatttggggtcttagattgaagtctttgatccattttgagttgatttttgtataaggtaagagatacggatccagtttcattcttctgcatgtggcttgtcaattatcccagcaccatttgttgaatagggtgtcctttccccattttatgtttttgtttgctttgctgaagatcagttgactgtaagcatttgtgtttatttctgggttctctattctattg

SEQ ID NO: 812246 - DNA, 638 bp, Homo sapiens
agtgatgttcaaactgataaatccaatggttgatcctaagatctcattttaattgacatatcagaagcgtttgaccctgatgattagttcttccttcttaatatatattaatatgttatggactaaatgtttgtgtcctccctgaattcctatgttaaatcgctaaccccaatgtaagggtatttggaaatggagccttcgggaggtaattagttatagataatgtcacaaggatgggactccatgataggattagtgtccttagaagaaggaagactacaactccttctctccaccctgtgaggacacatccagaagaaggtcttcagcaaaccaggatgtggtacctcacctagaaataaatcagtgtgcatcttaaacttggactccccaccctccagaactgtaaaaaatacatggctgttgttgaagccacatagtctacagtattttagtaaagcgacctgagctaagataatatatttctttctttcttttttttctttttttgaagttttcacagtatttctaatgaggttcttttttaaatttttatttaggttttgggatacatgtgctgagastgcaggtttgttacacaagtatacacgtgccacagtgatttgctgcacctatca

SEQ ID NO: 812247 - DNA, 613 bp, Homo sapiens
ctgggtcaaatgatatttcttgttctagatccttgaggaatcaccacactgtcttccacaatggttgaactaatttacactcccaccaacagtgtaaaagcgttcctatttctccacatcctctctagcatctgttgtttccagactttttaatgaacacccttctaactggtatgagatggtatctcactatggttttgatttgcatttctctaataaccagtgatgatgaactttttttcatatatttgtcagctgcataaatgtagccaagacaatcctaagctaaaagaacaaagctggaggcatcatgctacctgacttcaaactacggaaggctacagtaaccaaaacagcatgacactggtaccaaaactgatatatagaccaatggaacagaacagaggccacacatctacaatgatctgctcttcaacaaacctgacaaaaacaagcaacggggaaaggattccctacttaataaatggtgctggaaaaactggctagccacatgcaaaaaactgaaacttcctaacacattaaacamaaattaactcaagatgggttaaaggcttaaatgtaaaacctaaaaccattaaaaaccctggaagaa

SEQ ID NO: 812248 - DNA, 631 bp, Homo sapiens
gcatggtcaagtgggatttattccaggtgttcaagtttgtttcaacatttgaaaatatttatgtattttgagactattttgctctgggcatacatatctaaaatggctacaaattctattttattattatgtagtattctttttatgatccacaaatgccttgaggggaaaatatgatgtagcttaaaataatgagaatatgatttttttccctgtgtgcattagaaatgtatctgattcacgttaaatgaattactcaatttcattcattattacactagaagcttttattgtgcatgtttatttatatatttcaagttttcaagtcattttataattaatattttatctttacatttcagaaaactccatatgctttcctctatgagggattagctaatatgtaagaccaattttcttgtcaagaacaagtagcaaagctgaaaaaagagaaacaaaactgtatgtttgaaggcataagagagtgaccaggactagagcactagagaagccaamattctggtagatgaaagagtcaactgataaaaaggaccctctccttctccgtcttacactataatttttgaatttttaacagcattaataaaattacttattagtgttttctata

SEQ ID NO: 812249 - DNA, 612 bp, Homo sapiens
ttttttagattttcaatctctctacttacattatccatctctttttgtaagtttttcactttttacattaaagctcttagcctattaattatagttattttatttttatattcctggtattatagttacaaaatttatgttttatgtaaatctggatctggtggttgctttgacgtttacaactatgcttgttgcttttattatgccttataatttttggttgaaatctagatatgatgtacatgataaaatggacttagttaggactttaatataagggtttgtgtttgtttgttttgtttatctggctggggttagtctgtgtttactctttgctgtagctgtagtgttggaggttaaatttccactggtgtctcctctaatgtctttggattttcctagagatttgttcctaaataatagcgtctgaggcttgtagttcttataactgtaatcccctattatttaacaggatctgttgatgtggtggtcatctttgggggaagggaaagtgttctgaatacctgtgactaagtattggttttatygaatgtatgtccctaagtttgactttcaaatggcttctcagatttttctgccctctttctcttt

SEQ ID NO: 812250 - DNA, 519 bp, Homo sapiens
atttttatgtttttttcttgataatatgctaaacaaggggtggagtattcatgagttttccacaagaggcaggcaatttctggagctgagggttcctcccctttttagactgtctaaggtaacttctggacatttgtaaactgtcatggtgatagtgggagtgtcttttaacatgctaacggattgcaattagcatataatgagcaatgagtatgaccagaggtcacttttgttgcctacttggatttggcaggatttggccagcttctttaccacaacctgttttatcagtaggctctttatgacctgtatcttgtgacatcagtgctaccaatctcctgtcttatcctgtgactaagaatgtctaacgtcccaggaaggcaacccaacaggtctcattctcattttttcactctggtttgaatgcctttggcaaaatattgctacatttggtggcaattgtaatacaaaacagtcttygtattataattaaatattgaataattgaatattccaaaa

SEQ ID NO: 812251 - DNA, 626 bp, Homo sapiens
ctatggatccaacacttccattatgcttaatgtttgtcaacgttgttttaaataattggtctactccattttcaggaatctatcggtaggtcttttattttcttcacakattacttaatatcatggaaaatatcctcttatatactgtttaagctgcacactattcaattgtataatcttactgcagtcagagctgcaggagtctctccccaaatgtggggctatgctcctagaaattagcatggttgagaaaaaaaaatctgtctgtgtttggcaagaacaacgtatcataaaataggaggtttggtgggaagtaataaaggcgttacatatataagtgcacctacacacgcagagaaatttagtttcagaaggcagctgcttccaaaacgaacaagacataattcatgttacaaaccaggttctaccagtaactgtcctctttaaccaccttatatttttcagaaaaacttggtgtacttttattttcttccaaggcagaatctccaaaaattttggtattatgtaactctatcactttaagcattttattaaaactagtccttgctggatttaaatgccatgcccttttccttgaaatgcctccttctccccagtcccttaac

SEQ ID NO: 812252 - DNA, 462 bp, Homo sapiens
ccagtgaaaacataaagtgcatatgaggacatgagggctaaggggatccccagggttcccttytccattctcagaattccttatgatatataagccacatacattgcctaatgccgtttataagaaatgtcatatctttttaatcaaagtaggtgtggctttaagtgaaaagtcccatttctcttctttcagagagagtgaagatgctgacgatgagggtcgtgtggggagccaaagaaatgaccccacctcattgtgtggatgtttctcagcttttcccttgatgttgaatggtgtcactgccagttttggcactctttacctgttttatgctgtgaagccaagatgagattctcttgctcagccttgggattgtgtaggttgggtagaagagctggttagggcagtataatgccatttgccccaggcagccccatgggcatcctgtgactgacactgctc

SEQ ID NO: 812253 - DNA, 568 bp, Homo sapiens
ttgcctggcccttgggtacttarcatactattcctcatctgcaaactggggataataacagaagtcatagagtcctcagaagttataacttgggatagtaactgtagtaatagtgtcctcatggggttgtttttaatatttaaggagaaaacttacttaaggcttagctaactgcaggatatacagaaaaagagtttcataagtgggtgtcgctttctcacacaacaaattaggcttcttgtattcatttgcctgcagaaagagaatgtgatggcatacagatatttatattccttaatgaaaattactgaactgcaagaaaactcaagtattttcattttataaataaggtgaaggaactttaaagttgattccagtggaatctgcaaagtgaagacattgatcatctccttttatgattttttgtgacctctacaaatgatttcagtgtttaaggattacaaatgtacatgtacttattcctgatgttacataaagcagtcattcagtagatgatataaataactataagtacaacaaagtgtgtcttcataacagtatcccacct

SEQ ID NO: 812254 - DNA, 568 bp, Homo sapiens
ttgcctggcccttgggtacttagcatactattcctcatytgcaaactggggataataacagaagtcatagagtcctcagaagttataacttgggatagtaactgtagtaatagtgtcctcatggggttgtttttaatatttaaggagaaaacttacttaaggcttagctaactgcaggatatacagaaaaagagtttcataagtgggtgtcgctttctcacacaacaaattaggcttcttgtattcatttgcctgcagaaagagaatgtgatggcatacagatatttatattccttaatgaaaattactgaactgcaagaaaactcaagtattttcattttataaataaggtgaaggaactttaaagttgattccagtggaatctgcaaagtgaagacattgatcatctccttttatgattttttgtgacctctacaaatgatttcagtgtttaaggattacaaatgtacatgtacttattcctgatgttacataaagcagtcattcagtagatgatataaataactataagtacaacaaagtgtgtcttcataacagtatcccacct

SEQ ID NO: 812255 - DNA, 621 bp, Homo sapiens
ctggaagctctcagggacaattttttttcttgcatttaccaacttccacaggctgccacaatggctggctgatggcccatttttccacccacaaaatcagcaatgctgattcagtatstcgcacacttcatctctctggtattgctcctgtcctcatacctcccattctgtttcccttgccttctctcccacttttaaagcccttgtttcacattgggtccacccagaaaatctaagctaagatactcttcttgataaggttagctgattagcaatctcaagtctcatttgctatgtagcataaagtattcgcaggttgtggggatctggacagaatcctgagggcatggcgggggttgtcagaggagggggacatttttctactgaccacacctttgtttttgcaaaaatttctaattttttttctttatttgttgttagaatttagtctgtcaaacccgtttattgtttctcatgactcttggctctcaaaatgtaagtattctaataattagaaatgccctataatgagaactattgtctcagggagtaaggatgcaacagctactctaactttgattgagttggataaaataatgacaagaatcttatcaaagcttc

SEQ ID NO: 812256 - DNA, 601 bp, Homo sapiens
atgtgctgccacaaagaattgctcaaccaaagttttttaatcatrttctctaaaagtatcttaatgtatgaagatgtgttctttttgtttgtttgtttgcaatggagcctcactctgtcgccaggctggagtgcagccgcacgatcttggctcactgtaatctctgactacctggttcaagcaattctcctgcctcaggctcccaaatagctgggattacaggcacacacaaccatacccagctaatttttgtatttttagtagggacagggtttcaccatgttgaccagactggtcttgatctcctgacctcgtgatccacccacctcggcctcccaaagtgctgggattacaggtgtgagccactgcgcctggccaagatgctcttttttagcctaaaatattctggaaatatatccagcaaaaaaaaaatttgttatcctactgtaggcctcatttttaccttataatggatgtttacttgcctatgatgtagtttcatttgcctcctcgactgaatatgtactctccacaaatatttttggctatgatataaaataattatggttatatattttatgccactttaaaatatgaataa

SEQ ID NO: 812257 - DNA, 517 bp, Homo sapiens
gaactcagactctccttgggcaggtcttgctgcagccgctatgggggttggcagtgaggttcccaggtcaatgagttgtgtacctagaaggattatgtcttcctctgctgagtcatgcagattgtcagggaagtggaggaaagctggcagtcacaggcctcacccagctcccatgcaaaccaaagggccggtctcaagcccactgtttccccctaacagcaccctacgtctgtttccaggtgggcaagccaggcttgagaacttgccccaggctggttttccgatctgcgaaagaaaagggtttggttcttccctggcctgtggagtctgcacaccggattcatgccttcccctgagttctggccaggaagcttctcacccagttcaaattgttamgaagttcatctggagatttcctcctccctgtggagttttacccccagctcctctggccgccctcccaatggatccctgtggtgctaggcaggaatgggctgcttggggtcccagcaagctc

SEQ ID NO: 812258 - DNA, 626 bp, Homo sapiens
aaaataatcaacttccccaatatcagagtctgggtccaatacactgtgtggttcacagaagaggctcattacagcttaaaggttctttcccaaggaaaagtttgtttgactaccttactgaagctagaaatgcaacaatgccgatttctcacgtgtatctgtagttattctagaatgatgcatacatgaatttcatactacatgcttctgctatgtttaattcccttattcccaatgactcatattatctttataaagtcactagagaaagagtacaagactctttatgctttagagaggtgtgttgttattggtagcaataacaaatattgcaggtaagcagagtcctagtaaaacaggcagtattttacatgcaatccatttaaaaaccaagcatctggaaattcctaggagctaaagaaagttatccaaacaagtgatagcatctctataagtgctgaatccctgagccccctttataggggctgagcgagtggaaggaagccagccccaggcagaacaggcacttcagaaatttaagcaaatgaayatctttacctttatgccacattggctgaagctaaaatttgtcccccagagttatggccaccaaaagatgttcaaaa

SEQ ID NO: 812259 - DNA, 555 bp, Homo sapiens
ggcagagacgtggcttgtttacattagcatctggcatgggctggaagttcaatatatatctgttgactgacgaatgaattgaaaaatcctttataatatcacttttactacccacacatacaatattccattgtagaaaacaaccatatattatttaaactaccttcactctggacatcaaactacctccagttttccatagactatttaaaaaaaagctgcataagagattcttaaatgtgtacctttgcacacatatccaattatttctttgcaataaattcctacaaatagaccagttaggtcacagggtatactaaaattttaagaaatttatacattccacctaactaccctcagaaaagtttctctaaatcataatgctgtcaataattacatgatgagtccatttcctacaatcttgaccaacactagttattatctttttaaaactttaccaattttatattyctaaaacagcatttggttgtaatttgcatccctttgactatgaaactaaaggtttttcttacatctttgactcattacaatgtt

SEQ ID NO: 812260 - DNA, 555 bp, Homo sapiens
ggcagagacgtggcttgtttacattagcatctggcatgggctggaagttcaatatatatctgttgactgacgaatgaattgaaaaatcctttataatatcacttttactacccacacatacaatattccattgtagaaaacaaccatatattatttaaactaccttcactctggacatcaaactacctccagttttccatagactatttaaaaaaaagctgcataagagattcttaaatgtgtacctttgcacacatatccaattatttctttgcaataaattcctacaaatagaccagttaggtcacagggtatactaaaattttaagaaatttatacattccacctaactaccctcagaaaagtttctctaaatcataatgctgtcaataattacatgatgagtccatttcctacaatcttgaccaacactagttattatctttttaaaactttaccaattttatatttctaaaacagcatttggttgtaatttgcatccctttgactatgaaactaaagstttttcttacatctttgactcattacaatgtt

SEQ ID NO: 812261 - DNA, 430 bp, Homo sapiens
aactctcaacaaattttaaagggttggcatcacacaaaccatgttctcttgccctcaatgtaattaagtcagaaatcattaggaaaaataaggaaaaaaaattactcatatttggaaataaagaaacacttttaaataacacatggtcagaaatcataaaaataattaaaattgaaaaataataaaataacctcataacaaaactttgggaataacactgaatcaatacatagtgaaaatttatactttaattgctcatattagaaaaagaatgactaaaaattaatgaactaagcacccaaattaagttagataagaacaataaaataactaagasaggagacaaatatatacacgtgtacagcacaagcaagaatagcaactaagcccagagtggcttcttcaaaaagatcagaggttggcaagcttt

SEQ ID NO: 812262 - DNA, 640 bp, Homo sapiens
ttttccctttttcttttccttttcccccattcttcctaattggaaatcactgaaacctgagctgtgctttcgtaaagccctgcaaactkaagactagacaacttaaactttagaagaaaacagcagcaacctctttatatgtgttgctgttgcatactattctaggcccccgaaatagagccaatagagggaacaaatcaaccacctccactccagcactgcattcagtccccataatgatgaccctctctcagcaggaagtagccagaaagattatgatgccccatatccctatgatcttgtgataaataaatatacaagcatgatagaaatcatgcacaaattgacagtggtgattgtggcaggccaggtctcactaatgcaggcctgcattacaacaactgtcccagctctgactgagtagctaggttaaacattaaaagctgattgagccagtgcccttatacaaaggctggaatgtaacaaagagcccaccaagagttttgcctaggcttttcatgggccttgaagtttgacaagataatgaaggaattcttaacaggacccttttaggattaaacaagttttattggggggtctgaagaaactcctcgggcctccacaaacaagtttattgaga

SEQ ID NO: 812263 - DNA, 623 bp, Homo sapiens
agtagaaagaagggaagagactatttgccagaagtacctgtagtaaggcaaggtgctgytactatccctaaagaaagggatcttcaggtcccagaagtaggtgttggggtaggaaaaagtccataccaccttttccatttgatccctctagtcaccctcaaacggatgaaatcattgtactgttcgggttggttttcagggtaaccctgtctatgcccttttcccactcactctccaagaaagaataaagtgggggagagaaggaaggaggcacctatcgatggacacgtagaccatccctagctgcttattcacaactagattccctttcaggtgcgacacattctttcattttataatagagaaagaagtaaatgacattcattgatttcaaattataatcagttcattaagtaaaaatgattaaaatgaggtcctttcctactttgattagaagaaagaatgaaaatggtagaggagatctgaatatggaaaatgtatggatggttgggagggttgttttaaaaaggtggggggtgtaaagagtaggaacacagaaaacatactccagagtttgcccagtgttggtttccaatatttgacagacattagctgcatgtaag

SEQ ID NO: 812264 - DNA, 552 bp, Homo sapiens
ttttatgtttcagttttattggtttctgccctaatttttattgcttttttttcttctgattactttggatttaatatgctcttctttcttctagttttcttttgtggcagcttagattattgattttagatcttccttctttggtaatttatggattcaatgttataaatttccttttgaaaattacgtttgctgcatccacaaattttaatgagttgtattttcatttttatttagttaaacatattatttaattccccttgacatgactattttgactcatgctttatccagaaatgtactgtttaatctccaggtattttggcatttctcagccatctttcttttttacatttctcatttagctccattatggcattattagagcacactttgtatcatttctacttgtttaaatctgttaaggtatatcttatggcccagaacgtggtcagtcttagtgaatattctgtatgactttgagaagaatgtatattctscttttgttgaagttttatatgaatgccaatttggtctatttgattgatggtg

SEQ ID NO: 812265 - DNA, 321 bp, Homo sapiens
gcaaatttgtggcagagggcagggctagacctctgttaactcttcattctcttttcttctgcttgtatattcttaaaaaaggatagtacatctatataggtgggctgtgggtaagtaaatctggtgtaaattctcaatttcaccagtggcctagaaatttaacccaagctaggtagctgccaataacagaaagaagcacatgcaatttacttcagtgtagcattttctaattcccaggcccaaggaaagkctgctcagtttagagctaacacattgcaaaggtaggaccttgacagatctgagatgcttatgtttgtgcta

SEQ ID NO: 812266 - DNA, 501 bp, Homo sapiens
gctcacaacttggtcctctaagaggtagtcagtggtcagcgcttcagcttgaccacagcgtttggttctttctttaagtgttgtgttgtaatgcttggattataaaagccttaacacggccscatttgatcagttccctgccaactcttgtatcctcatttcactaagctttgttacactcactagactgttaacaacggagaaaaacctgtgggtactgaatatgccatatacaacttgctatttattctgttccctgtttagaaggccatggctacccttaactatctgaacttttcctgtcctgtaagactgagctcactggcaatatcctataggctgctttccctaagcctccccatctttcttcctccctctttctacttctctcctacctccttttccctctctcccctactcacctgctttccttttgcccctcccacatcctcttcccccttcttgtcatttttccatgtcaagaaatttccagatatatag

SEQ ID NO: 812267 - DNA, 501 bp, Homo sapiens
gctcacaacttggtcctctaagaggtagtcagtggtcagcgcttcagcttgaccacagcgtttggttctttctttaagtgttgtgttgtaatgcttggattataaaagccttaacacggcccyatttgatcagttccctgccaactcttgtatcctcatttcactaagctttgttacactcactagactgttaacaacggagaaaaacctgtgggtactgaatatgccatatacaacttgctatttattctgttccctgtttagaaggccatggctacccttaactatctgaacttttcctgtcctgtaagactgagctcactggcaatatcctataggctgctttccctaagcctccccatctttcttcctccctctttctacttctctcctacctccttttccctctctcccctactcacctgctttccttttgcccctcccacatcctcttcccccttcttgtcatttttccatgtcaagaaatttccagatatatag

SEQ ID NO: 812268 - DNA, 627 bp, Homo sapiens
tggaaatggagctgaaaagcaacagactgacagctggcagagtccatccttttaactactgagcttccctgagttccaccttgagrtacaacttttgcagaaattagggtacagatagaccaaaattgtgtgtatataatgtaatatataaggtcatatgtgtaaatacttctaatatttgtgaatataattttaaattgcatataaatacttatgcaggttataaatatacaatttatgtatgttaaatgtcactgctcaatgagtgattagatgaggttgagaagggaggtagagacacatctgagttctgaagtagctcttgtcattcttagacaaaacatattgttaaacatctcaatttcattgtctttgatacatgaatatttaaagcactatgcatatacctgtcacttaagaattaatttgtgttgccttaaaaacataaaaaataagacagggagactttccaatagtaagtaattgagccagagctggtaaagagagaggaagcattttgggaatgtgttacacatgcagaggatccctgactcatgacagttctgcttatgatttttcaactttacaatggtacaaaagtgatataactcagtggaaaccatattt

SEQ ID NO: 812269 - DNA, 608 bp, Homo sapiens
tttgtgccttctgtaattttgattgaacactttatatgaattccattttgtgtcttttggtgtactgcttatacatttttttaaaaaacraaacaaaattttggtgattctcctagagtttaaaatacatatttttaaataatctaagcctaccatcagataacactatactataaggcttcatgtgtactgcagctactccataatagagtatatccaattccttcctcgcatcccttgtggcattgctgtcattcacttcatttataatatgctataacccccaatatattctttctattattgctttgaacagttatcttttagctcaattaaaaataagaaaaataaaagattatatgtattttaccttcatttattcctcctctgatgctctttcatttctttatgtagattcaaatttcttactgatattattttccttatctctgaagaacttttatcatgtcttgtaggccaagactagtggtgatgcagtctctcagtttttgtttgagaaagtccttgtttcttctttgcatttaaagtataatttcactggatatagaattatctgttagatttttttttctctttcagcgctctga

SEQ ID NO: 812270 - DNA, 573 bp, Homo sapiens
tcaccacactgtctttttgtttgcatgatttctgatgagtttaatgtagttcttatcctttactctttagaggtaaggtgttattttcccccttatggcttccttcaagagtttttccttctttcatttttctgcaattcgaatatgctgtgtctaggggtgtgtgtgcttgtgtgtatttcttttgcttggtgtttttctgagcttcctgtatctgtgggtcagtgtctattattaattttggaaagttcactgctgttattacttcaaatattccttctgtcctatcccctctttattctttttctggtattctagatatgtttatgtcacccatgtttctgttacccatgttatcccacagtcctgggatgtccgttctgtttgttcaactctttttctctttgtatttcagtttgggaagtttttattgacatgtcttcaagctcactgattctttcctcagcaatgtcaartccactaatgagcctatcaaaggcattcttcatttttttccacggtgttttttttttttttttatgtctagcatttccttttgattttttggtagtt

SEQ ID NO: 812271 - DNA, 627 bp, Homo sapiens
agggatggttacttggcccacgtttggggagttagttggggaagtctttctaaaagaggcttgtgtgacctggaagggcaaattgaaataggcaagatgaagggagtagaagagaggatgtcttaacttaggtttaagtaattcaatgagccaaggctcagaactaaagagaaagtgtgtgtacacacacatgcatgaatctacatacatgtctacttttgagggagtggaaagcagtaggcaccatgaaaaggtttggttaacagcggatagcttggtatggatgcagtaaagagtttaggaataagagtacaagaaattggaggggtaagcaaggccaggtcatgcttgtgtgtcgtgataaggagtttggtcttttttcaaaggcattgaggaatgttaagcaaggaagagaatgtgttttatatgctacaagtggtagggagagtgtagtgtagggtagtaaagctgtacatgggaaactcttgcagcattcmaggaagaagaccttagtatcctgaatgaagagaatgacatgaacctgaagagaaatggatgaattaggggagatattaaaagcagaaaagtcaataggactcagtgatttattgcatggaggaagtgaga

SEQ ID NO: 812272 - DNA, 625 bp, Homo sapiens
gtcaacttcattttacccaagataaaattgaagcctagaaagactaaatgacttaaatcacttagtgataaayaaatgcctactttaatagtgttagtaattataatatatgataacaaagctgtatgatatggtgggagagagttcaggcaattgaggcagccagacagagtttgtaatggctccctcctttataagctgtggggctttcaatcagtcccctaacttctggtgccctcagttctctcaattgtgaaacactaattgttcataacttgtagcgttgtgttaagttataggtggtgtatgtcaaatgcctggcagcctaaagccttgcacatcatcggtattctgggaaagggattgttataattctcgttattgaccatacacacacaatactataatgaaatgcaaaatacatattaattgaacttcttgaagagtaacataaataaaacagctacctacgttaactgtagatccccctccttcccagttatttttttccatattaaataccttactatgagaaatattcctaaaatatgttagttgactgttctgccttaactaagaattccatagtgaacatttttttctttttctcgttattacagtcttt

SEQ ID NO: 812273 - DNA, 373 bp, Homo sapiens
aatttcctacaggaaagaccaaaccatttaattttacaggtggaattactaagcattcaagagttaatttctatcttttacaaacttatacagcaaaatggaaaagaacaaatactctctaaatcattccatataacctggacaccaaaaatagacaaatacagtttaaaaaaataaattataggccaatctcactcaagaccctaaataaattataccaaatggaatacagtggagttaaaracaaaaaaaggtgtatttatcatgaccaacttggctttatcccaggaatgcaagggtagtttaacatttagaaatctagaattgtgatttacataatagattaaaaggggaaacccatatataatctcaa

SEQ ID NO: 812274 - DNA, 569 bp, Homo sapiens
ccaggctggagtgcagtgacgacatgatggcttactgtgacctcaacctcctggactcaagccatcctcccacctcagcctcccaagcagctggtaccacaggcacacaccactaagcccagctaatttttktattttttgtagagacattgttctgccctgttgcccaggctggtccagaactcctctaggctcaaatgattctcctgtcttggcctcccaaagtgctgtggttacaggaatgagacactgcgcccagcctcctttgacttaaaatattaggtctattgtaaattctcaagggagccatttttttctttttccactctaatactgtgaattctttgcggatggagagactgttctcttcatttctgtttcccttcacctagcacagtcctcacccatcaaatcatggaggattgtagccacagctgcaaatggaaccctggagttttccagttcctcctactcattcaagttctatgtctcccttcttccctttgtttttctttctcaggtcctttttcttcttgtaatgtagttataggcttatcgcctgtattctg

SEQ ID NO: 812275 - DNA, 555 bp, Homo sapiens
aactttccatccctgtctctttctcaacctcttctttaaggccaataactcttggatttgcccttttgaggctattttctagatcttgtgggcatgcctcattcttttttattttttctttagtctcctctgaccgtgtattttcaaatggcctgtcttcaagatcacagattgtttcttctcaatcaattctgcaattaagagactctgatgcattcttcagtatgtcagttgcatttttcaactcccgaatttctgttcaattctaattattttaatctatttgttaaatttattgatagaattatgagttccctttctgtgctatcttgaattttatttagtttcttcaaaacaactattttgaattctctgtctgaaaggttacatatgtctgtttctccaggactggtccttggtcccctatttaattcatttggtgaagtcatggtcttgatgcttgtggatgtttgttgctgtcttggcattgaagagttaggtatttattatagtcttcacagtctgkgcttgtttgtacccatccttcttgggaag

SEQ ID NO: 812276 - DNA, 600 bp, Homo sapiens
aggaagacatttttgagagtgaaaggggagttaatgatgatgccaagaccgcaggtgtaaactgggaagtgtggtcatgctaaaaataaggcaaaatgaggtgcccagtcacctggggagtggatggtagagaaagatgacctggctttcctggtatgaggcttggcaatgtcccttctaatgaagtcctctcccctgcaggcctagtttctaggcagaccctgccaactgggctttcttttcctgatgcccaggcattctgaggggcctggtgtctttggcatcaagctgcctgtggggctggccagctgtcggcggctgtgtgcattcagttccctcgtgggttcccatcacagtccaccacccctccaactggcaaagcgccactgaaggaagcatttttgtggcaccgggcaatagtatgccacttccctgcctcccgtaacagaagtgttccaagaggcttctagtgctggtcctcaaagaggrcatctggttccactgtagacacttgcagcctgatggtgagcagctggtcaccttttatcctccacatcccatcatggaacaggaagcaggctacagacatttcccttttcc

SEQ ID NO: 812277 - DNA, 456 bp, Homo sapiens
atttctttggttagtatttactgtactggtaaagaccaaagaattggtaatgttcaacaaaatatgaaaatgccagtgactttaacaaaaaaatagctggaaaccaaagaatcttgcttayatcacaatcacagctaggaaaatgcagcttattttacagccggtccccaatgtgaagaatatgtagaaacaacagtaaataaaaaaggaagtataatacggaaatgcctaatatcaaagaaattcatgtaacagaatactgaacttcagtatttctaatatacgtatatacacattcctgctaactgtagaatatttcctgcaagttatggtcccagtgcctcaccaatggaagatctatcttgtactattcaattcatactctccctaataacagcactatattagcaggttcatcatcaagtgaaggctgtttgctagataactaaaaccaag

SEQ ID NO: 812278 - DNA, 548 bp, Homo sapiens
ataccagtttggcaggaagataacaccttctgtatccttaactggattcagtaatacacaggaatgtgtacacatgaggaaaagaaggtgaatcgatctgtgtggtgatatttttyaaagtgtatgctttagagttaaatattattaatggtttaataataaggtgatttgtaaaatcagtaacaaaaataacatcaggtagctgtgagacagcttcaatgaaaacaagatgatgtcttaaacaatcagcaacaaaagctttgctggatgcttcatcgcgtcattgcatctatttagaaaatgagatgcaggattcaaggaagaaattagaccagatgagaagtcaagtatgtatgaaactttgcatgccaacaactgttaatctgtagctagttaactaatataaagtgttttggggtactaattttagtggatggctttcttttgtatttttattataattaattttattaaaattttatagtggatggctttcttttgtattttccttattattaattttattaaaattttattataatgcacct

SEQ ID NO: 812279 - DNA, 550 bp, Homo sapiens
ctttttaatgtagacataaaaattgtcaaaaatattagcaaatcaaatccagcaacatataagatggacaatgcatcatacccaagggtggtttatactgggaatgcaagactgattcaatattcaaaaaccaatcaaagttattctctatgtaaatagactaaagaagaaaaaccacatgagttcctatagatacagataaagcatttgacaaaattcaatatccattcataatttaaaataagaagaaaaatctcccagcaaagtaggactagaaggaaacttcctcaacaaaacaaggggcatctacaaatgcctgcaatgctatagttaacactgaaagactaaatgctctcatcctaagttgaagaacaagtaaaagatattcactctcacctctccaactcaaaatcaacattataccatcatactagaaatcctagccagttcaatatgaaaaagtgtgtgtgtgtggsggggggaggagtggaggacaaaaattgacacagattggaattgaagaaataaaactatctctataattcacaaa

SEQ ID NO: 812280 - DNA, 538 bp, Homo sapiens
atttctaataataccatccagaggtagactgatataacatataaataacatacatacatatagacgtacataaccaaacagatgcagaggttcctggcttctgttctcaaattgtagccctgtgccaggaacgataatataaaactcactggtcggtccaaattgtgttcttggcagataaagttacctgttcggatggccaaagtcttttgttaatacatatggaaaggactttacgattttccatttgccagtttttttctacagtgttcccattttttctcccttctgatgcgtcatttcccagatgcctgcattttaaagatttcggtatctctaaggcagggagaaaggacattaagttttctccagaaaggagctgtgggcatagttgcctgttgtcyggggtcagctttattgggaccgtgggccgtgtttagggggtggccaggagacactggtgtgttgacgagtccttctcctcttcagcctcaggtggctgcttttgtaatagctcagggttgtgtgcaagaggcca

SEQ ID NO: 812281 - DNA, 625 bp, Homo sapiens
cccaaatggcgttgttgcatcctggggtgaactttgagggaacacgagcgactccatgccacctaccaagtgaaaggcaggcctgatgccatgcctggggtggggtccacatctccagtggtagagatgactcaccacaccacgtgctcctccgccgcgcccttcccacagcactggcttaacctgggggactctgagtcctttatcaaggttgtcctgggagatgggagtttaaacacccagcccgcaaggccacggccattcccaggcttctctctccacacacctgggctttgtcagtgggtgcagtgatcgagggcataaccgggctccatcccaatgctgcctcatccctgcagtcaccccgcacaggtgacgcaggcttcagagggccccggacctcgcctgagggtgaagaaaatcacggcatcactgacaaggccgccatgaggatcgcgtgagcagaaacacgatgatcatggctcactgatggggcagctctgaggatcgcgtgagcagaaacacacagataatcacagaatcactgacggggcmgctgtgaggatcgcgtgaacagaaacacacagataatcacagaatcactgacggggccgctgtgaggatc

SEQ ID NO: 812282 - DNA, 625 bp, Homo sapiens
cccaaatggcgttgttgcatcctggggtgaactttgagggaacacgagcgactccatgccacctaccaagtgaaaggcaggcctgatgccatgcctggggtggggtccacatctccagtggtagagatgactcaccacaccacgtgctcctccgccgcgcccttcccacagcactggcttaacctgggggactctgagtcctttatcaaggttgtcctgggagatgggagtttaaacacccagcccgcaaggccacggccattcccaggcttctctctccacacacctgggctttgtcagtgggtgcagtgatcgagggcataaccgggctccatcccaatgctgcctcatccctgcagtcaccccgcacaggtgacgcaggcttcagagggccccggacctcgcctgagggtgaagaaaatcacggcatcactgacaaggccgccatgaggatcgcgtgagcagaaacacgatgatcatggctcactgatggggcagctctgaggatcgcgtgagcagaaacacacagataatcacagaatcactgacggggccgctgtgaggatcrcgtgaacagaaacacacagataatcacagaatcactgacggggccgctgtgaggatc

SEQ ID NO: 812283 - DNA, 625 bp, Homo sapiens
cccaaatggcgttgttgcatcctggggtgaactttgagggaacacgagcgactccatgccacctaccaagtgaaaggcaggcctgatgccatgcctggggtggggtccacatctccagtggtagagatgactcaccacaccacgtgctcctccgccgcgcccttcccacagcactggcttaacctgggggactctgagtcctttatcaaggttgtcctgggagatgggagtttaaacacccagcccgcaaggccacggccattcccaggcttctctctccacacacctgggctttgtcagtgggtgcagtgatcgagggcataaccgggctccatcccaatgctgcctcatccctgcagtcaccccgcacaggtgacgcaggcttcagagggccccggacctcgcctgagggtgaagaaaatcacggcatcactgacaaggccgccatgaggatcgcgtgagcagaaacacgatgatcatggctcactgatggggcagctctgaggatcgcgtgagcagaaacacacagataatcacagaatcactgacggggccgctgtgaggatcgcgtgarcagaaacacacagataatcacagaatcactgacggggccgctgtgaggatc

SEQ ID NO: 812284 - DNA, 533 bp, Homo sapiens
ttgcaggccctctgccgaccatgcttccagcagctgcaagaacccagggaggtctcagtggatcatgacgggatctgcagcacgggctaacaagccaggccccagagacacacactgttcccttcccttscacgaagttcagagccaggcgtagctagactactgcagcacgagtgttgggtgggtgggcacaggttctgcctggcaaacgtcacatgcttttaccaaggtggtgaccatgtgagtgagtgccttgtgtttacactttgggtattttcttatttgtgttaaacttcaaaaaatgtgaaaacattcgaaagaagacagtgtctcctgggatctgggcagcaggctgggtctgaactctcgcttacctcttgtggatgttaacacagcctggaatttcctggtttgttagtcaaggaatactttacccaggtgcaatccatctgctttcatttttttagtcagtaaattggactcctttctttttgtctgcttgaaatgactaaagcaatgtgtgtgttgttttt

SEQ ID NO: 812285 - DNA, 634 bp, Homo sapiens
gagctgcaagaagacatatttaaatccactcttataattagagacttcaacatccgtctatcagaaatggacagattcagcaggtagaaagccagtaaagacatagatgaattcaacagcatcgtcaatcagctggatgtaatggacatctgtagactactttatccaacaaccacagaaaacacactctttttcaagctcacatggaacattctctaagatagacatattctgggccataaaacagcccttaacaaatttagaagactagaaatcatttaatgtctgctctctgtctacaaaggaattgaaagcaacagaaatataaccagaaaatcccaaaatatacagagattaaacaacacatttctaaaaatacatgggtcaaagaaggaatctcaagacaaattaaaaagtattttgaggctgggcatggtggctcatgcgtataattccagcactttgggagaccaaggcaagaggattgcttaagcccaggagattgaagtcacagtgagctatgatwgtgccaccgcctgtctcaaaaacaacaacaacaactaaaaccctttcgattcaatgaaagtgaaaacaacatatcaacatttgtggaatgcagtgaaagcagtgttta

SEQ ID NO: 812286 - DNA, 527 bp, Homo sapiens
gcaaaagatgtaaaagaatgaggtcactgtgtttaaatattgtaccttatgtgagttcaaaaaaaaacgtagatgtttgaaaaacacagctaacctttgaaaagaaaaaaatgccacattcactttagggaatgggcaaacttaactaataaaaatttatagccctggaatgtttgcaaaaaaaaaaaaaatctctcccacttgaaatgtcagaatgatctcagatctcctgttaagcaatttgttaaactttaaatggtaataaatattagatttaataagtggaaaattctcaagtaagaataaggccactgaagtacatttgaaagacgtatcttttaaaatttcaaacatctgtttgtttgttgattaaattatttattcatccttttaatcactccttcagcaaattggatggctcctaggtgccacgcattgcaagcattgaactagacttyactaacactaaaacgaaagaaataatgtcccttttctcaaggccctcacaatcttgaatgtcagaccca

SEQ ID NO: 812287 - DNA, 495 bp, Homo sapiens
ggcaccaatttcttagggatttcaacggatgactgtgtttccatttgtttcaagaattttcatgattgcatgctaggtaattccaatatctgtgctctcttaatattggtatctgctctcttatcacatgtgagttaatattttcctaatcctttgtatgccaaataatttcgggtttataatgtggacatttttaggtttctagaaactgcacaatacatatttcaatcctatcaatttggtttgattttctccttttatattgcaaaaatattagaaaatctattgcagttaaatttttaaaattagtcgttcttgaataaaaggttctgtgtatagtcataaagagaggacaattgtcctgagtctttcattgacaacttagtttctttttaatgtrttttattatatggttaacacatgaacaacatggattttaactatgtggatttactgatatgcagattttcttctgcctctgccatgctggagaca

SEQ ID NO: 812288 - DNA, 609 bp, Homo sapiens
gatctctatcaaaacattaaattggagtggcaatgaggracattctggccttttcctgaacttaagggaatgtatccagtcttgtaccttccgtattcttacggttttctgtctacatgttttattgattactgagaaagaaggtttaaagtatccaagtataattttggatttgtctatgtatctttttggtttctttagttttgcttcatgtattttgaagctctgtttttaggtgcaaatattctaaggattcttatatttttctgatacattaacacatttatcatcatataatgtccatctttatccttgacaatattccttgctctgtggactacggatctatgttatattaatgtaggttctccagcttttttttgatgagtgttttcatgatgtttatttcctcattcttttaagccatctctatgactgtgataggcagaattctaaggtgggctccaagattcccataaactagtatacatgccctggataatctcttcttctttagtgtgggaagacctgtgaatagaatgaatgacattcctatgattggtttacatggtagaagtgaagggattttgcaaatttaattaaagtctc

SEQ ID NO: 812289 - DNA, 609 bp, Homo sapiens
gatctctatcaaaacattaaattggagtggcaatgagggacattctggccttttcctgaacttaagggaatgtatccagtcttgtaccttccgtattcttacggttttctgtctacatgttttattgattactgagaaagaaggtttaaagtatccaagtataattttggatttgtctatgtatctttttggtttctttagttttgcttcatgtattttgaagctctgtttttaggtgcaaatattctaaggattcttatatttttctgatacattaacacatttatcatcatataatgtccatctttatccttgacaatattccttgctctgtggactacggatctatgttatattaatgtaggttctccagcttttttttgatgagtgttttcatgatgtttatttcctcattcttttaagccatctctatgactgtgataggcagaattctaaggtgggctccaagattcccataaactagtatacatgccctggataatctcttcytctttagtgtgggaagacctgtgaatagaatgaatgacattcctatgattggtttacatggtagaagtgaagggattttgcaaatttaattaaagtctc

SEQ ID NO: 812290 - DNA, 534 bp, Homo sapiens
gaataatattgtctaggttgttttccagggtttatatagtttttgggttttacatttaagtctttaattcatcttgagttgatttttgtatatggtataaggawggggttcagcttcaatcttctgcatatggctagcctggttagccagttatcccagcaccatttattgaatagggagtcctttccccattgtttatttttggcagatggttgtagttggtgtggccttatttttggcctctctattctgttccattggttatatgtctgtttttgtaccagtaccatgctattttgcttactgtagctctgtagtatagtttgaagttacgtagcatgatgcctccagctttgttctttttgcttaggatcaccttggctattaaggctgttttgattccatatgaattttaaaatagttttctttctagttctgtgaagaatgtcattggtagtttgatacgaataagattgaatttataaattacattgggcagtatggtcattttaacaatattgattcttcttattc

SEQ ID NO: 812291 - DNA, 497 bp, Homo sapiens
gtcttcaaagagatcatggaaaagactccaacaagtacaggtttttgataactttaagatcmcaccattggcctgggtaagaatttccagaactctaatgaagaaactgactggtttgtaaaactgttaacccgatgttgggcaaaacaaaaattaattggatgggactaaatgaactgatgaaaaaaaatgatgctttaaaaaattaccttttttcaaaacattgctcgttctttaatattttgttttccagatctgaggaaatgttttctcttttatcctacgctatctgtagttgaccacaatctggtagattatgcatttgtaaacagaaataaagcatttgattttctccctacctaatccctccagaatttgaaaatgatgagtgagtattcttacattcatgaccatagttgtttgtataggtccaataagaatctatctgtttgtaacaggacacaatggaaaacattggttacattaccaaagctttg

SEQ ID NO: 812292 - DNA, 497 bp, Homo sapiens
gtcttcaaagagatcatggaaaagactccaacaagtacaggtttttgataactttaagatcccaccattggcctgggtaagaatttccagaactctaatgaagaaactgactggtttgtaaaactgttaaccygatgttgggcaaaacaaaaattaattggatgggactaaatgaactgatgaaaaaaaatgatgctttaaaaaattaccttttttcaaaacattgctcgttctttaatattttgttttccagatctgaggaaatgttttctcttttatcctacgctatctgtagttgaccacaatctggtagattatgcatttgtaaacagaaataaagcatttgattttctccctacctaatccctccagaatttgaaaatgatgagtgagtattcttacattcatgaccatagttgtttgtataggtccaataagaatctatctgtttgtaacaggacacaatggaaaacattggttacattaccaaagctttg

SEQ ID NO: 812293 - DNA, 497 bp, Homo sapiens
gtcttcaaagagatcatggaaaagactccaacaagtacaggtttttgataactttaagatcccaccattggcctgggtaagaatttccagaactctaatgaagaaactgactggtttgtaaaactgttaacccgatgttgggcaaaacaaaaattaattggatgggactaaatgaactgatgaaaaaaaatgatgctttaaaaaattaccttttttcaaaacattgctcgttctttaatattttgttttccagatctgaggaaatgttttctcttttatcctacgctatctgtagttgaccacaatctggtagattatgcatttgtaaacagaaataaagcatttgattttctccctacctaatccctccagaatttgaaaatgatgagtgagtattcttacattcatgacmatagttgtttgtataggtccaataagaatctatctgtttgtaacaggacacaatggaaaacattggttacattaccaaagctttg

SEQ ID NO: 812294 - DNA, 527 bp, Homo sapiens
gcagaaattatttagccactgccccctccatcttcccttttccttgtcaccatgtgtacagtaaagaaccaggcggccgggcrcggtggctcacgcctgtaatcccagcactttgggaggccgaggcgggcagaacacgaggtcaggagatggagaccatcctggctaacatggtgaaaccctgtctctactaaaaatacaaaaattagcagggcatgctggtgggtacctatagtcccagctacttgggaggctgaggcaggagaacagcgtgaacccgggaggtggagcttgcagtgagctgagatcgcgccacagcactccagcctgggagacagagcgagattccatctcaaaagaaaaaaaaaaaaaagagaatcaggcaacttggttctagccaaatagagaacccatctgcataatgaaagattttggtggggtgaccagcttttcactccctatgcaaatggcacacctagccctaaccggtttttcctgccctatgcaaatggcatacgtggtccgac

SEQ ID NO: 812295 - DNA, 527 bp, Homo sapiens
gcagaaattatttagccactgccccctccatcttcccttttccttgtcaccatgtgtacagtaaagaaccaggcggccgggcgcggtggctcacgcctgtaatcccagcactttgggaggccgaggcgggcagaacacgaggtcaggagatggagaccatcctggctaacatggtgaaaccctgtctctactaaaaatacaaaaattagcagggcatgctggtgggtacctatagtcccagctacttgggaggctgaggcaggagaacagcgtgaacccgggaggtggagcttgcagtgagctgagatcgcgccacagcactccagcctgggagacagagcgagattccatctcaaaagaaaaaaaaaaaaaagagaatcaggcaacttggttctagccaaatagagaacccatctgcataatgaaagattwtggtggggtgaccagcttttcactccctatgcaaatggcacacctagccctaaccggtttttcctgccctatgcaaatggcatacgtggtccgac

SEQ ID NO: 812296 - DNA, 625 bp, Homo sapiens
gctctcttttactttctcaccctctctcctttttttttttttttttgagatggggtcacactctgttgcccaggctggagtgcagtggtgcaatgttgactcactgcagcctcctcctcttgggctcaagtaatcctcccacctcagcctcctgagtagctgggactacagttgcacgccaccatgcctggctaatttttttttgtatttttggtggagacagggtttcaccatattgtccaggctggtcttgaattcctgagctcaagtaatccacccaccttggcctcccaaagtgctgggattacaggcgtgaaccaaagtgctgggattacaggcgtgaaccaccgtgcccagcttctcactctctcccttctaccttcagccacggatgtggtgacacagcaagaaggccctggcaaaatgccagcaccttgatcttggacttcccagcctgtagaatgagaaaataaatttctgttcattataaatcactcagtctcaagtatcctgttacrgcagcataaacagactaaggcccctagtgaagcatgtgctcgcttagacctgttactaatgattgcctgggcaccatgttgaggaggacattcaggcacatctggtt

SEQ ID NO: 812297 - DNA, 603 bp, Homo sapiens
tttatgtgtagaagagggacttcagcatcctctagtccaggagtttccaaacttagctgcttatccaaatccacccaggacactttttaaattccagatttagaggacctcataccagaatctctttggatggactcccaaaccttctggtttgggagtcaagcttctggtccagggccttttggttgcaatggctgttgagttttgaaacattaatattgagatgtgtaaaggatactacagcaaacacccacacacttggcactccaaatcatcaaataataactctaaaaaatatttacttccatatattttaacaccttattttgaaataaacacttttgcaagtagaatacatggaaaaccttttttttaaatttaaatatttaaagttcatcagaagttgaaaaacaaaatcttcccataagtctcaaacaaccagactgagatcttaattttagcctttttgccaattgaataattcatgacaaagtttaaactttgcatatagcaaaagcaaaagcaaagcaatgttggcgtcatacctttcttatactttcatccccacccccacracactaaacattaagccaaaaaaaaagc

SEQ ID NO: 812298 - DNA, 571 bp, Homo sapiens
gaggagaagaaagagtccattaatgtgtaaagaataggaaggagtctcttcctcatggcttaatattccacctcctttccagcattattttagctgtggcctttctgtgtaaacctcacttggtcctcttccctcaccttcagccctaaagcctccttatcctcattaatgcaacacatattggaaggttgtactggcctaggagtcatgctggggtcctttttttacacttgtcctctccatctaactaacccccatccctatttctaatctgaactaacactcacttgatttctacctaatcccatgtcttggtcttgggacccatatcctaatcttttccctgggactgaaattcagtgttttaactttaatttgggattctaaactgcagtttctcaaggcatactcacttctctgtctctcagcatccttatagactcaggtatatctcaagtcctaaggwtctccacagtaaccgtgggtctggcctgtcctggctaggccaattcattttttctttcttcagaccacacaagagagcaaaggttggggtagagggattcaagca

SEQ ID NO: 812299 - DNA, 605 bp, Homo sapiens
taggagctcctcccagccacctttgtcagggctggtgcttgcactcaccattggggtatttgtgggcaagccaggggctccagttctgctsagctgtgtcccccatggaataggaacctaagggtgctgggaaccccgctgtccagccctccatttgtaacaacagagaatatctcacagtaaatgaagatcaggtacagatccatctgcttgagccacagctgcctcttaaaagcactatctagtggcctctaagtcaaaccatacagcccaatataaagcctgctgacagaagtgcatagagctatagaagcaaatccaaaggattctatgcaacgtactctatggtcacactcccctagggagagggaaaagggaaagaaatatacaggggaagaaaaaaatcaatattcatatgaaaataattacaaaaagtaggagtattagcatcgccagatgagagtaaaacaacacaagaattctggcactatgaaatatcatgacaggatcaaacctcccctatcaatattaactttgaatgtagatggtctcaacaccccacttaaaaggcacagagtggcaagttggataaaaaataaaaaaaa

SEQ ID NO: 812300 - DNA, 595 bp, Homo sapiens
taatctagtttcaagtagctccacaggtgtttctgatatccacccggggccaggtcatagtagttccagctgagtgcttagtaattgacccacaagtgtgtcaggccatgaggagtcaaagaagccatmctaacaacaagagatttagggtgatctgcagattaaaccacaaagcaaaaagttttcctttacatgccaaattccgcagcccctgcagatccaataattcataataatttctttgtagatacagttacaaactgacaactggagccaggggttcccagttgtgacagcacccagaataatctggaagcaaacataggtacactgacccactgaactggaaactctgggaatgggaactggagatctacatttttcaaatctccaggtgattgcttaaagcagaaaggattggaaatctctttttaggtcattccaaattagtacctatattccctctaagctactcagatattgtctttaaagaactgcctggtcagtaagtctcaacccaattccactagagcttcctcatatgagatcttcccaacagcattccagaaatccacatttggagctctaagacata

SEQ ID NO: 812301 - DNA, 631 bp, Homo sapiens
ccttttctttgtccttcatggccactaccccttctaccaggaacattacccttcaggctgaactttcaactattccaaaaatatttattgggagctttgtgtgtgtttgcgggttgggggcacagaaggaaacaagacagcccaggttcctgttcccatggagcaatctcacaacttggcagttagctgcaaatgcaggaaccacttggcttaggtttgaatcatgcctctcccgcattccaatcgtgtgacttttgggaaatttgcttaatttttctaagcttcacttttgcatttgtaaaatggagataagaatatgacatctccaaagagctatggtgaggatcaagtaatataaatgtcaagtgcttcagaacattgtcaggcacatagtaaatatttagtaaatgttagtgattgtcaactattaaattgtcaccatctgccagtcactgtgtaaggcactgggtgtggagagaataaaacacatggtccttgccattatgaaacttttattttgctgggggtgacagccaatagactaayaaccaggtgaatgtacagtaagtcagatgataactagtaatatggagaaaaataaaggaataatgaaaaagaaagaatcatgaaa

SEQ ID NO: 812302 - DNA, 618 bp, Homo sapiens
atttgtgcagttaatgcaattatcacatggtcctgaggtgacatacatcctcctcagctgacaggattaagagattaaagcaaagacaagcataggaaatcacaagggtattgattggggaagtgataagtgtccatgaaatctttacaatttatgtttagagactgcagtaaagacaggcataagaaattataaaagtattaatttggggaactaataaatgtccatgaaatcttcacaatccatgttcttctgccatggcttcagccactccctccatttggggtccctgacttcccacaacaactgagaactttgtcggtgggatcagaaacctgttcactgcagtggaagggccactcaatgaggagcagggaagtgcttcatgttagggagggaagcacattcgtgaacactgatgaacctgagaatagatgcagaacagggagatgatccagtgtgctgatgaccacaatcgtgtcatcctgtaggragttcttatgtgatatgttctgtggcttagttctttgcactcagctgtccaatgttttgtgtagttgcctcaaaggaatctatgtctgctggtgatcagaaaacacaaatatgggtgtgaagaac

SEQ ID NO: 812303 - DNA, 618 bp, Homo sapiens
atttgtgcagttaatgcaattatcacatggtcctgaggtgacatacatcctcctcagctgacaggattaagagattaaagcaaagacaagcataggaaatcacaagggtattgattggggaagtgataagtgtccatgaaatctttacaatttatgtttagagactgcagtaaagacaggcataagaaattataaaagtattaatttggggaactaataaatgtccatgaaatcttcacaatccatgttcttctgccatggcttcagccactccctccatttggggtccctgacttcccacaacaactgagaactttgtcggtgggatcagaaacctgttcactgcagtggaagggccactcaatgaggagcagggaagtgcttcatgttagggagggaagcacattcgtgaacactgatgaacctgagaatagatgcagaacagggagatgatccagtgtgctgatgaccacaatcgtgtcatcctgtaggaagttcttatgtgatatgttctgtggcttagttctttgcactcagctgtccaatgttttgtgtagttgcctcaaaggaatctatgwctgctggtgatcagaaaacacaaatatgggtgtgaagaac

SEQ ID NO: 812304 - DNA, 503 bp, Homo sapiens
gcacagagaagtcaagtaacttgcttaaagacacacagctagtaaatagcagtttgtatctgaacaaaccccaaggtccattgctctttttgctacttgttccttcttcaattcaggtttgatgaaaatcttccttttctgttgttatttcaaggtctaactgtctatcacggaagatgaatataacttatcagtgactccttctgaagtgttacattacttcacccctcattggaagaagaatatcacagtacatgactctttgaagatgttttccttagatcaaggcagccccaaagacactcattgcttttccttttacttactgctgttcaagcaaatatgcagataatgctgaacttacagtcttttggaaggttatttaayacctgctgtttgctcaagtcacattaaagaaacacacaatggtggaaagctgtgcatgttgtacttcatttaattgataatgcatcctggtttcttaggttaatacacattgcagt

SEQ ID NO: 812305 - DNA, 535 bp, Homo sapiens
aagaccatcagacaagagaaagtctctcttttgcaagagaggtcaaatttttgttctctttggactctattagtggatgattaatatatttctccacattaggaagggtgatctttattactcaaagtaccaaattaaatgttaagctcatacaagaatatgaaaatataagaataccctcacagaaatacctggaataatggttgaccaaatgtctgggtatctttcagcccagtcaaccttttttttttttcttttagaccaggcctggctctgtcgccctggctggagtgcagtagtgcaatcttggctcagtgcatcctcagcttccagggctcaagtgaatgtcctgcttcaacctcctgagtagctgagactgcagatatatgccaccatgcatggctaatttttactttttttttttttatacagatgggggtctcactatgttgccccagctkgttttgaactcctgggctcaactgatcctattgccttggcttcccaaagtgctgggattacaggcatgagccac

SEQ ID NO: 812306 - DNA, 683 bp, Homo sapiens
gtagttaccggatccattgcctcatgcatttatcatttctttgtggtgagaacatccaaaggcctctcttctagctgttttgtaatatatgatattttactattayatacattttatgtgcaatagaccaccagaacttattcttcctaattgtaattttgtacccattgaccaacctctccccatccccctctcccctccttagtctctcataaccactgttctactttctgcttctataccaactttctttttcttttcttttttttgagatatggtctcattctgtcacccaggctggagtgcagtggcacgatcacagttcactgcagtctcaaacctcccaggctcaagtgttcctcctgccttagcctcccaagtagcagggactacaggtgcaagccaccacgcctggctaattcttttttttatcctcttagattccacataagatcatgtgatatttttctttgtctgtctggcttatttcacctaacctgatgtccttcaggttcatccatgttgtcacaaataacaggatttcattcttacttatttttttctttcatccataggactctgcttgattgggatttcattctttttatggctgaataatattccattgtgtatataagccacattttctttttttaatttaaattttattttaagttctggga

SEQ ID NO: 812307 - DNA, 683 bp, Homo sapiens
gtagttaccggatccattgcctcatgcatttatcatttctttgtggtgagaacatccaaaggcctctcttctagctgttttgtaatatatgatattttactattacatacattttatgtgcaatagaccaccagaacttattcttcctaattgtaattttgtacccattgaccaacctctccccatccccctctcccctccttagtctctcataaccactgttctactttctgcttctataccaactttctttttcttttcttttttttgagatatggtctcattctgtcacccaggctggagtgcagtggcacgatcacagttcactgcagtctcaaacctcccaggctcaagtgttcctcctgccttagcctcccaagtagcagggactacaggtgcaagccaccacgcctggctaattcttttttttatcctcttagattccacataagatcatgtgatatttttctttgtctgtctggcttatttcacctaacctgatgtccttcaggttcatccatgttgtcacaaataacaggatttcattcttacttawttttttctttcatccataggactctgcttgattgggatttcattctttttatggctgaataatattccattgtgtatataagccacattttctttttttaatttaaattttattttaagttctggga

SEQ ID NO: 812308 - DNA, 683 bp, Homo sapiens
gtagttaccggatccattgcctcatgcatttatcatttctttgtggtgagaacatccaaaggcctctcttctagctgttttgtaatatatgatattttactattacatacattttatgtgcaatagaccaccagaacttattcttcctaattgtaattttgtacccattgaccaacctctccccatccccctctcccctccttagtctctcataaccactgttctactttctgcttctataccaactttctttttcttttcttttttttgagatatggtctcattctgtcacccaggctggagtgcagtggcacgatcacagttcactgcagtctcaaacctcccaggctcaagtgttcctcctgccttagcctcccaagtagcagggactacaggtgcaagccaccacgcctggctaattcttttttttatcctcttagattccacataagatcatgtgatatttttctttgtctgtctggcttatttcacctaacctgatgtccttcaggttcatccatgttgtcacaaataacaggatttcattcttacttatttttttctttcatccataggactctgcttgattgggatttcattctttttatggctgaataatattccattgtgtatatawgccacattttctttttttaatttaaattttattttaagttctggga

SEQ ID NO: 812309 - DNA, 522 bp, Homo sapiens
taatcttagttgggctgctagaaatctgtttcatgtatgcayttttcaaggtttcaccagtgacttgggcagaatttagacatagaattttgggctccccctctctggatttctcttttccagttgtcccctttcactttttagtggctgtggttcttcccaactcagaaagacaatgtgttttctacaggaattttagccactaagcagggcactgacatgctaaaagcacttaaatcagggaattcacagttcggtcttgtcttttaaatatcaactcccctggagaatatgcctgtttttgtttgctctctaataaattcatttaattttgagtaattttctctagagtttatagttgttacctgtgagaaggccagtcctgtaaaagtttagtcaaccttggaagtagaactcacttaatctggtttggacatctgatttttagcaatagatgaagggattctttaatttgtgactttaatgtcaaaaaaagggattcattgtaattcattaaacagt

SEQ ID NO: 812310 - DNA, 642 bp, Homo sapiens
ggcttcccccccatccaccaagttatccttaaaaactctgctcccctcatgcttggggagacygatttgagtaataaaattccagtctccctcacagtctgctgtgtgaattactttttctctattgcaattcccctgtctggcagcaggcaaggtgaaccccttgggtggttttagaactaccaatgggtcacatctactcacagcatttatgttgctaagtccttaacctcagctactcaaagactttacagagaacactgaacacttgacaatactgtggatatgggagccagtggggaaagacgactgccgggagccaggcccacagtaagtattgcccatgtcattcacacccactggaacctccctgcagataaaatggagtatctccatcagagcccataggtagagcaagaaacctcacctggatcatcccaaactctggcatgaaaatgaacacaatagggacacaaacaggaatgtctgacaggtaagagtcaaactgatcaaggttgtatccagcactaccccatgtgatgcggctcagaccccacagaagctggcaaagcttccatgagaggaagtagcatgacattggctaggctccctcaagtcagaggaactcaggaaaatgtcaga

SEQ ID NO: 812311 - DNA, 533 bp, Homo sapiens
tgaaagcatcaagaactagaattttcttgattaaaaggtggaccaaggtcatggtggtcttaagatgaaggaaggacattgatgggaaacagtcatctagaggycccacaagaacaggaacacacaaaggtgagctcagggactggtgttctggctgccccagtgcctgcccagcagacacactgtagcctagaggccctgtcatacacacttccaccatcagaggaagctgaagttcataattctctttaaatcattgtgaccagagaaagtcttatcagtattgcattcgatactcaagctttattgttaataaagcttccaacattcattgtgctcatagaccacacatcctatgatttcagttactcagccttgcccactgacagaatgaccaagggctgttccctttcccttccccgattctaccaaaagcctgtgaagccaccaattctgggagtagacctcacatgcagctcgcatcagtccagatcagccaggacccagataggatcactaaccaatccactcac

SEQ ID NO: 812312 - DNA, 533 bp, Homo sapiens
tgaaagcatcaagaactagaattttcttgattaaaaggtggaccaaggtcatggtggtcttaagatgaaggaaggacattgatgggaaacagtcatctagaggtcccacaagaacaggaacacacaaaggtgagctcagggactggtgttctggctgccccagtgcctgcccagcagacacactgtagcctagaggccctgtcatacacacttccaccatcagaggaagctgaagttcataattctctttaaatcattgtgaccagagaaagtcttatcagtattgcattcgatactcaagctttattgttaataaagcttccaacattcattgtgctcatagaccacacatcctatgatttcagttactcagccttgcccactgacagaatgaccaagggctgttccctttcccttcccmgattctaccaaaagcctgtgaagccaccaattctgggagtagacctcacatgcagctcgcatcagtccagatcagccaggacccagataggatcactaaccaatccactcac

SEQ ID NO: 812313 - DNA, 533 bp, Homo sapiens
tgaaagcatcaagaactagaattttcttgattaaaaggtggaccaaggtcatggtggtcttaagatgaaggaaggacattgatgggaaacagtcatctagaggtcccacaagaacaggaacacacaaaggtgagctcagggactggtgttctggctgccccagtgcctgcccagcagacacactgtagcctagaggccctgtcatacacacttccaccatcagaggaagctgaagttcataattctctttaaatcattgtgaccagagaaagtcttatcagtattgcattcgatactcaagctttattgttaataaagcttccaacattcattgtgctcatagaccacacatcctatgatttcagttactcagccttgcccactgacagaatgaccaagggctgttccctttcccttccccgattctaccaaaagcctgtgaagccaccaattctgggagtagacctcacaygcagctcgcatcagtccagatcagccaggacccagataggatcactaaccaatccactcac

SEQ ID NO: 812314 - DNA, 601 bp, Homo sapiens
cctagtacctttccaccccaggacagtacatagagatggatccagctaattgggaggtagagaaatcaacgttattcacttatgaatsatggggacccatgtgctctcttaagttttggaaatacagacttctcttagcagcccctcccatcctcaggctgcctcctgctgtaggtccattcctgaatcagcctgtccagggcagatgtatgtgaagagcactcaagggggtgttcaatcccactacattagtgagagaccacttaagtctcctgtgtggagatacagataagtaacttgtcactaggaccatcttttccttgtgggagtggttaacctttccacgaagtttccttccagagtcccaagtggcaatgagaaataagggaacccccaaggggttgttcaattccactacagctctctttagtgcatgaaattttctgtgggttgtaggtatattgagtgaaacaggtttgtttcattgaagaattttcttcctagactataccctttaacccttgtacctgctgaaaaactgtagatatcaactcaatgtgttgaaacactttaaatggaaagcaagtatgaccttcagcgc

SEQ ID NO: 812315 - DNA, 570 bp, Homo sapiens
ctgcacaaagagacacttaggtggtttgctatttgattaggatcactgggctcaggggccatgttcttaccctttgttcacttttttccaaacagagccacattccascagcacaggagataagtgcctcagaaggggaacagtatgatcatggcaggcagaggtggggccaaagattcagagtcttatccctaaggagagacattgtgagatacattccacccctccccagagagacctaaggatgattgggccactgtcttgtctacatgaccaagtgacaactaccctttcagtagcttctaacctttcagcagttcagcatcccactctgggccttcagagatcacgtccaaaaaagaccagatgtaggcaaattgacgtcttgatcctaatagactctgagcgtgttaagaaacatgccagtggcacatttagggaacatattgaaatatggttgaaatccaactgaatgtataatttagatatcatccaggaggactgtcatcaaaagagggacaaaagttcagatgagagtccaagacagacttaaatatacatgctattttg

SEQ ID NO: 812316 - DNA, 628 bp, Homo sapiens
tcatcatcattatttctattataacttctattataataacttctctcttggctagggtgaaaaatgcataggggtttgtatatatatatgtatgtgtgtatatatatatatatatatatatatatatatawaactgttttctcattatagctcatttgttgttttcacttgatccttagcacttccataaaagtcagagatccagagtctctatacagcaactccctaagaaatggtgtcagatgtgtgacacctagcacttaggcaaacatgatttattaaacatatcttaaagacaagaaaagcaagtcatagagtatatgtgaatatttaggacatagaattctaacattctaacaagatcagactttgaaaggcaatttggtctaaggtttagaatattttaaagaatgagttttaaacttcagcctacttaacctgtcagaaccaatagcagcagcaacaacactatgaggtttctctttctttcctcccattctcaaggtagtagggatgaggagaaggtacaaggattaagtattaacatgaaaaggacagatctaggcccaaggcctgagaggagagaaggaggggatgtggctttaattaattccttttccaaccaacc

SEQ ID NO: 812317 - DNA, 418 bp, Homo sapiens
tttctgtgatgaggtgccccaaatttcccacatgactctgaggaggcatggaaagccattgagttgagaagcagtaaactttccataggaccctccagcaaggggtgagagccaggtacaggacagagaccagggcagagactggaggtgatgtatctgtggcacttgagaggtcagagagaagactgaattagtaagcatcccaggccctcataaagctgagaggctgggggaaatgagagggtgggggaaagagggagagataccagagagagagaagaggagagagagacctgagttgcccagctgcagccctagcagcaggggacaggtcaatgcccaggaatacaggcwgttgccaacaacagtggaaatagccagcccaaatagcagctctgaatggcccctccacagaaga

SEQ ID NO: 812318 - DNA, 680 bp, Homo sapiens
gcatgagctgtgggagtgtggctacatccacctagatttcaaaggatgcccccggaamcttgaggcccaggcaaagaactgccacagtggtagagcggctccagagggccccactagggcaatgcccagtgaagccatgggagcaggtccaccccaaagaccccggactgataaagccaccagcattcaatttcagcctggaagagctataggcatgagactccaacctgtgagagttgcagcatgggttaatgtcgtgggctggagcccccttcgggccttggagggccaacctcccactccactctgtccagaggtgaggctttgaatcaaagaactttattcaggccaggttcagtggctcatgcctgcaattccagcactttgggaggccaagttgggaggattacttgagcccaggagttagagacagcggtcagctatgaccatgccactgcactccagcctgggcatcagagtaagaccctgactcctaaaaaagaagaagtttattctaaagccttaagatttaatgtttgcctgattgggttttgggtttggtagggacctattacttatttcttctttcctatttctctctttgaagggggagtaactattcaatgcctgaccaccattctattttagaaacacataacatgtttaatttcacaggctca

SEQ ID NO: 812319 - DNA, 571 bp, Homo sapiens
acccaaactgagccacagagagaccaagaaagaaacaaagaagttgttggagaatggcaagggcttgcaatccacaatatgaatgcattggcgaccatagatgcgtcagagggggttgggacaacaggaagtttttagaggcaaaagaagaaatcagccaggcatggtggtttatgccttgtaatcccagctattagggtggctgaggctcaagcccaggagtttgaggctgcagtgagctaagatcaccactgtactgcagcctaggtgacagagcaggaccctgtctctaaaaaaataaaaaaggagaaatccactaaagtgtattgaaacaacaccctgggctacaggggcttattacagatggtggcatttgttcattagtggtaccggctattgctagaagagtgccatcatagaagtggcttagctggaaattccagttgggaaagtcctttgtgacagttcctgttacaggactatgtgtgaatgaccgtacctcctttacaaccttccagctccatttcgttagggtttgacataagtgawtccattttggtactgacaaagc

SEQ ID NO: 812320 - DNA, 540 bp, Homo sapiens
acttgactagtttattaagttctctgaccaaatgtatcacttgcagaatcctattatccatattaaaaaatgctcagctgcwgtagaaattatgtcaatgctccccatgcaatgataaaaattacacttgtcctgtagcttctatatacaccccaagatatggtgctctgcgttgtcttccccatttcccatttctcttctcttcatatgtgctcttctgcccaagcaatagagtatgatgaacccaaacaagcaaaacaagcatatgctatctttctactagaggtaacattatgagggtctgtctttcaacaagaagcactgtggcttctgtgcttttctggcgggataagcccaattctctttctctgtagaaaaacagaaaagagaaaagaaaggtgaatgaatctgcataagcttattagtaagaagggaatggtcatttcaaaccaactcaagccagttcaatacattttaaaagatagcttttagaaatgcaaattttaagttaattctaacctatgacaatctgtatactaa

SEQ ID NO: 812321 - DNA, 623 bp, Homo sapiens
aacagagtagaaggatggttaccagaggctgggaactgcagtggggaggtggggatagttaatgggtacaaaaaaatagaaggaatgaataagacstagtatgtgacagcacaacaaggagactatagtcaatcatagtttaattgtacactttaaaataagtaaaagagtagaagtggattatctgtaacacaaaggataaatgcttgaggtgatgaatacccaattttccatgatgtgattattatgcattgcatgcctgtatctcatgtagtccataaatatatacacctactgtgtacctgcaaaaattaaaataaaaattaaaaaaagagaaataccctatgaggcactgacgctgtgagatcttgtcaaagtggaattctatttctttggtgaaatatcttgtatgacctttcactcgcttcttctgtgcgataatgaaagaaatatttctctatgtgtaatgtgctcacagagttaagtcagcccttatgtaacctcatccattttcctaggaattacttgcttatttttattgaggttaagaaattcacataaaattaaccatattaaggtggacagttcagtggcatttaagtcacagcactgtattatcgtca

SEQ ID NO: 812322 - DNA, 489 bp, Homo sapiens
atatatattatatatatatatatatatatatatatatatatatatatatatatagtatatatatawgagatagggtcttgctctatcgcccagactggagcacagtggcaccatctcggctcactacaacccctgcctcccgggttcaagtgattctcctgcctcagcccctcgagtagctgggattatgggtgcacgccactatacccagctaatttttgtatttttagtagagacagggtttcaccatgttggccaggctggtcttgaactcctgacctcaggtgacccacctgtcttgacctctcaaagtgctgggatttcaggtgtgagccgctgtgccaggcccaattataatctttcaaataaaaactcaatgcaaattaacattaaaagaagataaaggaatacatttactatacttttacttatatattttcttaacatttatgctttacatttttttatttacataaattaacagaaaga

SEQ ID NO: 812323 - DNA, 533 bp, Homo sapiens
aacagaaatcctgatttaaaggccccgtttataatgtagatgaagcttgtttaccaaataaaagagcagaatgctgtggtggattggctgcttcagatctcatcaaatggaagagtcctgtgtttattcctttgcatggcatcatgcaaaggccctgcctctgcgtggagcccatgcgtctttgttttgattcattccttcttctggtcaaccagggagaggaggaagagggagttgttccttgcctagaggaaaatggcagagcagcagcagatccaggtagtggttcaatacccagatcttctagcgtaagaatcatgcgtgttcagggtcacgatcaaatcaatccagaaaatgtatattgtaggagaggaagaaatcacttcatccctacccttcacagttcttgggacagactgcagcaacraaagacagattaacacaaacagaagttgaatagtaggtatatcttgtgttgtatccatgggagatacccagagaaatgagtcagtgtccaagaggtggcttagatt

SEQ ID NO: 812324 - DNA, 625 bp, Homo sapiens
tcctagagaaggaaacatgctttctgcaraaactgttacctgtgactgccttttgctctttttgagatatatttcacaccataaaatgcacccatttgtggttcttggtatatttcagagttgtgtatcactccatcaatcccatacccattagcagtcactgcccccgcagcgtgtggccacctctaactgactttgtctctatggatttgcctgttttgggcatttcatataatgggaatcatacactatgcagcctttggtatagggcttcttgcacttaccataatttttccaaggtccatcctctacatatttgtgcatttttatggctcgatattctcttgtatggctatacgacatttcatgcattcacttgttgatggacatctgggttgtttccacctttgggctactaataatgctgctatgcctgtacaactttttgtatgattatgtgttttcaattctcctgcctatagacttaggagtggaattgtaataactttctgaagagcttccagactgttttcaacagcaaccacacatgaaggttccattttctgcacatccttgccaacacgtattttcctactttttgattctagccatcttaacaggtatg

SEQ ID NO: 812325 - DNA, 543 bp, Homo sapiens
aatggatggaaaaataactagaaggatacacctaaaccgtatcattgctacatgagaatacaraagagcccccatttttaaaatcgcttgtctgtttttcactaagcccgtattactttcataatttaaaagtatgaataaaaatgaggtacaagaatgctgaaatacaaacaggtcctgaaaatttttctgaggcaattagtccaatagatataaaaatatacataaggaaaaactgaaaaaagatgtattctgaatattcagaaaaatgtaggtgggaaaaggaaagtagaagagaaattagaattatatgctggcaggaatttctccacacatgtatcaatcatcaatagaaagaaattggttcaattctgctattaatgattaggattgggttttttaaaaaaattcaactgtatgtttcccataggaacacctataaaacaaagtaacacaggaaggttaaaaataaatgagtggtaagtctacagggattacgctaagaaaaaaaagccacttgaaagctgttttactacatgattc

SEQ ID NO: 812326 - DNA, 750 bp, Homo sapiens
tcccctattagctctgttctctgttaactcgaggagttaataggtattagtaggtagaacaaggctgttgcagacaggaggagctattgaagacgtcgcatcagaatgagcaggccgtgttctgcaacagcaaatctagtttgacttgaccttttttcatggaacagaggagaggaaagagctggcagaagggagtgtgcagggcacagagtgtatagggcctactatagcagtcaggagtggggacttggggggactggggttagagacgggccttgctgacatgaggtagctcttgtggcttggcctcatgggcagagtagaggaagaagagccagaaactaggtgtggcattgctcttgggaagggtaagaaaggcaggtggtatgtggcaggctttgcagggacagagctggttttagttttcagcagttgagattgcaagatagccgtctgtcccaggcagacaggttccagcgccagggcgggtcggcaggttggaggagaagctgacagttgaagatctagcatcactgatggagaggtgtctggcatgactcggtgaggaagctcatgtcattagagaaaagatagcactgggcttccagggcgtggaggagggtttcagggagggaccttacggatgtaagtgttgccaagaggtgaagggaaatgacsgttaagaggaagccattggattttcagtgagggaggagggtcctggatccttaggagactccgcctgttggg

SEQ ID NO: 812327 - DNA, 607 bp, Homo sapiens
agacataaccagctgtggtagagtaacaatccatctatctagcaccatcagtaaatctacatatacttctatatataaatacattactaaaaaatgaaaactcctctcttaaagaataaaaacttttcatttaaaaatattgagatagaaattttaaaacatggagtgtaaacatccctatatttaaactaaatttgttttaacctcttcttggtagctaggaacaagttgatgaacagaaattactcactctaacatacactgaggacctaggctctgatactgtctcagtttctgcttgacatgtagatataaataccatacttggcactcttgtgtctcagtagctgatctgcaagctcccttccagctctgtagttctctcagtttatacaatctattggtctgtctaatgtctaaatgaaagccaacatttatacagcacttagcatgtgacaggcactgttcttagyactttatgtacagtaatatactcaatctccttaaaagccctattaaatggccactaccattatttccattttacagttgaggaaattattggagaagggggttatctgataggtacaaagtgaaagaacagaga

SEQ ID NO: 812328 - DNA, 553 bp, Homo sapiens
agtttaagtaacttaattaacatcagagccagtaagtggtagaattagagttcaaaacccaagttcatctctcttcacagcctgtgctttttactactatacagaatgcccaccagggattgaattagcacattagaagatgagaacttgcattcatcttcatcagcattactggcacatagaaagctttttttggtcactgctatattcctagtgcccatggtggtaacggcttagttgtgatttgcagaagaaagaaagaatagagcatatcaatctatgcgactaaagcagtgtttaaataacccagtaaacttaaaagaaaagactatggacatggcaatacgacgtaagtagagattttggttaattagaaacctgtgtgtcattttggtatttgcctgctgcttccctctccacagcccatctaccaagctgcgttagttcagatgcctaatatctctcctaagtgctctgattcactcaatcaccatacacacctctgtarcataggcgacccccatctcctgccttaattcttgcaactgcctat

SEQ ID NO: 812329 - DNA, 540 bp, Homo sapiens
attagaatgtttgggtttgcycatgtgtctctatcattagactgctgggttcagccagcagtctctcccataagaatgtctgggattgcccaggtttctctattattagactgcctggtgtcagtcaggagtctcttccattagaattgcctgtggttggccaggagtcttacccattagaattaccaaggtagcccagatgtctttataattagacagcctggggtcagctcgaagtctcttctattagaatgcttggggtccatcaggtgtctctattattagactgcctggggtcagccagaagtgtctcccattaaaatacttgcagtcgttcagatttctctgtcattatactgcctgcgattggccgggagtctctttcattagattgcctgtggttacacagatgtctctatcattagactgcctgggctggcttggtgtctttcccattagaatgccagggttcagatggaagtctctcccattagaatgccttaggtcacccaggtttctgtattattagaatgcctgggg

SEQ ID NO: 812330 - DNA, 588 bp, Homo sapiens
acctttaatctttgaggttgctgacctttgaatgggatttttgtttgttttcctttcaactgtttggccatgttgtgtagggctgttgcagttstttgggcatctgccccagtctgtagtcatctaggatttttcagtatctggaggtatcattagtgaaggctgtgaaacaacaaatcagcccacccctttctctgggaggtccatctcaggggaggtgcagacctgttgctggcttgaacacacctgtaggaggtgactggagaccccttttgggaggtctcacctatccagggggaacaggattggggacccacttaaagaagcagtctagccccactttcatagagcagccatgctatgctggggtaccacttctgcccctcatcaggttgtgctctctaaagcctggaggctgaaaaagctaagttgctgaaacagcaaagttgatggcccacccctatctctaggaactctgtcccagaaagttttcaaacttctgttggccagagaacatcagtggaagtggctggaggccctggttgggaagtcccactcagagataaggggcatatcaggatcctacct

SEQ ID NO: 812331 - DNA, 588 bp, Homo sapiens
acctttaatctttgaggttgctgacctttgaatgggatttttgtttgttttcctttcaactgtttggccatgttgtgtagggctgttgcagttctttgggcatctgccccagtctgtagtcatctaggatttttcagtatctggaggtatcattagtgaaggctgtgaaacaacaaatcagcccacccctttctctgggaggtccatctcaggggaggtgcagacctgttgctggcttgaacacacctgtaggaggtgactggagaccccttttgggaggtctcacctatccagggggaacaggattggggacccacttaaagaagcagtctagccccactttcatagagcagccatgctatgctggggtaccacttctgcccctcatcaggttgtgctctctaaagcctggaggctgaaaaagctaagttgctgaaacagcaaagttgatggcccacccctatctctaggaactctgtcccagaaagttttcaaacttctgttggccagagaacatcagtggaagtggctggaggccctggttgggaagtcccactcagagatraggggcatatcaggatcctacct

SEQ ID NO: 812332 - DNA, 594 bp, Homo sapiens
gtcagttgggagtatgttcacagacagaatgtttgtagtttttacagtgggatattcggtttttcactacactcctcaatttgytcagaaatgtccctcatagattctaaaaaaaagtgtttcaaacctgttgaatcaaaaaaatggtgtaactctttgacatgaatctaaacatcagaaagcattttcacaaatagcttctttctagttttcatcatgagatatttggtttttcactatatgcctcatacagtgaaatgtcccttcgtggattctatcaaaagagtgtttcaaacgtggtgaatcaaaacacaggtttcattcaatgagatgaatccacataccataaagcattttcgcaaatagcttgtttctagcttttaacatgggaagtttggtttttctttataggcctcaatgggctcagaaatgtcccctcatagattctacaaaaagtgtgcatttatagtgttgcatggaaacaatagtttgacactgtgagataagtccacacaacacaaagcattttcccagataacttctttctaatttttattgcaggatattctgttcattactataggcctcaaggga

SEQ ID NO: 812333 - DNA, 465 bp, Homo sapiens
ctactcagaccttcttcctctgttttccttctaagcccacttttagtttgtttccacggtactcagaatggtttgctgttttcttcttttctctatttttmtatgctccttcctgcacgatgaagttgatcttttagatttctgtcacactctagcctggcatgacaaattgagaaagagagagagaggagaaaatcttcattgtgataatcttcattgtgataattatcttttacctttgttcactcccacttatttatttattggtccttaatattgttattatttttcgttattgttcaatatttaccatcggattttttgtctatttattttgagaccaatttcggctgcaagtgttggacttagccatcagcttgccacgtctaaggttgaccagatgcctcttgctggtgacagtaccattcaggtccagcagagggatgcattcccgattcactgaga

SEQ ID NO: 812334 - DNA, 576 bp, Homo sapiens
actgagactatctcaaaaaaataatataggtatttccaatatgccaagtttatgcagtgtctaatttcttcttaccccttttcctggtacctcattttcttctgtgcttcatacttttaatgaattaatttttgcaacaggatctggtttattctgccttggcagggtggtcctgagagtggcaggtgccaccctcttctgggcaaagggaggtccagaaggccagttagggccaatggtgggagaacctgggggtggagtggggttggggatttgggctacagcccctggaatgtggtgaaaccaggatgaggcccagaggcagctgtggtaggccagggcagggcggaaggcactggactggaaccaggcaaggtctacagggccaagatcccaggccacacgggcaccctgggaggcggagcacagtgtcccatgacacagagcatgaaacacaggcccagggctcacagtaagcacatgracaagtggacacagattcacaggccagttgacatccagccatggtgggaccagaggtagacacggtgtcacatacagaccacagggaagaca

SEQ ID NO: 812335 - DNA, 602 bp, Homo sapiens
gaaaattcataatttatattcagrttcactctttgtgttggacattttatgggttttgacaactgtattatgacttgtatccatcattacagtatcatacagagtggtttcactgccctaaaaatcccctgagctccactccctcttcccctgaacctctggcaaccctggtctttttcctgtctcccttgtttagcctttcccagaatgtcctgtatttggattcgtatgacatgtagtcttttaacattggcttctttcacttagaaatatgcatttaaattttctccatgtcttttcatggttagatagctcatttctttttattgctgaataatattccattatatggatgtaccacaatcgagctattcacctcttaaaagacatcttggttgcttccaagtttgggcaattatgtgattcataataacattcaataaacattctgctataaacattcatgcgcatttttttttaaattttttactttttaagagacagggtcttgctttattgcccaggctggagtgcagcagcacaatcatagctcacttcagcctcgacctcccaggctaaagcaatcatcctgcctcagcatc

SEQ ID NO: 812336 - DNA, 492 bp, Homo sapiens
agcctcccaagtggttgggactacaggtgtgtgccaccacgcccagctaatttttgtattttttatagaaacagggtttcactgtgttggccaggctggtcttgaactcctgtcctcaggacatccamctgcctcagcttcctaaagtgctgggattataggcattaaccaccacacctggcccctaacaagttttaattcactttatccatgaccattaacgtttgagccaaggttgtatttcaaggtttatttaacatctattcttatgaatgcaaaatacaacaaaaaaagttttagaattaaaagcataaagctggggctgggtgctgtggctcatgcctgtaatcccaacactttgggaggcccaggtgggcagatcccttgaactcaggagtttgagaccagcctgggcaacatagcaagaccccatctcagtttttttataaaaagcataaaactggataattaatttctagggcctgactatac

SEQ ID NO: 812337 - DNA, 602 bp, Homo sapiens
actcgtgtctctctggacctgcatatctcacacagctcagacttctgtcagctgtttttcttttctcagaagaaatgacgtacagatttattaatgtgcacaaggagaaccacagagtgattactcccaccctttcatggggttcagaagcttgtgtaccatcttgaggttacagaaggaatgccaccttggattgtggcaaaacacgttctgggatagggagaacatgttatgcagatgaaaccttacaggtagcagccctcagaaagaatagaaggtagatgtttctttcagacttttaaggtgtcagactttctaatcttgcccagatccagataggggagggcttcagaaacagcctggtggcatcaatgcagattcttgctgcagatgcaaatctttctcataaggagatggcttttaagctctttgtgtatttccgcccttctgaatagccatcttgaaatatgccaaagagggccaggtgcggtgcttacgcctgtaatcccagtactttgggaggccgaggcaggyggatcacctgaggtcaggagttcgagaccagcctggccaacctggtgaaaccccctctctactaaaaa

SEQ ID NO: 812338 - DNA, 588 bp, Homo sapiens
ggaaataagacagatgcttgcattaagcaaagacctcaattccgacccctgcaattcagcagctacttaacatggaacacatgcagattagggcaggggtgcagcaatgagtaacacatggtttctgctcgcacttagggatccagagcgctgagcagcagctatgattagaacaaaaggtcagggaacccagaggaatcattcttgacaggaggagtatcggagaagccaattttttatttatttatttttgagacggagtcttgctctgttgctcaggctggagtgcagtggcatgatctcagctcactgcaacttccgcctcctgggttcaagtgattctcctgcctcagcctcctgcgtagctgggaatatagctaaacgccaccacagcgggctcattatcttttgtatttttagtagagatggggtttcaccatgttggccaggctggtctcgaactcctgacctcaggtgatccacccaccttggcctcccaaagtgcggggattacatgcgtgagccaccgcgccggccagagaagccaatctgagtagaaaccsgaacaagcaaggttcgaattccctc

SEQ ID NO: 812339 - DNA, 478 bp, Homo sapiens
tacagggtagtgccagataagctaacccgagctgtctcaaaagaaactatacacaactcggctgggtgcggtggcttacgcctgtaatcctaacactttgggaggccgaggtgggtggatcacgaggtcaggagatcgagaccatcctggctaacacggtgaaaccctgtctctagtaaaaatacaaaaaattagccgggcatggtggcgggcgcatgtggtcccagctactcgggaggctgaggcaggagaatggcatgaacccgggaggcagagcttacagtgagctgagattgtgccactgcactccagcctgggtgacagagcgagactgcgtctcaaaaaaaaaaraaaaaagaaactatacacggctcacacaacataaaaaaccctggctccctggaagacaggaaacacagttagatgatggggttggtgggtgggcagggggttggaaatggatgttactaacaacagt

SEQ ID NO: 812340 - DNA, 534 bp, Homo sapiens
cagtctcaaaaaaaaaaaaaagatttaacattttaagtagaataaaaatggcagagtatatgaaagaattctgagaaaccatgaagaaatgctaatgaggycaactatatgaaacatgcttagaaggcagtccaatagaatgagaccaaaagaaacctctgtgacagccaagatgacagataatggataacttgaagaaaaataaataagaaatgagaagactgtacgttagaagactaattaaacagaattttagagataataagtaaccacagaagggcaatctaattggaagaacgtaacaggaaacgtgagcttgcaatacaagataatggaaaagagatcatcacaataaaccaatacacggtggaacaggtgtatttaacccattgtctcggacacacatttcatgactggagttgcttagacacaagagaaaaaactacctgaccccctgtgagaggacagctcagccatgacgctcatataaatgaaggctgagactgcacttctgcctggaagaataattttaaa

SEQ ID NO: 812341 - DNA, 534 bp, Homo sapiens
cagtctcaaaaaaaaaaaaaagatttaacattttaagtagaataaaaatggcagagtatatgaaagaattctgagaaaccatgaagaaatgctaatgaggcyaactatatgaaacatgcttagaaggcagtccaatagaatgagaccaaaagaaacctctgtgacagccaagatgacagataatggataacttgaagaaaaataaataagaaatgagaagactgtacgttagaagactaattaaacagaattttagagataataagtaaccacagaagggcaatctaattggaagaacgtaacaggaaacgtgagcttgcaatacaagataatggaaaagagatcatcacaataaaccaatacacggtggaacaggtgtatttaacccattgtctcggacacacatttcatgactggagttgcttagacacaagagaaaaaactacctgaccccctgtgagaggacagctcagccatgacgctcatataaatgaaggctgagactgcacttctgcctggaagaataattttaaa

SEQ ID NO: 812342 - DNA, 550 bp, Homo sapiens
acttccagctgcactcatgcaagaatttgtgatgtatactaaaaaataaaaaaaggctcattcaggagagccttgtactcagcaagagtggctaacattagagcatacagactatgtgattgtataaggcatggagagttaaacaacctccagtcagctgcctgtttgaataccactgacttgttaagaatgatcttgcttttagattttaccatattcaaacttattaggtgagccttatatagcatatatacctggctgctattgtggggtttgggaacatgaggggtggggtgaactgttgttgttttaggtttcagtcagacagacatccctgtgcctcagttcccagaagcacagcaggcctctaggagcatccgtgggaacggcgcagtcctgacatcaccaactctcctgctcaggctcatcccatatacagaggtcaaagggtggggtttgagatygggggaaggaatgagaaagtagaagcaatgtcacttcagtgccactgttgactagtctttggtgcttatgtcagtatttgttttat

SEQ ID NO: 812343 - DNA, 617 bp, Homo sapiens
actttaggttgtttccagtccttggctaagaatagtgctgcaaatgaacacggaagggcagacatccaagatctcgatttcaagttttgtgtgtgtatttgtttgtttgtttgtttgttttttgataaatacccagaagtagtattgctgaatcatatcgtagttgtatttttggagaaacttccatgctgttttccatagcagctgcaccattttacagcaggttttcttaagggaggtctgggtggcatacctctatggctgtcaaagctcacaatgtacaaatagttctcaagaagagaataaatgaaggtaaaatccactgacacccctcccgttctggtgaccttactccctacagaaatcattgttaatatttacttgcatatacttccaaaatttgtatatccatttataaacatttcttaacccagtgggatcatgatataagcagtattccctaacttaacattacatcttgactgtcttgccatacaagcaggtatactgctgtctcaattttttaaacagcaacataaaattttattatttgtttctacrataatttatttccttggcttagttaaatgaaataactcagtattcttccaataaat

SEQ ID NO: 812344 - DNA, 565 bp, Homo sapiens
tggcaaagactgaaatgctgtggcattttccagaccccctaactgttaatttccaaatgtgatttaggttcaatgcatctggtgatcttgtgygagactttggtttgtaactaagttacttaaatagagaagcagggtgggaggcatccattttcctggtacaacttaggtaagaggcagcatggtcctggagtcagcaactgtagtggcagcgtcctaattctttagtttcctggttaggcagaggagtagctcttttggtggtcgaggtctgcagtgtagctttggcagttgttcctggaagaccagccaggattcaatttgggcgcattttctattctgcttaataaactccttagctagaacagattctgttgtctgcaaccaaaagtctccatcaatactgtacacatggattcctttcctatggaactagctagtatcttcatgaagaaattgaagctcaaagaagttaaaagacttgtcaaagtcactgagttttgtacatggtaaagcaggaactcaaacttagttctgttcaacttcaaagcctgaccattaacca

SEQ ID NO: 812345 - DNA, 553 bp, Homo sapiens
gagctcacccgctgtcctcccacagtcttgagcctggtgaagtggagagacggggagaggaatgcccagagacagaaaaagtgtaggttttagacttkaaaagatattgatttaattgtgtttcccttaaaattaaggtagaaatttgatcaagaattaaggagcaaaaattctatttttaagtccatgaaatttagtttatgaaatctacttttagagccaaggcagagagtgtagattatgtagtccaccccactacccctttattattggatgtggaaacagaagctcagatcagcctaggagctgttttccatgtaagaaagagggtttatatgcctcaggcaaggagttcgcaatctttagacagtcatatatgatgggaagagcatacaatacgagaactattttcactgcggtcatggaattttattgacttttaaaatttcatacatccttaaagctgaacatgagatttgtgtgctttttcaaagtgagagtatacacctgacccaagcttcttcaaaagtatcatggtcagaaaagataggga

SEQ ID NO: 812346 - DNA, 553 bp, Homo sapiens
gagctcacccgctgtcctcccacagtcttgagcctggtgaagtggagagacggggagaggaatgcccagagacagaaaaagtgtaggttttagacttgaaaagatattgatttaatwgtgtttcccttaaaattaaggtagaaatttgatcaagaattaaggagcaaaaattctatttttaagtccatgaaatttagtttatgaaatctacttttagagccaaggcagagagtgtagattatgtagtccaccccactacccctttattattggatgtggaaacagaagctcagatcagcctaggagctgttttccatgtaagaaagagggtttatatgcctcaggcaaggagttcgcaatctttagacagtcatatatgatgggaagagcatacaatacgagaactattttcactgcggtcatggaattttattgacttttaaaatttcatacatccttaaagctgaacatgagatttgtgtgctttttcaaagtgagagtatacacctgacccaagcttcttcaaaagtatcatggtcagaaaagataggga

SEQ ID NO: 812347 - DNA, 553 bp, Homo sapiens
gagctcacccgctgtcctcccacagtcttgagcctggtgaagtggagagacggggagaggaatgcccagagacagaaaaagtgtaggttttagacttgaaaagatattgatttaattgtgtttcccttaaaattaaggtagaaatttgatcaagaattaaggagcaaaaattctatttttaagtccatgaaatttagtttatgaaatctacttttagagccaaggcagagagtgtagattatgtagtccaccccactacccctttattattggatgtggaaacagaagctcagatcagcctaggagctgttttccatgtaagaaagagggtttatatgcctcaggcaaggagttcgcaatctttagacagtcatatatgatgggaagagcatacaatacgagaactattttcactgcggtcatggaattttattgacttttaaaatttcayacatccttaaagctgaacatgagatttgtgtgctttttcaaagtgagagtatacacctgacccaagcttcttcaaaagtatcatggtcagaaaagataggga

SEQ ID NO: 812348 - DNA, 518 bp, Homo sapiens
accaggcccagagtaagggatccaagcgrcagaaagaggaaggaactgatcttttaactcgagcctggaaactggcacagcgtcatcctgctgtcttctgtcacataatcaacagagctccccctccccagattcgaggagagggaacaagacccctcttctcagcggacatgatattttgtggccttctttgttaactttttaaaaatttgttgactttcattttaggtttgggggtacatgtgcaggtttgttaatgggtaaattgtgtgtggctggggtttggtgtacaaatgatcccaacaccaagggagtgagcatagtacctgatagtttttcagccttcaccctattccgccttccccactctagtagtcctcagcgtctattgttctcatctttgtgtcagtgtttagctcccacttataagtgagaacatggagtatttggttttctgttcctgcattaatttgcttaggataatggcctccagctgcatccatattgctgcaaaggac

SEQ ID NO: 812349 - DNA, 518 bp, Homo sapiens
accaggcccagagtaagggatccaagcgacagaaagaggaaggaactgatcttttaactcgagcctggaaactggcacagcgtcatcctgctgtcttctgtcacataatcaacagagctccccctccccagattcgaggagagggaacaagacccctcttctcagcggacatgatattttgtggccttctttgttaactttttaaaaatttgttgactttcattttaggtttgggggtacatgtgcaggtttgttaatgggtaaattgtgtgtggctggggtttggtgtacaaatgatcccaacaccaagggagtgagcatagtacctgatagtttttcagccttcaccctattccgccttccccactctagtagtcctcagcgtctattgttctcatctttgtgtcagtgtttagctccsacttataagtgagaacatggagtatttggttttctgttcctgcattaatttgcttaggataatggcctccagctgcatccatattgctgcaaaggac

SEQ ID NO: 812350 - DNA, 518 bp, Homo sapiens
accaggcccagagtaagggatccaagcgacagaaagaggaaggaactgatcttttaactcgagcctggaaactggcacagcgtcatcctgctgtcttctgtcacataatcaacagagctccccctccccagattcgaggagagggaacaagacccctcttctcagcggacatgatattttgtggccttctttgttaactttttaaaaatttgttgactttcattttaggtttgggggtacatgtgcaggtttgttaatgggtaaattgtgtgtggctggggtttggtgtacaaatgatcccaacaccaagggagtgagcatagtacctgatagtttttcagccttcaccctattccgccttccccactctagtagtcctcagcgtctattgttctcatctttgtgtcagtgtttagctcccacttataagtgagaacatgsagtatttggttttctgttcctgcattaatttgcttaggataatggcctccagctgcatccatattgctgcaaaggac

SEQ ID NO: 812351 - DNA, 613 bp, Homo sapiens
gagaccctgggcccaagcacatctgctttagggtcctgggagcaccatggggcactggttgtgggcaggactggtcaycttgcctcagcgccagaaccagatggcatggtagtgagaaagctccaccaaatgaccttgtgggcaatgtcctggccaggaggaggggtggctggggcaggaagtgatgcacaggtgggacagaaactgcagtggatcagcaggcctgagaggacaccccatgtgactcctagaagtagcaggttgaaccacagggttgctgatagccagtggtcaagatgatggggcttgggtctttaccatgtggttataaggaaggagggcatcattttgaggccataggctggtgaaagtgctattgatttaatccaaaatgctttggcatagaaaatccagaaaagacaagcaaaatgtttctttcttcaaatgatttacaatgactccactttgttatcttgcctaatatagacttggccagaacttctgtttagctagctagtgccgcagaacaaatcacctcacaatttagtgccttacagtttcgtaatctctcaggatttctgtagataaggagtttgggaaaggcttgttgggg

SEQ ID NO: 812352 - DNA, 542 bp, Homo sapiens
atcgcgccactgtgccccagcctgggcgacagagtgagactccgtctcaaataaaaagaaaaaaaaaaaaaaaagaawcagagacctggcttggtggctcatgcctgtaatcccagctacttgggagactgaggcaggagaatggcttgaacctgggaggcagaggttgcagtgagctgagatcgcgccactgcactacagcctgggcaacaagagggaagctccattcccgccccccgtccccccaaaaaagagagagagagatcctcctgcctcggcctcccaaagtgctgggattacaggcattagccactgtgcccggctgagaatggatttttaaatacctaaataaaggtaattatttgttaggaagcaagagagactggaaaggctctgggatctgcttgagatttcctctggggtcagggcaaggcaagtcaacagaacaggttaaagggacagttatcgacagagaataatatgctcctgttctaacccttccaagttcaccttatccaaaagcaattaggctctgatgagta

SEQ ID NO: 812353 - DNA, 502 bp, Homo sapiens
aaaatatcaggcagaagataaaaggaaaggaaattgcctcagggcgagagtataatgaggtctaaaaagtagtagggggctcttggagggacagccatgtcctsctggccattcctttaggaactagttggtcaggatagccacgctgccctaggctttacaaaactccggaaatacactcttggaaccagaggtgataattcactgaatgaggattaccccaaccagccacagcgggaaatccttggagaaggtgtgcgctgattggatcagaggcacaaaggaaaagaatcccagcatgaaggaccagttggaatgccaagactccataaatcactgcaagaaaaacgccttatggtgagggttctgggatttgggatcatttccagatgagaatccacagatgactcactgcctcacacagtccttctgaggttgttaaacagattgtttccatcagtattgagtcaggaattgaggctgctccccactgcacttactt

SEQ ID NO: 812354 - DNA, 554 bp, Homo sapiens
atctgtgctctgagctgagctcagagccagaaggaccactgagagcaggaccagcagcatcttgaaggaggctctggagttgctcccaactctgcgttgagagaaacatggcagctccctttataaacatgagcagaacaatggcacctttgagctccatactgggtggacctcaccacctgaaagattaggttttgctttcctctcataaagttgaatgcgtctcttattactttttgggattttagcccagcaggatgtggtggtaggatgtggttaggtacaaactgtgacttgagcatagtttctgaagaaacagtatccaagcaatcagcacaaatactacaattgaagtttggtcatcatttgattttcaattgggttagacagttagtctttccccttcattggttgtctgtgtgcacacgtgcttacgtttgtatatgtttgtcagcagtgatcttatagccagaagtgaaaatgattaatatctctagctattagtgtagcataaattccatttttatagcrtatatacctatatggatgatatg

SEQ ID NO: 812355 - DNA, 633 bp, Homo sapiens
acactttcagtcatacatactatactcagaaatgttatccttcataaataaagaggaaataaaatctttcacagataagcaaaagctttagactaaccttacaacaagtgctcaagggagttctacatctrgaagcaaacagatgataatcactattttgaaaatacataaatactcactgttagagaagacacacaaagaataaagagaatcaagccttattatttcagaaaactaaaagaaatgataaacaataagagaggaagaaaggaagaaagggacatataaaacaaccaggaaacaatgagcaatatagaaaaaccaaaacctcacatgtgaataataaccctgaggtaaacaaattaaattccccatttaaaagatatataagtcatataaaagggaacctccattagattaacaacgaatttgtcagaagaaaccttacaggccaggagagaatgagatgacatattcaaagtattgaaacaaaaaaaatcttatcagccaagaatactatttccagcaaagctattcttcaaaaatgaagtagaaataatggcgttcctaaacaagaaaaactggaaattcatcactactacactggtcctacaagaaatcctgaaggaaatt

SEQ ID NO: 812356 - DNA, 607 bp, Homo sapiens
ccatttcatcccttcttgaaataacatatctacttgtgaactgctgatttcttcagccattatccayatgaacttttcagaaagcatcagtggttttaccttctttcatgcaagcttaaccataaattttctctttgttttcactttaattttagaaaaatgtattttgctcttataggggatgttttgaaactcctgtcttatttttcattattccttgaaatagctcctattcagacatcttacagcatatcagtttaggttcattttgatgccaaaaaatgtggaatccttttatggtatttcttaatataacatacattttcatgaactttttaaagacctactacattacaggaaggcctttcaataatataagaattgctacaggtaacattgaattttctagttgattaggcagattaactttctgtttttctgctgacataaatagtgatgtgggttgagaaggaatataataccagtggtcaaatattctgcagctatgtggaaagtcaaacagttgcaactaagtgtcacatgctttaagggagtcatagagtagctgcttgggcctagcaggtaccctgatgttaacaggatgatt

SEQ ID NO: 812357 - DNA, 607 bp, Homo sapiens
ccatttcatcccttcttgaaataacatatctacttgtgaactgctgatttcttcagccattatccatatgaacttttcagaaagcatcagtggtttyaccttctttcatgcaagcttaaccataaattttctctttgttttcactttaattttagaaaaatgtattttgctcttataggggatgttttgaaactcctgtcttatttttcattattccttgaaatagctcctattcagacatcttacagcatatcagtttaggttcattttgatgccaaaaaatgtggaatccttttatggtatttcttaatataacatacattttcatgaactttttaaagacctactacattacaggaaggcctttcaataatataagaattgctacaggtaacattgaattttctagttgattaggcagattaactttctgtttttctgctgacataaatagtgatgtgggttgagaaggaatataataccagtggtcaaatattctgcagctatgtggaaagtcaaacagttgcaactaagtgtcacatgctttaagggagtcatagagtagctgcttgggcctagcaggtaccctgatgttaacaggatgatt

SEQ ID NO: 812358 - DNA, 628 bp, Homo sapiens
aacaagagaagggagaatgccttttgttgatttctttcatccttgtagtcaggatactctttaggggtctctatggaacaaaargctttcttcttctaaggaaacacttcacaaatcttaacatcttcagaaaagcttccctcaacttgctatttcccataattagaatgaatgaatggcttgatgggaaaatgacagttactatgtcaccaatcatcaacactaattttccctgaggaatcagagcgctagaggtcataacaagaaagactgggtagtacacgatgaggaggagcagaaagatgatcactgcctttatggccctcatgtgggcctctgtactggggtctctgaaccctgtagcatgcagtcgaatctgcttggtgtgtctaactagggagaaaagtaacaagaaaaatgagatcaggcaaaggataaagggaaccatcacccccaggttcagggttaactgtttgaaagtacctggaattttactcactttgaatttccaagtaatgttttcttcatgactgactttgaaaaggtgataccacatatcatcattctttggaacactaataattaaagagataagaaaggaccccagaagaatcgcaagcatgacctt

SEQ ID NO: 812359 - DNA, 628 bp, Homo sapiens
aacaagagaagggagaatgccttttgttgatttctttcatccttgtagtcaggatactctttaggggtctctatggaacaaaaggctttcttcttctaargaaacacttcacaaatcttaacatcttcagaaaagcttccctcaacttgctatttcccataattagaatgaatgaatggcttgatgggaaaatgacagttactatgtcaccaatcatcaacactaattttccctgaggaatcagagcgctagaggtcataacaagaaagactgggtagtacacgatgaggaggagcagaaagatgatcactgcctttatggccctcatgtgggcctctgtactggggtctctgaaccctgtagcatgcagtcgaatctgcttggtgtgtctaactagggagaaaagtaacaagaaaaatgagatcaggcaaaggataaagggaaccatcacccccaggttcagggttaactgtttgaaagtacctggaattttactcactttgaatttccaagtaatgttttcttcatgactgactttgaaaaggtgataccacatatcatcattctttggaacactaataattaaagagataagaaaggaccccagaagaatcgcaagcatgacctt

SEQ ID NO: 812360 - DNA, 473 bp, Homo sapiens
ctattattttggagttttctattaaaatgtgctgtttcccatttttgccttctaaaggtgagaaaattagtcccatggttctatatgagtgtcatagagaaaagattgcattcttccatggctcctcctgggaagtgagtcacatcagtttcctgggaagaactgggctcttccattccctcccagtttgaagcaggaacgaggaggccacagctaaggatacagatgttgtggtccagctgagctagaccagcctccccagatgcatccctccctttcagctctcatctcccatggagcacaggaaggaaactgtgttgggggcaaggggtgcagaggggagcckgattaattccacttatggttggatctccaggggtggaggagacagaaagtctagcagagctttcagcagacagacagtggacctccagctggcccctcgggccttggactcttctatgagtcaaaga

SEQ ID NO: 812361 - DNA, 548 bp, Homo sapiens
cccccatgccatttctcaacgccaccccaactcaggtgcccagaaaagccagctcagagagggccttcctgaaatgccatctcttctgtctttgcctrtggaccacagagccctttgaaaacttggggactgaatcacccagcttctctcattgctctggcctccagcgggaagctcctgacttctgctttcaaattccccagagaggcagctccaatatgaacatcctctccctgtccctcaagcatcctgagaagactggaatcagcccaacagcaaaccatggcatctcagatctgcaggaaggagaggctgcgtggtccctccctcccacagaggcctgaacactgctgaggaagctgctgctgggccaaaagcacccatccctgacagatctgggagaactcactggccaaacccacctactcccgaatgtaacccaaattttgccttcccctcctccttcagcttgagaagtggaggggatgttgtgaaatacagcaatgaaaattagtaaaccacagctcaactcatcaacgtggacaaat

SEQ ID NO: 812362 - DNA, 725 bp, Homo sapiens
gcatgaggagctggatgttgagatacagccgtgaactagacagcgctgtttacatccgcatggggcttacagtctagtgagggctaccgagagtaaagaacccagcaatagaaggcttttgatatcagaaccgagcttaaaattcaagacataggccgggtgcggtggctcatgcctgtaatctctgcattatggaaggctgaggcgggaggatcatttgaacctaggagttcaagaccagcctgggcaacataggtagacccaatctctataaaaattacaaaatttagctgggcatggtggcgtgtgcctgtggtcccagttactcaggaggctgaggtgggaggatggagtgagctcgggaggttgaggctgcagcgagccgagatcgtgtcactgcactccagcctgggtgatggggcaacagatcacaggcaaccctgtgacacagatctcacctgcaggttcagtgctgactggcttcacactgtcccccggctgcacttgctctaccttagacaccctttcatactttctccctctgactcccacccgtccccctatcctcactctcagccagcactgttgcttcatccttmccttgacagcagtggcgcacagactcccacaggcttgctcttggcccgcgggcggggctgtgcccacactctgcttccaacctttttccacaggtgactgtctgtgccccatcgaaggccaccctt

SEQ ID NO: 812363 - DNA, 610 bp, Homo sapiens
ggatgggcagcctttgcctctgccctgggacccatctttgctgaggctgccaagaggacgggggcctttccttgctacccacccsaccccggagacctaccggcattcgcagcgaacgtgctgagagaacgtcagctccacgtaggagggccggtccccagaacggatctttaggagctgaaggaagaaagagttgatgcctggattggggagtggcccacgagtttccggcactcttctctctctccttgtaaggagaacccgactctgtttcctgctagcctgtggactacaggccctcactccactctgaacgtggggcaaacagctctctcagctgcatggggatctgagggaggcccctgtccctccctgcccgggagcactagcacagcaatagcacaggaagggggctcatgttctggagtcagagagacccgtgttcagatcttgactcttttacctgctgaacaagtgaaataacatctctgaaccttgagttccccatccgtgaaatgggaatgacaccagccttgaaggattgaatgacacaccacttgtggcacgcctaggacagtgcttggcattactcagtaagtgctcagtaaac

SEQ ID NO: 812364 - DNA, 368 bp, Homo sapiens
ttcctctcgtaataactgctctcaagataatctagtatctttatggataacagcatcaactgtcttagaacccagtactgatctggtaattcatagaaacgtgttttgattgttatttccatgaacaacccgcatctctgcttccattctcctcttgaggctcagccaacaggggaagagctcaatgcttgttcaatctcaaatttaaaagcggaaaaatctttggaacaaagagccatcattttcttcaggagttcatgtataatcttcagtcctccagagttcctttgttgccagatccctggggaaagataggagtcctatttctttggatyacttttaattctttgtgtgctcttaaaagtgat

SEQ ID NO: 812365 - DNA, 368 bp, Homo sapiens
ttcctctcgtaataactgctctcaagataatctagtatctttatggataacagcatcaactgtcttagaacccagtactgatctggtaattcatagaaacgtgttttgattgttatttccatgaacaacccgcatctctgcttccattctcctcttgaggctcagccaacaggggaagagctcaatgcttgttcaatctcaaatttaaaagcggaaaaatctttggaacaaagagccatcattttcttcaggagttcatgtataatcttcagtcctccagagttcctttgttgccagatccctggggaaagataggagtcctatttctttggattacttktaattctttgtgtgctcttaaaagtgat

SEQ ID NO: 812366 - DNA, 618 bp, Homo sapiens
aaaatgtgccaattatatttagacatttagaackggaaagaactttcaagattaacctagtttaagatcctcattttataagtaagaaaaaatgaacacactctaggtcatcagtagaacatgcacagctagtcatgtttttattttattttttactgtattatgtgccactcttcaaaatgtacaatacatgggccaggcgcagtggctcatgcctgtaatcccagcactttgggaggctgaggtgggtggatcatctgaggtcaggagttcaagaccagcctggccaacatggtgaaaccctgtctctattaaaaatacaaaattagctggacatggtggtgcatgcctgtaatcccagctactcgggaggctgaggcaggagaatcgcttgaacccaggaggcggaggttgcagtgagtcgagatcgagccattccactccagcctgggggacaagagcgaaactccgtctcaaaaaaaaaaaaaaaaaagtacaatacaccaatacacgaaacttgcagggtctattctacctattctaagaaagggcacagaagttcattttgctctcacaaaagacacactccaaacatccaaactcatggaaataagtata

SEQ ID NO: 812367 - DNA, 571 bp, Homo sapiens
ctgtctaaacaccttctttttttttttttttgaaatggagcctcgctgtgtcacccaggctggagtgaagaggtgcgatctcrgctcactgcaacctccgcctcctggattcaagcatcagcctccctagaagctgggattatgggtgccggccatcacacctggctattatttgtacttttagtagagatggggtttcgccatgttggccaggctggtctcgaacacctgacctcaagtgacgcacctgccttggcctcccaaagtgctgggattacaggcacgggccatcgtgcccggccttgcttaaataccttctacccctaaactctattaggtgtggcaaacgggggtgggcactggtgagtgtgtttatggaactgctgcctgaagaaaagctcaggtgggtctgggctcggctcctgttcaactctgtgggaatccttcaccttcatgtccccagcaggagccagcaggagggtgcatgtggatggaagacaacggatgcacctaaagccctccttctcaaccagccctgcaaataaatcggtcctattcttcacctaaatgt

SEQ ID NO: 812368 - DNA, 471 bp, Homo sapiens
ttcaacacaatttttttttcctctggttgagttgtctccattttttatttttaaattaaagaaayatcattatggaacactaatgatcttaaatatcagggcttatctccaagctctcctttgtatgtattctgttacattctttgaagaatacaaggatttagaagaaaatgacttttaaaaaacctatctgactcactcaaacaaaattgctcactttcctgatctattgttgcttttctggtctttggaaagagatgatgtcttctacccggccttggatttttttcttttttgtccttcctttttttttggtgggggcaatttttggaagtaaatgtcacaatcgatcagtcaatctgagtaggcatggtctagtctgtcctaagtattttatatgagtaccatttgacaaagtcagaattctataatgattcttaacatttttttttttttttttgagatagtctc

SEQ ID NO: 812369 - DNA, 536 bp, Homo sapiens
tgatccctctagcagagcaaactctctctggactcctgaaatacttgttattttctcctatcttgaaaaagtgttatttaggttcacattatctcccaacctaaaatataagtcctttaaaaaccaaggttcacgtttgttacatttttacatactcatggcccagggtcacactcacaattggtacaaatacccattatgaaagtagaacgtggtaacagaagacagtgaaataaagtgctgagggagcccagtggaggaagagtttatttcagttgccttcacatttgaagtaaacctttaaggatattagaactgtgttgggcagaaaagatggaaatcggcaatctaggccaagggagcgacatgaataaaggtggagagagaaatgcacaactgaagaacaatttgtatgactaaaatttcggtggcaggttgttaggactgaaaaggcagattatggagggccctgaaggagctcctaaatgcatttggactcamttttgaggccatgggaagctactgaggcttttgag

SEQ ID NO: 812370 - DNA, 583 bp, Homo sapiens
ccctgttatcccaggatccagtgtagggcttgatggagttgatgaggtcctgtacatcccacaggagaagaatgaccaagggctagaattccagtagctgtacccagcctagcatttgccactcatccaccaygcatgtgatgtgtttgattcttgctcccagtagctcacatttatgacgcatgcttcctatgctaggttatactctggtgtgttgtttattcatagccagtatttccacttgatgagatcctatgggattttgcaacttatgtaacaaactcttagggagcatttgctgtgagctgaatacttttttaggtgtttatctagtcctcataatggtcctatgaagtaagtataatcattatccacattttatggaaagctgaagcacagagagatgaagtaaacctgccaggaagtgaggaggtgggattcaaacccaggctccctggctcctgagcctgtgccatcgccctcagctaagctgcctctcctgggttttctcatttccaaccattctctcttttttggatgttgtatgcctgccttgatcatcataaagtagtctccaaacttt

SEQ ID NO: 812371 - DNA, 601 bp, Homo sapiens
atattatttaccttgattattgagttttttggtgcccctttaagttttgcacctgaggctggtgcctcacccaactmacattagcccctgccctgattatttctaacatgcaatccacaccatatcattagttcctcagcaaatactctactattatcactacttcacagttgcaaaaactgaggcacaactgtgcccaatgtcccaaaggaaggagaagaaaaatctgaacttgaaccccagtttcttcgttttttggttcagagcctgcccagtatagcactacaataagctgaattttataaattgggttttgagttaaggaatcaaaagcttcaggcttaagtcccacctctgccccagagtcttctgagccctccattttcacagacgtcagttgccctaggtggaactggactttaatattctccacatcccttattttttcccaaaacagtttaccagctttttctttcctgaaccaggagcaatagcaaaaattgggaatgggaagaaacaggtaccagccaggacacctgaacgaacttggagctcaggaacccaggaggggattggagagagtggggagactccatggtcc

SEQ ID NO: 812372 - DNA, 601 bp, Homo sapiens
atattatttaccttgattattgagttttttggtgcccctttaagttttgcacctgaggctggtgcctcacccaactcacattagcccctgccctgattatttctaacatgcaatccacaccatatcattagttcctcagcaaatactctactattatcactacttcacagttgcaaaaactgaggcacaactgtgcccaatgtcccaaaggaaggagaagaaaaatctgaacttgaaccccagtttcttcgttttttggttcagagcctgcccagtatagcactacaataagctgaattttataaattgggttttgagttaaggaatcaaaagcttcaggcttaagtcccacctctgccccagagtcttctgagccctccattttcacagacgtcagttgccctaggtggaactggactttaatattctccacatcccttattttttcccaaaacagtttaccagctttttytttcctgaaccaggagcaatagcaaaaattgggaatgggaagaaacaggtaccagccaggacacctgaacgaacttggagctcaggaacccaggaggggattggagagagtggggagactccatggtcc

SEQ ID NO: 812373 - DNA, 542 bp, Homo sapiens
atgcatccagggttccccttctaccgccccrgctctgtggacactggggccagatcattctctggagggggccgtcctgggccctgcagtgtgctaagcagcaaccctggcctccacccccaccattgcaacaaccactcacgtccccagatgctgcccagctaagtgtgccccgggggaagagccacccaggtgagaagctctgcctgagacctgaagcgcccacctgcctcccacagccaggccccttcagcactagacccagcaaccctggggtggctgttctttgaattttgtgactttttggtgtgtcatttttgggagatgacagaggtagtggctgaacctgaaacttcgcccctgcagatctcggttcttcctgctattgcaggggtggagaaggtgggtgcttgagccagggtcctgagccagagtccctgccagggctccgccaggttcagacgctcacgggtggggtgacctcgggcctgatagccaggcctcggtttctctgtctctagcatgagggtgccggtgcccaa

SEQ ID NO: 812374 - DNA, 599 bp, Homo sapiens
ttttcaaaaatcttttgtttcagccaggcacaggggcttgtgcctgtaatcccagctactggagaggctgaggcaggaggatcatttggagccaggagagctggagaccagcctgggcaacatagcaagacaccatcttttaaaaaaattttgtttctgttttggaaaaattttcgatttacagaaaagttgcaaatctagtccaacgttccctatgggcagcaggcaacctaggtaccgaggcaagagactgagggcacgagctgcctggctctgccttcgagatagcagtaacagaattagtgaaagtactaaaagtctctgaaatgcggaaataatggcgtaagctgtctcctctctctctctctctctttgcctcggctgccaaacagggaagggccccatgtccagtggacacatgaccttacctatcattggagatggctcatactccttaccctgcccccttgtcttgtatccaataaataacagygcagcctggcatttggggccactaccggtcttcatgtcttggtggtagtggtcccccgggcccagctgtcttttcttttacctctttgtcttgtgtctttatttct

SEQ ID NO: 812375 - DNA, 478 bp, Homo sapiens
ctggaccttccgcagccccctctctacccccctggacgacttcttatcacccctgcacctattcagctcctagaacacacaggcccgaggcccccacctctgtgccaccctgggctcaggcccctctgacccagactgccatctccacggcccccacaccagcacacagatgcctcattcacgtggtgctcccagggcctggcaccagttctgaggcttaaaataggcacacaacgggcctttgtcggatagaggaaggaaggaaggagcgtttcagacaaaggagacagcaacagcagcgtccaggaaacccaggggcaccggggaggtggatggagccaagtgggggtggggtacttgaagggtcagagggcagggccaggccatgcaggaccctgaagaccccatgaggaactggggtgccatcatgtgggtgctgacttgataggrggcagggaagtgaccgtctgatcagtgc

SEQ ID NO: 812376 - DNA, 321 bp, Homo sapiens
aacaaacaaacaaaaaaaggcagaggatgtttccatccctgcraggatccctcctggtgccttctaagagccacacccaccttcctcccatccccaaaccccatccctaacctctgaccatcaccaatctcttcaccatttcacttatttttatcttttttttttttctgagacggagtctcaccctatcgcccaggctgaagtgcaatggcgtgatctaggctcactgcaacctccgcctcccaggttcaagctattctccagcctcagcctcctgagtagctgggattacaggcgcccaccacctggctaatttttgta

SEQ ID NO: 812377 - DNA, 321 bp, Homo sapiens
aacaaacaaacaaaaaaaggcagaggatgtttccatccctgcgaggatccctcctggtgccttctaagagccacacccaccttcctcccatccccaaaccccatccctaacctctgrccatcaccaatctcttcaccatttcacttatttttatcttttttttttttctgagacggagtctcaccctatcgcccaggctgaagtgcaatggcgtgatctaggctcactgcaacctccgcctcccaggttcaagctattctccagcctcagcctcctgagtagctgggattacaggcgcccaccacctggctaatttttgta

SEQ ID NO: 812378 - DNA, 318 bp, Homo sapiens
gtctggctagttattttgtatttttattttattttaagttctgggatacatgtgcaggctgtgcaggtttgttacataggtaaatgtgtgccatggtggtttgctgcacctatctacccatcatctatgttgttttgttttgatttgatttgtttgagacagagtctcactctgttgcccaggctggagtacagtrgcgtgatctcggctcactgcagcgcctcacgggttccagcgattttcctgcctcagcctcccaagtagctgggattataggcgcctgccaccatgcctgactaatttttgtatttgtaatag

SEQ ID NO: 812379 - DNA, 463 bp, Homo sapiens
ttcacattacacagatagggaagctgaggtcctgtgggttcctgcytttgtaaaatagggctcttagtgcctgtccgacctcctcagccagctgcggtaagtacacggtacagcggggccctcgaggtctcttgagggaaatgctgaaatgttcccgtaaccccctggcatccttctcgtgaaagtccaaactcttcccacagcccaccaggcactgtttgacccctgctggcgaccttcaacttcactggccaccttccctctcctccctccactcctcccagccaggcctcacctgttcctgctttgacacctttgctggtccccctgtccagtgctccgtcccaggtccccttggagctggcctctcccccgcttcccacatcagcaaacacgtcagcttctgagtcagacctcagaaggcctgggactcccagccacgtcacttttgtgatgcaggttt

SEQ ID NO: 812380 - DNA, 577 bp, Homo sapiens
cactccctaatctcaagtgcccagggacacaaaacactgtggaaggccgcagggacctctgcctaggaaagccaggtattgtgcaaggtttttccccatgtgatagtctgaaatatgacctcatggcaagggaaagacctgaccatcccccagcctgacacccataaagggtctgtgctgaggaggattagtaaaagagaaagtcctctttgcagttgagataagaggaaggcatctgtctcctgctcctccctgggcaatggaatgtctcagtgtaaaacctgattgtatattccatctactgagataggagaaaacccccttaacgctggaggtgagaagtgctggtggcaatactgctctttaatgcaccagatatgtttatgtatgtgcacatcaaaacacagcacattttctaaccttgtttctgacactgagacatttcttcacgttttcctgctgacccttcccccgctattaccctattgtcctgccacatctccctctctgagatggtagtgataatgatcagtaaataactagggaactcagagaytggtgccggtgccggtcctcc

SEQ ID NO: 812381 - DNA, 616 bp, Homo sapiens
catacactgagacagaagcagaattaaccactcttgtcagcctgacacaattctgcattgtacatcctcaaatgcctcaaagacacctaggtgattttgagggaattcccagtgaccctgggctgatagtccartgataagccactctggagagactcaggctgattctaaatagaaaatggaactgccttggtggaactccagaacctggatcatttgtccttatttgctagctcttggataaaagaaagaacaaaaatactaatttttcaggtaaaatacaaaaatcacattttaaaggcaaatatagttgtggtcatggctctggatgttttgcggccttgatctctcactcctaagatgcttatttatagttacagattctgccatcagattctatttcctcctgggtcctctcacataactgtagcaggtgaacaagatatgaaaaatctcaaagaaccacactcccgaatgggggctgtaagatgtgtatgttgatatctcacaatgcagaaaatgccttttgttagttttctgtacattctttatccaaactccggcccttatttgtaaatccgaagcagagcccagaccttatctgcagattctaggt

SEQ ID NO: 812382 - DNA, 616 bp, Homo sapiens
catacactgagacagaagcagaattaaccactcttgtcagcctgacacaattctgcattgtacatcctcaaatgcctcaaagacacctaggtgattttgagggaattcccagtgaccctgggctgatagtccagtgataagccactctggagagactcaggctgattctaaatagaaaatggaactgccttggtggaactccagaacctggatcatttgtccttatttgctagctcttggataaaagaaagaacaaaaatactaatttttcaggtaaaatacaaaaatcacattttaaaggcaaatatagttgtggtcatggctctggatgttttgcggccttgatctctcactcctaagatgcttatttatagttacagattctgccatcagattctatttcctcctgggtcctctcacataactgtagcaggtgaacaagatatgaaaaatctcaaagaaccacactcccgaatgggggctgtaagatgtgtatgttgatatctcacaatgcagaaaatgccttttgttagttttctgtacattctttatccaaactcyggcccttatttgtaaatccgaagcagagcccagaccttatctgcagattctaggt

SEQ ID NO: 812383 - DNA, 468 bp, Homo sapiens
aaataaggaattggttgagtaagtagagacatscctgtataggtttactctgtagccataatggataatattgagaaatctatttatggtcaatgaaagatgtttgtcatatattatcatataaaaagcagattataaagcactatgtacagtattttacaatgagtatttaaaaactttttatagaaacagggtcttgctctatcactcaggctagagtgcagtggcacaatcatagctcactgacgcctctgactcatgggatctggtgatcctcctgcctcagcctcctgagtagctaggactacagatgtgtgccaccatgcctagctaatttttaattttttttgtagagatgggatcttgctattattgtccaggctggtcttgaactgctggtctcaggcaatcctcctgcctcagcctctcaaaagcactgggattataggtgtgagccactgggcctgg

SEQ ID NO: 812384 - DNA, 469 bp, Homo sapiens
aaataaggaattggttgagtaagtagagacatscctgtataggtttactctgtagccataatggataatattgagaaatctatttatggtcaatgaaagatgtttgtcatatattatcatataaaaagcagattataaagcactatgtacagtattttacaatgagtatttaaaaactttttatagaaacagggtcttgctctatcactcaggctagagtgcagtggcacaatcatagctcactgacgcctctgactcatgggatctggtgatcctcctgcctcagcctcctgagtagctaggactacagatgtgtgccaccatgcctagctaatttttaattttttttgtagagatgggatcttgctattattgtccaggctggtcttgaactgctggtctcaggcaatcctcctgcctcagcctctcaaaagcactgggattataggtgtgagccactgggcctggc

SEQ ID NO: 812385 - DNA, 524 bp, Homo sapiens
tgacttggtgaagtggacggtgaaggaaagggttggtggtgaatccaaggcattgagctgaatcctgaggagatgcagcattgtggtcaggtgggaggaggcaggctgagctgcttctggatagctccttttggttgcttagtcgtgttggtgggactgcactgggctatattttggtgaacatgcacaacagacagggttgatgcaggtctgggacactgggaaggggttagggatgaagttgtaagatctgggagtccttcacgtgaagccaagggagaaagaacccacctagggaatgagagtaaagagaggaaaagaaagaatctaatggaaccttggggagggattttattcagggagcaggaggaagacaggtcacagaaggcaggagaatgaccagtcagagaggagtgagattgagaggatatcaggaaagccaatgagagaacattttaaggcagagcgtggtcaccagtgtcaaagkactgtagaaagtcaaggagggtgaggactgaatttct

SEQ ID NO: 812386 - DNA, 601 bp, Homo sapiens
tacaaattaccaatatcaagagtgaaacaaaggatatcaatataggccctgcagacatcaaagattaataatggatattwaaaacaattctacacacataaatttaacaacttagacaaaatggaccactttctcaaagaacacaaactaccaatgcacccagtatggaacatacataatttgaatagaactacaactactaagaaattgaattcataatttataaacctccaagaaataatctccatctccagatggtttcactggaaaattttactaaatgtttaaagtagaatgaacaccaattatgcacaatcttttctataaaatagaagacaaaagaatactttcaattcattctatatagatacaattaccctgaattttttaaaagtaagtttaaagaaagaaagaaagaaaaagaaaattacagaccaatatccctcaagaatatagttgcaaaaatctacttcaatagaattcagcaatatataaaacgtcatacatacacacacatttataattataaaccatgagcaaatggagtttacgctgggatgcacaaataatttagcatttgaacatcaaaatctgtcagtgt

SEQ ID NO: 812387 - DNA, 601 bp, Homo sapiens
tacaaattaccaatatcaagagtgaaacaaaggatatcaatataggccctgcagacatcaaagattaataatggatatttmaaacaattctacacacataaatttaacaacttagacaaaatggaccactttctcaaagaacacaaactaccaatgcacccagtatggaacatacataatttgaatagaactacaactactaagaaattgaattcataatttataaacctccaagaaataatctccatctccagatggtttcactggaaaattttactaaatgtttaaagtagaatgaacaccaattatgcacaatcttttctataaaatagaagacaaaagaatactttcaattcattctatatagatacaattaccctgaattttttaaaagtaagtttaaagaaagaaagaaagaaaaagaaaattacagaccaatatccctcaagaatatagttgcaaaaatctacttcaatagaattcagcaatatataaaacgtcatacatacacacacatttataattataaaccatgagcaaatggagtttacgctgggatgcacaaataatttagcatttgaacatcaaaatctgtcagtgt

SEQ ID NO: 812388 - DNA, 596 bp, Homo sapiens
taagactaaggaaagaatcaccagaaaggagcaggctttcttaatgaggaattgaaattactaattcaatctcttattatagatctattcagattttctatgttttcttgatcatttttggtaatctgtttttttaggactttgtccatgccacataggttatctaatttgttagtatacagtcgttcatagtattccttatagttattttatttctgtaagatcagcagtgatgtctcctctttcattctaaattttaatgagtcttgtctctctttctctgtcactctgtctctctctcacacacacacacacaaacacacactactcctctcctaccatccatttacctgaatgtgagtcaattttgttgatgttttcaaagagccaacttttcaattcattgattttctctattgtttttctgctctattccatttctttctattctaatatttactatttatttccttctgcttgctgtaggtttagtgtaytcttctttttttggtttcctaaggtggaacattaggttatttatttgacaattctctctctcttttttaaatatagatatttgtagctataagtttcac

SEQ ID NO: 812389 - DNA, 556 bp, Homo sapiens
ctataagtttcactctatgcactgctttagctgattcccttaagttttgctatgttggaaaagaaaaacaaataccacatgttctcacttataagtggaaactaaacattcagtatacatggacacaaagaggggaacagtagacactggaacctacttgagggtggaaggtgggaggacagtgagggtttgaaaaactacctatcagtacactatgctcactaccttggtgacaaaatcatttgcacaccaaacctcagggacacacaatttactcatgtaacaaacctgcacatgtatcccctgaacctaaaataaaagttgaaagaaagagatttggtatgcagtgtcatctcaaagtactttcaaattttctttgtaatttattctttgactcattggttatgaaagagtgtgttctttaatttccacatatttgtgaagttcccaattttcctttacttattgatttttaattatatttcattayagttaaaaaaatactttgcatgatttcaattcttttaaatttcttgatgcttatattatggcctag

SEQ ID NO: 812390 - DNA, 556 bp, Homo sapiens
ctataagtttcactctatgcactgctttagctgattcccttaagttttgctatgttggaaaagaaaaacaaataccacatgttctcacttataagtggaaactaaacattcagtatacatggacacaaagaggggaacagtagacactggaacctacttgagggtggaaggtgggaggacagtgagggtttgaaaaactacctatcagtacactatgctcactaccttggtgacaaaatcatttgcacaccaaacctcagggacacacaatttactcatgtaacaaacctgcacatgtatcccctgaacctaaaataaaagttgaaagaaagagatttggtatgcagtgtcatctcaaagtactttcaaattttctttgtaatttattctttgactcattggttatgaaagagtgtgttctttaatttccacatatttgtgaagttcccaattttcctttacttattgatttttaattatatttcattacagttwaaaaaatactttgcatgatttcaattcttttaaatttcttgatgcttatattatggcctag

SEQ ID NO: 812391 - DNA, 540 bp, Homo sapiens
cctgggagtgaaaggacgatatctactaccataaaaacacacaamagcgttaatataaaacccactggtagagcaaacacacaagtaaggaatagaaaggatgcaaatgttataaccacagaaaactaccaagtgacaatgataaaacgtaagagagaaagaaaggatatacaaaacaaccagaaatcaattaataaaatgataaaaataaaccctgacatatcaataataactttgaatgtaagtgaattaaattttccatttaaaagatatagaatggctaagtgaaattttttaaatgacctaactatatgctgcctacaaagaaacatgtctcacctgtaaagacatatatagactgaaagtaaagagatggaaaagtatattccgtgcaaatggaaaccaaaagagagcaggagtagctacctttatatcagttaaaacagactttaaggcaaaaacagtaaaaagagtaaaagaaggttattatatgataaagggatcaattcagcaagaggatgtaacaattctaaacataca

SEQ ID NO: 812392 - DNA, 684 bp, Homo sapiens
agttggccagaatcacccagaatcactgcccttgaggagaaatgtcactgatgggaatacgttacatacatgatggtgaggaggtaaaaaagaagtgttgggaaccattagaatctgcagtgtgtgcatgtgtgtctgtgtgtgtgtgtgtctgtgtgtgtatgtgtgtttggcccatgagaaagattattcccagccctcagactttcctaaagtatgaacaacgttaagagatccaacttttgatttggatttgagattttcgatttaatgtgacatattaatgaaagcaatgtgtggtatttcacatcacagttttcttcagagtactgcaagattcagtcctagataagtcaggaggatacccaggaagctgaaagaaaaagggaccaaagatcaaaatgggggagaaacaaaaggacactactcccaaataagttatttaagtttgtgagacaaacaatactatttgggggaagtattaaaagccctgcaaaggcctacactctatgaaggcaaaatggctgccttcactctgctggccttcatggcactggaagaaagtccagcatgagtggaagtttctggaacccctcatggagctgggggtagggggagtgtgctgggtccatgggcacygggtcactgaccacaattctgacctggtgcctaactgtcaagcta

SEQ ID NO: 812393 - DNA, 549 bp, Homo sapiens
agtcctattcctgggagtgaaaggacgatatctactaccataaaaacacacaamagcgttaatataaaacccactggtagagcaaacacacaagtaaggaatagaaaggatgcaaatgttataaccacagaaaactaccaagtgacaatgataaaacgtaagagagaaagaaaggatatacaaaacaaccagaaatcaattaataaaatgataaaaataaaccctgacatatcaataataactttgaatgtaagtgaattaaattttccatttaaaagatatagaatggctaagtgaaattttttaaatgacctaactatatgctgcctacaaagaaacatgtctcacctgtaaagacatatatagactgaaagtaaagagatggaaaagtatattccgtgcaaatggaaaccaaaagagagcaggagtagctacctttatatcagttaaaacagactttaaggcaaaaacagtaaaaagagtaaaagaaggttattatatgataaagggatcaattcagcaagaggatgtaacaattctaaacataca

SEQ ID NO: 812394 - DNA, 607 bp, Homo sapiens
tacaaattaccaatatcaagagtgaaacaaaggatatcaatataggccctgcagacatcaaagattaataatggatattwaaaacaattctacacacataaatttaacaacttagacaaaatggaccactttctcaaagaacacaaactaccaatgcacccagtatggaacatacataatttgaatagaactacaactactaagaaattgaattcataatttataaacctccaagaaataatctccatctccagatggtttcactggaaaattttactaaatgtttaaagtagaatgaacaccaattatgcacaatcttttctataaaatagaagacaaaagaatactttcaattcattctatatagatacaattaccctgaattttttaaaagtaagtttaaagaaagaaagaaagaaaaagaaaattacagaccaatatccctcaagaatatagttgcaaaaatctacttcaatagaattcagcaatatataaaacgtcatacatacacacacatttataattataaaccatgagcaaatggagtttacgctgggatgcacaaataatttagcatttgaacatcaaaatctgtcagtgtaaatca

SEQ ID NO: 812395 - DNA, 607 bp, Homo sapiens
tacaaattaccaatatcaagagtgaaacaaaggatatcaatataggccctgcagacatcaaagattaataatggatatttmaaacaattctacacacataaatttaacaacttagacaaaatggaccactttctcaaagaacacaaactaccaatgcacccagtatggaacatacataatttgaatagaactacaactactaagaaattgaattcataatttataaacctccaagaaataatctccatctccagatggtttcactggaaaattttactaaatgtttaaagtagaatgaacaccaattatgcacaatcttttctataaaatagaagacaaaagaatactttcaattcattctatatagatacaattaccctgaattttttaaaagtaagtttaaagaaagaaagaaagaaaaagaaaattacagaccaatatccctcaagaatatagttgcaaaaatctacttcaatagaattcagcaatatataaaacgtcatacatacacacacatttataattataaaccatgagcaaatggagtttacgctgggatgcacaaataatttagcatttgaacatcaaaatctgtcagtgtaaatca

SEQ ID NO: 812396 - DNA, 590 bp, Homo sapiens
taagactaaggaaagaatcaccagaaaggagcaggctttcttaatgaggaattgaaattactaattcaatctcttattatagatctattcagattttctatgttttcttgatcatttttggtaatctgtttttttaggactttgtccatgccacataggttatctaatttgttagtatacagtcgttcatagtattccttatagttattttatttctgtaagatcagcagtgatgtctcctctttcattctaaattttaatgagtcttgtctctctttctctgtcactctgtctctctctcacacacacacacacaaacacacactactcctctcctaccatccatttacctgaatgtgagtcaattttgttgatgttttcaaagagccaacttttcaattcattgattttctctattgtttttctgctctattccatttctttctattctaatatttactatttatttccttctgcttgctgtaggtttagtgtaytcttctttttttggtttcctaaggtggaacattaggttatttatttgacaattctctctctcttttttaaatatagatatttgtagctataag

SEQ ID NO: 812397 - DNA, 598 bp, Homo sapiens
ttgacaattctctctctcttttttaaatatagatatttgtagctataagtttcactctatgcactgctttagctgattcccttaagttttgctatgttggaaaagaaaaacaaataccacatgttctcacttataagtggaaactaaacattcagtatacatggacacaaagaggggaacagtagacactggaacctacttgagggtggaaggtgggaggacagtgagggtttgaaaaactacctatcagtacactatgctcactaccttggtgacaaaatcatttgcacaccaaacctcagggacacacaatttactcatgtaacaaacctgcacatgtatcccctgaacctaaaataaaagttgaaagaaagagatttggtatgcagtgtcatctcaaagtactttcaaattttctttgtaatttattctttgactcattggttatgaaagagtgtgttctttaatttccacatatttgtgaagttcccaattttcctttacttattgatttttaattatatttcattayagttaaaaaaatactttgcatgatttcaattcttttaaatttcttgatgcttatattatggcctag

SEQ ID NO: 812398 - DNA, 598 bp, Homo sapiens
ttgacaattctctctctcttttttaaatatagatatttgtagctataagtttcactctatgcactgctttagctgattcccttaagttttgctatgttggaaaagaaaaacaaataccacatgttctcacttataagtggaaactaaacattcagtatacatggacacaaagaggggaacagtagacactggaacctacttgagggtggaaggtgggaggacagtgagggtttgaaaaactacctatcagtacactatgctcactaccttggtgacaaaatcatttgcacaccaaacctcagggacacacaatttactcatgtaacaaacctgcacatgtatcccctgaacctaaaataaaagttgaaagaaagagatttggtatgcagtgtcatctcaaagtactttcaaattttctttgtaatttattctttgactcattggttatgaaagagtgtgttctttaatttccacatatttgtgaagttcccaattttcctttacttattgatttttaattatatttcattacagttwaaaaaatactttgcatgatttcaattcttttaaatttcttgatgcttatattatggcctag

SEQ ID NO: 812399 - DNA, 598 bp, Homo sapiens
acctagaagaggataaatcaagtaaccttaaattcatgagaactgcttttgtttctagcagyaatcagagggttgagaagatgtgggctggatgaggagccaaggtactgtatactaatgctaggactgtcctaggccccaggaaataagaagaggaactcggccaacaacggggcagccctgaatggagctcacggtttagcaaaggaggctgatttaagggagtaggcctacactgtgacttcctggcagtgctgaccttggaattgcccaagaatcagagatagccttaaaattgtgacaaggcaacgagggagaagtacaaggcccagaggaaaatgggttggtcgatgtttggtggcataaggactcccacaacatccatctgcagaacctcagaggagtcaataggaacccttagaattaatcacaggaatgagtgttgccattttccaggtctctatgatatgcttgtggccaggcacttcccatacatcatctcacttaaaataagggtcagacacttgacactccacttttgaaaggttgatgacccataattagagtgtgcgggaggggtccctacttaaagtttgga

SEQ ID NO: 812400 - DNA, 690 bp, Homo sapiens
agttggccagaatcacccagaatcactgcccttgaggagaaatgtcactgatgggaatacgttacatacatgatggtgaggaggtaaaaaagaagtgttgggaaccattagaatctgcagtgtgtgcatgtgtgtctgtgtgtgtgtgtgtctgtgtgtgtatgtgtgtttggcccatgagaaagattattcccagccctcagactttcctaaagtatgaacaacgttaagagatccaacttttgatttggatttgagattttcgatttaatgtgacatattaatgaaagcaatgtgtggtatttcacatcacagttttcttcagagtactgcaagattcagtcctagataagtcaggaggatacccaggaagctgaaagaaaaagggaccaaagatcaaaatgggggagaaacaaaaggacactactcccaaataagttatttaagtttgtgagacaaacaatactatttgggggaagtattaaaagccctgcaaaggcctacactctatgaaggcaaaatggctgccttcactctgctggccttcatggcactggaagaaagtccagcatgagtggaagtttctggaacccctcatggagctgggggtagggggagtgtgctgggtccatgggcacygggtcactgaccacaattctgacctggtgcctaactgtcaagctattttat

SEQ ID NO: 812401 - DNA, 601 bp, Homo sapiens; identical to SEQ ID NO: 811520

SEQ ID NO: 812402 - DNA, 540 bp, Homo sapiens
gcacccacttcatgatgggcagttcaggtcgcatggtgacttgttgacccatagtcaaatgatcagtttccatcaaagcccagtaacaggccaagagctgtctctcraaaggagagcagttatctgcagaagatggcagggtcttgctccaaaatcctagaggcccccatggtgattcacatatgggggtctgccaaaggctcagaacagcatttctatctgccacggacacctcaagcaccattggatctggtgggtcatatgtcccaagtagcagagtggcttgcacagcagcctggacctattgcagagccttctctttttctgaaccccagtgaatatgggcaaccttttgcgtcgctgaataaatgggcgggagtaacactcaaatgaggaatgtgttgcctccaaaatctaaacaggcccactaggtgttgtgcctctttcttggttgtaggaggagccaaatgtagcagcttgttcttcaccttagaaggaatatctcaacagaccccacaccactgtactcctagcaagttt

SEQ ID NO: 812403 - DNA, 479 bp, Homo sapiens
aagcttggtgggggtagggcatccgccattactgaggcatgaataggcggttttcccctcatagtgtaaacaaaccctccaggaagttctaactgggcaaagcccaccacagctcagcaaagccactgaggccagactgcctctctagattcttcctctctgggcaggacatctctgaaaaaaaggctacagtccgagtcaggggtttatagataaaaccccatctgcctgggacagagcacctgggggaaggggcagctgtgggcgcagtttcagcagacttacaaaacgttctgcctgtggctctgaagaaagcagcatatctcccagcacaacgcccgagccctgctaagggacagactgcctcctcaagcaggtccctgacccctgtccctcctgactggagaaacctcccagcaggcatcgacagacacctcatamaggagagctccagctggcatctggcaggtgctgctctg

SEQ ID NO: 812404 - DNA, 571 bp, Homo sapiens
aggaggccatcctacggtaaaggacatgtgataaacagaaaatcagggccaaactcatccttggttccaaagcccactcacacaataactagcctgttcgccagataatgctatcaatcccgccatgagggtgcacactcacgattttatggtttctaagtccacagtcaacgttggctaattcacatgcatatgtttatatatcaaaaccatggcagcaggcaagggaaaaagaaggaattggagttagaaaagagtaataactgacttctcaagtagtctggcataaatcaaatgagggcctaaattacaatggcacaaaaagaatagatatgcacacacacacgcacacagaaaatctagagaaacattaacacacactatatacttcagtattttctcactttttctcagttattttaaacttggattttagttggcaaagattttcttcattacaattcatacctagmgagctcagtaaccatgatcacaattatttgtgtcctcacttgcgcaataaacttcacatattttactcatggattgtatcactgtaggcacatggtag

SEQ ID NO: 812405 - DNA, 554 bp, Homo sapiens
gggcgaaagaggcttagggttcagaggaacctccctggcctcctctaggaaaatctcccaatgactttccaagcctgactgagtttgagaacttycctcagcagatagaggcaccagaaggagcattggggcagcccagcctcacacatctgcttccttggggtttatgttatgacttgcaacactgtgggaggggtactgtaactctgttgacagtaataagttgtaaaatcttcaggctgcaggctgctgatggtgagagtctaatctgtcccagatccactgtcactgaactgagagggaatcccactttgcagactggatgcagcatagatcaggagcttaggagttttccctggtttctgctgataccaatttaaattattgctaatgccctgactcgcccggcaagtgatggtgactctgtctcctacagatgcagacagggaggatggagactgggtcatctggatgtcacatctggcacctgcagttggaaacataaaaacaaatattcttgcaattaatcatgttatcagaggacttccctgagg

SEQ ID NO: 812406 - DNA, 496 bp, Homo sapiens
gtgcggacagggaggctcagagggtaggtggctccccgggggaaacagagcaacccttgtgcagccggctgggccaactgatctgcacctaacagccagtcttgaaggccaccaaccctggggtctcccggagctgacccagggacagaagggcaccaggcactgcccacaaaggtgcaactgatcctcctcaccggcgcctgggccctccctccctgccagtgtggctgtcccacccttcatggctttctgcatcctcaagctaggcctgggctcttcaagtggagaggggtaggcagacacaggtgccaggcactgggaactagggacgggggcttccctggtgaggatggaaaagaaggttcctacatgagaccctctagcccargccctgagaacgaaggggccaaagcttcacctaggggcagccatgggggagtttaggcaggcagtgcctggctggaaacatgtcttagggaagcacttgaatcccggg

SEQ ID NO: 812407 - DNA, 564 bp, Homo sapiens
ggctataggcgcatgcctccatgcctggctgattttttgtatttttagtagagatggggtttcaccgagttagtcaggatggtctggatctcctgacctcatgatccacctgccttggcctcccaaagtgctggaattacaggcgtgagcccccgcgcctgctctctcttttttttttgagatggaatttcgctcttgctgcccaggctggtgcgcaatggtgtgatctcagctcgccgcaacctctgcctcccggcttcaagggattctcctgcctcagcctcccgagtagctgggattacaggcatgtgccaccacacccggctaattttgtatttttagtagagagggggtttctccacgttggtcaggctggtctcgaactcccgacgtcaggtgatccacccacctcagcctcccaaagtgtgggattacaggcgtgggccactgtgccctgttttgttttgtttttttttwaaatagggtctcactctcacccaggctggagtgcagcagtggtatcatggctcactgcagccttgaactcctgcgctcaagggatcc

SEQ ID NO: 812408 - DNA, 632 bp, Homo sapiens
aaagcaaacttgaaaaggattatactcttgttgtagtaattccacccctggttaggaatgcatacttaataactaatcagaagcaggcaagttttattcaccaagacattaatcatcaagtaatttatgatagtaaaaaaattggaaaaaaaagagagaaatgattaaacacccagaattatggtacatccataaaattgaacattatactgccattaaacagtgtgtttccaaaggatttttagtgatctgtaataatgctcatgttatttgtgaaaaagctggatagaaaactgaaaatataccaagatcttaaattatgtaaagggaaaaaaacctcacacataaatagagaaaaaagaaaggaacatattaaaacaaactcttcagtgattgtatcttgagtgccttttttgttttttataatttttggtattttccaaattttctacaataagcatcttttacagtcagaaatataataaaatattttcaagttcgagattttagctgtgttagttgtatttgtgtggcattattactctttcttctgttgatggtgcatcartttttctttggggatgcacccttccccatctcaggcctctggtgtgaagtggatccctgacccc

SEQ ID NO: 812409 - DNA, 618 bp, Homo sapiens
ttaaaaatatgtttatatatatttgtatgtgtgcaaatgaatascaaaaggtttatgtagaatgatacagtccaacagtggttatctgggagcaaggagttgattggaggaagactcagatgaaggggactttcaagtttccctgtgtattcttctgcattgtttacctcttttaaaatgaaattgtattcacataatttaaattgcttttacatttgtaaaaagtaagtaaacacatctggaaacctatctcctctagcagctctttaataggctttgagatttttttttccaaaaatgcaaatatataaattttagcaaaatagttgcctgtattttgttgtcatagccagaggcacttagtcacagaaaggacttagaatatatcattatcttcagtctataccctggaaacagaatctgactctgaattgttggcacatgtctgctgggcagttaggagcaatacccatgagtggtgacagaagccagcctggacaccgagagagactgaaccgtcacatagtcacaatggaggcctcggtggatcggattgaccactctgaccttcagaattgctctgccttgaggcaactgccccatccccatccagcagct

SEQ ID NO: 812410 - DNA, 681 bp, Homo sapiens
aaaactcattgaatggtacacttgaaaagggtgaaatttattttatgcatattacactttagtaaagctgatcrgacaggctgctctgagaagtcataataaatggggggaaaatggggatagcagaggcaaaaatatttaactgctttcagtattcatatttagtagtggtaaagttcctatagctattctaaaatggtttggtgtgtaaggtggggtcaaaccagtgagtaactgtggattattcttacccaacttcccctgtttccttgaaaaccgacacaagattatcagtacagaatatatagatgcaatagagaagaggttaagtaaaacctcaagtcctaaattgatagatatatcagtatgaacagataaagtactttatttgtcaactaaaatgctatggaaacaacaacccagttttgaagaacaccccaacacccaatctctcatcctgaaattccatttcccatgaatagaagccaggatttcttggagaaatgttggtactaggcctggggtgggaaaggtatgagataaacctggagcatcttgtcacacctgacagtgaataagctatcaaagacttctggggtcatgtcaactctattcagaaaccaatttaaagaggctcccactggcctaggaagggagaagtgggcttcaaaatgataagaa

SEQ ID NO: 812411 - DNA, 311 bp, Homo sapiens
tctgtgctgcatttccttatttgtacatatagaataacaaaatgttacaaaaatatttatatgaatattgaattaawatatatgtgcttaatcagtgggtgacatttagtaatcattgagtaagatcaactttcattattatttttacacccccaaatttggacaaaacaataccattgctgtagagagacagaggaggtaattgattcaaccatctccaccaacagactattaattacatcattgatttttcctgatgttactggtgttttctcaactaataaatatgtgcctcaaagtgtggagaatgt

SEQ ID NO: 812412 - DNA, 632 bp, Homo sapiens
ttcactgtgttagccaggatggtctccatctcctgacctcacgatgcgcccgcctaggcctcccaaagtgctgggattacaggtgtgcgccaccgcgccgggcccgagactggaattttttaaagctggggtaggtgtcactcttcctctcaactcccccataaacaaaattcaggtttggaaaacatttctatacctatacaaatttgaagcattaaaatcattaactgtaaatagctcacatttacatttctagctatgctttctcttttctagtgtgctgcttaatgttacatagttttgccatcctctttaagagattcttagatttgtgtaacttggaaattttatcacaatttaaccccttctgcccaagtatttgctcacaagtatatacattttctacttcaattgctttgaaaaactccccagtgatcttcatgttgccaaatttaatggagaatatttagttattattttaattcacccctttgcagtatttggccctattgaccactttatttttctcctttcttgacagtttctcttttcttacctgtcactcatactatttcatcagmtacttctcttataatatattctgaacacctttacttagctttttttgtaga

SEQ ID NO: 812413 - DNA, 431 bp, Homo sapiens
ggtttggtgattctgattttaagatggtaccttgaacactgcatcctcaggaggggaggaacaccacaccatgttttcacatggtggaaggtaggaggaaaaaagacaaaatggggtgtaacttgcccttttataatgacattaattccacccaaccctcacggcctaatcacttttaaagatctcatttcttggctgggcgtagtggctcatgcctgtaatcccagcattttgggaggccgaggtggggggatcacaaggtcaggagtaagagaacagcctggccaatatggtgaaaccccrtttctactaaaaataccaaaattaggcgggcatggtgatgggctcttgtagtcccagctactcaggaggctgaggcaggagaatcgcttgaacccggaaggcggaggttgcagtgagctgagattgag

SEQ ID NO: 812414 - DNA, 647 bp, Homo sapiens
aagaataaaagaatattcatactggcttcagacttcatctttgggacattttttcttatatatccattgatagtttttttttttcttttgtgaatcactggttaatrttacttgctattttcaaaactgaaagcttttagttacataactgactcatatatgatggttcttatttaaaagttcaaacaatactgaattatagagggaaaaataagtattttatctctccagcactcatcataatcataactctttagatcaaagctaaccactttcaaataatatactaggagtactaaaatgaatccttctgcatccattaactcttggagatgtatgttgttatgtaatacatacacaaatcaacaatttgcacaaagatgtctaatatagtattacacacagaggtgaaaaatattcaaatttctgaaaataaagtaataaaacaattttatgaaatgcagtttctttaggctgccttagcctaaggtttaaaacatgatcatatcagctctcacaaactctgtcttgttcttgtccatatctgttagtggaaaaataggaggtggtcagcgaagagtgggattcttgaaatttaaatatggagaagttgcattttttgttgatggggccaagtcttacataca

SEQ ID NO: 812415 - DNA, 613 bp, Homo sapiens
acttctttcagctgtgtattcttattacaaccaaggcattttaccagagcaaggcatacaagattcattcaaaaaagcaacactgggaagatatgggagctgtggccttgaaaatatatgcttatggaaaaactgggaaagtataggtgaaggtgaaggacaaaaggaatgttataatctatgtagccaatatttgacaactagtcataacaaacatttaactgtgaaaggagacaaagaatatagaatatttcagaagaagcctcagtttctgtcagctgctcctacagaaccatgtattcctatgaataaatatcaacataaatttttgaaatctgtcttttgtaataaaaatcagataaattttaaccatgactcaaatattagtaaacatcatagtactcattttctagaaaactattacaattgtaatgaatgtgaaaaagtattttaccaatcctcaaagcttattttccctgaaaatatccatattcaaraaaagccttacaactctaatgaatgtggtgaaacttctgacccattctcaaagcttactcaacatcaaagaatttatattggagagagctcacaaagatgtaataaaaaatgtata

SEQ ID NO: 812416 - DNA, 605 bp, Homo sapiens
gttgcgtgcaagattaactgctggtttgtctttgcagagctccacacagaacatcatcaaagaactgatggacacttcatctccctgggtgaggggcaggtgtaccatgctgtcatggccattcctgcctcgattggggtgtgggtgtagagatggtctctataaccagggcccagacatggctgagaaggccttctgccaggactccaccttgatgactcacaggactttgtgccttggctttccctattgagtgacccacagttttaatccaagggaccctgagtctgtttccttccttcagccccaccatttcaccccagcactgttcaggtgtacaatcggctttcacatatttgtaagaatatctaggaaaattatttatattttactttcacttcatgttatgaccatgagtgtttttgcatttgctagggctcattgttttaattggcccccctttatccctctgwgtgcggaaataaatcagccctaaatctggatgagacctgcaggtggactccatcagtgcaggcgtggtggggcagcaggaggagcccgtggtgcccaccttccagagctgccacctcttttacctcctcatg

SEQ ID NO: 812417 - DNA, 563 bp, Homo sapiens
ataaaggtagacactaaagtggtaagtacagttttaatcaataatatackactgtaatagggaaaagggcctgtcataaagtgaattcaactttgatttgtgcaatggtgcctaggtgttttaaagggagaaagtgacagtaagcaaggggataagtggggattcggtagagtcagggaagtgaaaacttacaaagggttggtaagtgtaagtgagagtaggcggctgtgcctgctagctggccattatggaagttagaattctgttctcccacagagactgaaagacagaggccttttgcttcctcatgatttcatgtcaaaggaatgattttcagagacttgagaaagatactcctgatgtgtaggagacacatgtacatctcagaaaagggaataagagggtctcacaattgtttatcttttttcgataaaccctgtaagaaagggaagtcaggggcctatagtcagttgttgccaagacaaaaaaaaagaatgaattctttgggcagccttgagctttctgagacaagcactatagaaactacaaagcaactagctaat

SEQ ID NO: 812418 - DNA, 479 bp, Homo sapiens
tatctagtctaaagccaccctaagtagatttaaacttacttcttaaggagaaacttggtatttcattgacacatgagctggcaaggtggcacgttactgagcttgactctcaaaatgcctatcttaaccatagaccttttcaaaattattaaatcatgtaactgtacagcagtgccagagaaaaaaagccttcaagttgctatcaatgtgtctcaaaaaccttcaattaaaaaagtagttttggaggattatctcaaagatagggcatcttttcttgaactaaggcagatcatacaggttgatgtgctggttcctaccctccaacatctgcttttatggatctgcactttggtgttccaccaatgtatttagtaagaacttaaaaacgatgtcatatactttcatatttgctttaattgrtaaaagttataaaaaggtatgtggcttacttgcttatgttttgacagtatgataccatc

SEQ ID NO: 812419 - DNA, 638 bp, Homo sapiens
gaacattgcattcaacaaagttaaatgggtgtctctctttattttcagggatggtcagagcttctagtttgctgatacaccctgtgaacatccaggcagaataaatacctgcaacctttctcaaattcatttgaccctagaactccttttacccaggactacctcctgaaaatctatagaacagtttaaaatgctactttcacacaaattctttgcttcagtaacatttgcttagtcattaaacccagaaaaccatgtatatatactcacaactcgatctgtgcttaatctattcagtatgtactactggatttatttattgctttaacgtgtcctttactgtaagggagtatattttctatccctttagaatatcagttgcttaatccactattttgtacacagtggatacatactaaatatgtgctgttgataattaacattaagtcatcaggtctattctaaagcaagtgtaaataagcaaaaataaatcaggcaatttgacgactcataatctayggcataagcaaatgtcacacccaatttctaagatcaagtgaattaattttatcacgtattttcaagtatcttctgctatacattaattttttttggtgttattcagttatcagtataat

SEQ ID NO: 812420 - DNA, 596 bp, Homo sapiens
ttcagggaagttaatcaactttctaaagttgttcacagatttttatagatgtttctagagagaaagttcatagcattttattgaatgctcaaagagctaaagaatggcttacctatggaagaataagtaccactataagcctaatcccatttccatccccagggtaattttagggtcagaaccttacagccaagacaatctaaatatttcaagttacctttggagagagaatattgtgctttctctccacttaaatttaccttaaaattctaataaatccatgaattctttgagagcaacttttagtttcagtggccagccacctgtttgtgataatataacaaaatgttggaatgtaggcttataggggtatactctgatttcatttgcattaatctgcaaattcatacagtggtcagtgttatttatacctagaatggcttttgaatgtactgaaacttctagttacagagttgtaatcattatttgtgcccttaatttaaggattctcaagaatttgcataaatggacacccaatacaatagaatatgtttyttatcgttattcatcatgataagtgcttatgtaaacatgtg

SEQ ID NO: 812421 - DNA, 644 bp, Homo sapiens
cacatgcacatatacccacacacgcatacacacmtactcctgtggcaaacataataatgtatttatttagaattataatatgaccatcatgttaattattttttacctaatcagagttgttattgacaaatgtcataagtggaaagtattaattcttattgtcatcagtatttagccattatttagtagctcaagaatatctttatgtgaatgtctctgtaacttggaattgcaatttcactgtgttaagtaatcagaactctgcttataagatttatctgtatcttgtttcataatttaataatgaaactaaattcaagttaatgtaatgttgatctccgtcgaaaaataacttgtgagcattaaaatatctgtatggcattataataggcacctgtcattaattatgatttgatttgaaagtagacttactaggtagtgcttacatctgatttattgaaaattttttccaaaagcattgtcttttatttatacagtcctaaccacttcaccattaggaggggtgggacattaaaaattatttacccatcagacataaaattgtacaaattgactattcaaaatagtatgtgtattcaaagaacacttttaacatctatcttatgaaataattcttcctacaa

SEQ ID NO: 812422 - DNA, 612 bp, Homo sapiens
ttcccctagggtttttatagttttgggttttacatttgagtcttaaactatcattaacatttttcacagaatttgaaaaaaaactacttcaaaattcatatggaaccaaaaagacaagtatagacacatatagccaagataatcctaagcaaaaagaacaaagcttcaggcatcatgatacccaaacttcaaactatgctacaaggctacagtaaccaaaacagcatggtactggtacaaaaacagacacatcgaccaaggaacagaaaagagatctcagaaacaagaccgcacatctacaaccatctgacctttgacaaacctgaaatgatttcctatttaataaatggtgctgggagaactggctagccatatgcagaaaattgaaactggaccccttccttacaccttatacaaaaattaactccagatggactaaagacttaagtggattgatattttaaagggagaaacaagatgcaatgctatggaatgtttaaaagcactagctgaacccagcactagcatgagtagctgttaycttggacaagttaattaacctcatttttaaacatataccacaggataatcatagcacctacctcaaagagt

SEQ ID NO: 812423 - DNA, 563 bp, Homo sapiens
catggcttttatcatgtctgatgttaatgcatgttctctttttacagtaaattcatggccatcagatgatatcaatttcacatacctggcatcagggccttcacagccaccataggttttctcttccccatccattttgttcttatgaaatgctactgtgcttccccaggaacttcagtagtttcctagtgaggcgaggacgcagagtgtgtggctcacttccgtctggagaagtgtcctttacattttttagtgaattagagatagtatgttttactttcacgtctcttgccaaaaatttagcagtagctaatggaaagagtttttgtgtttgtttgtgctatttgtttttacagcagctaaatgcaaattatttttaaagttttgtcagtgcctataattaacttttgttcttgtcagttgaaattctaaccagattatttaaaagaagacttgtataaaatttctayatggattatgctatgctggattactggttttatgtatttgttatggaactgaagaattaatttgagttataaatgtctcattggatgttaagt

SEQ ID NO: 812424 - DNA, 563 bp, Homo sapiens
catggcttttatcatgtctgatgttaatgcatgttctctttttacagtaaattcatggccatcagatgatatcaatttcacatacctggcatcagggccttcacagccaccataggttttctcttccccatccattttgttcttatgaaatgctactgtgcttccccaggaacttcagtagtttcctagtgaggcgaggacgcagagtgtgtggctcacttccgtctggagaagtgtcctttacattttttagtgaattagagatagtatgttttactttcacgtctcttgccaaaaatttagcagtagctaatggaaagagtttttgtgtttgtttgtgctatttgtttttacagcagctaaatgcaaattatttttaaagttttgtcagtgcctataattaacttttgttcttgtcagttgaaattctaaccagattatttaaaagaagacttgtataaaatttctacatggattatgcyatgctggattactggttttatgtatttgttatggaactgaagaattaatttgagttataaatgtctcattggatgttaagt

SEQ ID NO: 812425 - DNA, 610 bp, Homo sapiens
cagtggggtgaaagaactgcagggcgttcattcgtatttacttacttttctcaccaggcacaggacgaggtggtgaacagtgcaatccttatggagttgtggggctggtggaaaataactcaagagagtagaacaggaaatgtgtgtaattctaataagtggaggcagcgccttgtccgatcatttggtaacctagcttaactcagttggttaaaacactgttcctcaactattctcagtccaagatgtgccaagtgcttaactcagttggttaaaatgattttctatatttcctagatggcatccctctttctctttcatccagggggtgtctgtcaccctttccctccatccagataagggcatgtgcatgcacacccatatgtcctctgctagggctgagatctttcacctttgctgtcaagtctgttttgcaaaacctacccaggtttccagaagcactaagtgggacttgatggatgcacttgaggcttaagtgacaaggtgggctcatagtgtttccattgtctgtgtgaggaaggaactaagggcattgatggaactggtgttgcgagtcctcaggacagcacrgctcccaccactgctgtga

SEQ ID NO: 812426 - DNA, 640 bp, Homo sapiens
cccccattcccaaatgaagggcagcccagttggttgtgctgtcagcaaacattgctgtttgcaaaggcatgacctgccttagggagaggtaaggggaagagcaggcacttttgcttgggcatcttcttgttcttttttgctgccatcgttatgcatttgccagctgggctgtcgaagacaccagtcaggaggagctgcttttccaagattcagagcctgcagctggcgtcctctcctggccatgctgtttccataggattaagatggagctctggggactttcagtcctgagctggccccctgggatgaagctgggctttcatactaattgttttccaaggcagtttacagctgggtcatttgcactcatattttttcatgacacgatgcagcagaggattaacacgtaaaagaaaagggctgatggtgggaatggctctgcacagaaattcccgattgtcctttctggcgggaagtggagtctgccctctttgttgggatcctgctccacagtttggaagcaggtgaaactttcagatggcctctaatcaacctggggtgcttccyggcggaggtgctatgttagggggcacgtgaataatagagagggttgcctatctcctcaccctctctccattag

SEQ ID NO: 812427 - DNA, 646 bp, Homo sapiens
acagtagatacctggagaggctgtgaatgcacctttcactgcaggtcagccactcgcatgataagagcttgtgtctgtttttccacaatttcagctctttgtcttcaggrgataagactgtcactcagggccatcttagcagatttgatgctcagaatctgcttttgaagttgggagttagaatccctgagttcatcattttctttcatcactttgtccactgaacttaggagcaaccaaccgcttcattatgttccttggttccctgcatatggtcaaaggtattatgtacagagtcactaatctccttgcctgtcatgagcagtgaatcaggagtgtcaaatgcatttattttgcataactctctaaacagttcatgccaaggactatcagtgttctccatactattagaagtagagtccttagcattttggggtctaatcatattaagcagccaactccagaaaccccaaaaccaatgaaagaactccatccttaatattctgttcctctagaaccactcctggtagaaaatctgtattagtgttctctagagggacagaactaataggatatatatatatatcctattacatatccatatatatatatatatatatatatatatatatatatatatatatat

SEQ ID NO: 812428 - DNA, 649 bp, Homo sapiens
ctcattctctagtccttacgttaaaatatgctaagagaaagctcatggccgagtccaggcaaaggttactcacatttagattcttccgggtaaccaggatcctggtgacagaaactggtaccgtccctgaatggctttcttcctaaatgtctctcatgcacatcagctgatgcattcttccacttgccattacttgacacgtggaagatgctcatgtcacacattcatttgttcatgcattcaataggcatttgtcaagtgcttggaaaggacagggccttgtacaatgcctgtgtgggaataaaaagatgtataagtccttgaggtactttcaatgaagccaagtagacaagacacaaccagttacataacaagagagcaggcaatggtagccgaagacctggtgtaagtctccatattcacctatcacagctgcttggctctgagtcagtcgtcgaacacctgtgaccttcactttcttttacaaagagtggttgggaagattgcatgggatagggtgtgcacaaagtcagtactgtggatagcagtgataaaagagtggtaccatgcatcagaagtargtcctagaatgtgacaggtgaggtatggggacatatgttcgccaacagtgctcattattgatgcgtgg

SEQ ID NO: 812429 - DNA, 611 bp, Homo sapiens
cttttaaagctttttttctctttaagtgtaggacagtctayggaattttttttttttttttttttgctgtgggggtccaaaatttgggacgtcctggagctgatgaagttttactacagagccccacggaagtaagaggagttgtaaggtagagcagagcctgccaggctgcaagtcccctgaatccgtgttcgactgatttcctggctgtcaacttttacacaagtaacctgtatgcctggagatcaggcaagagtgctttttgtaaatcttgcagggaagttaaagcgagcagttgaacgtttaaaggattttctgggaaagttggaggagttttaggtgttaaaggaatctgttgaggggatgggaccagattttgaggagagggttaagtttaagctaggggtccagatatccagaagaccttctggagggccagggacagggaattggagataaagggaggttagaagtaggtggagaaggaggaattatagtggatgtgtaatttggcttttgttctaatttctattctttacatcttttttaaggaaacccctaaaagctagcagttacactcttctgtgtcctcttttcaattagatcttacc

SEQ ID NO: 812430 - DNA, 558 bp, Homo sapiens
ccacaagaggagagattttgttaattttgttctccaaagcttagaaccttgcctggcttatcacagctgctcatgtggaatttgttaaatgaatgaagagacacatattcagcatgtacctgtgcactagtcatactgagggtgtttactgtgggatttagataactcgcctgcactaaaatgaactgtgtacaagtggcgtggctgcacaggagagcacgcatcaggccaaggcctgcaggagtctgaaagagctcagcttacggttatggttgctgaccatgcccatcctttgttgctccctgaggttctagactctgctcatttcctctgacctcggtagtccctgtttctcctactataaagaatgcttaaagttttcttttttaaaaaatatggcacgtaatttctgaatatttgttggcagatatatttctttcaaactgccaaacatttttcctagctttacaacacacyaacacacacaaacatacacttttttattcagcaacctcattgctggtccagggataacactggcatttactgattcataaa

SEQ ID NO: 812431 - DNA, 613 bp, Homo sapiens
gaataatcttgccaataggaccagaaattgttaaggtctagcagcatgttttgcattcatctctactaaaagaatgaattttcagtgggtccgaaaatgctcaatcaacctcraagtctgatgagggagcggacattcccagagcacctggatgggccctgccactgtttgcctctgggagtcttcctttaccatccttccatggcaatgagccccctttagggtagacttatttttttcacggagcaattcttcctttttaaaggtgactttgcataattctgctctgatccttcatgtcttgttttccattatttcaaagacctaggaagcactttccaataaacttccaagtgatgcttaaaaaataaccttctgcctctgcagtgaaggcagggctggccttgtaaacaaggctgatgcttgtaagacctgataaagggaacgtcctccagcccaacttcttggcataaaaaggaaaaaataaaatttcttttcctctgccaaatactgtagattcagtcatttcttttactcaaataaaaatgcctctgggagagtaatactattctcacccttctctctctctgtgaagtttcgctgggtgtgatgg

SEQ ID NO: 812432 - DNA, 570 bp, Homo sapiens
tgactagggcattattacaaattgccctgaggcatatctttccttttaataccatgtctcaaatgcaaactttcagcaggtggttattgttcaacattatgtaaccaaaaataaatgccacctagttattaaactgtcagaacattaaaagtgagtaaatcataacaaagtttatagtgtataaagccatagccacagtcaattttcttcagagaggcccagaatatacacagagaactaaaggacaaaacctgagagaaaaaaaaaaatgtattgtcttcggatatttgaactaatgttgtgaagggtaagcatatccctgcctccacaaaactggtagctatacagaatttttcttgtgctgaccggcttttgattacttgatatgtgagtcagataaggaaatatttctaactattaaaatttatttttttgatgagtaggctctctaataacaggcaaccacaatccaatatgtaattttaatttgaagtcatcccagatatacacttgtaaatgttttattttaataaccttacatargtttcaatcacaagtaaagcatatagt

SEQ ID NO: 812433 - DNA, 628 bp, Homo sapiens
tttgttgtataatttttaaaataagagcatgagaaatacagtgaataaatgtacagttaatcctttgtatttgtggggtccacacccacattttcaaccaacagcagataaaaaatatttgaagaaattgtacttaatacgtacaggctttttttcttgtcattatttcctaaacaatacagtataattattgacacagctgtgcatatgtgcaaattataccattttatataaagagcttgagtatactcaaattttggtatataaaggagatcctgcaaaaaattatccaagaatactgaaggatgaatatgtttcacttataacaaaaattcctgtatttaagtcccttctgagcacatgtagcttgtacagataccaacagataaaatattgtctaatgtgtctaatgtgtccattaagatggttataacaaccatgttgcaaatagatgaaatattttgttaatcagaataactatcactgaataaataaatttggttcctataatattarcttaaataagtattatttttgaattgactggatacctttttagaaatattatttttccctttcatactattatctatgaagaatatttgtccacatactactctaatacatc

SEQ ID NO: 812434 - DNA, 513 bp, Homo sapiens
ctgatagttaatagccaagcagtccttaccttgtcgggaaggcaggtggttgtggtacagccacagtcattggtggcrgttgaggccaagtacccaaggggacagctcactgtggagttgacacagttgcaggcacactcatactcatcacagcactgggtcttccgaagggtgggcaaacggtgcggggggcaggagggtggggacactcttttgcactcctccttcctgcaggctgaggataggacaaggccacactgagcactgcgcccagccagggctcgtaagtattcagctatgctatagggtgccagggagctttagactcagaagattaagtcagaaatgtgtgagggccaagctcacgggctgggagttattcaatgttaccaaaagcagtccatctgcagaaaaatatgaacattaatcaaaaagggaaatgtgaagctaggaactctaatggaggagaagtgaaggctgctcaatccctgctctatcactttcccacataca

SEQ ID NO: 812435 - DNA, 631 bp, Homo sapiens
aagatgtgtatcctttgtatagatgatatacaaagaggttaagtatttgcctyatcctttgtatagacgatatacaaagaggttaagtatttgcccaaaattacccagctagcaagtagcagagataagattcaaactaaggcagtctgactccagtgtctgaagactgcacctgctacctgacacctgacatcctggtcttgccctgaagaatgtcagctactcggaataatttcacccacccagtgtggtcaaaatgaagcttatcatcaccacctttaacagaggttaccttgaaggcagagggtggaattgggtggggaagaggctgtgtgataaagtaagacttgcattttttttttttttttactccttattggcattgtttaaatgttaacaataggcttccattacctttgaatttatagaagcacacacaataagaaaagatcttcccccgaaaaaggatcacagtttgtctccctgccagggaggtgaggaaacacaggccctttgaaggcaagtttcaaccaaggccacacagaccagggaagccaggattagaacccgagtcgtatcttggcagatgcatgtagcaccaaggccatgccagccctcgcccagccctccc

SEQ ID NO: 812436 - DNA, 547 bp, Homo sapiens
aatatgcataaacgtatgtggatgcatgagcatgtgtgtgtgaatatgcatgaatgcatgtacatatgtgtgtgtgtgtgtgtgtgtgtgtgtggacttgtgtgttgggctagaggaaatagtaggcaaagracacccaaccattctaggtgtacagctaagctgccctaatctgcaaactaatctatattttcctaatctttaatcctcaacaagaaacaagcaggatggtacttcagaatgtacattgatacgtattgatactggtatttattgatccagaagggaaactgttaaccaaggcaaagaaaagccagcatccacagcaggatgtctgtccaaccagactgtgcttatacccatgaaaagcctttgatgtcctttacatgccaaagagggccagagaaattctgcttaaaacgcatgggtggccaggcatgggggctcacgcctgtaatcccagcactttgggaggctgaggcgggtggatcacctgaggtcaggagttcgagatcagcctgccaacatggtgaaactcagtctctac

SEQ ID NO: 812437 - DNA, 655 bp, Homo sapiens
catgggaaagacccacccccatgattcaattacctcccaccaggtacctcccaccaggtccctcccacaacatgtgggaattgtgggagctataattyaagatgagatttgggtggggcatagccaaaccacatcaataacatagagaaggaattcagaatcctatcagaaaaacttaacaaagagaacaaaaatttaacaaaaataagtttgaaaaatcaagcagaaattctaaagctgaaaaattcagttgacttactgaagaatgcatcagagtctctcaacagcagaactgatcagttagaagaaggaagctcaaagacaggttgtttgaaaatatacaggcagaggagacaacagaaaaaagaatagaaaagaatgaagcatgcctacaagatggagaaaatagcctcaaaaggccaaatctaattgttttgaccttaaagaggaggtagagacagagactggggtagaaagtttattcaaagggataacaacagggaactctccaaacctagagaagaatatcactattcaagcacaagaaggttatagaacaccaagtagacttaactcaaataagactacatttaataattgaacttccaaaggtcaaggataaagaaaggatcctaaaagcagcaagaaaaaagaa

SEQ ID NO: 812438 - DNA, 655 bp, Homo sapiens
catgggaaagacccacccccatgattcaattacctcccaccaggtacctcccaccaggtccctcccacaacatgtgggaattgtgggagctataattcaagatgagatttgggtggggcatagccaaaccacatcaataacatagagaaggaattcagaatcctatcagaaaaacttaacaaagagaacaaaaatttaacaaaaataagtttgaaaaatcaagcagaaattctaaagctgaaaaattcagttgacttactgaagaatgcatcagagtctctcaacagcagaactgatcagttagaagaaggaagctcaaagacaggttgtttgaaaatatacaggcagaggagacaacagaaaaaagaatagaaaagaatgaagcatgcctacaagatggagaaaatagcctcaaaaggccaaatctaattgttttgaccttaaagaggaggtagagacagagactggggtagaaagtttattcaaagggataacaacagggaactctccaaacctagagaagaatatcamtattcaagcacaagaaggttatagaacaccaagtagacttaactcaaataagactacatttaataattgaacttccaaaggtcaaggataaagaaaggatcctaaaagcagcaagaaaaaagaa

SEQ ID NO: 812439 - DNA, 588 bp, Homo sapiens
cgcacctcttgggttctcagcctccctagtagctgggattagctaatttgtcagtttaattcttaaaccagctgcagaacctaagagagtagaaggaagttttcctckcctacactaggttgtatgttagttttctgttgccactggtaatgatttgggacacaacaataagccacaaatttagtggcttaaaacaacacaaatgtattatttcacagttctgtaggtcagaagtctgacatgtggcggtggctaacgcctcccaaatcccaacactttgggaggcagaggagggcagatcacctgaggtcaggattttgagaccagtctgaccaacatggagaaaccccgtttctactaaaaatacaaaattagctgggcctggtggtgcatgcctgtaatcccagctactcgggcgactgaggcaggagaatcgcttgaacccgggaggcggaggttgcggtgagccgagatcgtgccattgcactccagcctgggcaacaagagggaaactctgtctcaaaaaaaaaaaaaaaagaaaagaaagaaaaagaaaaagaaaaaaggccaggcgtggtggctcaggcc

SEQ ID NO: 812440 - DNA, 580 bp, Homo sapiens
gcaagaatctaggaaattaattcagttaactaatatttattggacattttctattttccagggattacgaaatatccctcttctacatttatcatttagacttcaatygtcttcactgaaaactgaggggcttagttttaaagttctttttttttcctttaaatatctaagagcctataaatccactcaatcttcattttctcccaactagaccttaaagtggcatgcagaattatagtgagacacaggtgggctgtgtatggtggttcacagccacagttggtggtggggagagtaaaggttatgatttccttttttctctacttcttcctatccatatttgcataaaaacatggtcacacattcttacttgattacttgtagaaagacacattccaaagatactaacacctttagggtaaaggacatctcttccttcacaatttattgcagaatgctaggtttacaggagaagcttgaggaatgcttaagcaatgttcagttgatatgaaaagttctattagcttaacttctagtctatttgcttcagttgctgccaaacatcgacagcctttcaaac

SEQ ID NO: 812441 - DNA, 589 bp, Homo sapiens
ttccttatttagagaagtttgcaggagggcttccatttccatacaycggattaaatgcttttccttctcacctgtttaggctaatggccttcagtgttatgcagagtaaagacattctgtagcctccattcagaagaaccattttgtttgaaaaagaaaagtctaattcaagcagagtcattaaatgaaaatgagaaactttagaaaaattaagaaaaaaaagttgagtattctctagggaacacagattgttttgctgtttagaccgagataagttcttcaatgcctgctctcaagctgatttagtctatgaaaatgattttcttatggatggaggctttcctataactttactttgctgttgatatatttcttttttatactaaatcttttttggtgggaactgtttagacctatgaccttagaacactggcctgacttggagaaaaatgaacttgaaaagaatcctgtgatatatggagcacacacctttacatataaaaattaaactactggcccataatcagtatagctcgcctcatgatagattattctcaggctaaatttataacaggcactcaacaaaagt

SEQ ID NO: 812442 - DNA, 600 bp, Homo sapiens
agtgttaacactccattatgttaataattaataataactgaaacattgggaaaacaaagcacaacaatactttcccatgtgttgagtgtcactttatggattargtatttttggttactggtatctgcatgcatagttatgtcatgtatcaccacatataagtgggtaaatgatcactgtcacaacatgctctacataaacaacaacactgaataaaaaagacctctgaggaacaggccaatttgaaactaggaattctagcaaatgatatacatgacatttgctcttcttccacatcgtattgcactgggttttatttttaccttcggactttttaatttcctcttcccataattacagatgagaaaataaaatacatcctgtaaattcacccacttcaccacaaagtttgaagactactaaaataccttataattggatcaaatgtattcaagctggatctaaaaccctctgtattacctgaccatataaccactacccttgtgtttgtgtgcaacaatagctcctacagtagattttttttagggtaaaaagtacacgcttgtagagttcaaaataactctttatccctgacctaac

SEQ ID NO: 812443 - DNA, 540 bp, Homo sapiens
caaaaattactagggaacattagttggatacgacctgctctaggcattcctacctatgccatgagtaatctattttctatccttagaggagatcctagtctcactagtccttgacaattaacaaaagagsctgaggcagagttacagctgcttgaaaagcaagtccataaggctcaaataaatagaacagatccagagaagactctagatttgctaattttttcaactcatcattcacccactggtgttattgtccaagagcaggacttagtagaatggctttttcttccacatgctaattcatggactctaactccttatttggatcaaatcactactatgataggaaatgggagaactcagattgttaaattacatggatatgatcctggataaattatagtccctctcataaagacacaaatacagcaagcttttataaacagtcttacttgacaaacccatttagctgactgtgtgggtattctagataatcattttcctaaaatgaaactgtttcaatttttgaaattaactaat

SEQ ID NO: 812444 - DNA, 604 bp, Homo sapiens
agaagtgggtgagttagtatctggcgatgaatgaaggaaaccgtgacagaagctcagacctctgagacagcactcagcacagcctctgcccgcatggtttagcaagtgctagaagcagggccaaggccagtgtggcttagcattctgctccctggggaaatcaggccaagagacatcgcagcgctcagcgtttgggtgaaacatggagatctttccactaatgttgatggagggacagcctcttacatgtcttctccatgactacccattgtttttctgggtggaaaaataggagagggaagcttgggttgataacctggacactagcacaagtggccacctgcatggcaaccaagtagttaacacatttctgagggcagctttgggaaagtaacgggtgctagcaatgccacctctcctttctctgccaaatatgagagtaaattaattgtccagtttgcacatttttagagagtgttatgatagaaaccagtccatccatttttctaccattgggcgtatatttggcctcacctggcagtgcctgaagaaaaaawttgatttcttggtttgtgaaaatcattctttacataccttttgaaaa

SEQ ID NO: 812445 - DNA, 570 bp, Homo sapiens
gcatagtttagaaaataaaatccttcctttgtattcaaatttacaacgcttagtgcactgaagaataaccatttcttyacatgtctgtctctcttgtctgtacacagaaggcaagttctgtattttgtattcccagcaccaagcacggtgctgagcagcccaaagtgcttaataaacgtgtgttgaattcagtgtttctctacgtaaataaagcacggacttggagcaggttaatgccaaggagtatgtgtatttagcaccatttaaaatctcagaagggccattctcagcttttcttgtcaggaagaaccaagggaacattctaccaggtagctgcatacctgctcagagacagagctgctgtattttttagacattctctttctcatcgtctctttcactgatttcacctttttcccaagagagatgcgagaggcagtaggtgatttgatgacttctttgtacacaaagtctccttctttaccctgtaaaacaaaatgttgcaagtattgttggtcgcagaaaatgaagaacaggttttattatttaaaccattaacatcctagctct

SEQ ID NO: 812446 - DNA, 660 bp, Homo sapiens
ggagcccctttcttcctgttggccttgcagtgtgcccttcagtgtgccctgcagggcagcgtgccactgccctgttctgtctgsgatctgtatgtgatgaactgcttctgtttcttcatgggctctgtgcaactgctcttctgtgtctcccctgacttctctcctgctcagggctctcctagagagcggccatcttggtgggaataaactgcacacaggtcagacagaagccacaaggggacctaccagtatcaacaggtgttctgtgagagggacccctggccgtgggtcacacatttaagcattaggttgtctgccagaataaagaggtactccacgaaaggctcactgtaaacatccatgatgaagttccctggagcgcttcaagggcagggctaaagtttgtggccactctcctgagagagaccacaagaccaaattagagtaaaacacaacacctactgaccagggtgtcaacggtgaaggggtcaaaaacaccgctaaagaatagcctaaggctgagagtcctgaaggaagaaacacacttcaaaggggggccgatttgtgtcccccagaatacatgcactgaagtcctactgagaaggtgaccttatttggaagtgaagccatcacggatataattaattaagttaggataag

SEQ ID NO: 812447 - DNA, 640 bp, Homo sapiens
gagctctctgactccagaaatttaatttttagccttttctaagggtttaatttaaaagctgctccccaaacaattctattgtttttatgtttatgttaaaactcatggggaaaagtctgcataccctctaaactgataacaatggatatattttgggttttgggggatgggaacctagattgtgtgtgcacgtggggattagttgggtgggctatcaaagataccttttaactttatctataatcttttcatttctgacaaggagaagatattctatgttgcatgtatatttaaaatttttttaaaaagaaaaaaaagatggctataaaacaacatggatgaacctggaggacgttattctaagtaaaaaaagccacacacagaaagagataatggatgatctcacttaaatctggaaatttaaaaagtcaaacacacagaaacagagagtagaatagtggttgctatgggctaggggtggggaaaatagggagatattgatcaaagggtacaaattttcaactagaagatgaacaagatctggggatctaatgtggagcatgggttgtgatggatctgtgaattagtttgattatgataatctttacacaacacatmtatcaagtcatcacattatata

SEQ ID NO: 812448 - DNA, 635 bp, Homo sapiens
aaagttaaagatagcaagagagaaaagactcatcacattacaaggatcctcaaaaagattaacagctaattttcaccaaaaatcacaggggccaaaargaagtggtaaaacataatcaaagtgatgaacaaaaaagactgtcaagaatttctctacccaacaaaactacatttcaaaaatacagaggaaattaagatactgccagataaacaaaaactttgatattatacctactgtacaataaacacaaacacgacaccttcaggttgaaatgaaagaacactagatagtaatgcaaatccacatgaagaaagataaataattgagcaatgacacatatagactcaaaataaagggatgaggaaaagctaccaaacaaatggaaaacagaaaaaagcagaatttgcaatcctactatctggcaaaacagactttaaaccaacaaagaacaacaacaaaaaccaagaaagacattacataatggtaaagggttcaattcagcaagaatgtctaactatcttaaatatcttaatatatatgcaaccaacacaggagcactcagattcataaagcaagttcttagagaccttcaaagagacttagactcccacacaataacagtgggagactctaac

SEQ ID NO: 812449 - DNA, 621 bp, Homo sapiens
catccttcccaggtcatgggctcacaggggattgtatcactttggcttagtttatatcatgccatagttaacacactgtatagaacagacaagtcaagattttgacaaacacttgccattgatgtgaggcattttttagaatatagttaatctcatttttcttgacgggttcatcagtcattgtagtaaagagtctgaagagtgggatggactttcctaaaccaaatgcacattgtcagaatttaaagcactttgtagaacagactaaatccttcctttggcagtggacagttctttggcagtgaacagtttaaccaccattcccttgatgaattatttctattgattggtgtagttcttagcacacacgtcatcagaaatggaaatggttgattagaagatctccaaacctatttatttagatgcggtgaatgtgtaggcagcccatcctgtttagcctgctctcagcattcatggatgtgttccygtttaacatctgaggcagtgggattagttgggggtgatggatcttcatctatttagatgtcaatttttgttaaaatttaagctacttgactcatgtttttgagtatgagtataaaattaactttataattttat

SEQ ID NO: 812450 - DNA, 573 bp, Homo sapiens
atcttttcaaaggcctcttatgcacatctcactccttagcttttccttygaattttttggtgagctttctctcccccaacttgtattgccatctcaggcaggtgttgtgacaaatagttttcaacaagtactccgaagaaaagactatttctactgggagagctctgatttaggtcaaataaagacatgccctttgaatggtggtttcctgagaactaccagacagtttgaataatgacaatactctaagaatgttgctttaggggaactacaaacccatgctgcctcttccaggggctaccaggctgctgattttcagcatgatctgtgggctgctggttttcaaggatatctcagagctggggagggggtcatgaaagtgaagcaagttaagatgccacacagtcagtgttcttcccaagactgagatattttacttgaataaatgctacttagattattgcaagcctttagttaattgcatatttttgaaaggatgatttgccaattgtcagcattgttattgcttttttggaggagtatcttaattatgggggtcctgactctactatt

SEQ ID NO: 812451 - DNA, 551 bp, Homo sapiens
ctccacacctaccagtggggggtctctattcttactgccgactgtgtgctgtccaaatctgccaaggccaaaggctatttttgttgtaaacacatgtattgttatttaaaatatagatgaagtatgagttttgttttttaaagaatgattattgctttgaatgctaagttgatgacttggggaaaaagggaataatgcggtcaccaaaacaaacactgcttaagcacgtgttggccatgcaggtataaaggtgtgggggctggcattctgttcgttggtatctttaagtactccctccaccgtgaagtgcagaaattagaattcacagaagaagctgtgctttctgcctaaaagcagacatgatttccaaggagaccccagagattttccactttccccaagtggaaccctgtccacattaaacggctcccaccccccacccctcagtacctggcaaccaccattctactttctgtctctaygaatttgaccactctaagtatttcataaaagtagaatcatacagaatttgtctttctgactggcttatt

SEQ ID NO: 812452 - DNA, 624 bp, Homo sapiens
tctaatatgcttgcaacccaatagtaggatgtattcagctatttggagattgcaaaatgttcgcgtttcttatgttatgccwtgtgatttaactttacaaataattcagcaggcctagtaagtgcggttgaatgtccaaatatgtgtaatctgtcctccattttctggtatagccttttctttaaaaaaaaaaatcaaatcactcaagctaacatgccattcaaaagcagaaattatagcatcctccaaggaaacttcaggggcaatttacattgtcaaggctattttcattctcaatttgaattcacaatgaatcttccacacctgctttggtattgccttttgcagctcctgatctctcaactcacttatcccaaatttatgaaacatctctttcccttttcactcactaaaagcacacctaccacaaggactttaagtataaaacattttactggttacttgggtaaatggaaatgaggcaagacagttttgtaaattgattatgacactacgagaaatgctactgaaaaccacgagtcaggatgtactattcctagaaatgtacccctcattccactagccatgtttcttctcaaccctatccctcaccatactttatct

SEQ ID NO: 812453 - DNA, 592 bp, Homo sapiens
cagaaaggtggttttcctctatgtattattcactcttmttcttcctcaggcatctcctatactctttcagtctctgtattcagatggaagatgtgggaaaaggttacaacaacttcctaaacatcttaagcaaaaagtaatgcatatgatttcggctcacagtctatggcaaaggctaattaaaggattccacctagattacagggaatctgaaaattgcagttcctccttaagaagctgcttcccagagaaaacaccttgctaatggaaatttggtagacagtcataatcatttttgccacagatctccacaatgggccagcactgctcggctgaaagagtcagaacagctttacacaagtggtagcacatgaacagacttgaataataaataggcattttccagtaggataagcaagaggatgtcccagtttaagtaaacaacatgtgcgatggcctgcagatgaaatagaggaggtgtaaacaggaaaataagcaatttctatcttgcttctgcactaactgtgtaatagtgagcagtgaaagatgggactagaggagcaaatgagaagctgaagatgaagagcttaaa

SEQ ID NO: 812454 - DNA, 639 bp, Homo sapiens
agaaatatcttacattggaaattgtcggctcaatgtattttagcatatttcacscagctaaacatgtatgttttcactgcatgttaaaaataacaaagcatgtaaatgcaaactacaattatttacatattctaaaatttgtggatagaatatacaattacttggttacatgtttttctcacttattctcattactgtactctatgtttactcttaacataacacaatgcagagtatatttttagtcagctcatactccaaaaatgtgtgtaacaaactacccccaaactagtggtttaaaactacaagcatattattcttgcagtcttgtttgtacatcatgtgtgatttcattgatctagggtgggttaaattaaatggctctacatttaagatcatctaggagtggggagaatgccatgcagtaaggggctccaggggtccatctctccacagaaacacacacatgcacacacacacacacacacacacacacacacacccaaccaaccaatcaaacaaaattcctccaaaactattagaatcaactttgtcagaattgtggaaaatagtcaaagattcacagcaaacatagtaaatggtggctcaagaaatggcgacttgacaaagtaggaaaac

SEQ ID NO: 812455 - DNA, 583 bp, Homo sapiens
ttttcaatactgtagctttgtaatatgttttgaaagcaggaaatataatgtctctacatttgttctttcttaaaatcactttggctattctagtctttttcttttctggttccatgtaaatttctgtatagctttcttctatattttaaataaatgtcattgggattttgatgggaatagcatttaatatattgctcactttgggttgtatcaaaattacaatgggatacacttcacacctgtttggatagctgttattaaaaaggacaacaggctgggcccagtggctcatgccagtaatcccagcactttgggaagctgaggagggtggatcacttgaggccaggagttagagaccagtctggccaaaatggtgaaaccccgtctctgctaaaaatacaaaaaaaattaaccaggcatggtggcacacacctgtaatcccagctactcaggtggctgaggcatgagaatcrcttgaacctgggaggtggaggttgcagtgagttgaaatcgcaccattgcactccaacctggatgacagagtgagactgtaaaaaaaaaaaaaaaagaaaagaaaagaaaa

SEQ ID NO: 812456 - DNA, 604 bp, Homo sapiens
cttggaaggctgaggcaggaggatcgcttgagaccaggagtttgagaccagcctggacaacatggcaaaaccacatctctgcaaaacaatacaaaaattaaccaagtatggtggctcgtgcctgtagtcccagctacttgggaggattgacttgagcccaagaggttgaggctgcagttatccatgattgcaccactgtgctccagcttaggcaacagaaccctgtctcaaaaaaggcaaaacaaccaccaccaccacaacaaaagtgaagtcatgacaccatttaggggacatgtagatataaagaattattgtttcctccaggtactcagtcaagtaattctactagggaatcaagtatgagaattgaaggtttaatcagagttgcagccaggaggactggatcaagtgcctttcaatcctgagaaagggccaggcgtggtggctcacatctgtaatcctagcactttgggacaccaaggcaggaagatcgcatgaagccaggaattctagaccagtctgggaaacataaygagacccctgtcactacaaaatttttaaaaaaaaatttagcagagcatggcaccacataccctgtagtcct

SEQ ID NO: 812457 - DNA, 626 bp, Homo sapiens
acttggcttacagggcacatactctgcctattgtagactggtctgacgaacatgaagattytagtagagaaatagaataatgtggatcccaaacccatgaaggcagttatgcatgcatttctttagttttaggcatgataatgacctcaggagataatctgattcattcaggaacagaacaaaccagccaacctcagaacaactggaaaaaggcagtagccactattcttttttttttttttttttttttttgagacggagtttcactctcattgcccaggctgcagtgcaatggcgcgatctcggctctccgcaacctctgcctccctgaggcagaggtaggcggattgcttgagcccaggagttcaagaccagcctgagcaacatagtgaaatgccatctttaccaaaacaaaacaaaaaacaaaaaacatatatatatatatatatatataaacacaaaaattagctgggtgtggtgttgcacacctgtggtcccagctactcaggaggctgagatgggaggattgtttgagactgggaggttgaggctgcaggctcaagcaagatgaggtgagccataatcacaccactgcactccagcctgggctacagagcaaaactctt

SEQ ID NO: 812458 - DNA, 553 bp, Homo sapiens
tgtcacaaaaagtgattttccaataaccaaagagcatttgaaaattgctcaatttcattaatcatcaaagaaaactcaaatgttatataactacatcccactataatggctaaaatgaaaaatacctgaaaattccaagtgtcagtgaggatgtggagcaaatagatttctcaggcttgagggagtataactaatactgagaggtgaaaccagctggacatcctgggtgagtagggatttggagaacttttctgtcttacaagaggattgtaaaatgcaccaatcagcactctgtagctaggattgtaaaacgcaccaatcggcgctctgtagctaggattgtaaaacgcaccaatcagcgctctgtagctagctagaggtttgtaaaatgaaccaatcagcaggacatgggtggggacaaataaggaaataaaagctggccaccmcccgccagcagtggcaacctgcttgggtccccttccgatgctgtggaaacttcgttctttcgctcttcacaataaatcttgctgctgctcactctttgggtccatgc

SEQ ID NO: 812459 - DNA, 514 bp, Homo sapiens
cttttccaatttggatcccttttatttctttctcyttcctgattgctctggttaggagtccagcactatgttgaataggagtggtgagagtggacatccttttcttgttccagtttttaggggaaatgttttcaactttcccccattcagtatgatgatgtttgtgggtttgtcatatatagctcttattattttgaggtacattcctttgacgtttcattggtcgagggtttttattatgaaaagatgttgaattttatcaaatgctttttcagcatcagttgaaatgattgttttttgctctgcattttgttgatatggtgcctcatattaattgactagcatatgttgaaccatccttgcatccctggaataaagcccacttaactgtgatgaataatctttttgatgtgcttttggattcagtttgctgatattttgttgaggactttggcatctatgttcatcagaacagccctcattcaactcttcagctacgtaacttctactagtg

SEQ ID NO: 812460 - DNA, 653 bp, Homo sapiens
ttcacctcagatggaaggatgttatgttgctcctaagtcagaccctcactgcagctgaaaagcaggcagctctgatttcagagattagcaacatatctcctataatacaccaaaagggaagaaagcagataaggaaagagaagaaatagcagaaatgccattcccaattgggaggaaagcagtttcccttgacaaccctaattgggaccccaataactcaggagatgaaaaggaagctcttttttaagtgtgcattagagggcctacggaaaaccagggccaaacctctcaattactctaaactgtccatgataaacagccagatgagaatcttgtagcctttatggaaaggctgagagaggcactaacagaacacccctccttatcccctgattcagtcgagggacagctcatcctaaaggacaagtttattagacaggcagctgccaatattaaaaggaaactacacaagcaagctataggaccagatagcaccttagagaacttcctgaaagtggccactttggtcttttgtaataggaaccaggaggaggcccaaaagaaagagacaatggtcagaaggacagagactctagcagcagctttgcaggcttscaaagtccaggatcccggaggtgcatctgctagttgct

SEQ ID NO: 812461 - DNA, 472 bp, Homo sapiens
aatttcagaaggaatggtatcagctcctctttgtacgtctggtagaattcagctgtgaatccatctggtcctggactttttttggttggtagactattaattattgcctcaatttcagagcctgttattggtctatttagagattcaacttcttcttttttttttttttttttgtgagacagagtcttgctctgtcatccaggctggaagcatgatctccgctcactgcaacctctgcactctgggttcaagcaattctcttgcctcaacttcctgaatagctgggattacatgtgtgtgcaaccatgcctgactaatttttgtatttctagtagagacggggtttcaccgtgttggccaggctggtctcgaactcctgatcttaagtgaaccactcaccacggcctcccaaagtgctgggattagaggcacaagccactgcrtcctgcccagatctcatctttaaggatcc

SEQ ID NO: 812462 - DNA, 438 bp, Homo sapiens
atgaagcccctcatgtttggccaggctctgtgtagggaccatgctgaaaactgacyatgagttggtcaagaaaggatcatttctgtcactgtatagatgagggaagtaaaacagagagggcaagtaaactgccaaaggacacacagcaggtaggagatagagcaggtctgtgtcttgctctaggggccaggactggtcaggaaggaggaagcggtccttttgaggagggcgaggcaacggaccctgccgcccaccaggactggtgtccctcaccttacccccacccttgccctcctcaggtggcctgtggagaggagaaacacagggcaccaactatgaagactctcagggcgcgatttaagaagacagaggtgagtgtgaggccctagatgcccgatacacccctgcaacttcagccttctgtctcctggggcttgg

SEQ ID NO: 812463 - DNA, 438 bp, Homo sapiens
atgaagcccctcatgtttggccaggctctgtgtagggaccatgctgaaaactgaccatgagttggtcaagaaaggatcatttctgtcactgtatagatgagggaagtaaaacagagagggcaagtaamctgccaaaggacacacagcaggtaggagatagagcaggtctgtgtcttgctctaggggccaggactggtcaggaaggaggaagcggtccttttgaggagggcgaggcaacggaccctgccgcccaccaggactggtgtccctcaccttacccccacccttgccctcctcaggtggcctgtggagaggagaaacacagggcaccaactatgaagactctcagggcgcgatttaagaagacagaggtgagtgtgaggccctagatgcccgatacacccctgcaacttcagccttctgtctcctggggcttgg

SEQ ID NO: 812464 - DNA, 438 bp, Homo sapiens
atgaagcccctcatgtttggccaggctctgtgtagggaccatgctgaaaactgaccatgagttggtcaagaaaggatcatttctgtcactgtatagatgagggaagtaaaacagagagggcaagtaaactgccaaaggacacacagcaggtaggagatagagcaggtctgtgtcttgctctaggggccaggactggtcaggaaggaggaagcggtccttttgaggagggcgaggcaacggaccctgccgcccaccaggactggtgtccctcaccttacccccacccttgccctcctcaggtggcctgkggagaggagaaacacagggcaccaactatgaagactctcagggcgcgatttaagaagacagaggtgagtgtgaggccctagatgcccgatacacccctgcaacttcagccttctgtctcctggggcttgg

SEQ ID NO: 812465 - DNA, 609 bp, Homo sapiens
ctgctcttccttttctccttctctccttccctcttccstccctccctctctgtctctcttctgccctctcgctgcctatgtggaattggctgcctgccacgcctgtcttctcttgtctgctctgggattggatggctcagcgagctggagccgcctgcccccgagagccccatggctttgctggctgacccagctccagctgctgagtaaggggtggcctggggtgggaggtcggtcgggggggcggactcgggtgtccccagggagagttaggggactgggagccctcgtcaacgggttcctgatgagcagcagaggcagggacttggaggaaagggaaacttggtgtctgccgatgcgggggcacgggccagggttctattcccattggaggccactgctggatggatgcgaggttcctcgaggctctgtgaggggtctggatatgtggttctggggttctgtccttagggcttgttctcgcactcaatcgctctgggcctttgcccctccccaccaagttccttcccatctcactctgctccatgcctccagcccaggtcctgaggacatcggccctcccattccggaagccgatgagttgctgaa

SEQ ID NO: 812466 - DNA, 559 bp, Homo sapiens
ggagggtaagctatttttaggatgactgctatttaaagtaacatactggcctggcaaggtggctctggcctgtaatcccagtgccttgggagatacaggcaggagaatcacgtgaggccatgagttcaatactatcctgggcaacaaaaggagacccccatctctattaaacagccgggcgtggtggtgcgcgtctgtcgtcccaactactggagaggcaggctgaggcgggagggtcccttgagcccaggagttcaagattatagtgagctatgatcacagcactgccctccaggctgggcagtgagaccctgtctcaaaacaataaattaagtaacctagactatgtatgtgaaaataatatttccaaccctagcatgctgacttcatctgagcttacagatgcattttcatacagtcctccccaagggatcarttcctgtgagagccaaggatggcaccactcattgaaatcctgaccatgggaaggcgtcatttgggattccggaatgggtggctgaagcagtttacagaatcgcgttctggtgagctttaagaa

SEQ ID NO: 812467 - DNA, 559 bp, Homo sapiens
ggagggtaagctatttttaggatgactgctatttaaagtaacatactggcctggcaaggtggctctggcctgtaatcccagtgccttgggagatacaggcaggagaatcacgtgaggccatgagttcaatactatcctgggcaacaaaaggagacccccatctctattaaacagccgggcgtggtggtgcgcgtctgtcgtcccaactactggagaggcaggctgaggcgggagggtcccttgagcccaggagttcaagattatagtgagctatgatcacagcactgccctccaggctgggcagtgagaccctgtctcaaaacaataaattaagtaacctagactatgtatgtgaaaataatatttccaaccctagcatgctgacttcatctgagcttacagatgcattttcatacagtcctccccaagggatcagttcctgtgagagccaaggatggcaccastcattgaaatcctgaccatgggaaggcgtcatttgggattccggaatgggtggctgaagcagtttacagaatcgcgttctggtgagctttaagaa

SEQ ID NO: 812468 - DNA, 635 bp, Homo sapiens
cactcacgttgatctagtatcacaagtggaaaacagtattacttgccataaacagaaggcaattataactataggtttttttaaaaaaacaaacaattttctcatattctacctaaatcctattcccattgaaagctctgatcctgaagtgtatcttcctcttgggacttccagagagttcaaagcatgtcagcactaaactaagagtcaacctgatatactcagaataattggaagtgaatccaaaaagggaggtgattcaatgtttttaaaatgatttttcagatagctcttaaaaccatttcatgttccacaagagatattgcttatggttcaagtgaataggttgtgaagcaagaattaaatttaaataccaaccctctcagtgagcagctgagtgactttgaggaagtgaatgtgcctctctgagcatgaagtttttcttatttaaaatgggctacaaaaaagtgccagcttcacacaaaaacatgtatgcaaatgtacatagcagctttactcaaaataaccaaaacctggagacawcccaggttttgaaaggcctagagatgcctttcagtaggtaaatggttaaacaaaaactgaggtacacccacaacatggaatactgttctgca

SEQ ID NO: 812469 - DNA, 634 bp, Homo sapiens
tatagtcccagctacttaggaagctgaggcaggagrggtcaaggccacagtgagccataatcgtgccactgaattccagcccgggcgacagaggccttgtcttgaaagaacaaaacaagaatccttatcttttacagacatataccaagacattcagggaggaaattatatgatatgtgggatttgctataaaataacgagaggaagaggagaagcatgcaggagtgtacatgaaacaagattggccacgagatgacaaatatctgaatccgctgatgagtaggtgaaagctcactacgctagcctcttgtttaaaatgctccagaatagaaagtgtgtctgaaaatccacttcatgggtttgtagcaagcattgaataagatcatgtatacagagtgctttataaccatggcttacaggtagtcagtacacattgtttttagttttgtatactccccgtccattaatcacatccaaaaaaggtatgttattcacactaagagctctggcccatggacctttgtccacttggtggtaatttattgaaatttggggtttagaatgaggaaatgccagccttcagagccccaggcttactatgcaacagcaaagccaacagtcccaaatgccttcc

SEQ ID NO: 812470 - DNA, 491 bp, Homo sapiens
ctaggccctgatcaaacagctccaccttcctgagccacttgttccacaatctccccgtgagcccattcaaaggacttgcttcctgcgggtaccaccatcactcaatctcttccacatcaacaccatttacgcctggaacctgttgtgctgttttacagcttctaaataaaaagggtgattaatgcactgggtggctgaattggacaaatgtcactcaatcaagtttttttctttacccttggctgtttttggagaccagccaggccaggagcaggttgacgtgttcaaaaggaactgatgagtcatatccaacttttggacataagctcagccactgtccctcttgagtaatttcacggatgtgcaaggtggttgaaggaaaggagcatcgaagtagaaggcaggagcctgkctgcatcctcctcctgaacacacttcctgcacaaccctggctcacgtttcatggcagtgttgcattacctacagttttg

SEQ ID NO: 812471 - DNA, 544 bp, Homo sapiens
aaacagtgagtccagtctctatcctcccatccctccgtctccacaccaacacttccaaaatactcgctcttcactatgtgtgccagattaggagttagagtgggagggctggtccacaaggtcagtacctatccacgtcatttcactgactagtgctttaatgcccctcctgtaaaacaggatgacacctgatcatttcaccaggttgaaggtactatcacatggcatatgggcacaaaagcaattggaaaactccagttcaaagaatcagggcctacggaacgtgctaggtcatcaaaccttttcatttagaaagaatacttgtggcagattcagagctgggcgccacccccaccaactcggccgctcctcacttcctggacacttcactcttcgtgaagatggctttcttamagcaaaaagcacttcacacacattaggatggctattctcaaaataaataaataaatagataataataaaagaataagaaaacaagtcttggcaagaaaatggaaactttgtgcaccattggtggggatgt

SEQ ID NO: 812472 - DNA, 625 bp, Homo sapiens
taaaagtgtcctctcagctgggcgcagtggctcacgcctgtaatcccagcactttgggaggacgaagagggtggatcacttgaggtcaggagttcgagaccagcctggccaacatgatgaaaccctgtctctactaaaaatatgaaaattagccagacatggtggtgcatgtctgtagtcccagctacttgggaggctgaggcaggagaatcgcttaaacccgggaggcggaggttgcagtgagccgagatcgcaccattgcactccaacctgggcgacagcgtgagcctccatgtcaaaacaaaaatgaaaacaaaaacaaacaaacaaaaaaaccagtctcttctctagggtcccagaaacctgctaaccactaaccaccgaatccagggtgctggttctagccttcttagttttgttctctgcagtttcttttcccaaaatccccttttcccatggcttttgccattgtgtgccaggcacgaggtctctgcccactgactatgctcycttcccgccccctacctataggatgcatcccaggctccagtcctgagctgtccccaggtctcctttcttcagtaccttgctccctctcatacccaatcctgccaacgaagtggtt

SEQ ID NO: 812473 - DNA, 625 bp, Homo sapiens
taaaagtgtcctctcagctgggcgcagtggctcacgcctgtaatcccagcactttgggaggacgaagagggtggatcacttgaggtcaggagttcgagaccagcctggccaacatgatgaaaccctgtctctactaaaaatatgaaaattagccagacatggtggtgcatgtctgtagtcccagctacttgggaggctgaggcaggagaatcgcttaaacccgggaggcggaggttgcagtgagccgagatcgcaccattgcactccaacctgggcgacagcgtgagcctccatgtcaaaacaaaaatgaaaacaaaaacaaacaaacaaaaaaaccagtctcttctctagggtcccagaaacctgctaaccactaaccaccgaatccagggtgctggttctagccttcttagttttgttctctgcagtttcttttcccaaaatccccttttcccatggcttttgccattgtgtgccaggcacgaggtctctgcccactgactatgctcccttcccgccccctacctataggatgcatcccaggctccagtcctgagctgtccccaggtctcctttcttcagtaccttgcyccctctcatacccaatcctgccaacgaagtggtt

SEQ ID NO: 812474 - DNA, 492 bp, Homo sapiens
tgcattcggtatttgtcctaatgctctccctccycttgccccccacccccccacaggccccagtgtgtgatgttcccctccccgtgtccatgtgttctcattgttaaactcctacttatgagtgagaacacgcagcatttggttttctgttcctgtgttagtttgctgagaatgatggcttccagcttcatccatgtcccgcaaaggacatgaactcattctttttcatggctgccatccccatcattgtacttatgattgagcaagatcccatagaaaggtgctacaggctgaatgtttgtgtctctcccaaaattcatacattgaaaccttaatccccaatgcgatggtgtttggagatagggcctttgggagataatcaggtcatgaagtccccatgatgggatcagtacccctataagaagaaatatgagagagcttcctctcgctcccccactccctcacccccaaccctgaccttgtgagtcaaga

SEQ ID NO: 812475 - DNA, 262 bp, Homo sapiens
cttgagagaccacgtggagaaagagaagcccttaaatgatatgaaaaaagagagaaaggcctagtgtcctagtggcccagcggagcccagttccccaaccaattctctagcagaatgaagccttatgagtaaccactgaccagatgagcagaacaaccacccagccaggcctagmccaaaccccagaatcatggacaaatacaacagttgctgttttaagccaccatgttttgggatggtttgttactcagtaacagataac

SEQ ID NO: 812476 - DNA, 613 bp, Homo sapiens
tgttctctgtatttcctgaatttgaatgttggcctgccttgcttggttagggaagttctcctgtataatatcctggagagtgttttctaacttggttccattctccccatcactttccagtacatcaaactgtggtcttttcacaaagtctcatatttcttggaggctttgttcatttcttttcactcttttttctctaatcttgtcttctcactttatttcattaatttatgttcaatcactgatatcctttcttccacttgatcaaattggctattgaagcttgtgcatgcatcacaaagttctcatgccatggttttcagctccatcgggtcatttaggttcttctctatactgtttattctagttagccattcgtctaaccttttttcaaggtttttagcttccttgcgatgggttagaacatgctcctttagctcagaggagtttgttattaccaaccttctgaagcctacttctgtcractcgtcaaactcattctcagtccagttttgttccctttctggcaaggagctgtgactctttggagaagaggtgctctgttttttggaattttcagcttttctgctctggtttctccccatctttgtgg

SEQ ID NO: 812477 - DNA, 666 bp, Homo sapiens
agagcaggtggtacaggaaaaatctttcctgtttttcccagaattggcaataagcatcgcaacttagaaaaaaaggttgctacrgacaaccttagtttggagaccagcccctgtgagctagtggtgctggggcctgtttccccatcctatggacagaccgctggtgggtacatgtcagaagtttatgggtacccgctaaaataatggcaatacagtaagcaacttccaaaccaacagaggaaaataagggcataagaaaaattttatcattcagttggaagatactaaggagagagaacaacataagcaaagaaaaatactggtaaataggaaacatgggtaacagtaagtgtaaatattagtaaccacataatagaaatagattatgctccactgttttaaaaaacagatattctcaaattagacttactttagcttacttagatatactttaccagcctatctaaaatatgaaaatacaaaataatggaaaataaagaggtcagaaaagacatatcaggaaaacaccaggaaaacaaaacttccatagcaattttagtttctggcaaaacaggaattaaaacaaagtattattaggaattaagaaaaaacaacaattaaccttgaagattcagcaatcctgaacatgtacatacataacaaaaa

SEQ ID NO: 812478 - DNA, 620 bp, Homo sapiens
ctgataatgaagctcactaagcgtaggccttggagtcagacagactcagcaccrggaccttgggcaagtggcttcgtgtctctgagcctcaagttctctgtccttaaaataaggataaaaatacctccttcagaaggtagttgtgagaatttaaaagtttctcctttaggaaccagcttagaataaggactcagtaaatattggccaccctttctgcctgactccccccctatttataaagtttggaaaagaaagtgccttatatgttgcgaaaaatgatgccacaaagcaagtcaatggtggggagagaacaatagctcccggaaggaatggtgctagtaatggaccaccgcacccataatattctgcaagtgctcccctaccccattcttgcattacaaaaaaaatttaattccatttattggtcaacttttcccatgaggacacatccttaatttaatcatgtaaatcaatgagaaaatctaattcactttagagaaatttgcttcaaggctagccttatgggaatgaatctgttccttaaagtgtatccatagcaagtgacgtgtgtctttatcacagttacaaagggatataaattaatctctagcccattttag

SEQ ID NO: 812479 - DNA, 620 bp, Homo sapiens
ctgataatgaagctcactaagcgtaggccttggagtcagacagactcagcaccgggaccttgggcaagtggcttcstgtctctgagcctcaagttctctgtccttaaaataaggataaaaatacctccttcagaaggtagttgtgagaatttaaaagtttctcctttaggaaccagcttagaataaggactcagtaaatattggccaccctttctgcctgactccccccctatttataaagtttggaaaagaaagtgccttatatgttgcgaaaaatgatgccacaaagcaagtcaatggtggggagagaacaatagctcccggaaggaatggtgctagtaatggaccaccgcacccataatattctgcaagtgctcccctaccccattcttgcattacaaaaaaaatttaattccatttattggtcaacttttcccatgaggacacatccttaatttaatcatgtaaatcaatgagaaaatctaattcactttagagaaatttgcttcaaggctagccttatgggaatgaatctgttccttaaagtgtatccatagcaagtgacgtgtgtctttatcacagttacaaagggatataaattaatctctagcccattttag

SEQ ID NO: 812480 - DNA, 667 bp, Homo sapiens
tctcctaatgctatccctacactagcctcccaccgacagcaggccctggtgtgtgatgttccctccctgtgtcaatgtgttctcattgttcaactcccacttataagtgagaacatgcagtgtttggttttctgttcttgtgttagtttgctgagaatgatggtttccagcttcatccatgtccctgcaaagggcatgaactcatccttttttatggctgcatagtattccatggtgtatatgtgccacattttctttatccagtctatctctgatgggcattttggttggttccaagtctttgctgttgtgaacagtgctgaaatcatcatcactggtcattagagaaatgcaaatcaaaactacaatgagataccatctcacaccagttaggatgttgatcattaaaaagtcaggaaacaacagatgctggagaggatgtggagaaataggaacgcttttacactgttggtgggagtgtaaattagttcaactattgtggaagacagtgtggcaattcctcaaggacctagaaccagaaataccatttggcccagcaatcccatcactgggtatatacccaaaggattataaatcattctactaaaawgacccagcctcatttcttaagccccacacccacctctactccagcctcttgaccatt

SEQ ID NO: 812481 - DNA, 424 bp, Homo sapiens
tttgggttctctattctgttccattggtctatgtgcctgttttataccagtaccatgatgttttgatgactatggcctatggtatagtttgaagtcaagcaatgtgtctccagatttgttctttttgcttagcttgctttgactatttgggctccttttttggttccagtatttagccatggttcctaaaattccatgactttggggattgtttttttctagttctgtgaagaattatgatggtagtttgttgggcattgcattgaatttgtaggttgcttttggtagtatggtcattttcacaatwttgattctacccatccatgagcatgggatgtgtttctatttatttgtgctgcctgtgatttctttcagcagtgttttgtagtttttcttgtaggagtgtttcacctccttggttagg

SEQ ID NO: 812482 - DNA, 565 bp, Homo sapiens
tcccttagaggcttctgttctgcacttatccccacccctctcctacatacacaatatatctctctctctactggatctttctcattgggcatgatattatttttaagtgaggagatgataatataactcgttttctacaaatatcatcccatttttcttctctccatagaaaaacattttgaaaaagtctactcaacttctatttacttataaactcacctcagtatggcctctccctcctctgtgcactaaaactgttcttgtcaaggtcaccaataatctccacattacccaatacatgacccatgtgtctggctaaggaccatgtctatgcactcaattactacacttttcaaatatattcaacacatctctgatcactctctactttatgaaatcctgttattacatcatattccccttttctcctcactcttgtcctcctctaggcttttttctttctttctttctttcttttttttttttttttttttttttttttttgctkactgcagcctcaaactctgaggctcaagcattcctcccacctcagtagcctcctgag

SEQ ID NO: 812483 - DNA, 570 bp, Homo sapiens
gctgtgtgctctgcaaaggctgtaacctgcttttctacagtaatgacttttactccagggatagttattgctaagggatagaaccaccagggggccccctgccctcgcaaaaagcgggaatgcagtgcctcctaataatgccagcaactaggcaatgggggaaacacagtggcaggcacattgggccaccccaggtacaacatctggtccaactggatggcagacatggccatcctgtgtccccacagacccataaactcccagggggcacgaagtccatggggggggcccagccttggtaaggctgcttgttccaccacacccttggtgtggtgacatgtgttgtgtttgcacaaacctcagtaggcagccatcccacagtgacttttccccggtgctgctctatgcattgtggcacctgcgatgggggcaccacgtgatctcctattagccagccccatccatcatggacactatgagtcagccagggggcaggcttgccatggttttgcaacacccctgtccaaagcccgctgtgttgcatmccacccattgtccatgggatcccaa

SEQ ID NO: 812484 - DNA, 628 bp, Homo sapiens
cccagccaggctgctgcctcacagttcgatctcggactgctgtgctagcagtgagcaaggctccatgggcatgggacctgctgagccaggcatgggatataatctcctggtgtgcatttgctaagaccgttggaaaagctcagtagttgggtggcagtgtcccaattttcctggtacatactgtcacagctgcccttggctaggaaagggaaatcccctgaccccttgcacttcctgggtgaggtgatgccctgccctgcttcggcttgccctccatgggctgcacccactgtccaaccagtaccaatgagatgaaccaggtacctcagttggaaatgcagaaatcacccatcttctgtgtcaatcatgctgggagctgcagaccggagctgttcctatttggccatcttggaatgaaccccactacctggatggaatttttaagtcagtggggctgatgagatcacctggggagtgtacgaaggcagacaagagcattctgggaagaatttagagttctcagtcatttggttgtggggcagaggaataagaacccacraggttttatctttctttctatctatctacgtgtacatagagagtaacatatatgactatgtaactataa

SEQ ID NO: 812485 - DNA, 635 bp, Homo sapiens
tataagttatgtatgagatattaattacagrtttcagcaattagagtttacttatattcaagcatgacataatctatttttctgtttcaaattcttaatcatcttgggacaaatacatcaatttttttcaccttccttaaaggttctaatagaaaaatctagagcctatttttgtattagccttaaaatagggctggtcatgcaccaagtatctttcacttacactgaggtcgaaaagcgtgtatttattttatctaaactagaatacgattccttaaaacattagccctatgtgtcttcctaagtaacagacaggaacaaagcatttttaagttggctgaaaattgcacttcattttacttaaaaatgtcattctgaaggtagtacaaatctcaactgaaagaaactttacctgtttagatcgttttaggatgtgctcagaaatatgtatggtttatattatgaaaagttagatcacttgcagttggaaaaacagcttagacgtcttttccttaataggtaatgaatgaactacttgaattgattccaactcttgggtgcttaattatagcattcataacatttgcacagtgaaatgagctactggtacagttgtctatcaactgaaagtcagt

SEQ ID NO: 812486 - DNA, 612 bp, Homo sapiens
aaagtcaccagctgcattagctcctaacaagagagtcarcctgtcctttgaacctttgaagccaagcactgacttctcctctgcagctattaaaatcctagatgctggccgggcacggtggctcatgcctgtaatcccagcactttgggatgccgaggcaggcagatcacttaaggtcaggagttcaagaccagcctgaccaacatggcgaaaccccatctctactaaaaaatacaaaaattagctgggcatggtggcgggcgcctgtaatcccagctacttgggaggctggcgcagggagaattacctgaacccaggaggcggaggttgcagtgagctgaggccgccccactgtactccagcctgggcaacagagtgagactctatctcaaaaaaaaaaaaattcctagatgccatcttcttctaatataaggctgttttgtctacatggaaaatctgttgtttagtgcagctactcttatcaatgatcttagttaatcttctggataacttgctgcagcttctccatcagcacttgctgctctttgcacttttgtgttgtggagacagcttctttccttaaacctcatgaaccaacctctgctagcttca

SEQ ID NO: 812487 - DNA, 523 bp, Homo sapiens
cgctggctgcctgtgctgtcccacccccgccttgaggcggagctgagggcacttgagaggattgtcctgaatgtcacctgggtggtggataagggcaggtgcatgtcacaaatcaaggatgttggttctgtttcgcattctaatctctaagaagagtttatgatgtaaatgtattgaactgatagaatttcttagaacatttcttaggaaggtttagtcttctaaactcagggaagcggacggtcttcgcggccaggggagattctgttccccaggggggcatttggcaatgtggaaacatcttcggttgtcacagcttggggtggggagaggggactgcgatgggccaggccctgctcctctgcctgcacccaggccccctagctcactcattcaagccacctcctgggcctcacaggcattggagggcgaraggctttggatgggagctgcccctggcacacagcagtgggctctcagccgggctgacgctgctctcagatcagcttccttcctttcctgc

SEQ ID NO: 812488 - DNA, 590 bp, Homo sapiens
ctttgcaaatatattcaagttaagatgaagccgttagggtgggctttaacccactatgaccagtgtccttaagagggcagtttggacatagatgctgttttagtccattctgtgctgctataacagaaaaccacagagcgcatcatttataaacaagaagtttatttggctcacggttctagaggctgggaagtccaaaatcaaggggccatatctggtgagggccttcttgctgagtcatagcatggccgatggcatcacaaggcaagagggagcccaggagcccacacttctttttttgtttgtttgtttgtttgtttgagatggagtctgactctgtcacccaggctggagtacagtggcgtgatcttggctcactgcaacctccgccttccaggttcaagaaattctcctgccttagcctcctgggtagctgggattacaggcgcccaccaccacccccagctaatwtttttgtatctttagtagagacagcgttttgccatgttggccaggctggtcttgaactcacgacctcaggtgattcacccgcctcagccccccaaagtgctaggattataggcctgagc

SEQ ID NO: 812489 - DNA, 645 bp, Homo sapiens
gcagggcgcagcaagggccggactcggcgcgagcaggcgctgcgcaccaactggcctgcacctggcgggcacgagcgcaaggtcgcgcagaagctcctcaatggccagcgcaagcgccgccagcgccagctgcatcccaagatgcgcactcgcctcacctgagcctgggtacgtgcgcccaacacctcccccaaccagtgccccggggaccctaggagcgtccccccacggcgcggcgctgctcgccctgggcagagtcggctgcctctgagggaaccgtattagggaaccgcacccgccagcttggcctcttatggccatagcaatagcattaaagcctgcggaacttcataggtgggtagaaggggctaggaaacgaagaaaacatctttttaaaaatataagcgatcgatgcctgggtgcagtggctcacacctgtaatcccagcactttgggaggccgaggcgggcggatcacaaggtcaggagatcgaaaccatcctggccaatatggtgaaaccccgtctctactaaaatatatatatatatatatatawaaaattagccaggcactgtggtgcgcgcctgtagtcccagctacttgggaggctgaagcaggggaatggcttgaaccctggagggggag

SEQ ID NO: 812490 - DNA, 545 bp, Homo sapiens
ccagctgacttcttcgaatttgagtattggttggtkagttagtctctctatgactctacctcatttagggtctggagttgtgctccagtttttgaagaaaaaaatgtgctggcatagtactcacgaattggaggatttgaatggttcccttgacagcattaaaagcctatcacctaagcctttccaagtgttctctttgcttacttgccacatgtaggtttcacatccagaataagtcaccggccctgagaacatctgatttccatgatcctggcagtttctctgatggggcttctctgggtgagcaaatgtatccttctctctttcttgttttacctggttggcataggagggaagaaacccagcacagattttagtctataatgattgtggagtatttccagatgtgaagtatgtaatcctgttggttctgctgtgtctgccaagcaagagtctaacaactgcattacagaatagaacagagagtgaaacaaatgtgaaacgtgattctgttagtaggctgtgcttgaggagaaatgaacaca

SEQ ID NO: 812491 - DNA, 593 bp, Homo sapiens
tttttaactaaaaatgaaagcatcaaagatatcctgcaatagagtcatagttctgagaaaaatttaatgtattctgtaactaaaaaaccctgaagtgcaagagaggcaaactatgttgaaaagagtaaatacttttttccttaaataggcttactataaattataggaaaaaacttttaaatatttttctgaggtttattctgcatattattaaaagacatagaacatctacaaaacgtgtaagcaatattaacgacgaagctacaacatacacagctccactggtatggagagccagatgctccggtccacactcacactctgagcaacgctgctcctctggagactcctcagcaggagggacggccgctggtgcgctggggaaggagccagaggcagatgaagggcaaaggagatgggcgggactgccctgagggtgggcacccagtttcagggcaatcaggacactgagcacagggcgacagagacaggggagtgggctccggacaaagtcaggctctctaggtgggtagcagrgtccctgaactaatttcctgttgctgctacaacaactaactacaaatttgggcctc

SEQ ID NO: 812492 - DNA, 587 bp, Homo sapiens
aactgctgacctcaggtgatccacctacctcggccttgcaaggtgctgggattataggtgcgagccaccatgcccggccacggtaaatttaaaaattcagtagaattttaaaatagttggaccagagaggaagcatgttttcaaacatgccaagggaatccattttggatttttaatttggggaattttctcagatctggaaaagttattgtaaatcaaggttgaagtaaagttggtttacatattttacgtatttgccttttggaaaacacaatttaggactttaggtccatgtctttgttttcatactgacaaagaggctgtttctgagacctcagtcccccacacattgcaggggtattgctgggctctctttctctgcgttgtgaaaggcctcttcagggagcatggagagctgtgttctgcctccctgcgcattagatgagcgcctagagggtgctggcagtgagctgctgcggagcctgacatgggttgcctttctccaggcacagcaggcagactccaagctatttcttascctggctgggccttgaaaaagcccagccagccgctgaaaaactgagctg

SEQ ID NO: 812493 - DNA, 491 bp, Homo sapiens
cctgtaatcccagctactcgggaggctgaggcaggaagaattgcttgaacccgggaggcagaggttgcagtgagccgagattgggccagggcactccagcctgggtgacagagcgagactccgtctcaaaaaaacaaaaacaaaaacaaaacaaacaaacaaaaaacaagaaagacttgcaaaatttgaacactgagtctgtatttgatgatatgaagtaattattactacttttttagttgtgataatggcattttgtttttttaaactctttataattcatagatacatattgagatgtttatagatgaaatcatatggtgtctgaaatttgcctcaaaataacacaagatggggcagatgtgagtgaccacatctctgatgcaaatttgaccatgattttcatcatttttgaagctgggccatggtacctggggtccattayattattatttatatatgtttgaaattgtataaaataaaaactaaat

SEQ ID NO: 812494 - DNA, 561 bp, Homo sapiens
gatactttacaaaatgaataacacaaaggcatatagtcaacagactgctcaaggccaatgcaaaataaaaattcttaaaggcacctagaggaaaggccagaattctactggataaatttaacaaagagactgaaataatttaaaagcatcaagcagaaatgctggagctgaaaaatgcaactggcatactgaagaatacatcagagtccttaatagcagaattgagcaagcagaagaaagaattagtgaccttgaagacaggctaattgaaaatacacagtcaggggaaagaaagaatttttaaaaacatgaagcatgcctacaggatctagaaaatagtgtcaaaatggcaaatctaagagttattgaccttaaagaggatggagagaaatatcagcatagaaagcttattcaaagaaatagtaacagagacattctaaacctagagaaattatgaatatctagataaaaaamgtcataaaacatcaagcagattcaacccaaataagactttaaggcaaataataatcgaactctcaaaagtcaagaataaagaatgga

SEQ ID NO: 812495 - DNA, 467 bp, Homo sapiens
aattttgagagagtcactgcccagaacttcacctttcatacggatcatacattcaaactttctaaagtttgattttgytgaaaagatacctctaaagcaggttgttctttcccattctttttatacatccttctgctcttcagaagaaagaccagcttttgctagctctgatattataatgatggttactcaaaggtgaaaaaacatttgccaaaaaaaaaaaaagagaaaatttaactatgttgttctttagagcaagtgaaggatgccaatcactaggtaacaaatccttcacaattcaggttgctttcagttctttgtttttaacaagattgaatatttcatgataaaccactatgtgatttttaacatataccttggagggagttgaaagaactgagccatgttgctataactaaacccttccatccacgtctgtgtatttatgtgaacaaattttcttcgtt

SEQ ID NO: 812496 - DNA, 405 bp, Homo sapiens
gttcaatttactttaatttttgaaaaaaattttcttatttataaaagttgagcttagagtgacctccccattctgatgttttctttacccttcgctgtgcacagagaacaaaaagccagtgtctcgtttttactccaaagaaactaaactgcttccttaaatgggttagctcttacaactgaaaatggcaaccagatgtttaccaaagtccctagcattgccccttcaagcctagcttccttctaattgtttgatctttttaagtttcatagaaamcagactgggtatttaaattgtctaaagctgggaaatgtttaaatataactttgaagatactttctctgaactgtcttgttagatgtactttcttttatttttaaggaaaaatgcagcattgaaaatttg

SEQ ID NO: 812497 - DNA, 515 bp, Homo sapiens
cgtttgttgtaagcagaatcacccagtctgtcatctcccaagatagaaattacccaytttgtcatctcctaagatagaagggccatcacccttgagcccttccttcctcttccttggcattgaccttctattaattgccaatactactgaatttaacctcttaacgtttttttttcttctgttcttgtttttgttttgtttttttgagacaaagtctccctctgacacccaggctggggtgcaatggcgtgatctcacctcactgcaacctctgcctcccaggttcaagcaattattgggcctcagccaccaagtagctgggattacacatgtgtaccaccacgcctggctaatttttatatttttagtagagacggggttttgctgtgttgaccaggctggtcttgaactcctggcctcatgtgatctacctgcctcggcctcccaaagttctgggattacaggcctaagccaccatgccaggcctatctctaaacatttctcacatctgtcat

SEQ ID NO: 812498 - DNA, 515 bp, Homo sapiens
cgtttgttgtaagcagaatcacccagtctgtcatctcccaagatagaaattacccactttgtcatctcctaagatagaagggccatcacccttgagcccttccttcctcttccttggcattgaccttctattaattgccaatactactgaatttaacctcttaacgtttttttttcttctgttcttgtttttgttttgtttttttgagacaaagtctccctctgacacccaggctggggtgcaatggcgtgatctcacctcactgcaacctctgcctcccaggttcaagcaattattgggcctcagccaccaagtagctgggattacacatgtgtaccaccacgcctggctaatttttatatttttagtagagacggggttttgctgtgttgaccaggctggtcttgaactcctggcctcatgtgatctacctgcctcggcctcccaaagttctgggattacaggcctragccaccatgccaggcctatctctaaacatttctcacatctgtcat

SEQ ID NO: 812499 - DNA, 665 bp, Homo sapiens
agaatgatatttaaaaacaaagatctgggtactaggtgtgcccattgctactagggtgtcattgagtttgagctctctcagcagagagggcttggaaatatctgtatgtctactaatccatgcaaacatacacttgtatttatttctgtgtctgcctctatatgtacatattaaaaagctgattcttaccatacccgtgtttgccatccaacaccacaaggtttattatagccttctgctgtcatcatttgtaacttctttctcagacagtgagaaaattggatctcatttacatcatatttccctattgtttaaccctagcatacccatacattaatttcagaattgttaacctatacccctgtgagaaacaaatttactaataaaagtgaacgttttgtgtgtggtcttcttgtctttttgtctaataatattcagtcgaaatattattttctgaaggtagggcatatcttttctcctcactcccttcagtgtggctatgtcattcagtaatacagttagggtcatttgctgcaattkatgtattatttgagtccccaacctccacccccactgcaaatcagggttgaggttttttttttttaatttgcatgtagtaaaattcattatttgtggtttatagctccatgggttttgacaaatgc

SEQ ID NO: 812500 - DNA, 632 bp, Homo sapiens
aataagtaaaaaataaattggattttttcagttcagtaggcaaaatccttctttattatttttttctattgtatgtaatattatagtctcaacatctcacagataacttgaaaaaaatgttttagtattgttttagcttttgacctaaaccctggagtggaagtggagcctgtggaatacaagaacagcatacaaaaaagtgcctttcttttttgtcatcctggtatccttgggcttctcttgccatctacctcttttttctttaggagagattccttactattaaacctcatgcatagttctgccagtcaaggccagacacagtggactccttattgaacatggattagtttcacactaaaactgcactatactgataaataataaccgaatagcatcttgtcatctctcattgacgatagggtttaaaagaacaacaacaaaaaatagatgtattttctaccatttcctatttggggggttgtcatggtgtgtttagtacccctgggttttaacaatgtcccgactgagcctgaaatatttctcccgaacagagtttggatacagagctgaattyaaccttcacatataaagccgtaactatttataccattgtgatccaaatattgcag

SEQ ID NO: 812501 - DNA, 643 bp, Homo sapiens
ccctttgttaaatatcatttctaagcctatttatatttgagtacagtaatagctcatggatctgtaattgaaagaattagttaatgttacgttcttttatacgtataagagataacttaatatctgaaagtatttattattaaaacttgtgagccccaactttttgttctttgagtaattgcttttcactaatgttgtaaatttttttaattcttgatttttctagggattatttcacatttcagctgcttttgttttctactgctatcattgagggttcaagaacaaaaaataagtcttcaggtaaaatgcctgatccataatagcgcttggcgttgtattttgctgaaaagatcatatacctgtttggatgcttgatctgaaaataaagttgtgatgattatgaaattttcgcatgaagtttccttggctgcctaacaaattcagtcttatttgttggtttggttttttgtttttttttttaaagaattttggctgtttgcttttttttttttccatgtcgtcttgatctgcaataaytatatggatatgtgcttggacctgctaagtattttaattttgcatatttggctgcttgaattttaagtaatttctttggacaatgcaaattttaagagcttga

SEQ ID NO: 812502 - DNA, 502 bp, Homo sapiens
tgtgtatatatatacatatacgtatatgtgtatatatatatatacacacacacacatatacatgcacacatacacatatatatgtatatataatatatgtatagtcttactgtcaagagtctgtaagagtctggctgctgaaaatatttgttgatataatggttcgtcacttaaaaaaatttttaaggttcaaactactagcagttttaaaaaatacctggggtttaaaatgtttaagtaagtacatttattttaaaagaaaattgtattttacactaatgaatggaaaacccataatcacttcccataatagagagtaatcacacacatgaataaaatgtaagcaatcctgggtttctggcttgttcagatgccaattttattctatagagtttggaaaattcctwtttttttttgctttgtgtggctttaattcaattcttctcttatttttctttctcatcatctttcttttcttcactttttcagtgttactcaattg

SEQ ID NO: 812503 - DNA, 511 bp, Homo sapiens
atgcgtattcaattgttgattatctgcatgagggtattccttgttatggataattcacaaaacatgttttatgttttttttttttwataaatcctggaccagcttcctgctataagcaatacactttgtagccatgtcttctactgctctgttggtaagtgcttagcaaacagaacctcatttaaacactatcctagataaaatataattaggtaaatagatctgtcaaaaacaatattaaaattccaagccaaatagaaatgtctttgggattatttgtgctaaggcttccttcaattgtcattaataattaaaggtgccactgtgtttattctccctttcattttaaaatgaggccaattagagcgggtctcctgtgtttttgttatagtacataagccactcttgagaggtatgcacactgtagacagtcaatggataatggatttgctaacaaaatacctttaaacaaattattggacatagatataggactccacataaagctttt

SEQ ID NO: 812504 - DNA, 589 bp, Homo sapiens
tcctatccttcgtgtcttaattttttttttttttttttttttttgtgagatggagtttcactctattgcccaagttggagtgcaatggcacgatcctggctcactgcaacttctgcctcctgggttcgaacaattcttccaccttagcctcccgagtacaccaccatgcccaggtaatttttatatttttattagacatggggttttaccatgttgcccaggctgctctcgaactcctgacctcaagcgatcctcatgcctcagcctcccaaagtgctgggattacagccatgagccaccacacttggtaatgtcttaatttatatgccactttaaggatatttattttgggccctttagattaggctaggtgtcccagcgttgccttctcttagtacttgggaatcttcctttcattgcattaatgattctataatgcaatggctgttttaaattcttttctcttctaattggattgcaaactttgtgagattggtggttgcctaaatctggttcaatttgtgtcatcatcagtctttaggacaaagttggtatgtggtaaatamtcaatggatgtgttggatgcctg

SEQ ID NO: 812505 - DNA, 541 bp, Homo sapiens
aaaagaggctgcagtgaagtggggcagtgtggaaggggtccgwctagtcctctgtcactttctggcagtaggagaaaagtgaaagccacaaatacagtaaaatctaataaaaaattatattaatccactttgcatatgagaaagatcctaagctggcaactatacaaacttctgcctaagagcaaatcaaagctgtatagttctaggaaagaatggtataggtatagggtgatttctgcatttccaactgaggtacccaactcatctcactgggactcgttagacagtgggtgcagcccatggaaggtgagccaaaacagggtggggtgttgcctcacccaggaagtgcaaggggtcagggaactccctcccctagccaagggaagccaggagggactgtactgtgaggaactgtacattctggcccagatactacattttccccatggtctttgcaacctgcagaccaggagattccctcggatgcctacaccaccagggccctgggtttcaagcacaaaactgggcagccatttgggca

SEQ ID NO: 812506 - DNA, 615 bp, Homo sapiens
agcatatggaaaagttttccttttcaccaatttatctatcatcagtatggactcatgagttcctattttttcaatggttcaatattgtccttatttattttgatgccaaatagtcctagatttggccactaggggcctcttcaagctagcttctgtgttctttcaacatgtctttatcatttttttaaacacttccttgctttctgttaacattacgatgttccaggataatcataccttttcttccccagccctggagaccagccatttctccagaaatccccgattccttttagtaggaaatggtattagaaaacaaaatatgagttccagacatactgattacttatcaggataagtctgagtctacatctgtgctgtccagtttggtagcaattacccatgtgtggctacttaaattaaaataaaaacaaaataaattaaatattcaggatgggcacagtagctcacacctgtaatcccagcactttgggakgctaaggcaggaggatcacttgagcccaggagttcaagaccagcctgggcaacatagcgagatgtctaaaaaaaaaaatggaaaagaaaaaaaaaactcagttcctcaattacataagc

SEQ ID NO: 812507 - DNA, 640 bp, Homo sapiens
ctaacaaaacaataatgattattataaaaatggaaagtttccactggcatttgtacctaaaataaagcagtccacatttaaagcttcatatcctgggtctcttcyttttttgatgtgcatccttgaagacattagttctaatagaaaccagtttaataaaaattaaaaatatcttctagagacagcatttttcattagtcaatttctttttaacacaagcaaaatatctttaaagcttagtcaacacagaaaaatgtatagccaataaaccagcaacttactgagctacaggaggatatttctataggacttttagcattttgtttagatcttcagctactgctaagaattcctctttagttgagaaaagcttgaccttgatcatttcaaaatgctaacaagtttgaagtaatctggaaacaacccacattgtggatacacacacaaagtgtgtaaaaatctacattatattgacatcattcccctaaatgccaaatacgtcacaaatttacattttaaaatgctgtaacagaatgaattacatacatttttaaaatattactagacattaaatgaaaaatatttctgacaatcttaaatatattatgcaacatattattttaaatgatcctgatgctta

SEQ ID NO: 812508 - DNA, 582 bp, Homo sapiens
ctcatatgaggcatccatgaaacagccaacaatttgggttctggagcatgagcatgtgtaggaaccatggctccagggtctagggctgaggtggcacccatattcagagtgcaggttccaccattcccatgttagtaacaatgtgcaagatgtgactgcttttagatcagccagggggctgagatccaaagcagcagcacacacacagctacaatgtttctggggtctgaggcatggactcactcactgtggtagaagtagtttcatagacacagaaaccacagctccagggcgcaggatacagattattccataaaggcagtggttcttgtttctgaggcatgggcacacagggaattacaaaggttctggggtccaaggagtggtctagtatattgtgaagatgtcagatgtcagatgtctgaggcacagatgttgaaagagtagcaatgcagccaatgttcatagcaaagcaacctgggctccaaggcttsggttgaggctagtccacagccatgatggttcttgtgtttgaggtgagagtatgcatagtgggacagagtctgcaatgtgggtatgcgg

SEQ ID NO: 812509 - DNA, 632 bp, Homo sapiens
tagcaaaacaatacaaaacatgctggctgtaatgaatcaggaatagaaatacacatagactatagtagtccgttttcacagtgctgataaagacatacccaagattgggtaatttacaaataaagaggtttagttggacttacagttccacgtggctggggaagcctcacgatcttggtgaaaggcaaggaggagcaagtcacatcttacatggatgacagcaagcaaagagcttgtgcaggaaaactctcccttatgataaccatcagatctcatgaaatttactatcacgagaacagcatgggaaagtcctgcccccatgattcagttacctcccacaggatcccttccacaacatgtgggaattcaagatgagatttgggtggagacacagacaaaccatatcataaacacataaagataacagtaaaatcctaatgtataaataaccacttttataaggggttaaaattatattattgacaattttggagaagggaaaaaatatttatgatttatatgaattgcaaaacaggatttattaaatattacattattttatgatctcaatgatgtaaaatatamatttctgtgagaaaaaatacctattaaaagtagttatatatgaatat

SEQ ID NO: 812510 - DNA, 626 bp, Homo sapiens
ataaactcttttctttataaccttcttggcatagctagggggcatggctaattcaacacgtcccaaggccttatctagaatctaatgtgttcatggtaggtaaactgaacaattttcaaaagtcacagcagtttatgaccttaaagtctttggaatacctaatatctgacctgcctaatttagactaaatgtccttattttaccaataatctttaaaactttttatttcccaaagattactaaagttatgtgaactaaaaagaattagtttttatttttctttcaaaatatctcatttaagcacttatttttctttaagccagttaattagagttcttttgtataaacatcacacacacaacacatacataactacacaggcagacagaagaagatccggtagttgtaagatttttcacttgccagttttgaagtttcttaattggattacttgctttagggtgcctccttcaagaaatagggctgagaacacaggtagtttttacaatatmtagaatctttgaaggtagcttgaagacagaaaaattcaagaagggaagacagaagttgttcatggaggggaagagaactatcaaatggtaaatgtcacacagataccaaccaga

SEQ ID NO: 812511 - DNA, 613 bp, Homo sapiens
gagtaaagctggttgagttctggctccaggacttactggttgttaatactttggggcaagttatctcagctttctaagcatcagtcttaaatctacaagatggagataattcagtatccatcttagtgtttttgcaaaagatctaaatgcattaattcatgtaaagtgcttagggcaactgaaaagtcaacagaactcaataacaattattattatgcatcaatatggatacttgtttaaaaataagctgcttgggaaaatggatactgtgtatattttcaaagcttgctttctctccctgttttgattcagatactgtcctaaaactttagctatttcacttacttagatgaatttcatcctcacaaactataagaaacctacatattacggttctcggatttagacaaagttaggacccaatgttcctttttaaaacatctcaacatttctataatcttttatgcataataaaatatcaaaaatagactagacttgcaatagaacagtgtttattttcatggttgcattcctaaaacaaatgtataygcgtgaagtctggctatttaatcacctgagacggaggagtttcatgctggagatagaatatcag

SEQ ID NO: 812512 - DNA, 646 bp, Homo sapiens
caatggagctttatagttttacactagtctttaataatgcagtaaaaatttacaatttttttaaaataaaaatatggtctttctcaaaaagccaatcattagtgcttgtcatgaaagtgaggaggtcttgagaaaacaatgattctttgaaccagaaaaatagaagttttagatctatacaaaatgaggattagttaattatagtgggacctatagagtctcagataacattcttcttgaatgtttgagttctactgtatactaaaagcataatggagcaacaacaacaaaaacccatggaattaaggaatcgtttcaaatactgtctagttgtaagtaacacttcaaaatatttttgtcaactctaaataaaacagtaaacaaaaacttattttcaactcatatcaaaatatttagaaaatctctaccttaaacagaaatattctaaagtcattagaaaacacaaaatggatttcttgcttcaaatgcatactggaataaagtagtatatttaaaagtataccaagcaacaaaatgggcattattagcaaaattttctatattttgatttcacctacttgatctccaawcactgaaaataataaattaattatttgagaggagtaaatcttagtaaaagcttctt

SEQ ID NO: 812513 - DNA, 601 bp, Homo sapiens
atatagtatatataccatagtataaaatataccatatataattattatttactgatacwgttgagtttaaataaaccactaagctatttgctttctaataatctcatatattcttttccttttatttttcattgcttggattcttttaataaatcaagttattggttttattaatcttttaattaatgatttattattttattgcttctattagctttttatatcatatatcatatacattgtattattcattccgtggtaaccctaggtatacacctgtgacttactacattcaaccttaaactagtgcttttaccacttcttaaacatttaaggaccctaacaagttcaactccatgtgcttactcctcactcctcacttaaccctttgtataattcttgtttacatattttctttctgcatatcctatacactccgtggggtactattattattattggcatttgaaacagccaacatttgtttaaatctgcctatatttaccctttttggcactcttcattcttttctacagttctctacttctatgtggaatcatttctcttacagttgaagactttagtgtttctcatcatgcac

SEQ ID NO: 812514 - DNA, 591 bp, Homo sapiens
accaggctccctgggaggcaggtgagcctgggtagtatccatctgcgtggctctggccccctccttcctggctggtctgcacccacagaagtcctggctttggcatgccttccttcctgaagtttcctcttctgggactcgggcttagattccctctgagacaaatgttatgtagaacacatcgtgagtggctcccctggagtggtggccctggagatgcaggtggaaggccttgctttgagcccgagctgcaggggtcaaatggcagccccctacaaggactctgcttggcctaatttgggtcacatgctcacccctggccaggaggatggctttctctgattggttgggtcacgtgcccacccctggccaggaggatggctttctctgattggttgccttggagtggggtcagaggggtggtgtaggtttggcaacccaaagtagagaggggaaggaagtgtaggcagggacaggtggatgtgaatgttacttcagagcacagctgaggtgggaggggaaggaactaycaagtgggggaagaccagagctgctggattgtgccagggtgccggaaggagggtgggcaat

SEQ ID NO: 812515 - DNA, 477 bp, Homo sapiens
ttagcttctatgaaatgaactcatatcctgaatctttgatatctttattactattgtmatttatttatttatcttgtggttattttatcttctctggaatctttgcattgttctggaattgtatttcttcaagtgcatgacatgcatactggtgatgtgggcaatgactttagggatatattaatgagtttaaaataatgtaatagtggtatatatttttaggtgtattagaaaacatatgcacagctatcacatccctgatttatatcttagaacaagattaagcaataaaatgggagttgatttcaagtaattttttaaaaaaacatattccaggtctcccagtattgcccaagctgatctcaaactcctgggcctctcctgccttggcctcccaaagtgctaggattacaggtgtgagccaccactcctggccctggtttcaagtaattttatgaaagagtaaataacgataga

SEQ ID NO: 812516 - DNA, 456 bp, Homo sapiens
tacacagtaagcgtggaagagaaaaagatggaaggaatctacgacatcagtgttctgttaaacacctccatgcattmttctattattccagccattgctagataactaattttgctcaggtacaacaaaacaacctggtgaagcctgcctgccatgcacctctcccttcctgatctacagaatctctaatcattttaccttcatataggaaactaataggaacttattcagctctcaaggaattgcaacccataagtgttagtagtagtgtatgaaaagagttaacacatgttgggaataaaaaatacccttttcaatggctgacatagccaatagatccatgctttcctttttctttctctctgtcaaagagccctgatatatatttcaaaaggcttatctggcatcccatggaacattccaacaggtgatccatagtgatttcatataaataaa

SEQ ID NO: 812517 - DNA, 612 bp, Homo sapiens
actcatatgactactgaagcctctgagctaccattttattcttggttttcctttgctttgggtcacttacttatggtaaaatgcctcaaggagaaagtagaaaacaatgtcagtttatcttaacgtgttttttttccctttaaaaattataataccttatgtcctggattccttggctgccttcaaatagctatgttttgtagtatctctggcacttgcagttctctgttaaaggcttagtgtctgatattttctactctgtatatccagttgattattagtgctggtatgttcaaatgctattccaagaggtggtagtaatggacactgggtactttccttacttgaaaggaaaaagaagaggtgtgagtaacaatgcacaatgtttgcataacaccaggaaactatgaaaagactgggcagatagaatttctataatctgaaattgttatatatattcaaatcatttaaaaattttgatctagaaattattagctcactttattaraaaaaggaaaggactgcattgcagagcagcttggccttctattctatggacaactggtgacatttagagttgagggtatgtcccaggtttccacactttgagta

SEQ ID NO: 812518 - DNA, 555 bp, Homo sapiens
ccataattcccatgtgttgtgggagggatccagtggagatgattgaatcacggggtgggtctttcccatgctattctcgtgatagtaaatgagtctcmtgagatctgatggttttttaaaaaacaggagtttctctgcaaaagctctttgcctgcttccattcatataagatgtgactttctcctctttgctttccaccatgattgtgagacctccccagccatgtggaactgtgagtacaattaaaccttttacttttgtaaattgcccactcttgagtatgtcttcatcagcagcatgaaaatggactaatacaataaattcctaccaggagtagggtactactgaaaaaatacctgaaaatatggaagtgactttggaactgggtaacaggcagaggttgcaacagtttggagggctcagaagaagacaagaaaatgtgggaaaggttggaacttcctagagagttgttgaatggctttgaccaaaatccagatagtgagatggacaataaggtccaggctgaggtggtctcaaatggagatgaggaacttg

SEQ ID NO: 812519 - DNA, 585 bp, Homo sapiens
ctttaagtcctgatgttagtaagttgagccttaatactttcgctttcttggtccgtctagtcaaagttttatcaattaacactctcaacaaaattcaaactgagcaatgtataaaatcgattatacactatgatcaagtgagatttactcatggaatacagagttgacctggtatccaaaaatcactcaagcaataaaggaaattccaataaacacatgatcatctcaatagacacacaaaaaaaaccatccaacagaacctaacactttttcatgataaaaatcattaacagacaaatagaaggaaacttcctcaattctataaagaatatccaggaaaaacccacagttaacatcataattaatggtgagagactgaattattcccctaaaactaagaataagaaaatacgtcctctttcagcatgtatattcaacattatattgaaggttatagttagggmaattaagaaaaaagccaccagattagaaaagaagaaataaaactgtaactatttatagaatatataatcttatataaagaaaatcctgggaacacacacacacacacaactattagaactc

SEQ ID NO: 812520 - DNA, 603 bp, Homo sapiens
tcacttaatcctcacaaaacccagttaaaccttgtattcctgctttcctgacaggaaaatggagacttggagaggtgaactgacttgcttcaggcctttcggctattaccaggtagaagcaatatttgaatccgggtcttaaaaattctacaactagttaagaaatggtattaaataccccagccagcatgtagtgaccttccccttcaatatgaggcgtttgggagatcgagaggacttcatcccaaactctaaaagaagagccatacattcccaggtatctgaaggactgacatacaaatcatgcttttttgcctataagcaaacacttcaaagtgctatttttaattgaaagtttgcagctgtattttttaaaggtggcacttctgctttctcctcctcccttcctgccccatgtccagaagtgcccctgggaagcagtgcatggccctgctggggaaggcaggagcrtcccaattcccaatcttctgcacaatgggcatgcaggcccaggcaaacgactagacctttctgagtttctgtgtcctcatttgaaacacggaaagaagaacaagtatatccaatgttccaaggttattttga

SEQ ID NO: 812521 - DNA, 603 bp, Homo sapiens
tcacttaatcctcacaaaacccagttaaaccttgtattcctgctttcctgacaggaaaatggagacttggagaggtgaactgacttgcttcaggcctttcggctattaccaggtagaagcaatatttgaatccgggtcttaaaaattctacaactagttaagaaatggtattaaataccccagccagcatgtagtgaccttccccttcaatatgaggcgtttgggagatcgagaggacttcatcccaaactctaaaagaagagccatacattcccaggtatctgaaggactgacatacaaatcatgcttttttgcctataagcaaacacttcaaagtgctatttttaattgaaagtttgcagctgtattttttaaaggtggcacttctgctttctcctcctcccttcctgccccatgtccagaagtgcccctgggaagcagtgcatggccctgctggggaaggcaggagcaycccaattcccaatcttctgcacaatgggcatgcaggcccaggcaaacgactagacctttctgagtttctgtgtcctcatttgaaacacggaaagaagaacaagtatatccaatgttccaaggttattttga

SEQ ID NO: 812522 - DNA, 582 bp, Homo sapiens
aaaaataaaaataaataaataaaagaggaaggtgcttctatatattaaaaattgatttaaaaaaaaaagtattcttccttcagctaraaaagaaagaaaaattttttaaagaaaaagtgatcaagggaagggattaaaagtataacgataggccaggcgcggtggcgcacgcctgtaatcccagcactttgggacgccgaggggggcggattacctgaggtcaggagttcgagaacagcctggccaacatggcgtaaccccatttctactaaaaatacaaaaattagctgggcgtggtggcgggcacctgtaatcccagctactcaggaggctgaggcaggagaatcacttgaacccggcaggcagaggttgcagtgagccgagatcacgccactgcactccagcctgggcggcaagagcgaaactctgtctcaaaaaaatatatgtgtgtttgtgtgtgcgcgcgtatgcgtgcgtgtgtatactatagaaccacactgacgacctacgttcaaatcctgattccaccacttcctagctgtatggcgatgggctacttacagagcctttctcagtctaggt

SEQ ID NO: 812523 - DNA, 582 bp, Homo sapiens
aaaaataaaaataaataaataaaagaggaaggtgcttctatatattaaaaattgatttaaaaaaaaaagtattcttccttcagctagaaaagaaagaaaaattttttaaagaaaaagtgatcaagggaagggattaaaagtataacgataggccaggcgcggtggcgcacgcctgtaatcccagcactttgggacgccgaggggggcggattacctgaggtcaggagttcgagaacagcctggccaacatggcgtaaccccatttctactaaaaatacaaaaattagctgggcgtggtggcgggcacctgtaatcccagctactcaggaggctgaggcaggagaatcacttgaacccggcaggcagaggttgcagtgagccgagatcacgccactgcactccagcctgggcggcaagagcgaaactctgtctcaaaaaaatatatgtgtgtttstgtgtgcgcgcgtatgcgtgcgtgtgtatactatagaaccacactgacgacctacgttcaaatcctgattccaccacttcctagctgtatggcgatgggctacttacagagcctttctcagtctaggt

SEQ ID NO: 812524 - DNA, 512 bp, Homo sapiens
gctgagacccactgggctgcattcacggtaggttggggattgtragtcacaggatgtgacagatggtcggcaccaggtacaggtcacaaagacctcgttggtaaaaagatgccttaaaaagctagccaaaaccggccgggcgcggtggctcaaacctgtaatcccagcactttgggaggccgaggtgggtggatcacgaggtcaggagatccagaccatcctggctaacacggtgaaaccctgtccctactaaaaatacaaaaaaattagctgggcatggtggcgggtgcctgcagtcccagttactcgggaggctgaggcaggagaatggcgtgaacccgggacgcagagcttgcagtgagccgagatcgcaccactgcactccagcaagggcgacagagcaagactttgtctcaaaaaaaaaagaaaaaaaaaaaaaaagctagccaaaaccaagagggcaacaaaagtgactcctggctgtccccattactcattatacactatttgta

SEQ ID NO: 812525 - DNA, 512 bp, Homo sapiens
gctgagacccactgggctgcattcacggtaggttggggattgtgagtcacaggatgtgacagatggtcggcaccaggtacaggtcacaaagacctcgttggtaaaaagatgccttaaaaagctagccaaaaccggccgggcgcggtggctcaaacctgtaatcccagcactttgggaggccgaggtgggtggatcacgaggtcaggagatccagaccatcctggctaacacggtgaaaccctgtccctactaaaaatacaaaaaaattagctgggcatggtggcgggtgcctgcagtcccagttactcgggaggctgaggcaggagaatggcgtgaacccgggacgcagagcttgcagtgagccgagatcgcaccactgcactccagcaagggcgacagagcaagactttgtctcaaaaaaaaaaraaaaaaaaaaaaaaagctagccaaaaccaagagggcaacaaaagtgactcctggctgtccccattactcattatacactatttgta

SEQ ID NO: 812526 - DNA, 523 bp, Homo sapiens
ccctggtacagcagcattatcaataaccaaacaatgtgactggcactttcaactggtttatcacttgtcagctctgaagacacttgctgagctgacagagagtcgatccaggatgtgacatgtaaaaaatcaccgtatttctgggtaaaaaaaaaaaaaagacttcagcatctcaggctcacaggctatcttaattcatcaggttgactatgcacaatttttggttgttaaatctctgcttctaaacctccaagtttggagtttttgagtttaacgtaacaagtgccaaaacgtgtcatgcagatccaccattctgctctcaagtttcttatgctgtagtagaaaagactctgtaggaagatgcacagttgagtaatacatcttgaactaycttatacacaaaaaaggggagatttatcacaaagctgataagttcaaggcttgcggctcaattagatgcaagtctgacactcaaataatgtcagaaatgggtatcttttttttttaacagtttgctttgcat

SEQ ID NO: 812527 - DNA, 523 bp, Homo sapiens
ccctggtacagcagcattatcaataaccaaacaatgtgactggcactttcaactggtttatcacttgtcagctctgaagacacttgctgagctgacagagagtcgatccaggatgtgacatgtaaaaaatcaccgtatttctgggtaaaaaaaaaaaaaagacttcagcatctcaggctcacaggctatcttaattcatcaggttgactatgcacaatttttggttgttaaatctctgcttctaaacctccaagtttggagtttttgagtttaacgtaacaagtgccaaaacgtgtcatgcagatccaccattctgctctcaagtttcttatgctgtagtagaaaagactctgtaggaagatgcacagttgagtaatacatcttgaactaccttatacacaaaaaaggggagatttatcacaaagctgataagttcaaggcttgyggctcaattagatgcaagtctgacactcaaataatgtcagaaatgggtatcttttttttttaacagtttgctttgcat

SEQ ID NO: 812528 - DNA, 771 bp, Homo sapiens
agtaagacaaaatactatttctcagtagagcacaaccttgaagaaaatcaatgtaaatgttattctacttctcacctctttttttctacaaaactaaacactccaaacacaggcacagcaaactgcatttcgaaaggttttgtaagttaaacaagccaaggaagttacatggaaaaaaaaaatctcctttgagatataaaactgttcatatctgaaggagactgtacagatagcagaagggaatatagtataatatttgatgaagagacgtaattatcatttatgaatgagaaagctcaatgttttcctaaattactcgaattaaacctcaaataaatatttgaagttctccatctaattcggctacaatgaaaaactgaatctcattacctctggatttacatcgactccaatttcaaagattatatttatttcagaggggatgaaaaagcatttttcactaggaagaaaatgaattgaggtttcaatataaaacaagactcactgcatattataaagaaagtgctagtctaaatttttttttccaaagaaaacttctaagaaaaagtcagagatatttcacttagtttggagataagtttaaataaatgacaattatgtgcctgtaatagtggtacaaacagatattgtatacctcaatttaagcatayttattatatcaactagagagtattattccttttatgaaataattcctcattctacaaaaacacgcagtataggatccatttagtaatgagctccccagtg

SEQ ID NO: 812529 - DNA, 569 bp, Homo sapiens
ttctgaatctatgaagtagcgaggaggcttccggactgctcccccgcccaccggacatcctggctgagctccctcatggcacgtctcacctggccgcccgaccaacttcagcaccttctgcttggaaccagctcctcctccaggatcagccctgctgatgacagaatcaccatcctcccagcccctgccccctggactgccccaagctcagaaccccagagttaaccgagctctctggcatcgccactgcaaactgtcacaaaatgctgtacccagactgtcccgtccctctttgcccactagcactgacccctggtccctgccacagcctcctaaatggcctctctgcaattctgtcaggcactgttctaggcacagcacagataatgctcatctactcctcccagcaagtcctatttcacagctgtggaaactgaagtgccgggagactcasttcccttaaggtaatacagctggcaagcagaaggcagcaaagctgggacttccatccaggcacagtctggcccctgagtccatgctcctcgccgccctgctgcaggcctttctag

SEQ ID NO: 812530 - DNA, 606 bp, Homo sapiens
gggcacctactaagtgccaagcatggtgctgtgagctttacatgtgatctcatttgagctccttggaaagtcttttagaaccctgttttggttttgtttttatttttttgaaagagggtctcactctgtcccccaggctggagtgcagtggcatgatcagggttcactgcagcctcaacttcccgggttcaagagatcctcccacctcagcccctcaagtatctgggactacaggtatctgccaccacaaccggctatttttttggattttagtagagacaaggtctcactacgttgctcaggctggtcttgaactcctgagctcaagtgatcttcccacttcagactcccaaagtgctgagattacaggtgtgagtcaccacatccagccctagaaccatttcaaaggtaaggctactgagcctcacaggcatgaagactctggggaagattacaaagatgattactccaatgatgccagtggctgcaaaatcaaatgtcaacaagaccygggcggcagcacatgggtgagcacaggccctgtctacaggcccctgcaccctggcctccattccaaagcagcagctggggctggggaggcactcg

SEQ ID NO: 812531 - DNA, 619 bp, Homo sapiens
cattctgggtagcatatggggcatagatagtccctggaatgaggtggtagtccagttgctgaaacttccactggtgttaacttggtagaatattctggtggacagtaaacatctgggttggtgcaaagattcagactctttcagcatggggatagcagcattttttttttctgagacagtcttgctctgttgcccaggctggagtgcagtggcacgatctcagctcactgcaagctccgcctcctgggttcacacctttctcctgcctcagcctcctgagtagctgggactacaggcacccgccaccacacccggctaattttttgtatttttcagtagagacggggtttcactgtgttagccaggatggtctctatctcctgaccatctgcccgcctcggcctcccagagtgctgggattacaggtgtgagccaccgcacccggccagggatagcagcatttgaaaacaatgaactggcttgctgtgatgaagcctaaagagaataatgggtaactgawgatagttgccaaacagttaagaactaagtgtgaggaccaccaggcatctttagtagcttacaaagtgtctctccctcctgttatgggagaatagctgca

SEQ ID NO: 812532 - DNA, 602 bp, Homo sapiens
gatttagaggaattacccaaatgttttccaaagtagctacagcaatttatattcctaccagcayagaagttttaatttatccacatccttgtcaatacttgttattatctctcttgtttattatagtcatcctataggggtgaagtggtacctaattgtggttttggtttccattttcctaatgactaatgatgttaaacatcttttcatgtgctagttagccaattgtacttctttctcagagaatgcctattcatgtgttctgcacattttaaaagcaggatctttgtggtatatggcttatatgtcaataaaactgttattaatgaaaaacataggtgaggcatcaggattctggaccacatcaatttgtggacataacatgagaggaacagaaaattatttgaaatgaaatacctgtttgttaggaaaacatggttgtgttttctgaggggtcaggtataacagaagtccttaggagaaaaatggagagtgtccactattttattaagcctgggtaacagtgagtatgggtgataggaaagaggagagagagtgcagagaagatctgaaagccatttcaaacacaaggctcatgtagc

SEQ ID NO: 812533 - DNA, 626 bp, Homo sapiens
ctcaggaggaggttacagccagcaaagcaccaagcagagaggcaggcagcacctgggtgaggtgcagtccacatctgctyagcttctcagaggtgccagacttggccttcttgagacaatgcacaggggccttggaggctggctgggctggatccatctctggctaacttttctcagtgaccaaggctgtgaggtgctattcagggacaggaaagcatggctgtggagccaagtaaagctgaccagctgcctctgaggcctttatctgcatatgcacatgacattaaaaagtcatatattcgattttatatacgatatgtatatgggtaatcttatttctagtaggcacctcgtaatacactgtagtctggcacaaatctctcctttttcagtctgtatatttgtgtaataacactactagggaagcatgaacaccaaaagtgaaacatataatttttattgtttggaaaatgatttgtggtattgtttatagctactaaatgaatataatagcatgtgactcattattattatattttaaagtattttgtctttcaagtcttttaatctaaaactgttaaatgttccttgacactcagtgccaagtttctttggatgagatctga

SEQ ID NO: 812534 - DNA, 448 bp, Homo sapiens
ccagttacatgaacaattttattagtcaattgtgactcattttcagatattaaaaagacaaatctcaatcaaattttctattttatatccaatacaatacttgtccatctccatggctgtagttcaggatatgmtgtaccctttcactcttcccccatctcctgccacttcctttcactttcagctcctcttgagtcaggtcagagagtagaataatcaggaaaaaagtgactgaattattcttacttagtaagtgctacttgtatgatcctctcctggctccaatgtctgctatgcactccaggtagccaaatgctggctctttcggggtgaaggtgttccttggttgatagcttgcagtgctccccccaccagcctcagattctgtactcagtgatacacccagtgacttcttagtggcctccccccactaggaggactccttggc

SEQ ID NO: 812535 - DNA, 625 bp, Homo sapiens
cacctccaatgcccatgccctgtcatgagcacacacacatgcactcccctgcctctcaaggcctcttctttaagacatgttttcacagcaagatcattgcattatggaggaaatgcaatatccacaattatcttcctttgatcctagcaaacatcattttcctctgaccttagctgggagctaagcctgtcacaatcatgactggcttactcatgatcaaaatattcagtgcggccagaacatgcagctcggcaaactctaaggagtcccaaatataacaacctactttgctctgcccaaggaacagagactggccccaaaggattgatgctgaccctctgcatttggtttagttccacaaaaggaacctaggcaatcttttagcatcatcgttgtactatcatgcttagaaaaatccaggcagtctaaattcctctatacacactacacattcttgtcaagattaatcctaacagaagccaggagcaagtaggaccacacattccacaggccttgtgtgtyccctaatgtggtttgtagatcagcctgagacatgccaaatatattgggtaactgaagactcttttgaaagaaaagaaaacataaaatttgcagtgctgtacca

SEQ ID NO: 812536 - DNA, 625 bp, Homo sapiens
cacctccaatgcccatgccctgtcatgagcacacacacatgcactcccctgcctctcaaggcctcttctttaagacatgttttcacagcaagatcattgcattatggaggaaatgcaatatccacaattatcttcctttgatcctagcaaacatcattttcctctgaccttagctgggagctaagcctgtcacaatcatgactggcttactcatgatcaaaatattcagtgcggccagaacatgcagctcggcaaactctaaggagtcccaaatataacaacctactttgctctgcccaaggaacagagactggccccaaaggattgatgctgaccctctgcatttggtttagttccacaaaaggaacctaggcaatcttttagcatcatcgttgtactatcatgcttagaaaaatccaggcagtctaaattcctctatacacactacacattcttgtcaagattaatcctaacagaagccaggagcaagtaggaccacacattccacaggccttgtgtgttccctaatgtggtttgtagatcagcctgagacatgccaaatatattgggtaactgaagactcttttgaaagaaaaraaaacataaaatttgcagtgctgtacca

SEQ ID NO: 812537 - DNA, 499 bp, Homo sapiens
tgaaatacaaatgaatggcagattttggggtacagtgagtagaaatggtgagttcagtatgggatgtgttgtgtttgtggtgacggtagtaggtagttggaaaaatgggagaggcctgacttagagatctggacgtgggagtcagcagcatttaggttgagaggcacaaaaggctggaaccccatggactacctacgtttaacttatgaacagagtaagaggcatccgcttaggaaactgagcaacactgagctcagctaacagagctgggcaatggacctgggctgccacagaaatcgatttttaaaaattattggtattttgaaataaaaacaagtttaagaagaagatattgggtgtgaaggaattcctttcagtaggggaggamtctgtctctcaaagaaaaagattgctcaggcaatctaagttcatctgttcatgctgaatgtctgaacagacttatattctattcacaaaggggaagaaaagtgtggattgt

SEQ ID NO: 812538 - DNA, 624 bp, Homo sapiens
ttaaccttcctgagtttgaaacttrgtttttctgaatcaatttattgttaagaggagtacttggaggatgacttcctttttatttattttgccatactaaaataaaattgaatagcaaaagtaaggatgacagaagctcagagacaaaattttattactttcatttcagaagtgtgaaaaaattaagaacttagccaaataaatcaagaccctattgcctaaatctaacaacaaattttattttgtttgccaacccttcttaatctcaaacaacttctctgacattcccagcaagtacatccgttaaaagtttgcaggttctcagaataagcaaatctacagagataaaaagaggattactggttgcctagtgctgggggttgaagaagtatgtggagtgattgtaaatgggtataggattactttggggggtgatggaaatattctaaattgtgatgatgattatacaactctgagtatattaaaaaccactgaattctacacattaaaataggcaaattggatagtatgtgaattacaggtcaataaaactgttaaaagtgattcggagttaaagccattacttcgaaggaaaaagcagatcttaaaaatatagatttttaa

SEQ ID NO: 812539 - DNA, 646 bp, Homo sapiens
tccctgggttaacatgtgcattgatggtacaaaagcagtagtgggtgaaactgttggcaccttaacacaggtcaaggctttgacattaagactgtactagtagtcactgtagtcttcgccattatgtagtcacagttaaaaaaaaaatccagtttcattaaagaatgtctttgatgaagcaataacaataatttcattaaatcttgaccttttgtaatattctgtgtgacaaaatgggtagtataaaaccacttatgctgcatactgaagcaaaatggtcatcccaaagtaaggcattggtgcaattatttgagctcaaggctgaaggaactaatcactttccttcatatctacttgaatgaacaactcacagactatggttattcaaacttatatatttagcagacattttctcaaaactgtacaaaatgagatcatcacttcaagtgaaataactgacagtcatttgcggccaatgataaaattcaagcaatatcaaaattttggaaaacttgtatctgacattgtgagcttagcagcttcataatacttaaaagactgttctgatcatctcagtggtcatattgataaacataatttttaaatttatataatgtaayacagtaacatttgtaagatctgtgta

SEQ ID NO: 812540 - DNA, 556 bp, Homo sapiens
atctaagccctgattgcaggctgactggatataaactcaatatggttgctggggcatggcaggattgagactgaccttgccggttatgagggagctgggtaaggcctgtcactgctgkctttcccccacttccctggtgacctgtatgatgcagcagaggcagccataatccccctgggaacaaaactccattggcctgggaaccacctcctaccccccacagtggtggcagcaagccccgtccaagaaaagcctaagctcagacctgcctaacagtgcccacacctgatggtttttctctactcactctggtagctgaagacaaaaggcataagctcttgagagctctatggccctacccatcacctgagaaacctaagtacccatcctgccaaatgtagggcaagattatatacccctcctactacctcagctggtgctctcttgaaaacaccacctcctggctggaggcaaaccaactcaagccattacagcaactcataacagaacaactgttaccagggggtccttgttcttagagctcccaagatggtgg

SEQ ID NO: 812541 - DNA, 586 bp, Homo sapiens
gcaacatcctgagttaagaaggaactgactggaacacctcaggctctgttccagaccctcctagaaacaggatgtccttaaacactttaatgcagtgayactcaggtataaaactcagagtgagctgctttccgggttctctcagctgacgtgcaagtggacatgtgcataagagactctatctgttccaggaagcttttctgagccttggggaactggctttcaatgaatgctaggcttctgttgtcctttgctgcctattaaataataaatccacttcatgaaacttgttttgtgtatgaatgctctgtctcaccagactcgggcaagtaaccagtgcacagtaaacttgcttcacagtccttacttggtgaaaggaactagttagtgcgctcagtctcttttataaggttgaagacatcatgcctttttaccactaagtactttagtgaatacttcctaagaacaaagacacattttatgtaatgacagtacacgtatcaaagtcgagaaatttaactctgatctaatagtattagctaatctatagtttatattgtttcatcaattatctcaaccatgtcct

SEQ ID NO: 812542 - DNA, 626 bp, Homo sapiens
gtgagttctacaaattatgtgtctttttcctgtaattgatacagcttactggggagtagcttccattttcatgtacattctttcacgtacacattctattaataatttatatgagmctctttgagctcactaacatggctagtcatgttttactttaaaatactagtgaaattaacttaaaaaaaatcaagtactacaacctaatgttacttccttactattatcactatcttttaaaagtatgctctcaacaatctgtgatggtgccagtcccttctggtcaaaattgcctattagcaatgttgttgataaaattacaggttcctacataaacctctcagaaggatattcttaacatctgttacctttttaaaaagaggatagcctcttctgataagtgactgatagggcagaggagtaggccttaaaagagtacacgcacattgacaatgccaccttattctcgaaaccaaagatgtactcatgatgcttccctaccaacctcctctgaaaagattaaccttttagaggtagcacaggatgcaacagaaatacctgttcaggttggttggcattggagagaggagtgaccatccaaatgacattgaggttaatgagggcagcgc

SEQ ID NO: 812543 - DNA, 626 bp, Homo sapiens
gtgagttctacaaattatgtgtctttttcctgtaattgatacagcttactggggagtagcttccattttcatgtacattctttcacgtacacattctattaataatttatatgagactctttgagctcrctaacatggctagtcatgttttactttaaaatactagtgaaattaacttaaaaaaaatcaagtactacaacctaatgttacttccttactattatcactatcttttaaaagtatgctctcaacaatctgtgatggtgccagtcccttctggtcaaaattgcctattagcaatgttgttgataaaattacaggttcctacataaacctctcagaaggatattcttaacatctgttacctttttaaaaagaggatagcctcttctgataagtgactgatagggcagaggagtaggccttaaaagagtacacgcacattgacaatgccaccttattctcgaaaccaaagatgtactcatgatgcttccctaccaacctcctctgaaaagattaaccttttagaggtagcacaggatgcaacagaaatacctgttcaggttggttggcattggagagaggagtgaccatccaaatgacattgaggttaatgagggcagcgc

SEQ ID NO: 812544 - DNA, 605 bp, Homo sapiens
tgggcccacagaaggttggaggggtggaggaaggaatgagacccaggtttaaaaggatcagagatgattatattttatataccacctatatactgacttctaacacatgtatcttcagctcatacacagccctctccaaactgcagatctaactatgaaccccaaatgtctccttgggtagctactgaacaaccaaccccaaactctcgatcttctctttcagtcctgctcctatcccaatattttccctttcaataaatggcactgctactttttgagttcttcaggacaaagaccttggaatcttccttggctactcatttccactcacattccacatccaacctatctggaaatctggttagctccacctgcagtatatttgcagaatgtaatcatctctcactacctctactgctatatgtctggtctaagttatctttatctggctcacttaaatagcatcaaactgattcccttgattccatcgttttccaatcacagtctattmttttttttttgtttttttttttgagatggagtcttattctgtcaccaaagctggagtgctgtggtgtgatctcagctcactgcagccttacggt

SEQ ID NO: 812545 - DNA, 602 bp, Homo sapiens
agggccattttgatggcagtggctgctgccatgctggctgcagcagggaggcccggctggagctgcacactccatggtgccagtaggagccccgacccttctgagttggggcaggagctccycgggtgccgctacagctgtccaaatcgcagctgcagacccaggcctgctctatggaacaagcaggagccacgccctcctgggtggggctacagccgcggaaactgtggctgggaatctgagcctccctgtgctctttccggggggccaggaaaaggcagtatctgccctcccctccgggtgaggatgtagctgcagctgctggacccacatctgcagacctgcgcctcctgttccacagagctagcaggagccagggacaagcaggagccctgccccttctaagttggtggggcaggagctcccaggtgctgctgcggccaccctctcagggaaggacccgggcatctctacagcctgcaccctcacaggttccagaaaggacactcccccatcccccaggcaggctctggggtgttttctcccactgcctggcctctctactttcctggcacctgttccgattgtggagcaggatctgg

SEQ ID NO: 812546 - DNA, 483 bp, Homo sapiens
taacaggatccacaaatgattcttatggacattaaagttgaggagccactgctttagataattcttttgaaatattatataatcagcttaccrgacttcagaattcctcctttcccaatggctggctcttcagggtggtgtctttctcttactcacctttgtatttctagtgcctagcacagggcctggcatatgcccctttgatttcttttggtgtcacagcttaatccatgtttactgaataagttgcagaatcagtctagtgtcacagtataatcctactgccatcagaagaaattcatataaacaatttttctgaatatggcttttactataatcattattttaggccacatatcatgaaaccaaaaatcctactctaaactgatgaccttttggtttcatctgggcagagtctcccttttgttttaattcaaagcatacctctatttccacattcccatttttctggggttcagttta

SEQ ID NO: 812547 - DNA, 618 bp, Homo sapiens
ctgaaagttatgcctttgcaaagaattaaaaattccagtcaaaggaacccccaatcatcagatgtttttgttctgtacatggagaatcagcctaaggctgtctctgtgggcatgtgtgcttctgtggatttcccaagggccatgggaatggctgtggacacagagcaggcaaagtgtctgtgatcaggacatgatagagatgacactgtacttcctttagctgccctcggagacatcttgtgcctcatagcagaaggtagaagtggggagatttttgtctaataggacggtttcaggcactgtcagagctgtgggtgggttacgtaccatttcctcaagctgtacttgggggagaagttggggagaacttgtgcatttaactgcttgggttggcccagcagtgtttcttgctttttcaaccctcagagttctgaagcaatcgggaaatgttacaggaaggagaaagaggttttcagggacagaaggatagtgactagcagggcaatgttggaaatggaaracaaaaaaacaaattttttaaaataagccttttacttgggaatattttagatttgcagaattattcagaagatgctacagagagtttttgtataccct

SEQ ID NO: 812548 - DNA, 655 bp, Homo sapiens
ttaagtaccgggaaattcagaaattccagcattatcaaactacygtaagacagatccatgagagcctgcgtaggtatatgaatacacagagatacagaaaataatctaaaaaaggatccagattgactagctgctagaagggtcagagaactctattaagtaggtctctatcaagaaatatccagtgtaaactggtaataaatacatctagctagtgatactataaaaagagaggatgggcacagtggctcacaccggtaatcccaaatacagtgggaggttgaagcaggaggatcacttgaggccaggagtttgagaccagcctgggcaacacagtgagatcctgtctctacaaaatattttaaaattagctgggcgtggtgatgcatgcccttagtcccaggtactcaggtggctaaggcgggaagatcacttgagcccaggaattcaatgctgcagcaagctattatctcgccactgcacttcagcctgggggacagcacaagaccctgtctcaaaaagaaaaagtataggaagacgtattaataaactaatatttaaaagataaaatttcagaagagggtctgcttgtttgcatttaaaccttctgcattatagatttaaactttaagtaagttaagaaaatgattcttgc

SEQ ID NO: 812549 - DNA, 636 bp, Homo sapiens
ctttctatacagtcaatctgattttttctataattagtttttagtttcattgatttctgctctaatttttattawttcttttcttctgccttagactttttttatgttaaggtagatatatagattattggttttagatctcttttataatagcatttaatgctatgaatttccctctaagcactgcttttactgcattttactaaccttggtaggttgtattttaattttgttcaaaatatttttctaattttgtctttatttgtaaagcatagcttctttgaatataaaattctgggttgacacttttttccccccagcactttaaatatgttttccagtgacttctggcttctactacttctgatatgtcaggttttaattatattgtttctctgtatatataagggttggatgggattttttccccccaagattatctctatctttggctttccgaaacttgacttaggtgtgggctttatatttatcctggttgggttttgctaacattcttggatctgaaagttgatgttttccaccaaatttggggagttttctctatttctttaaatatttttttcttccttttcttgatctaagatcccaatttcatctatgttggactatgtgata

SEQ ID NO: 812550 - DNA, 636 bp, Homo sapiens
ctttctatacagtcaatctgattttttctataattagtttttagtttcattgatttctgctctaatttttattatttcttttcttctgccttagactttttttatgttaaggtagatatatagattattggttttagatctcttttataatagcatttaatgctatgaatttccctctaagcactgcttttactgcattttactaaccttggtaggttgtattttaattttgttcaaaatatttttctaattttgtctttatttgtaaagcatagcttctttgaatataaaattctgggttgacacttttttccccccagcactttaaatatgttttccagtgacttctggcttctactacttctgatatgtcaggttttaattatattgtttctctgtatatataagggttggatgggattttttccccccaagattatctctatctttggctttccgaaacttgacttaggtgtgggctttatatttatcctggttgggttttgctaacatkcttggatctgaaagttgatgttttccaccaaatttggggagttttctctatttctttaaatatttttttcttccttttcttgatctaagatcccaatttcatctatgttggactatgtgata

SEQ ID NO: 812551 - DNA, 535 bp, Homo sapiens
tcctgccactcttccaaacctcttgattcccaggcaatcactgatcagctttctgtcattatcatttacatttcctaaaatttaacataaatgaactcatacagtatgtactctttttttttcagtatttgctcttttgtatctggcttcttttactcagcataataattttcagattcatccatattgttgcacatattaacacctcatttctttttgttgctaattagtatttgtttggaaaaatcaaatttgctcatccattcacctgtagatagacattttgggttgtttttggtttgggctgctacaaataaaggctctataagcacttgtttgtaagtctttgtatggaaatatgatttcatttcctttgggtaagtagctaggaatggaatggatgggtcataygataggtgtatgttcaacttaagtgccaacttacttaagtaattttggaaataaatggagtctgtaagactaaaaacaaaaagaattgcacataagcactgtattctgcttgataaagttattg

SEQ ID NO: 812552 - DNA, 429 bp, Homo sapiens
ctgtgtgtgcagtttgggtaagatcaggccctggtagaaagagctgtgggctggaggtctgacaacctgggtttgagtcatggctctgcatggtgaaaacttgggcaagtcactcactcctsctgaacttcaattttcatatctataaaataagttaagattgatgatctctgggatacttcctgctccaacttgctgggttctgcttgccttttgagcatcacagttccagaagcactctaggcctttacctggaaagcatggagccaggaaatgtgaaactcgaatagccagttggattggtctacttaggctgctgtagcaaagtaccccgtgctgggcggcttaaacaacagaaacacattgtctcacagtcctggaggctggaagttcatgatcaaggtgttagtagggttggttcctccttag

SEQ ID NO: 812553 - DNA, 589 bp, Homo sapiens
tcttaacgttggtggaaggaatctgtaacttcagagactccctttctccttccagtggacttttagaactctttaggggtccctctgaagacatattcagcacagtctgtgttatagtactatcctgtttcattcaagtcaacagatttcttgagcatctcaagaagctaagctgctaggctctgaggacataaaatgataaatgcatggtcttgcctacctgggctctcagtggagctagggaaaatgacagaaaatgctgtatagccatgaaggaccagagatagcatctccatggcataggatcaaagctggctgcagcaggaagtgggatgagtttgcccagagtgaggggaaaggggatagattgacaggaggaggtgaagtccaggtaggcttcaggcagtgcagggcttgggaagtggggaaaggaaaggtcattctagcagcaaagagggccccagcgayaggcaaagtgcagtaacatggtgtgtttgagggggactctacttgaacttgctgttgggtggggagtgctgagagtaaagggtgggaatgaaatgatgagattccaattgtgcagagctgg

SEQ ID NO: 812554 - DNA, 519 bp, Homo sapiens
catgcaaagaaacaagaaagttttcttaatttgtctactgaaaagacatagaaacaatgatcaatccagtagcaataagcatccctactgccaagattgtggtctctaaatacyatttcctacatcaagaaataaaaacagtgcgggtgtggtggctcacgcctgtaatcccagcactttgggaggctgaggcagggcggatcatgaggtcaggagttcgagaccagcctggccagtatggtgaaaccccgtctctactaaaaatacaaaaattagccaggcatggtggtgcgtgcctgtagtcccagctactcacaaggctgaggcaggacaatcacttgaacctgggaggtggagattgcagtgagctgagattgtgccactgcactccagtctgggctacagagtgagactctgtctcaaaacagaaataaaaacaaagggttttctggagaaatggttgattgcaggtctgaggaaggaaatgtacaaaatgagagcaaaacttcttgtaatacc

SEQ ID NO: 812555 - DNA, 613 bp, Homo sapiens
tagagatgtggaagcactctgctggatataggatttttaacaagcaaagaccttaggagatgattcctcataacatggaaaaagtgaagagaaggcttacgttaagtgaagtttaattgtcatgacagatggtgaaagagaaaatttaaaggctcagatattgggcactcttgaataaatatgctataaatgttcagaacattcaccagacgattttgttctgtaggaaaacacagagccacataggatgatgctgggtaagaggcataaaagagttaactagttattcttctctgtagaccagagctgaaggtaagagagtccattacagaacttggcttgctgagagtagtatggaggtcataagacacttagcattcaataagagtactactaagcttgtacaagaatgaacaactgtgagagagaaagttggtcatgccaataagaagtcttgagacattgtccagttcacagccctacatcattttgtagacctggaatcctttgcttgactgaaatcttttcakacctggaacgcttcgcttccttcaaactagaaggatcctgcaaaaccatagcaggtaaacatgatagcgtttcctcagtcctt

SEQ ID NO: 812556 - DNA, 569 bp, Homo sapiens
tctgcctgaaagcctgacttctcatcatctaagaagaaacagcacatttatttttctgtctgggtgtgacaccatttcagagaaaggttgctagctttgagctgaaatgttatttcatccctggagtgtaggtgaaggctgtttcttctagggattggagagaactgtgccagctaaggcaagtactcaggatagccagatgctgtcagcaaacaaagagtctcggtggaaagtgagaaagtgtgcattagggtgaagaggctgaattgccacctatccgtagctctgggaagagagaagctctgtaaataatccactttcaggcagtttaatgctttgaacatagtaacagcccatgcgcagaaatcatctgatagagcagattgcaaatttcacttccagcagtgtggttgttcttgcactacaaggaaaggttctggcagcctagggaggaagagggaagagaaggagggggactttgaaatatggcctggccctcctcccacctccatgatgccacggggaaggggtatctcagaagggatcckagctattgattagaaccagtg

SEQ ID NO: 812557 - DNA, 630 bp, Homo sapiens
cttctgccctccaacccctcaggtcagagagaaaacaaggtgataccaacacagttkaacaccgaatgggctctggtttgcatcccacaagtattttctttttttttttctcttactatttttaatcgacacataataattgaacatatttatggggtacagtgtgatatttctatactatacatacataatatgtaaggattgaatcagggtaattggcatatctatcacctcaatcatttgtcatttaattatttgatttgtgttggtaacattcaaaatctgctcttctagccatttgaaaatacataataagttgtccattattgtcacccaacagtgctctaaaacactacaacttattcctaatatctaggtataattttgtttctgttaaccaacttctggctggtccccctgccccactcaccctttccagcctctagtaaccactatactactccatacttccatgagattaactttttaagcttctgcacaaaagtgaaaacatgcagtatttctctttgtgtgcctggcttattttacttagcataatgtcctccaagcttatccgcattgccatgaatgacaaaattttgttatttttatggctaaatactattccac

SEQ ID NO: 812558 - DNA, 630 bp, Homo sapiens
cttctgccctccaacccctcaggtcagagagaaaacaaggtgataccaacacagttgaacaccgaatgggctctggtttgcatcccacaagtattttcttttttttttyctcttactatttttaatcgacacataataattgaacatatttatggggtacagtgtgatatttctatactatacatacataatatgtaaggattgaatcagggtaattggcatatctatcacctcaatcatttgtcatttaattatttgatttgtgttggtaacattcaaaatctgctcttctagccatttgaaaatacataataagttgtccattattgtcacccaacagtgctctaaaacactacaacttattcctaatatctaggtataattttgtttctgttaaccaacttctggctggtccccctgccccactcaccctttccagcctctagtaaccactatactactccatacttccatgagattaactttttaagcttctgcacaaaagtgaaaacatgcagtatttctctttgtgtgcctggcttattttacttagcataatgtcctccaagcttatccgcattgccatgaatgacaaaattttgttatttttatggctaaatactattccac

SEQ ID NO: 812559 - DNA, 622 bp, Homo sapiens
tgattattaagatcatcacatatttcttgcataattgaaaactaaaaacctggggccacaggccagctgttgaatcttaggcacatccacatctcttggcatgagtgtcctcaatagtaaaatgagcraattagatagatgaccttaaaggcccgtccccattctgtgatgacataattcaacagggatgcttctattgggccctgaatgtagcacagaggtgaaagggaacactacatagcaggcttacagagggggctggtgggaagagaacgagatggggcctgtgggatagatcagagccccgcaagctttgtggagtgcgggggaaggaagactgcaagaaagccagccaaggcggctgcctctccactcaactatgtgattaagtgactggcttctgtttttcacaaagccagtctccagctcaaagaacctcagggactattttaaagacaagttattcctttgtttttaattgtaattaagtaggtattttataatatttaaatggtgcaatttacatgtcacttccatgatgcgctgggtacccttcaccagaaggagagaacgtaagtttaagaggactgctgtgtattattttgtgactagggaagtgcat

SEQ ID NO: 812560 - DNA, 559 bp, Homo sapiens
cttactgtttaacaggcactgctctaagtgtgttacgtgcatcaactcaaacccatgacaatcctacaaaataagtacatactctcattaggcctattttataggtgaacaaactgaggcacatgccctctgttgccaagctactcagtggctgagcagaatttgaacatagtctggcttcagaaggttcattcttaatcgttacgctttactgtctccaaaaccagagagaggacttgatccaatgaaccgcctcttcctgaagcactcctccagatgacaaaactatcaacagagaaaggccacccggccagcacagcctggatacccctgtgtttgggctgcagaagcacaagcttaatgaagaccccaaacttcctgaagggacagaggcacctggaacaatgctggccccctggccagggtctgcagtggattcccatcagtgcttgcagctyctctcctgcaggggagcccaacagttcatgctcctgcacactctctgggcctccggtgcagtctggtcacctgggtgacccctgcccacctgggaccaggg

SEQ ID NO: 812561 - DNA, 622 bp, Homo sapiens
gtgaaaaagaggtaggaaggaaaggaggtgggggggatgactgagtagagaagaaaaacataataggatgcttacacattgttgaaggtgtgttcgtgattttggctygtgaatttagagttaacccagatggtcccaaattaatgatagacatctggtggctatggtgactccagggaaggaaagagaacagcgagccggcacagttagtgaacgcttcacagaagaggctgtactgggggacttgatcgatttgtgtaatttagatacacaggccatgccctccaggtaaaagtactcggtagcacagagcaaagcacaggagtggggatgaacaaggtcagccagtccagctgcagaggagtaatggagatggaacaggccttatgcaacagtggacacttctgaaaaaagggctactagcaaagataaggtatcatttgggaagattaacacagtatttggtatattgaatgggttggaaagagatttctggccaagagaggtggccatagttaagcccaagagactaagattgtatcctactcgggaggaagagggcacaaatgagagacccccatccttaggatgacatcttcagcccttcacttcattcttggag

SEQ ID NO: 812562 - DNA, 592 bp, Homo sapiens
ggcagggactgtgtctcccatgtcaagttggagtctcacctagggcagaggctacatcwctcccatcagattggagatcccccctttgggagaggtgctttgtctccccactcagcccaggggctcccttatggaaaaagttgtctcccccatcggaacaccggctcccataaggcaggtgttgcttccatcagactcagactttccctcccatcagactcagagtttccctcatccttcagactgtggtttccgaaagctacagccacaggacctccttgcccagaagcagagggcagcagtcctccatgactctcttgtgccctctgttgttgcagaaagagcacaaaattctcagagaagctgctatcagaaagtggctccacggcaagctgcacccaggccactctctggtctccaataccaagcaagcccgggccaccgccctctccaagaccccagagcaacgggaatcgcagcgttccaggagcttccacccctctgtggatgcacgcctgcaatgcattccacagcccacggagatgcccaagcccatctacaggaagcccacggtcaagcggcccacaatgtg

SEQ ID NO: 812563 - DNA, 539 bp, Homo sapiens
gggagaatcactgacctgtgatcctgccactgcacttcagcctgagtgactgagcaagaccctgtctcacaaacaaacaaatggaatcacaccaaatattagtctgactgatttaaaggacttatacttggatgccttttttaaagtgaagaatcaaataatataactgtgtttcttaggcagatcacccaaatctctaattttttttgttttgttttgttttgttttttgtttttgttttttctgttttgtttttgagatggagtctcactctgtcgcccaggctggagtgcagtggcacgatctcggcttactgcaaactccgactccctggttcaagtgattctcctgcctcagcctctcaagtagctgggattacaggcacacaccaccacacccagctaatttttgtatttttagtagagacggggtttcaccgtgttggycaggatggtctccatcttctgactttgtcatccgcctgcctccaaatccccaattttaatgtgcaaccccgatactcagaaataaatgtaaaa

SEQ ID NO: 812564 - DNA, 500 bp, Homo sapiens
atagattgtgggtaattgcacataggtagaccgtaagagctaaccaactttgatgatcattattayattttgaagtcctgcattgagatgaatagttgctttttttcttttagggcatggctcttcttagcaaatatgttcacattcattttcaatgtggtgttgctctttttgaaattcttggccaggcacagtggctcacacctgtaatcccagcactttgggaggctgagacgtcccaaatatggtgaaaccccatctctaccaccaccatcaccaacaaaaagttaggtgggcatagtggtgcgtgcttgtagtcccagctacgtgggaggcttaggtgggaggctggcttgagcctgggaggcagaggtagcggtgagccaagatatcaggccactccactccagcctgagtgataaagccagacttcgtctcagaaaaaaaaaagaaagaaagaaaagaaattcttccatgattcagtattccctgttacattt

SEQ ID NO: 812565 - DNA, 660 bp, Homo sapiens
tgacattcaaagcccttcaggatccagccctgacatccttaaccttcccaccacccccagactccccaggccccttgcccctgacaacccagaccctctgcttatctggaatgctctctgcccctcctccyacccactttccttcagggtccagtttcaatcctcccccttcaagaagctttcgactgctccagcccaccaagaggattcccctcatctgagctccaacccccaaatacaatccaaggatctgaacccggagtttgaagggcacggtggtgggagatcaatcagtaacagaacaatcctcccgcagactacagttcccgtgcacggcagttcctgattacaaaactgtcctgatataattattaatagcactcctcagggtcagtccttgtgctggggaggggaggggaggggcagggcccaggaatggtgccaaccctgggctccccacagagcaggccacagggaggtggacccgcgagtgctgtgcttatcatggagggctccgtggggaggtgggactttgctgaacctcagacaggccttaaacagaaaatgccagagaaacactcaggatcacccttatcaagggccacaggaaaggcgccaggtttaatctcaaagccacacctggaaccaacggtttggagc

SEQ ID NO: 812566 - DNA, 630 bp, Homo sapiens; identical to SEQ ID NO: 810111

SEQ ID NO: 812567 - DNA, 528 bp, Homo sapiens
aaaaggtgacttgggaagagctcctaggaaggtgcgggctggctgctctgcagaggtcttgagtgaaaaggaggggaatgaggagggaagaggcagccccgggtggactggacagccatgccgtgaacctcacagagactttagacagagagggggctctacaacaccccagtactccctctgcctctcttgccccctcctctgtccacacaggtctgcccaaggccgcccctttggacactctgaggaactccaagccaacaagatgcctctcattagtgacttctaccctgatgccgtgatggtggcctggaaggcagagggcaccaccatcaccctgggcatgaagactgccacaccctccaaacagagaaacacaagtacacggttagcagctacctgaacctgacgtctgaccagtggaggtcccccagcagctatgttyttaggcccctcaccccacccacagcagccaggagctgcaggatcccagggcaggggtctcccctcccaccccaaggcatccag

SEQ ID NO: 812568 - DNA, 513 bp, Homo sapiens
ctcatccccaggccagcacagggatagggaaagaccctggaggtgacagcagaaaacagcagccccaattatagtctgacccaggctattgagcccacctgacccaatgaaagccaccaccaaaatstgggggctccaacagataggcagaactgatgacaactgaagagagaggaagagaacagagagagacaacagccaagaaaacaggccctatcccagagcaggccaagcctcaccatgttgtcacttagtcatgctcaaaggatgctacaggaaggaaggggcacctgctgggtgcttctgtagaagaggcaggcctcatggggtacgatgaaagggagcctgactcaacagatgaggcagggcacccatgggcaagagacccagtggagccgctgctaatgaaagaaaagggtacttgcactatccatggttctgaggctaaagctgctccaccaagtgggtctcaaacatattagtgacaatagctgtcgctttgtactgagtgca

SEQ ID NO: 812569 - DNA, 488 bp, Homo sapiens
tgtgagaataaagtgttttggaattgttaaccagtccttagtttttgctttctatctcattttcattgagaatttaaagtggaatttataacgaatttgtcagatctggtaagcatttgatayatgctagtttagtgactaaccaaacccaaccaaccagtcttctagggctgattaagcaaaatcctgataactgtttatgattattactatacctagggctgccataacaaaatacctcagactgagtagcttaagcagcagaagtctatttcctctcagttctagagactggaagtctgagatcaaggtgttggcagcaacgatttctcctgaggcctctctccttggcttgtagatggccattttcacagggtctttgatttttgcacacgtgtctatagccaatatgttctcttataagaacaccagtcagattggattagggcccaccctcacagcctcatttaatcttaatcacctcttta

SEQ ID NO: 812570 - DNA, 597 bp, Homo sapiens
cggcctctcgggtctattgacccttctctgcctccccggtccggactcatacaacttggaggcccagaggtcgtccagtctcatcttgacgtcaggtctgtgacaagagggtgattggggaagcattcccagtgtacaccttcttccccattccaacgttggacagcattcttttttagagagatagtatagtaaagataatatggccgggcaaggtggctcacgcctgtaatctcagcatgttaggaagccgaggcgggcggatcacctgaggtcaggcgtttgagaccagcctgaccaactggtgaaaccccgtctctataaaatacaaaaattagccaggcgtggtggcaggcacctgtaatcccagctactccagaggctgaggcaggtgaatcacttgaacccggaaggaggaggttgcagcgagccgagatcgcgcactacactccagcctggataacagagcgagactttgtctcaaaaaaaawaaaaataataataatatagacagcctaaatgtctgcctccggtcatctcggtccctgggccgagttctttctcccagggccatcctaagtccctccctcttctaca

SEQ ID NO: 812571 - DNA, 494 bp, Homo sapiens
atttaaaagtttaaagatggaggctgggtgtggtggctcacgcgtgtaatcccagcactttgggaggctgaggcaggcagatcacttgaggtcaggagttcgagaccaacctggccaatatggtgaaactctgcttctactgaaaatacaaaaattagccaggcatggtggtgtgcacctatattcccagctactcaggaggctgaggcaggagaattgcttgaacccaggaggtgaaggttgcagcgagctgagatagtgccattgcactccagcctgggcgttgcagcaagactccgtccccccccccccaaaaaaaaaaagtttaaggatgtatcttaacccacatattattttctctacttgratgcatcctctgtaacttagtatatgtaatactacagatagactttctcaacatttgctgcctatgctaaggatctgcagccaggttctcagaagcagtacctaccaattctcaacagcagatggca

SEQ ID NO: 812572 - DNA, 519 bp, Homo sapiens
attccttggaggtaagtattattattatccccactttgcagatgaggaatctaaggctcatakgtcagtaagccagtaaaaggcagagttgggatttgaacccaaggctacactctttccgtggccaggattttaaccggggtattcagtactggtgccattatgggggaggaaaagatgatggattcattttggacatgttgagttagaggggcccatgagacctccaggagaagaggtgagtctgaagcttgaagatggaataatttgaaataaaatgaatttgtttctgaaagttgtatcctaacgttggcatattcagaacaccagtcacattgacttgccctgcagaatttccagatgggaattctagcagctcacatgccaaggctgctccttagtgtgtgtatggcttgccagacccatcttccaaagctgcactcaggttttttttttttttgacatgtctcagctcctttctccaccatgtgtgcctgcagtactgtctccttttatcta

SEQ ID NO: 812573 - DNA, 469 bp, Homo sapiens
tgagcttgggaaaggaagattcttcccaattatgcttctatagcatactcatactccaagatraggagaggctggaatgttggataaccatccccaacccccaatgacagtcatccactaagctctgcattaattagctgtgtgaccatggataaatcatttcatatttttgaccctcagtttattcatgtgtagcatgagaggtctcaaacacaccagcaattttcaacttttattttttaaacaattgcttactttcataaaatgaagttttatttagatacccaagatgtaaaacatgaaaaatgtagacccactataactgggggagttcttgagggtggaaagagagaaccctgctcagccttcctattctgccccctccccagattcccttgcctttgctactggctttcccagccttggaagctactggggtacgttaaggatcctccaggattccatggag

SEQ ID NO: 812574 - DNA, 627 bp, Homo sapiens
gttttacagtctttttatcttttggtctggcttccccagggtcactcctgcatagctaaatgtcagaggaggctgtgctagttaaacacctcragcctctcggagggcttctatgcaccgcgggtggatctgagtgtaggctaagcagctcactcaatggccagtctcatgtttgtctaggcttttccgtcccatggggcgctctcaagtctcagccatggcccttctatgcctctctgtttcaggaggtcagcattaaatttctgctgaccaccacctgtcctatctggaattgcaatctcaggctagcaaaacggagttttctccgtttgtttccttccaagctcaccacttttagttgacatcatgggttctgcaccacctaacctccaccattgttcaccacctcaggcaacaaagctgctggttttcataccagctcagggctagaaaagccaggaggtttgaggggtgacagaagccccaggtaggaaggccacagactccaggttcccacccaaagctctagaagcttttcaaaaataacccaatttcttctctgcctttggtcaatttctagagaccccaaatggttggttttgacaactttagttttatacttgtttc

SEQ ID NO: 812575 - DNA, 627 bp, Homo sapiens
gttttacagtctttttatcttttggtctggcttccccagggtcactcctgcatagctaaatgtcagaggaggctgtgctagttaaacacctcgagcctctcggagggcttctatgcaccgcgggtggatctgagtgtaggctaagcagctcactcaatggccagtctcatgtttgtctaggcttttccgtcccatggggcgctctcaagtctcagccatggcccttctatgcctctctgtttcaggaggtcagcattaaatttctgctgaccaccacctgtcctatctggaattgcaatctcaggctagcaaaacggagttttctccgtttgtttccttccaagctcaccacttttagttgacatcatgggttctgcaccacctaacctccaccattgttcaccacctcaggcaacaaagctgctggttttcataccagctcagggctagaaaagccaggaggtttgaggggtgacagaagccccaggtaggaaggccacagactccaggttcccacccaaagctctagaagcttttcaaaaataacccaatttcttctctgcctttggtcratttctagagaccccaaatggttggttttgacaactttagttttatacttgtttc

SEQ ID NO: 812576 - DNA, 653 bp, Homo sapiens
cactgtacagtcagagagccggggggagcttcactggagcagttaaaacacgtaggagtgcacagtgagagctgggctgggggtggaggatgagatgggagcccatctataaaggcatcgtgtgccaagcaaaggaagcaaaagagaacgaggaggataatggaggcggaatggatcgtaaagaggaaaataaaagaaaagagatggatgaagaaggaaaagtagagagaaaagaaggagtaaaaacacagccatcctctcctgcatgtgggaactggtactggttctcagtcttaggaaatgttttctccagtgagatgccccccacacactagtcctagccccttgtagttcagcaaaaaaactggcaataagttttatgctttaataatgtctctgagttagcttcaatcagaacaatttgactctcatattaaaaaaaaaccaaaaaacccaaatgccataataaagtaagctccccaaaatatattcactgacactaaagggttgcgtcaagagtctgctcataagtgcctgmtcaattgggttcttaataaatgcttttccaatcagtgttagcagtagtggaggaaattctaataaaaaacaactgacgcaaggtacttcacacttctctgcactcctctgccaca

SEQ ID NO: 812577 - DNA, 653 bp, Homo sapiens
cactgtacagtcagagagccggggggagcttcactggagcagttaaaacacgtaggagtgcacagtgagagctgggctgggggtggaggatgagatgggagcccatctataaaggcatcgtgtgccaagcaaaggaagcaaaagagaacgaggaggataatggaggcggaatggatcgtaaagaggaaaataaaagaaaagagatggatgaagaaggaaaagtagagagaaaagaaggagtaaaaacacagccatcctctcctgcatgtgggaactggtactggttctcagtcttaggaaatgttttctccagtgagatgccccccacacactagtcctagccccttgtagttcagcaaaaaaactggcaataagttttatgctttaataatgtctctgagttagcttcaatcagaacaatttgactctcatattaaaaaaaaaccaaaaaacccaaatgccataataaagtaagctccccaaaatatattcactgacactaaagggttgcgtcaagagtctgctcataagtgcctgctcaattgggttcttaataaatgcttttccaatcagtgttagcagtagtggaggaaattctaataaaaaacaactgacgcaakgtacttcacacttctctgcactcctctgccaca

SEQ ID NO: 812578 - DNA, 540 bp, Homo sapiens
agtgctgggattacagacatgagccacygcgcccagccaaatgtgttcattttaagtcactcactttgtgccaatttgttatagcagccacaggaaactaatacaatacttgtgccaacttaagtaacagcaccagccaaagtacataaagtggaaataaaggtatttttagaaagtctcattactataaaatatggtgtaaataaaaacagatctgaatatgcaaattgaagtttcaaaataagtctcctgccatcccatttcaaagacactggaaatcttaagctcttttctttacaaattctgaaactatcattgcctgtgggttgggttgaaatgaaggcacgtgggtgtttcaagggtatgttctgtgacaaagagacagaatagaaaaatccaaagtcatagcctggagctaatacagtaatatgaatacataaaacaggaaggacaagaatataaaagtgaatttggggacctgagaaagtcaagaaaatgattggagaaatacaatttgggagaccactttagaacccagcc

SEQ ID NO: 812579 - DNA, 579 bp, Homo sapiens
aaaagagctgacagtggaaacacagccaagcctttctaattagcaatcctagagaggacagcaccaataagaaagaagagcagccatcaaagccaggcctttatatgtatgtaatcaacagrcatctgatctagattcttaaagatggtgtggtttgggtgggtgattttatttattttatttttctgtctcctaaataatatgtaatttcttcaggccaagaaataaattgaaaggatttagagggatttgcttatcagtggaacaccacgtagcattacattcctcctgcttttgggaaggtacattgaagtttggttaatcttctgtggttcaatactcctcttccctctgtcagcctgccttgaacaacagattaatcccttttccacccactctcttctccttcctccctcccctctctcttgatctacccttccctttttgagcaaatagaagaaaaatcttaaaagtggggggaaaaaaaaattaaactgctgcactacatttatttatataatcctagaagacctcaagggtagaaataaaggatcccaatcctcggcacaaaatttggcc

SEQ ID NO: 812580 - DNA, 581 bp, Homo sapiens
atgtctaatagcctcatttggtttataatgctgtttaagacatttgttttcttattgaacctctgtttggttgtttcatccactgttgaaagtgggatgttgaaatcaccaactattattgcagaactgtccacytcttcaaatctgtttgtctttgtttcatatatcctgcggatcttttattaggtaaatatgtaaggataatatctttttgatgaattaaacattcttgatatttgcatagtacctctagctctattttggttactgtttgaattaattttcccgtcccttttaaaacatgtaaaaagtcattctgtcaatctttgacttttaactggagtttaatttatctgcatttaaggtaattactgataagaaagattttgctatttttgtccttgttttctacaaatttgttgttgttgtggttgttattcaattcctccaaaaactgctcatttttacatttgattgtttttctagggtaccattttgactgtctcatttctctttagtatattttaacagttattttcttagtggtcattaagggtattataactaatatcttaaattta

SEQ ID NO: 812581 - DNA, 619 bp, Homo sapiens
acaacactttctttaacaaattatttaggcaggaagccaaaccccactggactcagaaatggtctcttccctgggaatatatccacatttactcctcagttgactatttcaatgaactatccagtttatcccaaattagtgatattggagttcaaatctcacagatgttttctttcttgacagccatttttatttttttaaaaagaatattatattacacttttaatctttggttttcataatatttggttttgcaactgctcacattgccccagagaactagaaacaagtgcttgatttcaattgaattatttgttacttaacaaataaaacctatgaaaagccattattactatatcccttctgcagttgaaaaagaacatatttttgataatattttctggaagcactgccaactttattttttttccaaagtgtatggcaggtatttcatctgttcttcattgacctatattatttatatgctataaatcattggctttttcacatatattataaaacttcttcgagattaattttggtgaaaagtttattctataaaatcactttattataggtaaatcayatcatttcattctctgcaatcatacctccccat

SEQ ID NO: 812582 - DNA, 552 bp, Homo sapiens
cagtttgcatattttttcttttattgcctgtgcctttggtrttgaattcaaaaattcgttgccaaatccaatactgtgatgtttttgtcctgtgttttcttctaagaatgttattgttttaggtcatacatttaggtctttgatccattttagttaatttttttgtatggtgttaggaaagaatccaacttcattctttcgcatgtggatatctagttctctcagcacaatttattgaaaagactgtccttcttccccctgaagggtcttgggttccttgtcaaaagtgatttgactgtatctggaacagattatttctggactctcaatccttttaccagttataggtctattcagattttctatttcttcatgatttagtcatggtgggtttcgtgtttccaggaacttgtccatttcatctaggttgtcttaattcgttggcatacaattgttcatagtactcttatagtcctattttatttttgtagacttgtccgcattttcacttctgattttagtaatttgaatctccttctttttttcttagtt

SEQ ID NO: 812583 - DNA, 539 bp, Homo sapiens
taaaaaaatcaagacagtggtcaaatattaaataagtgtggctcttattttctgtggtgccctaattctaccttctcctctgcctctattcagatcacccattytgatccatactaaagtatacactggcagtccttttctattcctttaagaaatctttggaaaaagattcaaggggacaatatcataagcctagtaaaacatcatgatcagaataatgcttactctttactgagatggttttatttttaaaatgaacataattttttttatttttaaaatgaaactaataaaactgcttattctttgagatggttttataaaataaaatttataaaatatttatatttatttacatatttaaaatatttataaagtaaaaccatctcaataaagagtaagcagttttattagtttcattttacaaatgaagacactgatttagagaacttaaaggaaaactttaaaagcatacagttaataaagaggcaaaactagaagtaaaacttgggtcctaaatacctacctctaaggtatac

SEQ ID NO: 812584 - DNA, 560 bp, Homo sapiens
ttactctttactgagatggttttatttttaaaatgaacataattttttttatttttaaaatgaaactaataaaactgcttattctttgaratggttttataaaataaaatttataaaatatttatatttatttacatatttaaaatatttataaagtaaaaccatctcaataaagagtaagcagttttattagtttcattttacaaatgaagacactgatttagagaacttaaaggaaaactttaaaagcatacagttaataaagaggcaaaactagaagtaaaacttgggtcctaaatacctacctctaaggtatacaaagtttctcagaaaacagttactattctagatcatattacttgtaatgaaggttgtactccctttaggctctagtttcttttgaactaaatattacaatgcaaacttaattttaaaagacttactttggctattccgtatagtcattaaactataacaaaaaagacatcatatcattgtcaaaggcactgaaaacacaaatctctgaaataaaagtcactgaataatcacagatgatttat

SEQ ID NO: 812585 - DNA, 555 bp, Homo sapiens
tcaaagactatgtaacttagaatttgttcttcctttcctttgtctctcagcaaaatataatcatcttagaaattttcctctcttctatttgtctattctatccacatatctagcttatttcctgttactgggattttgcctattgtttttctataccttacttctgtaaaatttgttgagtttttctatttatccctctttctccttagttaatgaggtaccctaaagcactagcacttaggaattagtctacttgtcagcaagagcgatctattaacaaagggatatgtaagaaacaggagaactaaaacaatcttgtggaaagggattattttctaagcgtgtgtctactatattagtttacttccgaaaaacatcagttacttctcataaatccatcctgtgtttaagaacataaaatatagtgtggatwacaaatgcaaagcatgcaaattttcaggtaatcaggcgagccattacttacggcacaggtgtgccgccaaaaagaaataataataataataataataataactactcaataaatagagagca

SEQ ID NO: 812586 - DNA, 613 bp, Homo sapiens
gggaacctagtatctaaaaaacttaataaagtcaaaaagactgaatttagaacttgaaattttgattttggaaagtttgtcaaatagcaaacattaaaacgcttgatatgacaaaataagagcacagatctctgtaaagtaagtcatccatttagccaaaatgataattcaaagattttaaaaagcaaaaacccttactctgtaatagaagaatatctttcccaaacaataaaggctaataaagatggcatgaagtcatctgaatctgtgtcttctctccccttactcttattttttttgcagtttactcaaaaggtaaacaaaaatattttattatctctaaatattacacagaaatcttgtttaaaagagaaaacctatgtatagtgtattattaacactaaagctaattttaataaaatcttataaagaaatacatccttaaaacttctaaattagacaaaattactttcactttagcaaaaactgtatttccatgccttcttataacccttctatttaccaaacacatcctgctttccttatacwctttatatacagagatgttttatatccattagctttgtgtacatacattatacagttaactcat

SEQ ID NO: 812587 - DNA, 623 bp, Homo sapiens
ttatttctgagggctctgttctgttccattggtctgtatctctgttttggtaccagtaccatgttgttttggttactgtagccttgtagtgcagcttgaagtcaggtagcatgatgcctccagctttgttattttggcttaggattgacttggcaatgtgggctcttttttgggtccatatgaagtttaaagtagttttttccaattctgtgaagaaagtcattggtagcttgatggggatggcattgaatctataaattaccttgggcagtatggccattttcacgatattgattcttcctacccatgagcggagcatgcttttcttaaaggtattttatttttttgtcagtgtccatttgtggttctggttggaggcgtctggagcaccctgttcagaatatatggaggaaactcaccaccaccatgtcattcctcaagtcctgtgatcctaggctatccaccttcttctttctgtccttcagcatcttccaatgaactagaatcctttaaaatgtattaaaatttggtttcaaggaccaaaatayggtctagtttggtacatgttctgcatgcatttgagaagaatgtgtattctattgctgttcagatctatgttgggt

SEQ ID NO: 812588 - DNA, 555 bp, Homo sapiens
aaggggccttacaagagggaggtaggagggccagagattgaaaaggacaggtgactcagaagcgcaggttgagcgaggcgctcagaagatggagaatggggccagaagcccaggaatgtggggggtctctagamgctgagaaaggtaaggacttggaagctcctctagaacctctagaaagggacacagccctgctgacaccttaacccagtgacactggttgcaggctcctggcctccagaactataagagaatacatttatgttggtttgagccagtaaatttgtggtaatttcttatagcagcaattaaaaaaaaaaaacgaacatacttcccacttcaaatagtaggagaaaacatccaacgttgttatctctccagctgaccgactgtgcatgtgcactcacctttcctgttcattcattccccagtgcacctctttaacaggagagttcccagtaaagtcatatggccaaggaaataatggctgtgatttcacgcactctgaagaattacaagccatactattttgtagtaaatgacattacaattact

SEQ ID NO: 812589 - DNA, 610 bp, Homo sapiens
tgtacataaccagaaatgctacacaaagaaataatgaaatatataatctaatacaacttttctgagctgaagaaagacctggagacttgatgaactcactacattccagataaaaattattgaaaattgacccacacttgtaaacctcttggcaaaacacttgaattgcaaaaataaagaaaatattctcatttgcaggagggaaaaccagtttcctatgatggaacaagaatcagggtagcctcagacatctctatatgttgaatttgcatctctatatgctagatgtcagtgaagctacacctacattaaaaaaaaaatgtgttgtctttgacactgtggttcaaggtttttttttcttttcttttttttttttttcagaaaacagaggcaagtattcaaactgtcatgagaataagatgtggccaaaattaaatgtggttctatctctcataaaaagtcttagaatgatgcatcacaccagctstctgggaacaaatgtattttgttggcatgggaacaaaataattagtctgaattttgtaaataaactgcggttattaaaattactcaaaacaaaccagaatagtaaccattaaacatgaaaagt

SEQ ID NO: 812590 - DNA, 652 bp, Homo sapiens
gtctacagatgtcaagaggttcagattaagcttgttaaagatctgcttcactcgaactcactgatgattatttatttagcagttttatgtaaccctgtcattgataagcactctattaatttgccgagggacaaatcaacactagttatttttctaccggctattagactcggtgctgctgtttgttacaaaccacttgccagttaattataaattatgggtcctctttgcctatattaattgatatctcctttgcctttgtagtactagacaaataaattgaaggcaagatttattaggcagtgtatgtcttgtgtctcttgattagtattctttacttttttaacatttatacttgtttatacagatttgacagaccaaaacattagagaaatgatctttagggtgttttgtagcgaaaaaagaaagagagagagaggagagatagaaagagatttaataggcttcctacaaatttatttcaaatgacctacaattcattgtaagcaattcctaaaatgccttttgactttgtgctatggaytggtgacggcagcctcccaattatgcaaaatctaatattcaagtggttttaaagtctgtgcatccagttgctatatgataaataaatatgatatgtatataacaaaac

SEQ ID NO: 812591 - DNA, 589 bp, Homo sapiens
aggcaagactaattgggtaaataaataggcaaaagaatctttgccaacaagggctgtagtattgtcctaaggatgaagtatgtgtttttttgtgtttttttttttttgacttcttgtttactttgcatgtaaatgtaacaggaactagtgtttggccagttttgtgtctatttactgtctttacatttaatgtctgtctctgcctatttctgtcattccaaacactttagaaataacaaagattttctgagttcaatgagaaaattgtcactaccgctagcatttgttctatcaaatgcattaaatagaatgccacctctgggtagggtggagtttatagtctgtcgtggatcacatagctgacattgccaataagtataagatatgatttcaggctccatcattgtcactctgggaagagagcacagtcctgcaggtcttgcagttacacaaagagggtcctcyagaatgtagctgcatttaaaacagaaaaaagaaagtgtggaagaatgaaacactttggcacgtattccccaaatgcagattatttctctctagacttcaatttttgctcttcttcttcccatcc

SEQ ID NO: 812592 - DNA, 524 bp, Homo sapiens
ctattacccatgcttcattgttttcacattttcttctcataagaacaattctagtattgctgcttgaactttttactttacattcactttcctttcctcctgccagcccatatgcaagtactaccttagtcttcaaataaacatacaggtcagatggttcactaggttgttacattaaaaccttaaagattttgtgtctcaaaaaattcttgattcaatgtaaattattgaggcataatagctcaacttctcctactggttgtttcatttcttgctttattggaaaggaattgctaatttgtaatgtttctatctaaacctgtcaagtaaaatgtccttaatactgttttttatgcttctttgaggctttgtctacaaaaagactggagctgggtcaataatgctaatagcagcagcaggcaggaacawcctaggcagatagggcaggtccctggtaaaatcccaccttcaagccaaggacagtttaaagcctagctacaagtcccaagtaaatccatggacca

SEQ ID NO: 812593 - DNA, 602 bp, Homo sapiens
tagagtatatgtaaagcattctgtgattgaatcgtagctcccagaaaatgaactctctgagctgtgctttcctctagtctgagtgatgtatacatttatttataaatacagaataatcatggccagtgayagcaaattgtctaactcctggatttttatttatatgagtatttccttcttttgcctgtatttaatcattccacttaagtgtttctagaagtttccctggacttccaaatggctaaataaacctatcttagtatcagaaagaaactcaagaagtgatttagcccaaattctacttctaggcaagatccccccttcagttttcaacaaaaaagggtctgttctcccaagttcttccagatctcgtatccccttacaagctaactcttgttagtgagatgcagcactgaatcactcttgctgtcaggtctctttcttctggctagtttgtggtgtttaaacccatttcctccacctcatggtgctcaactgctcggctgctcccatacagacaccttccactttttgcgcctcactggcaaagccacctgttgtttgtttcctggagtatgcaatctgccatttttcacagttga

SEQ ID NO: 812594 - DNA, 419 bp, Homo sapiens
gtaaacaaagccactgggaagtttaaactgggcggagcccacctcaactcatcaaagctgytgtagccagactgcctctctagattcctctgctcttggcagggcatctctgaagggcggcagcgtcagtcaggggcttatagataaacccccatatccctgggacagagcacctgggtgaaggggcggctgtgggtgcagcttcagcagacttaaacattcctgcctgctggctctgaagagcagcagatctcccacagcactcgagctctgctaagagacagactgcctccttaagtgggtccctaaccctgtgcctcctgatgagaagacacctcccagcaggggtcgacagacacctcatacaggagagctctggctggcatctggcaggtgcccctctgggatgaagcttcccg

SEQ ID NO: 812595 - DNA, 419 bp, Homo sapiens
gtaaacaaagccactgggaagtttaaactgggcggagcccacctcaactcatcaaagctgctgtagccagactgcctctctagattcctctgctcttggcagggcatctctgaagggcggcagcgtcagtcaggggcttatagataaacccccatatccctgggacagagcacctgggtgaaggggcggctgtgggtgcagcttcagcagacttaaacattcctgcctgctggctctgaagagcagcagatctcccacagcactcgagctctgctaagagacagactgcctccttaagtgggtccctaaccctgtgcctcctgatgagaagacacctcccagcaggggtcgacagacacctcatacaggagagctctggctggcatctggcaggtgccyctctgggatgaagcttcccg

SEQ ID NO: 812596 - DNA, 635 bp, Homo sapiens
agtctttcaatctgtgattatgttttctctctcaattttggtattcgttaattttctcaataatatttggtagtttacartgtagggatatttccttagatgtattcataggcgtttgatatttcttaatgtacttttaaattgtattaatattaaatttttttatataaatataactgattttggaatatataattatataccttaatcatgaatttgtttattaaaacttctatcttttctatagatttatgtaaagaaaaatatcaagagctctacgaatagtgctttatttctgccagaaattatacattttttaaagaaaatcctatcttcatatttgaaacataagaacaagaaaattataagtgtaacatgagcctagtagagtaacacccagtacaccctttgcccaatccactgtttacattttgtcccaaatgctttatcattctctcctctcttttctcctttcctcttctcttcactctatcttgtgtttgtacgtgcatatatgtatacatatattgacatacatgtatagacatttacatttatacatatagacttatatatatggtcagaaacatgtccctataacaacaaatactttagtacatattttctgaaaacaa

SEQ ID NO: 812597 - DNA, 609 bp, Homo sapiens
aaaaagtataggagaaaaattttggatgtgataaatatgtttatggcatcgattgtggtgatggtttcacagacacatactcatcttccaactcatcaaattgtatatattaaatatgtacaagtttttgtatgttacttatacctcaataaagtattttaaaaaacacgtttgctccagtgtgtatttttaccctatcttaaaggctgaccaccctatctgcccatcagaatcatgttgatataaaaatataacaaatatttcatagttcacccccaggaggttctgatgcagtgtctttgggcagggacttggacaattctccacagatgtttctgaagcccaggaagtagtgtggacttctgcacttcaccttgacttatactgctctccttccaccccccaagcagctactgcatccatcatgaagtaatctggttaccgtcacccaagtgccctctccaacctttcaaacattytgaataacctaaaacttctacggaccacagactgagatgaacctaaaaaagaagtttctgacctctgttgtggtgtaaaatgacgccttaacctgggcttcacagaaaacagagcctggagcaatagcgt

SEQ ID NO: 812598 - DNA, 459 bp, Homo sapiens
tgtgtattcacatggccttctgtatatgcctatgtcctaagttcctcttaaaaagacactagtcatagtggatcatgacttaatgtaatcaagttacctgattaaagaccctatctccaaaaacagtcacattttgagatagtgggagttacgacttcaacatatgaattttagggaaatgcaattcagcccataacattaagttagcttgagagttatatattgtattatactggattttttccctaagtagtaagctcttggctttctctaaccattttttatttgatttggttttttgttttttgaattttttttctatttacctttaatgtatctagaattattcactacaataaamtaatgcttttagacacatgtcattttccttatgcctcaaattcaatgtttttagtatattagcacttatatttcctttctagtatattgaatttgcat

SEQ ID NO: 812599 - DNA, 548 bp, Homo sapiens
ggtattgtaagtaatctatggatgatttaaagtatataggaggatatgcataggttatatgcaaataccatgccattttacataagggacttgagcatctgtggattttagtatctatgggaggtcttggaaccaatcccctacagacactgagggaggattgtactaaaagaaaaatcccagccagtctagttttatccccagtgaaaatatttttcaaaacaaaggcaaaatagtgatagtgtcagatacacaaaagataaaaattcatcatcagcagagctgtacattaaaaaatgttacaggttgtccttcatgtggtaggaggtgggtaggagatagatatctaggaaccgtgagctaaacaaacccgagggaatatatcttaactcatttcctaactctacaaaatgaaatgaagagcactagaagcagcagtttatakgtagagaagctttttaaaaatcctgtgtttagaaaagataattggctgtttaaaaagtagtaacaatgtattatgaattttattatagatgtacaagtaagtt

SEQ ID NO: 812600 - DNA, 279 bp, Homo sapiens
atggtgaaaatgaggttttagcttcaggattcactctgttatagcaatataatttcataattctttctctgtctcctcttcctttaccttctcccttcttaccagactctaaattattaatagtaagtgtgtattcatgagttttttattttgtttgagggctatatattatgaacatattttaaatcttaaaaaggttacaatagctgggcacggtggctcacgcctgtaatctcagcrctttgggaggccagggctggcggatcacctgaggtcaca

SEQ ID NO: 812601 - DNA, 632 bp, Homo sapiens
tcatttcttattgagtgggtttcatacttggcttcctgcataagcctgctataagtcagtctttccatgaatcagtgcttagtaagtgttttctgatttgaatgatgctatggggtggcagtggtggaagggaattgatatttgaacactcagagtcaagcatgatcctaaatgtttacatccatcatctcatatattcttcatgaccatcctgtaagagaagtattattattcccatgtgacagaagaggacgctgagtacttaacttgtcatgcttagtacaactagtaagtgggaagtgggagaaccaagactgaatgcaagtctatctgatggcacggctttcatctttcattggcattgccctgcctgcaactcccttggaataaaactatctgggaaaagaaggggaaactatgtgagtaactaaggactgtggtttctagagcacttgagccataaactccccgtgttgagggcatgctcttgtcagcctcactgtgtgcaggcatttattttgcttgggaccaaagstaaacattaacccacttgagctttgcctttcctttcccattttcaaactcccatggctcccagtggctttagtcatgtataccctatctattattat

SEQ ID NO: 812602 - DNA, 596 bp, Homo sapiens
aaaacatatggctgggcagacttggcttgtgagccatagtgtgccagtccccatttttcatatgttgaagagccatttgtatttctttttctgtgaactgtccatatgtcttgttcattttttattgatctttttcttaatactctttctaggcacttttcctatattagtcctttgtgtctgttacatattacagatatttttcttaatttatcacttgtcttttgactttgcttatagtaatatttttcagagcaggagttttgggtgattatttttccctgtttaaccaatattcattgaatgtgtaactgcaagtacagttatgctgtttagtatttaaccagaattcgaatcatgtttcccatgacattggtatgagggaggcagtctctcaacagtgagggagcctcaccccccacaacttaattgatgatagtcacgaatttgggcatttgagaaggtattgtagttctgggttttctcattmccctttatactgtgaatcctgtgagggccaagggcctttgtgtccttagcctttaagctatgcccaaggcattggagacttgcagtaaatgtttatagaatgaata

SEQ ID NO: 812603 - DNA, 471 bp, Homo sapiens
ttaagggtattgagtcaaagcaacattcaagtgggatggaaaaacatagactttacatatctcctacagatctattttggaacacaaacttaagtatgtaattaacaaagtgaaacaatatatacagaaaagagttatatgagaaataatatttagaaagaaaactagcacagcatacatttaagtctaagtaattgttgactcatacactcacaaatagataagatcacatgttgggccatgatgaataggagagtaagggggtgataatctctgaaaataatatgaagaacataaaatcctgctaagatttttgtcttggtgggttggagaatattcwtggtgattattaactctaaatattggtagaaaaatacaagtttcaaaatgtagcttaagtgtttgatagtaaccattagaaattagtatttataacttaaaaatcattagggtaaataaaagtagagcaag

SEQ ID NO: 812604 - DNA, 635 bp, Homo sapiens
atggtaatccttgatgtccaagattattgccagaggccatggcagttgtccaactgagagatgacaggagtttagacattgatgtgacagtggggatggtccagaggaacttgactctgtgtattttgaaagtagagccaaccagatttcctgatggtctgaatgtgaggcataagagaaagagaggggtcacggataacaccaaagttttctctctgagtcgctgaaatgatgcaattgaagtaagctaagatttagggggctgaagatatgcaggctttgtgagaatcagtttggaacattttatgtttgagatagctcttatatatccaggtaagaggtcatgttagactggtgagtttagtctttgggagacaatctggactaaaaataataatttgccaattgttggcatataatttgaatttaaagccacaagacttgataaactcacttagaaagtgagttgtagattgagaagagaagaggaggtaggactaacyaaactatggggcacttaacagaggtcaagaagaagaggaagagtcaacttgactggacaggaactaacagggagatgtgtgatgtcctgcacatcaaggggatgatggagaatattgaggcagaaggaatgg

SEQ ID NO: 812605 - DNA, 582 bp, Homo sapiens
aattgcagacactcaatgccagcctgtgaaagcagctgggagggaggttgtaacctgcaaagccacagggttggagctgcccaaggccttgggagaccacctcttgcatyggcattacctggatatgagacatggagtcaaaggatattattttggagctttaagatttaattactgtctcattggattttggatgtgcatgaggcctataccccctttattttggccaatttatcccatttggaacaggtatatttacccagtgcctatacctccctgtatctaggaactaactaacttgcttttgattttacagactcataggtggaagggacttgcctcctctcagatgagactttggacttgtacttttgggttaatgctggaatgagttaagactttgggagactgttggaagggtatgattgtgttttgaaatgtgaggacatgaaattggagggaccagacgtggaatgatatggtttggctgtgtccccacccaaatctcatcttgaattgtagtttccataatccctatgtgtcatgggaggggccgggtgggaggtaattgaatcatgggga

SEQ ID NO: 812606 - DNA, 625 bp, Homo sapiens
cctatgacaacctcccacatgggatcctttctgtattttttccatctgccagctaaaattaaaggactctgaaaatttggaagagggcagagccaagamagatggaaggaacagggctctctgaatgagtaagtagaatccaccctgctgggatcatgcatattagactatcatataagaaatactttttattaggcttagtttgaccatttattcattgtagcggtcagcattactttaatacaatcatacaaataatgttagggtgatgtttctaagagtaggtaacatggatgcgggacagctcagaataagcaatgtccactgcagcaatggtttttaaaatttggattatctttaaataaaatggaagtagttattctgccaaagacatctcagtctacatatatttattttctggaagaggagcattgtaatgacttagccacaaaccaaataaacaaggcagcaattgcctgttgtgctataataagcctttgcaaacatgctctgcatttgcacatggcttccttaataaatggatgctattttcttatgttcacaagcagttgcatcaaataggagatgcaatttaaatttgatctgcatctcagagaaccactct

SEQ ID NO: 812607 - DNA, 631 bp, Homo sapiens
aacaacaatttacatggtacttgtattgtattaggtagtaaaagtaatctagagaatatttaaagtatacagttggatatgcacagattgtatgcaaatattgcactattttatataaagtaattatatatcataaatttttagtatgataaattttggtgtctgcaagggctctagaacccaatcccccatagatatcaagggacaactatattaacagaactgaagggaacagacagcaaaacaataatagtagcaaacttcaataacccactttcaacagatcatccaaacagaaaattaataaagaaacagctgacataaataacaatatagacgaaatgtacctgacaggcatacatagaacattttgtccacagcagtggaatacatattcttcttctcaagggcacatgtaacattctccaggataggtcatatgtttggacacaaaacaagtcttaacaaatttaagattgaaatcatctcagttaatttttctgatctcaatggtataaaactagaaattgataacaggataaatcttggaaaattcacaaatacrtgaaaatttaaaaacccactcccaaacaccaatgtggcaaagaagaaatcaaaagagaaataagac

SEQ ID NO: 812608 - DNA, 635 bp, Homo sapiens
ctataataaaggaaagcaacttccatgtggattggaatgagtgttgmagcaacaaacacacagccctcaatcttgagtagttatcaaataaagagagataaaaatttaggatacctggaataggggcttgactggtttctaagataggtggaagtggatgcaaggaaaagatccccagaaagaggaatgagagagagagattaaagatggtgctattcaagaaaaactaacaaggtcattctcctggttgcagcctgcctgggagaagaggggttgaactgacttgaagaaaagatggagtgacagcagctacttctaggcagtgtatctattctgcttaatttatattcattttacactggagctgcctagcttgcatctccacaaattatttcaaaccgtccatagataagctgaagcaaaatagaaaaattgaataatgcaaagatgtaaactgaaagaagagggaggaagctgtagactggatagaaaatgctttggaaaccagaaacccacccaactatttataatattcatgacattggtggcatgcataacagctaagagtcacaatattcagaaaattgtcattctaaaaacatattgcacattaggtgatcttggagaaacacgaa

SEQ ID NO: 812609 - DNA, 598 bp, Homo sapiens
ggttaaattttattttcaaacaagttagtcggaatggtttgtctaattaatagttttgctatggcatatgttctaaacgtttcctttttatttttacttgcatacacattctgactaaacagctaatatctactgtagtacaagagcttaaccactctgtaagaactaaggatgattaggttgaaatatcttacacttaaggataacagctagattaaaattgttattaatattatgcaaatataggtagatttgtatgaaaatcatattacatttcaatttcttatgagaaattatgtaattgataatgagtcatgagcaaatctgctttccagtaggaaaactagcagtatcaccattaataccaatattcatattgtaattattgcaaaaatttcaatcggaaacatctcaaatagaaagatgtctttacttataggaaacataaatgaagaaaacaaaataaacttaactgactgaacatctttcttaagggatttgaaacctcatgaagcccatatgaattctaaatgggaaaacacaataagccctaattaaatattstactatggtttattgtggtagaaatatgaatata

SEQ ID NO: 812610 - DNA, 628 bp, Homo sapiens
tgtgacaattttgtataaaacatgtgatatggttgtcataaaaactaaagtattattgtaatctccttgtgacacaagatgaactgataattactcccttcatttatggtataaccacaaatttgtgtctgtcttgtctgtttctgtatgcactcttgagagctgcctcacagctctcataatttgcagtctaacaaatgaatccccaaaacaaaagaaaccaaaacactgagagatgaattctccaaaatactattttcccctgatatcatatcctactccaaatccttcattggctttcatacccacctgtgttagatatgagctttacaatgccacattgaagatcctccaaaatacgactgtaaattcaattcctttccatttgtgtcttattacacttcaacttgcactgactttcaactgctcttttctaaacatattgcctacatcctcaacattgcttaacatattgctcacttaaaacatcttttcttmattgcctctgaaatctcattcattagaaatactcataattggaagttaaactagtaaataaaaataataaaatcatggtttatatttaaatttttatgcatatacgtggtataaaccattatgtattatt

SEQ ID NO: 812611 - DNA, 628 bp, Homo sapiens
tgtgacaattttgtataaaacatgtgatatggttgtcataaaaactaaagtattattgtaatctccttgtgacacaagatgaactgataattactcccttcatttatggtataaccacaaatttgtgtctgtcttgtctgtttctgtatgcactcttgagagctgcctcacagctctcataatttgcagtctaacaaatgaatccccaaaacaaaagaaaccaaaacactgagagatgaattctccaaaatactattttcccctgatatcatatcctactccaaatccttcattggctttcatacccacctgtgttagatatgagctttacaatgccacattgaagatcctccaaaatacgactgtaaattcaattcctttccatttgtgtcttattacacttcaacttgcactgactttcaactgctcttttctaaacatattgcctacatcctcaacattgcttaacatattgctcacttaaaacatcttttcttaattgcctctgaamtctcattcattagaaatactcataattggaagttaaactagtaaataaaaataataaaatcatggtttatatttaaatttttatgcatatacgtggtataaaccattatgtattatt

SEQ ID NO: 812612 - DNA, 628 bp, Homo sapiens
tgtgacaattttgtataaaacatgtgatatggttgtcataaaaactaaagtattattgtaatctccttgtgacacaagatgaactgataattactcccttcatttatggtataaccacaaatttgtgtctgtcttgtctgtttctgtatgcactcttgagagctgcctcacagctctcataatttgcagtctaacaaatgaatccccaaaacaaaagaaaccaaaacactgagagatgaattctccaaaatactattttcccctgatatcatatcctactccaaatccttcattggctttcatacccacctgtgttagatatgagctttacaatgccacattgaagatcctccaaaatacgactgtaaattcaattcctttccatttgtgtcttattacacttcaacttgcactgactttcaactgctcttttctaaacatattgcctacatcctcaacattgcttaacatattgctcacttaaaacatcttttcttaattgcctctgaaatctcattcattagaaatactmataattggaagttaaactagtaaataaaaataataaaatcatggtttatatttaaatttttatgcatatacgtggtataaaccattatgtattatt

SEQ ID NO: 812613 - DNA, 558 bp, Homo sapiens
ctgcatagtggtactgtcccaattccatcgtcaagcagtccatgaaatccatgatagatgtggcagagctgccaagccatgtgaaatatccatccccagaatgcactctgstatgggacagacatatgcagtgtataactatggagccaaacggctgatgcctaggtgcagagatacaggtttcactttcactgaccggcctccatagccatctatgtatgcagctttgcccagaaacttatccaggttcccacagacgaggctacaattacttcagcaacttccctaattaaacacaaaaggctctattcctctgctcatttgcaagtaatccgtgagctggagcatccaggtgggactgggtctagcggctaaccctacccacttatggacatttctcagaattgctgctccgaggataattgcctccacagtggggcagaacaggaaatactgtcagctccttagttccagaggccaagcatccaggggaggtgggagctccccaggaggctgctgacattgtttacctaattcccacaactcagttgggatata

SEQ ID NO: 812614 - DNA, 609 bp, Homo sapiens
atttcatgaaagagtcaatggaattgaaatgtttggcatttrtttgtccttttgaagaagctcaaatttgcaagtggagaaaaagtttttaaaaatttaaaatattttacgcaatcatttcttagtgccacagaccccaaaatgtatcagacttcaagccaaataaaattaaaagttacttttgaccattacactgtgtaaaccccatgtttttttttaatcagaaagatgacgtattcagttataaaaatgccagccttctatggatagtttctgctaatatcttgaacacaattttttttctgttggttttctacctgtgtccatttgattttgcccttttggcaattacaaatttcttgaaagaggctgtataagaatgatgccagccactgaccttatcatcagatagatgactctcacttctgttcttccacaaattgggcaaggcgagttattatttcctttgcaagagagacttaaccttgtatattacacgggctgctttcatcaggagaaggctcagccctagttgatctgtggaatgctaatgattcatttcatctttcatggagaacacctcttgcaatcacagctcagatgtttctt

SEQ ID NO: 812615 - DNA, 624 bp, Homo sapiens
tgctgttttggttactatagctctgtagtataatttgaaggcaggtaatgttatttctccagttttgtacttgttgcataggatatctttgactattctgggtcttttgtggttccatatacattttaggattgttatgtctatttctgtgaagaatgtaattggtattttgatagggattgtattgaatttatagattgctttgggtagtatggacattttaacaacatcgattatctcaattcatgaacatggaatatctttccactttttgatgtcctcttcaatttatttcatcagtgttttatagttttcataatagagatctttcacttttttggttaattcctaggtatttaatgttatttctcactatcgtaaatgaaattacttatttgatctcttttttacattgttcactgtttgctactgatttttggatgttgatttgtatcctgcgactttattgaatttgtttattggttctcactttttttagagtctttaggttttatcaagtacgggattagatcatccgcaaacaatgataatttggwttcttccatttaaatttgcatgtgctttatttctttctcttttccgattgctctagcgaggactctc

SEQ ID NO: 812616 - DNA, 589 bp, Homo sapiens
gctcactgcaagctccacctcccaggttcacaccattttcctgcctcagcctcccaagtagctgggactacaggcacccaccaccacgcccgctaatgtttttgtatttwtagtagagacaaggtttcaccttgttagccacagtggtctggagctcctgacctcgtgatcctcctgcctcagcctcccaaagtgctggaattacaggcatgagccacggcacccggatgaaaagctgaaaattctaaaaaccagagtgcctcttctcctccaaaggattgcaactccttgccagcagcagagcaaagctggacggataatgactttgacgagttgacaggagtaggcttcagaaagtcagtaataacaaacttctctgagctaaagggggaggttcaaatccatagcaaggaagctaaaaccttgaaaaaagattagacgaatggctaactagaataaatagtgtagagaataccttaaatgacctgatggagcagaaaaccatggcacgagaactaggtgatgcatacacaagcttcagtagtcgattcaatcaagtggaagaaagggtatcagtgattgaagatca

SEQ ID NO: 812617 - DNA, 631 bp, Homo sapiens
ttatgttgctttcatctcaaaataataaataacccccttaattggttaatagatttatttatgtaaatatgacactttatttgtgttggacataggccatgagtcataaactattatataatatataatacctgcacttattatttatgagaatcaaaatttctttcaagggaactattacatatgtatacatgtgtcatgttggtgtgctgcacccattaactcatcatttacactaggtatatctcctaatgctatccctcccccattcctgcaccccacaatgggccctggtgtgtgatgttccccaccctgagtccaagtgttctcattcccacctatgagtgagaacatgtggtgtttgattttctgtccttgtgatagtttgctcagagtgatgttttccagcttcatccatgtccctacaaaagacatgaactcatcaatttttatggctgcatagtattccatggtgtatatgtgccacattttcttaatctagtctatcattgatggacatttgggttggccccaagtctttgttattgtgaatagtgctgcaataaacacaygtgtgcatgtgtctttacagcagcatgatttataatcctttgggtatatacccagtaat

SEQ ID NO: 812618 - DNA, 624 bp, Homo sapiens
ttacatccttattctttatatttaaaacrtgattaatatttctataattcttttccataaaaaggaaaacataaattctcactctacatagttaatcaaattcccattccccgcttccgtagcattttatctatcctaaagaaccaatctacaggctgtttcctcacccaaaagcactactaggaattcttatatttatgtatggcttcattcaccatgcaacaatcattgttgcatcgattttctgtagtaatctactaactggttgcagtctatgttttcagctcattttgcataaaaagaaactgaggttcagaaaggttaggtgagccaatggctaataataaaaaatgatgtcagtagatgtttactgaatcatatcagatgttttttccccaaaccttatttgaagcaaatttttttgtttgtttgtttgttttttattgtggcactgagagtgtccccggatttacgtttatcatttcagatatcagattcactgaaacttctaaaagtttcacaatgttattaattattataacataatatagaagagctttatgttcataagatttacaaagtgttttttttgttttccaaaatgtttttatgagcatattagtt

SEQ ID NO: 812619 - DNA, 647 bp, Homo sapiens
taacatctgcaacatccctattcccaaataaggtcacatttcgaggtacttggtgttagaatctcaatgtgtgaatttcgacaggacacgattcaacccttaacaatagaacatgggaatcrgtaccttctttgctgaaatgttctttcagttatccagatttgcacctctgcaaaccttttgtgtacctttgtgaccaacattcatgctatgacattacagatttctcttctactataggcatgttttatacttggtagtgttttttgctttatacacttcaattttctctgcagaagtgtgcataactctttaaattactcaatctaataatcgtttcccctacaaaactttaaaatagatggtggtagctctatgtgatgaaagtatatattcccctcactgttcactcagtgtttataatgacgcttcgttcaccttttgaactgcccttttttataatcactggagaataggtatgtgtttcatcatcaagagagttcagcaaaaaaaaggaagccagtgggtgggactcttacaggatctggctggtgaagtacaaactaatttccttcactttttctgagcactgtcaattttttattaacttttagtataaatttatttttactataaagttattaaaa

SEQ ID NO: 812620 - DNA, 655 bp, Homo sapiens
ccagcccctacccggcaagagaggcatcactgasgctgcatctgccatgcgctcctggtgtgactgcaccctgtcaggccagacccggcttgagccaacttagccaagccagcgtcagtgtcaccagcctcatgggtggagccaccctcatgctgctctgcagcaccctctgaacccgatatcccaggcctgggaggtgctgaaggctcaggacgcctcttattgctctgaagtctttgtgaccaagtggagtgctgtgactgtggggccaagagagaagctgccaggtacagggaaaggcgctggtagggagccagccagaaggtgcagcatcccgggatggccctgctgagtctgctgtcaggcctgtgaaaggtcagcagagccaaggagcaggcaggagaggctggagccccgcccagaaccttggcgagctggtggccctgccaagtcctgctggccactgaagagggaatccagggcaaggcaggtgacctcctgggccaccagtctctaacccctaccccagcctagggaaggggaggacaggaagagactggatgctttgtaaaggacttcctgttcttggggacataactctcgtcccctcccagagccctggatgactgacaggcattccttggccaacacatgc

SEQ ID NO: 812621 - DNA, 655 bp, Homo sapiens
ccagcccctacccggcaagagaggcatcactgaggctgcatctgccatgcgctcctggtgtgactgcaccctgtcaggccagacccggcttgagccaacttagccaagccagcgtcagtgtcaccagcctcatgggtggagccaccctcatgctgctctgcagcaccctctgaacccgatatcccaggcctgggaggtgctgaaggctcaggacgcctcttattgctctgaagtctttgtgaccaagtggagtgctgtgactgtggggccaagagagaagctgccaggtacagggaaaggcgctggtagggagccagccagaaggtgcagcatcccgggatggccctgctgagtctgctgtcaggcctgtgaaaggtcagcagagccaaggagcaggcaggagaggctggagccccgcccagaaccttggcgagctggtggccctgccaagtcctgctggccactgaagagggaatccagggcaaggcaggtgacctcctgggccaccagtctctaacccctaccccagcctagggaaggggaggacaggaagagactggatgctttgtaaaggacttcctgttcttggggacatwactctcgtcccctcccagagccctggatgactgacaggcattccttggccaacacatgc

SEQ ID NO: 812622 - DNA, 503 bp, Homo sapiens
aaattaggtaccaaggccaggaggttccttcagtgggatgccacatrtgatgggaacttaatgttaaatgatcataaaagtgaaaactgcctgaggtattacaccaggaaggaacatggaagaaacagaacttgccctaagaagcaagatttaggactaaaatacaccccccaccataaagatgagcaactctcaaacagtatatgagatgatttcaatgggacaagatgcccacaggatctactacctccccatagtggaagaaaacgcctgagaatgacaagctgaaggtattaactcatacctgaaacaactgacttccccacaataggaaaacagaccaagctacagaaaggcccaatcattcagactcacagggaagattaggaaggagtgacctaggggaactctacggccagctctctgggtacattggctacaagctgcctgctcttcaaagccctgaaatgcacacacaatcaagtcatgttgcaggctgggag

SEQ ID NO: 812623 - DNA, 510 bp, Homo sapiens
gacagtaaatttctctactaaaaccaatacatgccagaagataattgtgtaacatctttgaagcacttagagtaaataactgttaacatttatatatgaaaactatttttaaacatactatttcaaataaagatatgtatagtttaccacctagaaagttctaaagaatgatattcaaggaggaaaatgatctcagaaatactgtctaaggagtaagatgaaaattgaacaaattaaatgacaaatattagattaatcaaaataaatattttaagtatctaattatatgattatgtttaatgtgtataaattttaagaggctagaatagaaatattgcatgcaataggtaaataaaattatgtgagttaggaaacataaatgaagatgtttgaaatcctcttatcattagaaaaaagaggataaatatgttgttttactttattttttcaaagataattttgtaggataaaattttaagagtaagaaaayttaatgaagtttataaatta

SEQ ID NO: 812624 - DNA, 586 bp, Homo sapiens
ttatatattatagtattatctatagtttagggtatttttccttttgttwtaaagtctgcatacaatgaaatatgtaaacctttagtgtgcatttgctgaattttaacacacatatacatctgcgtatcaaattcttactaggatatagaatattaacaacagcccagaaatttccttcattggccttcccagtctcttgcccttgatttcctataaacacccactcttctaattttttctattatagatttatttgtgatatagtctgaaagtatcctccaaaatttgtatgttaaaactcaattgtcaatgtgatacaggctgagcatccttaatgtgaaaacttgaaatttgaaattctccaaaatctgaaactttttgagtgctgacacattgccacaagtaaaaaatttgatgcctaacctcaagtgatggatcacagtcaacactgtttcatacacaaaattattaaaagtgttatataaaattactgtcttagtccatttgcatttctataaatgaatagttgagactaaataatttatgaagaaaaagggtttatttagctcccagttctgcaggttgt

SEQ ID NO: 812625 - DNA, 352 bp, Homo sapiens
gcctgggtgacagagcaagaccctgactcaggaaacacacgcatgcacgcacacacacacacatacayttactgtcttcagttctgtatgttagaaatccaacatatgtctcagtgggctaaaatcaaggtgttacagggctgcattacttttcataaaggacatttcatttccttgcccttcccagcttctagaggttgcctgtatccttggctcatggccccttcctccgccttctaagccagcaaaattgtatctccgaccattcctctgtagtcactttgtccttggactctcctcttctgcctccttccttcacttttaagcacacttgtgactatcatgggcccac

SEQ ID NO: 812626 - DNA, 352 bp, Homo sapiens
gcctgggtgacagagcaagaccctgactcaggaaacacacgcatgcacgcacacacacacacatacatttactgtsttcagttctgtatgttagaaatccaacatatgtctcagtgggctaaaatcaaggtgttacagggctgcattacttttcataaaggacatttcatttccttgcccttcccagcttctagaggttgcctgtatccttggctcatggccccttcctccgccttctaagccagcaaaattgtatctccgaccattcctctgtagtcactttgtccttggactctcctcttctgcctccttccttcacttttaagcacacttgtgactatcatgggcccac

SEQ ID NO: 812627 - DNA, 621 bp, Homo sapiens
ctatcatgggcccacccagccaacccagaataatctctctatcttagggtcagctgattagcaaccttaattccagcttcaaccttatttctcctttgctgcataacctgacatattcagaggttctaggtatgaagacatggacatctttagggatggaggtgttattttgcttatcacatctggcttcaattcttccttagcatgtctgtgaccttaatcattctgttggttaattgtttgtcttacctgctaggatgtaagatcctgggaatcttcagcctgctatcataggtaaaatcttgagtgtagataggaatgtgaaaaatagtgtttctcaagcatgtctgtccatcaggggctattcatttgttcatgcacttcataatgtttattaagcacctacctagaaccagacacagttcgactcaggatgcgtcagtgaacaagacagaccccaaacactaccctcatggagcttacatctttggtagagctttaaataatatagakgtctgggctccaccagccgctccagaagccaagccacttgggtgaagaacagctaatcattaaatggcaagttagaatcatttgaattatttttccccacaccttgga

SEQ ID NO: 812628 - DNA, 593 bp, Homo sapiens
taagtctgttttattttctcttttttttgtgtttttgttttgaaaattaacctaccctggacttcagttaggatctctctagttatatgaacttatgtttattaaatctgatcattagaatcctaggaaatactaccctcctgcttggcttacgtactattttgtagcttcagaaaacaggccatgtggtgtaaggtaatatatatcaacttggaggaaaacaaacctggattcagattctgactctgccacttttgactctgtgaccttcagcaagttacttgacctcatttagctggcagttacagatgtaaaaatgaggacacgggattgaccacattctctaagggtggtaatacggcccagtggttaaaaacttatctttgtgatcaggtagacctggatttgatcaacctcttccatttcataactgtgaaatcttgagaattttatttaatctttataggcttgcttattatctcaaacaaattaaattttaaagtgaaagtaactaccttataggattgctgygctggtaaactcgtaaggttgcttagagggttgcttttaatccttggaggattaaaagtcat

SEQ ID NO: 812629 - DNA, 591 bp, Homo sapiens
ctttctgcagtctcaattacctgtggtcaactgagatccaaaagtattaaatagaaaattccagagataaacaattcataggttttaaattgcacactgttctgagtagcattatgaaatctcacaccgtcstgctccatcctgctccgtcctgttctgggacatgaatcagtcctgtgtccagcatctcaggctgtgtacaccaccctcccattagtcagcaacatcatcttctgacagccaaccatggacatcatcatgccgatgattcaggatcacccaagcagatgatcctgcttctaacctattgtcagaaggtcagtagtaagctaacacaacacgatgcctgtgtcattccccagacttcatctcatataggcattgtatcatctcagatcatcacaagaagaaaggtgagtacagtacaggaagatattttgtgacagtgagagagagagaaaccacagtcacataacttgcattgcagtacattgttatacatgttctattttattattaattctaaaaataaaatctcttactgtgcctcacttataaatgacactgtatcatagctatgtatgtatagga

SEQ ID NO: 812630 - DNA, 463 bp, Homo sapiens
cttgggatgatgaagacctgacccttgacttgccaatagctaacttacgggggagttgggagaattgctgtgctttggcatggatgcccctgacttctgatccgagctcctccacctgctagctgagggatattggacagttctggactgattctgtatctatgaaatggggatgattcctgtcacgctgttgctgtaaaaaacaaaatatagaaacacggaatgctgttcttggcatggagatttcaaactattgttcagtgaacacctactatgtgctgacatcccaatgctacttgaatcttcttattttcagcatttggtcagagctcatgtcccatttttaagatgatttgttytacaaaatcatagaatgtttgacttttaaagcttcttatagcccctcttgcccagtgatttttggacttttgttttagtaacgtaaaccccttttccaaagggc

SEQ ID NO: 812631 - DNA, 564 bp, Homo sapiens
tgtgcggggaagggctgctgggctgaggacctgagcagatggtggtcattaatagcaccaacatgtgaccagcygtaattgtgctggaaggactgaagccactgatggttgctccgtactttggttctacttaaaaaatacttttagcaggacataattcattatacaaggcagcattagcaaagaaatatcagactcccagtaagtgccattttcctacccctgtgttttaacaagtattcctggtgtttagaaatacatagtctctcagtcatcgtgtgggtaaaagtgagaagagttgtttttctcagtggatcaagactaagtcttatgagatttgaaatctagaagctctgctaaaattgcatatagcaatgcctgtgaatatgtgaaccgaatgagaaacacatttgtgtcctagagcagaaacttagattcagctctttatacacacaatgacccctcctggttaattgacttgcaatggtagtttcaggtatccagcagtagttctggctacagcagatctgtctacccactgcctctaaagctaatctctccagt

SEQ ID NO: 812632 - DNA, 584 bp, Homo sapiens
cctttttctcaggaattttttagtattctctgttctgggatcacacactatcctcagttaccactctacaacttgaccaagaagaatttccctcatatctagaaaaaacaaactatattcrgatactgatacatggtctcctgtaatttgagttattgataaagtttaacaaatccaaacaactcaagacttaaccagcagatgttatcatccaacatgataaactctggtaccaaaattctttaaacatgaatgatagcctaaaaacactagagatccactataactcaactcttcattataggacatagtgtttttaggctgtctcctggtttatggccaataactaataattattcacaaagtgctgccatatgatgttttcaaagtatgttcacatacattctctcatttgagcttcacaacctaatggcataggttgtcatcgttcacattttaagaatgaggaaatcagcagaagtgatgtaacttgcccccagtaagaaagcatgtatctgagcttcaactcaaactaagctttatatctctaagcctactcttgttttaaagacatatgtgctttt

SEQ ID NO: 812633 - DNA, 556 bp, Homo sapiens
caaaactgtccattttacaaagcaaaaagagtaggccccaaatttccaaaccatctgaatagtttcttcttgatactttcagaagcactaaaaaacatcaaggtttctcatggaaccaagtcagcaaaaaataagcactgtacttaacagacctctagtttgaagattttaaaagggacatctgctattgcttaaccaccacccacctaatccctttagagctctacatctatctacatacacctcagctgtaaagcattctgaaggtatctgttaatcccgtcatagtcccagataaggatctcacttaatcctataaaatacaactatcactttcttcaaagtttggtcataatattagcaaatattatttgaatcatttgaattagaaaagcactttcttataccatttaagaagatactaccaggtayggttaagtgaaattatatttccagcctttcagtgagggactctgttcgcttcaatccttgaatatctccctcaaataacagagaaatggttaaaggcaggagacaggatctcaggaaaaatatt

SEQ ID NO: 812634 - DNA, 611 bp, Homo sapiens
attcctgttactcaaagctaacatytgggatcacttgcatttttttttgtgaatttcattttttaaaagttcattcaaagaggatctgttgatagtgaactattaattttgtatcaacaaataccactaccttacccactctcttgaaaatcactttgattaacatgcagtctcagtagacagttattttctctgagcacattaaagacattaccacagtgtgtggctttcataattgctgttgagaagttagctggaagttcatcaaacattgaaggttctcatttttgtcttggtgctttaatacatttatgtcttttatggtctgcagttttgtgttctagatatttattttgctggttaggattcatttagcttcataagtctgggaattggtattaaaaataataaattttagaaaattctaaaccgctatgctgccaaatactaccacagctcccttctgtcttgtttatgagacttaattaggcatatattaaaacttttttattccccatcatgatttaacttttaaaacattttgcatctctttgcttcccttcggacatatcttccagctcacaaaatttctgtctttatttgtattcaac

SEQ ID NO: 812635 - DNA, 599 bp, Homo sapiens
agtcacaatctgggagaaaatatttacaaaacaaatatttgataaggcagttgtattcacaatacacaaagaactcttaacaataagaaaataacccccccaaaaaatgggcaaaatatctgaagagatatctcaccgaggaagagatacagatgtcaaataatcatataaaaatgctcaatatcatttgttatgaggaaattagatgctaaattttgtcaaatgatttttctttatctattttaattatcatttttgtctgttattatgacggattatattggttagcttttgaatgttgaaccagtctttcattagtgaaatagatcctattaagtcatgatgtattaatattatttcaggtactgctgtattttttggctaatattttgttgaatatttgtatgtccatgtgtaagagggatattggttttcaatttcttgtttcttgtattacatttatctggcttttttatgacaaaatgacaaaatatttccttttctattttctgaaaaacaaattgtataaagtttacatatttcttaaaattttggcagacttcrtcagtgaagcaatttggtcctagacttttttgctg

SEQ ID NO: 812636 - DNA, 498 bp, Homo sapiens
gcccatttccaaatgtagaatttcacagttaaaaatagcttggttttgtatcaaggtttatcccttcccaaacattcacacccaatatatcctttactgctcaagcagttgataaaggagttgagagagtcttgttttggatatgatgaagcagaggcatgccgacgtaaggccactcgctaaagccatatcaaagtttagctgtggaatacagactagaatgcaggtttacaggcttccagcaaagggcacttccaaacatgccatttctctcaaactaggtggttactttatcagattatgtattgaaaactttttcttttttagattactttttggctttctaaagggacgaattattttgaccagatagttcccaagcaagacattttttgtcttactttgttaaggtagtacagggtgacaggtgaaatttaaccactcagtgcccaagcagacagattytggggtgaagcactgtgtgtgccttctcgcagg

SEQ ID NO: 812637 - DNA, 568 bp, Homo sapiens
tgctttctttatcactgaaatttaaatacagtcatgtgctgcataatgacatttcagtsgattatggaacacatatatgaaggtgatcccataatggagctagaaaattcctatcaactggtgacatcgtagctctagtaacgccacagcaccatgcattatttacctgtttttggtgatgctgttgtcaataaaccacgattgtataatacatacaattatgtatgtattatagtatgtactatactttttttgtcattactttagagtgtacttctactcataaaaaataaagttaattttgaaacagtctcaggcaggtccttcaggaagtattccagaagaaagcattgttatcataggagaggacatctccacgggtgttattgtccctgaagactttccggtgggacaagatacagaggtggaagacagtgatatgcatgatcttgaccttgtgtaggcctaggataatgtgtgtgtttgtgtctttgttttttaataaaaaagtgtaaaaactaaaaggttaaaaattattttacatagaaaaaagcttgtagaataagta

SEQ ID NO: 812638 - DNA, 607 bp, Homo sapiens
gtccatagcagcatttttcacaatagccaaaatgtagaagcaaccagactgtccaatgacagataaacagctaaactaaatccaggccaagcatgcaatggaatactattcagccttgaaaaggatggaaattctgacacatgccacaacatggataaaccttatgctaagtgaaataagccagacacaaaaagacagatactattaatatgttattccacttatataaggtacctagaggagtcaaattcatagagaaagaaagtagaatggcaggctgggcacagtagctcacacttgtaatgtcagtgctttgggaggccgaggcaggaagatcacgtgagtccaggaggtcgagaccagcttgggcatcatagagagacccccgtctctacaaaaaataaaaaaattaggtggctatctatggtgacatgtgcctgtagtcccagctatgtgggagactgagttgagaggatcgcttgagctcaggagatcaaggctacagttagctatgattgtgccactgcactcmagcctgggcaactgagtgagaccctgttttgttttaaaaaacaaaacaacaacaacaaaaaaactcagctgggta

SEQ ID NO: 812639 - DNA, 629 bp, Homo sapiens
ccagtttgcatttccccttctgtagtatctgatcctgtgatctctcagctgaggactattatactaatgaaaaacacttccaggaaatcagtccaagacagatttaatttgatgtggaaaagaaccccaaacgcacattctatccatcagaaattaggatcagctttaggtttcaagtccctagttccgaagatgccatagcacgttgaaggaaatgaagaggagtcctttttgtttttgtcttttatttcttttaaggaaaaatgaagaagaaaaagaagggccctccttcccccagggaaaagacagttctgatcaacataattacaatccccgaggggcagcgcctgcccagccctgaagccacaaggctggtgcctctgcaggtcacgtgtgcctcccgcaggctgtccaggaagagttcagtcgcatgagaagagaaagtcaggttttctgggtgcatgggtcagccactgtctccaggacgggtccctgcctctccaactggcagcgmtgagctgagaacccagtcctctccagcaagacccgagctcactttcccaagtccagctgcatttgtgccctcaacaaaccatgccagcctccaggtgagttcaagtcttgtctcc

SEQ ID NO: 812640 - DNA, 625 bp, Homo sapiens
tcaatgtggtattcaaactttctttaacatatatatatatatatatatatatatatatatatatatatacacacacacacacacacayatagagagagaggtgtgtgtgtgtgtgcgtgtgtattaggtaagagctgacctgccctgattaaagggaggtgaaaccccaaagcaccttcccccacccacccctgtattgtcttcagaatccacttgggcaccgcctgtggctcccagcaccgctgggacaggttgctatttgcagaaggtttttgcatagggtttggtactatctgaggtttcagggatccactgggggtgttggaacataacccccatggataaggagggactactgcagtgcccttatgaagaggcctgagagagtggccttgctccttctgccacgtgaggacacagagaaatggcaccatctatcaaccagaaggcgaggcctaaccagacacccgatctggcccatcagctcctctgccttcaccattgaagggaaatcctgctctgaccctagcacattcggggtgcttgtatcaagagctgccccaccacatgacagatgaatacaggagcttctactgtgggaacaccttagattttagagactgct

SEQ ID NO: 812641 - DNA, 325 bp, Homo sapiens
cggctttatctctgggatgcaaggctggttcaacataagcagatcaataaatgtaatccatcacataaacagaaccaacgacaaaaaccacatgattatctcaatacatgcagaaaaggccttcaacaaaattcaacaatccttcatgctaaaaactctcaataaactaggtattgatggaatgtatctcaaaataataagagctatttctgacaaatgcacagctagtatcatactgaataggcaaaaactggaagcattcyctttgaaaaccggcacaagacaaggatgccctctctcaccacttgtattcaacatagtgttg

SEQ ID NO: 812642 - DNA, 667 bp, Homo sapiens
ttttaggttttcagatacctattctggcctctaatataatcctaggtttaagagaagccaaactgctcactctggtactgaactattgactctttcatgaacaatgaaaatgaaacttttaatccaacttctatccacagtaacctgatcaagcacagggtaatgcttaacacagtgctagaaacagaaaatggctctggagagctgcaagtttgtttggtttcctaccccatccccatgcccccaatatccacaggatacgaacacattaactcaacctaatgatgaacaggttcctgtctgcaaatacatcccaggagtttcctttggataagaaaactctttttcagtgtctggaccagcagaattataaatcggttacaaacacggcatcttcttgctgctgctagtccagtttcgtcttagtattcatcacctagctttgtaagagctaggtgctctctcagcatgagaaaacaaaaatctgtctcagagtcaaggcaggggtaaagcagagaatacaaacttgccccacttcaaaaaacaaggcatatctttcaactaactaaacagcaatcccagcaggcgtgacaatgcaagctttcttccctattattgtttgaaacaatcacaagctatttgttcrtattaattcgtttatatgtag

SEQ ID NO: 812643 - DNA, 657 bp, Homo sapiens
aaaataagttctagtgttctatagatctgaagagtgacttatagcaaacaacaatttattgtattttttcaaatagctagaagagaggactttgactgttacccgtataaagaaatgatgaaggtttgaggtgatggatatgttaattgccttaatttgatcattacacattgtatatacatgtatcaaaatatcacactgtatcccataaatatgtacaaatgtatatcaattaaaatgaatatatttaaagataatatagaggaacaaatcccaagcatcatttaatttcttctgtaaataactcagcataatacatatgctgtaagtaactttatgtttacatatttagctgttttgtccttaaaagaactcttttataaggaaactaccttaccatcatcacagttaaaaaattaatcagaggtacttgatatcatcaaatattcggtaagttcacaatcccctgattttcttataacttttaacagtttggttggttgagtcagaattcaaataaagcacatacatttcttyttttaagaaaaggaggaagagaggcagtgctgcatagtagttacaagtacagtacgctagggaatccaactgcctaggttcaaatccttgtcctgccagtatgaccttgggcaggttatg

SEQ ID NO: 812644 - DNA, 586 bp, Homo sapiens
tacataaaggggtacgatgtcacttaaaagttgcctacaataaattaaagcctactgcacacactgaatcaaccactaaaaataaaataaagaattatggctaayaatccaacaagaagataaaatgaaatcataaagtataccaaatccaaaaaatagaacaaatgtgacaatagacaaaagcaagatgatagatttaaacataaccatatgaaaacacatatatatacactcattaaatgtaagtggtctaaacaactcaattaaaaggcatagattatgagactggataaaaaagcaagacacaactatatgctccctacatgaaccatactttaaacatgaagacacaaatagattaaaagtaaaaggataaaaaaacgaaatacccagctaacactaaacaaaacaaagctgaagtatcaatattaaaatctaacagagtagattagtagattttagagcaaaacatattagcagggattttaaaaaaaaaggttatttcataatgatagagtctctttatcaagatgacataacaatcctaaaagtgtatgcatctaattacagatttttgaaacatacg

SEQ ID NO: 812645 - DNA, 625 bp, Homo sapiens
aattgatgacatgatcacttgtgccaattataattttataccaaaggactgcagagcattggatgggtttgttgggcaggtttctcacaaacgctgacagaaaggyatgacgaaggatgggaggacaaactgggggggtgccaagtagaaaaacagaagcgatggctaagtgctcgtcctggactctgccctttgataagggactgaaggtcccttatgatcttctttcaaattccaccgtcacagttttagtcacatccatctataatattatttactatcagacttttctttaaattgactcgctttttcactttagccttatcccaagcaataatgcatataaatcataagtttgttgtaatagattttttgtaatactaatcaaaattaaatttattcccctgtaacagagataatttctcaaattactttggaaaacaccaatttaaagtgctcagtttaccacttgaggaaaatgagagatcagaggagtaaagccaattttccaaggtcacacagcctgacaactggaaatcctggcctagcacctaagtcttttaggtattggcccagtactctttccttctatcatctttctcagaggcaaagaaaaaaaaaaaaa

SEQ ID NO: 812646 - DNA, 436 bp, Homo sapiens
gtgatggagttggtgggaggagagagaygtctgactcccaggtaccctttgcccttcttccttcatacctctttctccaatgtgcaaggttaaaaaggcattgaatcttacgatgttcagatgtagttcctttaaaaaaagatcagtacctttttgagggctcaaaagatccatatctagttagtacatgaaagggtggaatcaggtgagtttattgctgttattctcacttcttctggctgggtgtggtggctcagtaatccagcactttgggaggccgaggcagccacattgcttgagtccaggagttcaagatcagcctgggcaacatggtgaaatgccgtctccagaaaaaaatacaaaaaaatagccaggcatggtgacacacacctgtggtcccagctacacaggaggccgaggtgggaggatcccttga

SEQ ID NO: 812647 - DNA, 600 bp, Homo sapiens
atttccagaaaaaaatgacctaaaagtcatagttttaccattgaatgtaatatccttcctgtaatccatgaatcagagtatgtaaagagatgtaaaagatgtaagaaagagttttgagttttaatttgggaaaagaagtataagacagtagtagcagtcatataaaatagaatagcatcaaacatttaaaaaatagtatcgtgatagcatagagcaaaatttacattttaaccatttactaaactttggtgaaaactatcacttaaaaaatccttaattacaaggagatagtataaaacatagtttgttgctgttgtatatttgtttttaagtatctcagacaaatcgaataattttttaaattagaaactaatatatgtcaggcatatggctacagttaaaattttttttgaaaatgaaattatggatgcagaaagcaaacaagctgtggcagaaaaggatggatctaaatatgaagaggaggaggagataagagcaatccagcygcaaaaattactcatgccataggtagttttagatgccctagaaatagttctatgttgtattgaataacagcttgaatcaggattcgatattatt

SEQ ID NO: 812648 - DNA, 588 bp, Homo sapiens
ccttgatctgttttctcactgctattttaatatggggattagacacaaatattttattctttaaaaaatccatcagaaatgttatttagtaaagcagagactttccacgtacaaaatttaaggtcttgtttagtgtctcatttattttaccaccaccagttccttttaaagacaccccatttttccttcccaatagcactcactgaagtaatataaaccttgttaactgtagtaaaaaatgatgcagactttctctaatcaagagctcatttacaagaggaaatggtgttatggcagatagctgaagtatactgtgtcttaagaatttgttgcctctttcttgctagattgaatttcagaattcagagtctaaattttctctttcacatctggtggcactttttaaaaaatcagtgtgcaaaaaggagaaaaatctctctgcttcctctttatgccactcactacagtccagcctatgccaggcttaaagaaaaggcttttgtattggcaaagacactccaaaatggtttccaagtgcattraaagtcaaggagagttttgcagaaaaatttaagattaaaaaaaatc

SEQ ID NO: 812649 - DNA, 593 bp, Homo sapiens
gcaaatagaattcaacaataaataaaaataattataaaccaaggccaataaggtttatattatgcaagcctcagagctttaaaattaatcctgtgatccatcatatgaagaagccaaagaagaaaaatcataaaattaatcaatgcacaaaaaaatttaacaaaatttaatatgtatcaatgattaaaaatcccagaaagctcagaatagagaaacttcctcaacttgaaaatagcatcccaaaaaccttgagggcaacatactgaatggtaaacaactgaatgcttttcttctaagatcagggacaaggcaaggatgtccaccctcaccactcttttctaacagtattgtaaatatagccagtgaaataagtccagcagtactgtaaattctaaccagtgaaataagtctaatagtactgtaaattatagccagtgaaataagtcaagaaaaagagaaaaagggtattcccattggaaaagtagaaataaaatgttcccaattttcagatgacatctttgcctatgtaggkaatctcaaggactacaaaaaagaaaaaattctagaactaataagttagtctagcaaggtta

SEQ ID NO: 812650 - DNA, 493 bp, Homo sapiens
ttttttttgcagtgatagaaagtaaggcatttatttgcagagcaccaagcaaggaggcccaggcagctactgctcaaatcttggcctctctgatggcttgcatccttgcctactctgactcaccacgtggttctagatcacaaggtcttaaacaatcatgagaacagggcagtctcttgcctcatgactatcaacgctaaagagtattatggcaactgctggtgattctcactcaattagaatcccaatcttacagttgacaaagagtattaaaggtcagccaggtaaaccttcccatcatgcaaagaaagtttgacatacactgggatttccactgccccctcaatctcagctttttttttcctacaaaaattgatcataaaagcaaactttaagacaaacagaactcagctcacatctccctgatttttgcacagtctcactttcagtagtcatgaggattgycttttgggaaggagagggaatttttatg

SEQ ID NO: 812651 - DNA, 622 bp, Homo sapiens
tagccacgataggactgttgggcctcacaacttcagaaggcaccattcacagagcrtgaagtgctctagggcataatcacattgtattgcatttcagtggtattccgctggagttctgaaatccccgtgcctctgcaaattgtttgctgttgttgtttaaatttacaaaagaagaaaacgaagattggttaagtccccagaataagttgtttgaagtctacacttagactatgcacaatgtctggctatctaatgttgtgttatctattgttttttggttttaagcaacaatttattgttctctctcaggtctgggcactgaaagcctggctggggttctcagttggggcccttcatatggtttcagtgggagggcagctgaggccacggtaatctgaaggctttttcctcagcaccagagctgaattggctgagacaagttaagactgatttgttattgctctctccaagtagcctcatcaaatgaagaggttgggctttcttacagattatggtctcaaggtagtcagacttcttgtttggagggtggtttatcccagaattcgagttctaagaaaacaatgggaaaacggtgaatcttcttatgacctagatttggaaa

SEQ ID NO: 812652 - DNA, 634 bp, Homo sapiens
ttgtgagagttgataccttaaaaggattgtcttgcttccaattcacaaacattatgagtctctattatatttagattttctaattactcccaacartgctttgtcattttcagagctctggtcttaaacacattttattaaatttatccctaataattttatgatttggaagacaggataaaatgaaatccttaaaatctaattttgaagtgtccttttcttatatatagaaatacaattaatttttgtgtatttacctatttaccttcttttgtttgtttgtttttgtttttgtttttgagacggagtcttactctgttgccaggctggaatgcagtggcgtgatgtcggctgactgcaacctccgcctcccaggtttaaatgattctcctgcctcagcttcctgagtagttgggactataggcgcgggccaccacgcccagctaatttttagtacttttagtagagatggggtttcaccatgttggccaggatggtctcaatctctttacctcatgatccacccacctcagcctcccaaagttctgggattacaggcgggagccaccatgcccagcctgtatatttaccttctatcttacaaccttactaaattcatttattacttctagaa

SEQ ID NO: 812653 - DNA, 596 bp, Homo sapiens
aagagtacaggacatcctccctctctctctttcttgcttctactctgtccaggtgatgtgtgtgcttcccctttgccttctgccatgattgtaagtttcctgaggcctcccagaaccctagcagatgccagcatcatgcttcctatacagcctgcagaactgggagcaaattaaacctcttttctttatcaattacgcagtctccaatattccttcatagcaatgtgagaatggaataatacacttgtttcagcatcaactcaaatgtccaaagtccaaaactgcatctgaaactcaaggcacatactttccaggtatgagcttataaactctaaaacaagttgtttacttccaatatacaacggttgcacaggcattgggtaaaattaccattcaaacatagggtcttgctctttcacccaggctggactgctgtggtgagttcttggctcactgcaatttctgccacctgggcacaagtgatcctcccacctcagcctgccaagtagctggraccacaggccatgtcaccacacccagtaatttttgtatttttttgtagagacggagtttcgccatgttgcccatagtggtct

SEQ ID NO: 812654 - DNA, 606 bp, Homo sapiens
tttcctctgcctagaatctccctctcatcttytcaggtggggaccatgactcttcattttttttttttttttttttttgagatggagtcttgctcttgtcacccaggctggagtgccgtgacgcaatcttggctctcggctcactgcaacctacacttcacaggttcaagtaattctcctgcctcagtctcctgagtagttgggactacaggtgtctgccaccacacccagctttgctttgtgttgggaacattcaaaatcctctcttctagctatttgaaaacatacaataagttattgttaactgtagtcacccatcagtgctaagacactaggacttattcctctcatttagctgtaatttggtattctttaaccatcctctcattatgtcgtcctcatctctgccctgcctttccagcctctagtaaccactattccacactttacttctatgagttcaacttctttagcttctgcatgtgagtgagaacatgtggtgtttatctttctgtgtctggcttatttcacttaacataatgtcctccaggctcatctatgttgctgcaaatgacaggatttcattcttttttatggctaaataat

SEQ ID NO: 812655 - DNA, 606 bp, Homo sapiens
tttcctctgcctagaatctccctctcatcttctcaggtggggaccatgactcttcattttttttttttttttttttttgagatggagtcttgctcttgtcacccaggctgsagtgccgtgacgcaatcttggctctcggctcactgcaacctacacttcacaggttcaagtaattctcctgcctcagtctcctgagtagttgggactacaggtgtctgccaccacacccagctttgctttgtgttgggaacattcaaaatcctctcttctagctatttgaaaacatacaataagttattgttaactgtagtcacccatcagtgctaagacactaggacttattcctctcatttagctgtaatttggtattctttaaccatcctctcattatgtcgtcctcatctctgccctgcctttccagcctctagtaaccactattccacactttacttctatgagttcaacttctttagcttctgcatgtgagtgagaacatgtggtgtttatctttctgtgtctggcttatttcacttaacataatgtcctccaggctcatctatgttgctgcaaatgacaggatttcattcttttttatggctaaataat

SEQ ID NO: 812656 - DNA, 626 bp, Homo sapiens
tacaaagctatttctacctaatgtcggcggtggcggggggtttgggagggcaggcaagtgctgttagcaatttacaggaataaaacccattcaactgtaaggtaaagtggacttcttaaatgatctgtatgtatatttggtacaatttttgacaaagtagaataagaactctaaaatggtactacattttcaagtctctaattacaagatgtagttacctaattacacattgttagtacccaattatatagatccacaataattttgtaattgtgcttaattacactaattaagtcagtaacccacaaaaaatacaaagaattcttatgaagaaaatccttagtaaactggattatattcaatacttagcaagaaataacctttaaaagcaaagctatttctcacattttgtcacactcacaacttcttaacctgaaactattgcctaagtatgactctacatgatccattcccagtgtagactgagtcacaggaygagagaaacagtggcttagagcaataaaaggaaactttgagatctactttaagtctgtctttataatacgtgaaattgagcccccaaaggctatctgacctgtccaaatttacacaattagtgaatggta

SEQ ID NO: 812657 - DNA, 626 bp, Homo sapiens
tacaaagctatttctacctaatgtcggcggtggcggggggtttgggagggcaggcaagtgctgttagcaatttacaggaataaaacccattcaactgtaaggtaaagtggacttcttaaatgatctgtatgtatatttggtacaatttttgacaaagtagaataagaactctaaaatggtactacattttcaagtctctaattacaagatgtagttacctaattacacattgttagtacccaattatatagatccacaataattttgtaattgtgcttaattacactaattaagtcagtaacccacaaaaaatacaaagaattcttatgaagaaaatccttagtaaactggattatattcaatacttagcaagaaataacctttaaaagcaaagctatttctcacattttgtcacactcacaacttcttaacctgaaactattgcctaagtatgactctacatgatccattcccagtgtagactgagtcacaggatgagagaaacagtggcttagagcaataaaaggaaactttgagatctactttaagtctgtctytataatacgtgaaattgagcccccaaaggctatctgacctgtccaaatttacacaattagtgaatggta

SEQ ID NO: 812658 - DNA, 342 bp, Homo sapiens
tctggttgaagaggcagacattggataaataacacaaaataatacatggctcagagttttgaggagtgctaaaacagatgcagttatattgagaataaatcaggggccagaatttagtttagcatatatggagctcctttttgaagaaatgacatgtgtaactaaactctgaagggtgagttgaagttcgccaggtgaagaatggatggttagccttctagagaaagtacatgcaaatatytggagaaaggaaagaacttaatacagctgaggaactgaaagaaagccacaggggctaaaacgcactggggaaatagcataagataaaggtgcaagagtagg

SEQ ID NO: 812659 - DNA, 602 bp, Homo sapiens
gcaaacctgtgaaaaaacacttaagacacctctaacccaggactcatatccagaatacataaagaactcctgcaaataaacaatagaaagataacccaacaaataagggagggcaaacacatctactttaggacccagcagctcctcttctagttacttacacaagagaaattttgaatgtacataacaaaaaggtatacagcagccttattcataaaaaccaaaaactggaaaagcacccaaatgtccatcaaaaggtgaatagataaataaattgtggtatatttgtaccatggaatactgctcggccataaaaaatgaataaattactgatatacagcacataatgatgactcaatctcaaaaacactatattaagtgaatgaaggcagagccaaagagtaaatactgtatttttccatatatataaagttcaagaacaggaaaaactgatgcacaatgatataagtccaaaagcagtcatctcagggatagagggttgactgaaaaggagcactgtctataataacggaaatagtctatgttttgtgtggcagttacacagatgtaaasaattatcaaaccgatcaaatgaacactta

SEQ ID NO: 812660 - DNA, 488 bp, Homo sapiens
gcagtggctcatacctgtaatcccagcactttgggaggccaaggtgggtggatcacctgacgtcaggagttcaagaccagcctggccaacatggtgaaaccccaactctactaaaaatacaaaaattagytgggcatggtggcgcatgcctaaaatcccagctactcgagaggctgagactggagaattgcttgagcccgggaggcggaggttgcagtgagccgagattgcaccattgcactccagcctaggcaacagaacaagactccgtctcgaaaaagaaaaaaaagaaaaaatttgtcaggcgggtggcatattcctttagtcccagctacgcaggaggctgaagtgggaggaataattgagcccaggaggttgaggctgcagttagccatgattgcaccattgcactccagcctgggcaacagaatgagacactgtctctcaaaaaataataataataaataaaataaactgttattatttgt

SEQ ID NO: 812661 - DNA, 479 bp, Homo sapiens
taccactatctaacccaacgttgtccaataaaagcatgatgycagccacatatgtcatttggaattttttttttttttctttgagacagagccttgctctgccacccaggctggaaccacattaaaaaggtaaacggaatgctgggcatggtaactcacacctgtaatcccaacgctttgggaggccaaggccaggagtttgagaatagtcttggcaacatagggagaccccatctttacaaataatttaaaaattaacccagcgtggtggcatatggctgtaatcccagctactcaggaggctgaagcaggaggatcactgagcctgggagattgaggctgcagtgagccgagatcgcaccactgcactccagcctgagcgagagagtgagatcctgtctcaaaaaaaaaaaaaaaaaaaaaagtaaacagaagcaggtgaaattaattttattttttaaatttcattttatttattt

SEQ ID NO: 812662 - DNA, 415 bp, Homo sapiens
tgctagagagtaccaatttctaataagcacttagttgatcccaaaatggacagtccatggactgcaattcatatagcaagagtccggtgaaaggtgaagacccagaccagataccatgacaatttaatttgcatactggctccactgaatgttgtaaaccatccatccttagcacgtaggggatggagggggtctcctgaccattgcaactgtggggacggtgcttctcaactttgtctacccgttagaatcaccccagggctttaagacccatccaagcccaggacccccyccagaccaattaggcaaagctccccaggtgattctgtgcagccagggttgaggaaccagtggcttaactcattattacactcttcaaatgcagcactaacatggcagaaagaggtgtgacagt

SEQ ID NO: 812663 - DNA, 606 bp, Homo sapiens
caggttctgataagctttattttgggacttgtaagcagtctttatggagactagagaatatgaytggataggcataaaacaaaatctaaggttaaaaacagggagccgagagtggctttgggttgaaaatgagtcttctggcctaacatgtcccctttcctctgccatcctccactatgagtagatgggaaaaccctggctgacagctgcctgtgccaggaaggccacttagcgtcttttttccctagggtttttgtttttttaataaggtttacatctccgttttcaatagacatccctttaaattgtctgatggcatttgttggtgagcactttcaatgcaacactggctaaaggtacaaagtggtgattctaaactgagaggcacagaggggactaaaggattatttctttcaagacttgatagaaactgggttgaattaagcagtgggttaaactaagaggtaaggattcgtgaacaagttatccagatgtgcctagaggtttgcatttctctcattctcactttaattgtgtatcatctttttaaaagatggtgccttagttatgcactgttgtcatagggtattcaacatagacgaactg

SEQ ID NO: 812664 - DNA, 572 bp, Homo sapiens
atttggggcctttttcccattgtttcgactattagcacccagctccctttctccttgctaatctctctagccttgggttcttttcctgaaaatgctctttccttttctaccacagccaggctgcaaactttctaagttttaatgctctgcttctcatttaactacaaatttcaactttaggtcattcctttgctctcatacctgagcataagctgttaaaagcagccatgtcacttcttgaatgctttgctgcttagaaatttcttctgccagataccctaggctgtcactctttttttttcttttttttccccctagacagagtcttgctctattgcccaggctcactgtgtgatcttggcccactgtaacctccacctcctggattcaagtgattctcagtgattctcagcctcccaagtagctgggatcacaggtgcacgtgccaccatgcctggctaatttytgtatttttagtagagacggggtttcaccatgtgaaccaggctggtctggaactcgtgacctcatgatctgcccgcctcagcctcccaaagtgctgggattacaga

SEQ ID NO: 812665 - DNA, 548 bp, Homo sapiens
aaattcagccttccacaaagccctagggcatggacacaaggcagccaagttgtttgccaatttatgacaatgctggcctttgctccagttcccaataagttcctcatttycatctgaaaccttgtgtatggccttcactgtctatatttctaacagcattttggtcacaaaaacttaaccaatccttaagaaatttcaaactttctcgtatctttttctcttcttctgagccctctaaattcttccagccttcacccattactgggtgaagttccaaagctgcttctacattttcaggtatctttgtagcaatgccctactcctcggcaccaattttctatctttgtccatttgcgtttcttataaagaaatatctgaggctgggtaatttataaagaaaagaggtttatttggctcaaggttctgtaggccatataggaagcatggcactggcatctgcatctggtgagggcctcaggctgcttccactcatggcagaaggcgaaggggagcctgcatgtgcagagattacatggcgagaggaggca

SEQ ID NO: 812666 - DNA, 464 bp, Homo sapiens
attacatcggttaaaatattcattcagcttctctgagacaattgtcgccaaccccaaagcaaacaggttgttaggcaaaggaagcaaaaaagtaaagcatgttttaaaaccagccactgaaatatcctactctcactcatccatagttggagagaatcagatttcactttgcgattcacaaacatgtctgcttctccatgttgcttagcgcttgccaataatgcagttgtccctgcttaatggagaaggatgcagagtagaggacccttcctgtgacaagaccacaacaaaaggtatctccaaaagaaaatattttaacctgagcccaatttttaattataaaacatttaaacatgtaatttttatattagatagtactraaatgaacagtgcagaatcacaaatctaacaatgcagttgattaaaattactctaaaagcaagacgaccgtttcatatttcttt

SEQ ID NO: 812667 - DNA, 465 bp, Homo sapiens
tagcagcactatttgcaattgcaaaaatatggaactagataaaatgcccatcaatattgagtggataaagaaaatgtggtacaggtataccatggaatactactcagccataaaatggaacaaaataatggcattctcagcagcctgggtggagttggagaccattattttaagtaaagtaactcagaaatgataaaccaaacatcatgtattctcatttataagtgggagctaagctatgaggatgcaaaggcataagaatgatacatgaattttcggggaggaaaaatgggagtgggtaagggataaaaggctacacactgggtagtgtttactgctcagatgatgggtgcgtcaaaatctcagaaaccaccactaaagaacttagccatgtaaccaaacaccacccgttcccctaaaacctattgaaattwaaaaaaagaaaaaccatcccaatttctcatt

SEQ ID NO: 812668 - DNA, 560 bp, Homo sapiens
taaataagatatccgtcacctctagcgtttatcatttgtattacaaacagtgtaattatacacttttagtgcataatttaatgaagcaggtggattgcctgaggtcaggagttcaagatcagcctggccaayatggtgaaaccccgtctctactaaaaatacaaaaattagctggacgtggtcgtgcatgcctggaggctgaggcaggagaattgcttgaaccctggagggacagttttttaaataagattaaggactgaggactggttggggctcataaatgatatgagtaaagtgttagctaaaacagaagaaaaaggggtgcccaaacaagtcaccttaaaatttgatgcctgtgctgtcattaatagtaataagttaggaataaggtgtggttctcttaattagaaaagaggctatatggcagaaaataaatacaactgtcataaattagcactgtgtggaaataaatgtgaacactggtcttgtgtcatttaggccacttggattaaaaaaaaaaatgaaaaagatccatcccaccttcagaaaggaaaaaatgg

SEQ ID NO: 812669 - DNA, 555 bp, Homo sapiens
gggccagactggatccttgagtaaatatcttggttcgagaagcttacaaagactctcctgagccagtgtttcaaactttctatgatgaactaaatgtgccagtaccagaaattccaggaaaaacaagaaatttgtttttgcaattagccaagcatgtagcccagtctctcaatgtcacttcatgttatgtatgtggagaagctgtaataagagatcaatggccatgggaagcctgagaattagtacctacagtacctgatgaattcctggctcaaaagaatcaccctgataatttctgatcctaaaagcctcaattattaaacaatattgcatagctagagaaggaaaagaattcactcaccgcgtaggatgacttagttgtcggagacagaaactgtataatggtaccacaaaaacaatcacttggtggagttcaaatcacacagagagaaaatttagtaaattctcaaagttgcaaactggacccacctggagtcccacygggactggacagcccccactggattatactggatatgtaggcatagagcttat

SEQ ID NO: 812670 - DNA, 640 bp, Homo sapiens
ataatcgctaatgaaactggcagagctttgactcttttagtccagcaggaaacccaaatgagaaatgccatctatcagaatagattggccttagrctatttgctggcaactgaaggaggagtctgtggaaaattcaacttgaccaattgctgtctacaaatagatgatcaaggacaagtagttgaaaatatagagacatgacaaagccagcacatgtgcccatgcagatttggcataggtttgatcctggatctttgtttggaaaatggtttccagctctaggaggatttaaaactcttgtaataggcataataatagtgttaggacctgcatgttactcccctgtatgttacacatatttctccagttactaagaggcttcgttaccatcttagttcatcaaaacacctcagcacaagtatacatgaatcactattaatctgtctcacaggaagatctagatagtgaggatgagaatgagaactcccactagtgagtgaggttctcaaagggggaaatgaggagagaggctatttctcctactgtcctgtctccaaagaaaaggagaaagtaaaaactgaaaaataacagactgattggcgccactggccaggcctgtaggttaaagattaacccccac

SEQ ID NO: 812671 - DNA, 597 bp, Homo sapiens
ttgaaagagttggttccctctgagcgctgtgctctgttccatgcctctctcccagttctgctgatggctggggtctttggcattccttggcttgtgaatccatcactccaatattcactttatcttcacatggtattctccctgtgtctgcgtcagcctcttctcctcttcttacaaggacatcagttataagggattagagctcaccttattgacctcatcttagcttgatgacagctgcaaagaccctgttttttgttttgttttgttttgtttttttgtttttttagatggagtctcgctctgttgcccaggctggagtgcagtgacgtgatctcagctcactgcagcctctgcttcccaggttcaagtgattctcctgcctcagcctcctgagtagctgggactacaggtgtatgccgccacacttggctaaatttttttgtatttttagtagagatgggkttttaccatattgtccaggctggtctcgaactctggacttcaagtgatctgtccgcctcggcctcccaaagtgctgggattacaggcgtgagcctccgcgccctgtttttttaataagatgacattcacagg

SEQ ID NO: 812672 - DNA, 597 bp, Homo sapiens
ttgaaagagttggttccctctgagcgctgtgctctgttccatgcctctctcccagttctgctgatggctggggtctttggcattccttggcttgtgaatccatcactccaatattcactttatcttcacatggtattctccctgtgtctgcgtcagcctcttctcctcttcttacaaggacatcagttataagggattagagctcaccttattgacctcatcttagcttgatgacagctgcaaagaccctgttttttgttttgttttgttttgtttttttgtttttttagatggagtctcgctctgttgcccaggctggagtgcagtgacgtgatctcagctcactgcagcctctgcttcccaggttcaagtgattctcctgcctcagcctcctgagtagctgggactacaggtgtatgccgccacacttggctaaatttttttgtatttttagtagagatggggttttaccatattgtccaggctggtctcgaactctggacttcaagtgatctgtccgcctyggcctcccaaagtgctgggattacaggcgtgagcctccgcgccctgtttttttaataagatgacattcacagg

SEQ ID NO: 812673 - DNA, 637 bp, Homo sapiens
gttaattctattttattttttgctcctatttcagtaaatctcctctttattaattcatcccttctatttttaaaaagattattcttttgcttattctaatttcttaatttggatgtttaccttgctgctattcagacattcttctttcctaatatattagcatacatgctatatattttcctctaaccatgtcaaaacactttattccctaaatttaaaagtgaaacattatctttatcaatcaatattaagtatttcctcatttccattatgatttcttttttgaccctgaagttatttagaagtgtgtctttaaatttccaaacacaggatttttttttttgtcctctttttgttattcatttcttaaattctttggagtcaaagtatgtaaactgtaagatactggctgaaatttgttgagacttgctttatggcatactatatagacgattctgaaatgttccaaatgtacttgaaaagaatgtgtcttttttatttcttgggtacaaarttcaatatacatccattagatcaagcttattaactgcatgttcagatcttctaaaatctctgatttttctgttgcttgatctatcaaataatgagagaggatattaaaacctctcactatgat

SEQ ID NO: 812674 - DNA, 531 bp, Homo sapiens
aaactaacaaagaataaataaataatataaaaataaaataaatactgcagtccttatgttattgctttgtttygatatctggtatgattgcctgagggacctgaggttgttaatcatagggggtttttttaatctttagaagtggttggttatgtaaaatattatttttttttttttttttgagactggattttgctgtgtcacccaggctggagtgcagtggctcgatcacagctcactgcagcctcaacctcctgggctttaagcaatcctcctgcctcagcctcccaagtagctgggatcacagatgtgtgccaccacgcctggccaatgttaaaaaatcctttaacttttttgtagagatgcactcctggactcaagcgatcctcctacttgtcccgaccaccagcccctttctgataaacatttacactgtttattatctgatgccatttctatcttcttccttgtcgtccagacatcaaagaattaggtttcttcagggttttctttttcaagtgctcagtgtta

SEQ ID NO: 812675 - DNA, 531 bp, Homo sapiens
aaactaacaaagaataaataaataatataaaaataaaataaatactgcagtccttatgttattgctttgttttgatatctggtatgattgcctgagggacctgaggttkttaatcatagggggtttttttaatctttagaagtggttggttatgtaaaatattatttttttttttttttttgagactggattttgctgtgtcacccaggctggagtgcagtggctcgatcacagctcactgcagcctcaacctcctgggctttaagcaatcctcctgcctcagcctcccaagtagctgggatcacagatgtgtgccaccacgcctggccaatgttaaaaaatcctttaacttttttgtagagatgcactcctggactcaagcgatcctcctacttgtcccgaccaccagcccctttctgataaacatttacactgtttattatctgatgccatttctatcttcttccttgtcgtccagacatcaaagaattaggtttcttcagggttttctttttcaagtgctcagtgtta

SEQ ID NO: 812676 - DNA, 671 bp, Homo sapiens
taacgaactattttgaaattattatctcattttgacaagtaataagacttacttgcctagacaacattgttgcaatttttttttcttttctatagtacctacatttacatttacttgttattttatttttaaatttacttggctgggcatggtggctcatatctgtaatcctagcattttgggaggccaaggcggaaggatcatttgagcccaggcttcaagaagagccaggacaatatagtgagaccctcatttctataaaaaataaaaataaaactatatttattttaagagacagggtctcgctgtgttgcccaggccggagggtagtggctatttataggggggaggatgatagcgcactatagcttcaaattcctgtgctcaactgatcctcctacctcagcctcccaagtagctgggactacacgcttgcaccaccatgcccaccttatatttacttaaaaaaaacaaacaaaaacaaaaaacaaaacctactatattctgaaataattttagatttacggaatggttgcaaaaacagtacrggaagttcccttcattcatcctgccctgatgttgacatcttataaccatagtcattcatcaaaacttccttattactggtgaaattagtcatgattacttggttaaggtgtcatctgtcaaga

SEQ ID NO: 812677 - DNA, 577 bp, Homo sapiens
atcgcccaggctggagtgcagtgcagtggtgtgatcttggctcactgcaacctccgcctcctgggttcaaatgattctcctgcctcagcctcccaagtagctgggattacaggcatgcaccaccacgtctggctaatttttttgtatttttagtagagatgaggtttcaccatgttggtcaggctggtcttgaactcctgaccttgtgatccgcctgctttggcctcgcaaagtgctgggattataggcctgagccaccgtgcccggccattttttattttttgttttttttgttttttttgtttttttgagaaagggtctccctgttgtttaggctggagggcagttgtgtaatcatggctcactgcagcctcaacctcatggactcaggcagtcctcccaactcagcttcccaaagtgctgagattacaggcatgagccatcacacctggcctgattttttgttttttttagagacagggtcttgctcttaaacacaggctagagtgcagtggtggaatcayagcttactgtaacctcacactcctgggctcaggtgatcctctcacttcagcct

SEQ ID NO: 812678 - DNA, 567 bp, Homo sapiens
ttcaaccaattgccaatcagaaaatctttgaatctaggccaggagcacggtagctcgcacctgtaatcccagcactttgcgaggctgaggagagcagatcacttgaggtsaggagttcaagaccagcctggccaacatggcaaaaccccatctctactaaaaatacaaaaattagctgagcttggtgccgcacagttgtaatcccagctacttgagaggctgaggctggaggattgcttgaacctgggaagcagaggttgcagtgagccaaggttgcgccactgcactccagcctgggtaacagagcaagactctgtctaaaaaaataaaaaagaaagaaaatctctgaatctacctatgacttggaaccacccacccccccaccaccccactcccccatacctgcttctagttggcctgcctttctggaccgaaccagtgtacattttatatgtattgactgatgctttttgtctccctaaaatgtataaaacaaagttgtagcccaaccacctagggtatgtgttctcagaatctcctgagggctgtgtcatggccattggtcac

SEQ ID NO: 812679 - DNA, 645 bp, Homo sapiens
aataccagtctctcctctggtttttgtttttttgtttgtttgtttttttgagatggagtctccctctgtcgcccaagctggagtgcagtggcacgatcttggctcactacaatctctgcctcccgggttcaagctattctctgcctcagtctcccgagtagctgggattacaggcacccaaaaccatgtctggctaatttttgtattattaatagacacggggtttcaccatcttggccagcctggtcttgaactcctgacctcgtgatccatctgcctcggcctcccaaagtgctgggattatggtcacaagtctctttttttcctgctctcaaaacctatgcatcttctgtttccttccattggtgtgttggtcccatagctggtcatgcatttgatctttgcccatatgctaccttctcatggaagtctttcttaacgatcttgagtaggttggtggggaggggagtgggggctggactaatcccaactgagggcccttcacagcattctcaaaatgtataatgatcaatttatgtttgttgccttattttaatctatgaacatacggctcatggaggcagactgtggctgtctcatccaccactgttccttyagtacctcgtacatagaaagcacccagac

SEQ ID NO: 812680 - DNA, 663 bp, Homo sapiens
aaaccttaaatgaggcaggccaccccttctcccaggcatccacatattagcactttcttcattcgtcttccatttacatctaactaaactaattattttcctgctacctcacaccccattggtgttacacaaaccgctgagacagccctatctcctgcaggcatcgcttgtttcttttcagcagcctgttgtaacaggagtgacagaactattaagaatgtcagcctctcatgcatgagaaacttatgtgaaacaaatggtgtcatcctaggtaggatggaagatggcagccaaggcaaactcaggaaccagcaagaccccaccaagcaaactttaataggggaagaagaaactatttgtacatttccagggcaatacacaaataaatacaattttttttttttaaaaaaaggtgaaacaaaaaaaattgcatgatttctgcaggacttaggacatactggtggcactctctgatgcaccagagaattgagcaaatggttgagatttatgcaacactgaatagaaaacagaagatagattaacagatagattatatatatatatacacatatatatacacacacatatatatatacacacacacatattatatacatatatatatakagagagagagagagagaaacagaaaatggaggatcc

SEQ ID NO: 812681 - DNA, 517 bp, Homo sapiens
atgcttcatgcgattaggtaawactcttcttgtgttgtgcctctatttttttttttttttttttttttttttttttttttggtgagtcctacaatttcccccagttggagacgaaaaaaaaaaataacttgaaggaaccttgcagggcaaggaatcattcttaaaaggaaggattttaaagcacatgcctgctccctgccactagggcaggaaattgcctgcaacgaatcatccctcaaaaggggactgagccgaaaggggcaacgtggtcacaaagtacctgcctgcacatttactgcccctctttatggctttccacaaagtcccttcatgcaaaatggcaaagagatgccccatttatatggcataaaaattaagtgactaatggcctatgtccaatgaactcctacccacttacaaagtaagggaacttcacattttaattcgttcagctcaaggagaagcggaacctcatcacctacccaatgattacttggaattaaactccgggccaagt

SEQ ID NO: 812682 - DNA, 517 bp, Homo sapiens
atgcttcatgcgattaggtaatactcttcttgtgttgtgcctctatttttttttttttttttttttttttttttttttttggtgagtcctacaatttcccccagttggagacgaaaaaaaaaaataacttgaaggaaccttgcagggcaaggaatcattcttaaaaggaaggattttaaagcacatgcctgctccctgccactagggcaggaaattgcctgcaacgaatcatccctcaaaaggggactgagccgaaaggggcaacgtggtcacaaagtacctgcctgcacatttactgcccctctttatggctttccacaaagtcccttcatgcaaaatggcaaagagatgccccatttatatggcataaaaattaagtgactaatggcctatgtccaatgaactcctacccacttacaaagtaagggaacttcacrttttaattcgttcagctcaaggagaagcggaacctcatcacctacccaatgattacttggaattaaactccgggccaagt

SEQ ID NO: 812683 - DNA, 547 bp, Homo sapiens
tcatagaaaaaaagttctatgttttggtaaagttcaatttatccttttgtttcttgtagagtatgcttttagtgtcackcctcataactctttgccttacccaagtcacagatatcttctcttctattttcctctaaaagttttgtagtttttccttttacgtctagatctatagtctatgttgagttcatttttgcattaagtgtgaggtgttgatcaaagttctattttttttggaatgtggatgtccaattcaacatcatttgttgaaaagaatatctttctcctatgaattgcctttgcacctttccaaaaatcaattgaacacatttatctgggtctatgtctggagtctctgttctccttcatttatctacttatgttgattcgtttggcaatcccatactgtactgattattgtgatttttatagttaaattttaaaactggtatgactcatctaattttattgtttgtttttaaattattttggccattctaggtcccttgactttccacaaaaagtttagaatctggttgagagatta

SEQ ID NO: 812684 - DNA, 547 bp, Homo sapiens
tcatagaaaaaaagttctatgttttggtaaagttcaatttatccttttgtttcttgtagagtatgcttttagtgtcacgcctcataactctttgccttacccaagtcacagatatcttctcttctattttcctctaaaagttttgtagtttttccttttacgtctagatctatagtctatgttgagttcatttttgcattaagtgtgaggtgttgatcaaagttctattttttttggaatgtggatgtccaattcaacatcatttgttgaaaagaatatctttctcctatgaattgcctttgcacctttccaaaaatcaattgaacacatttatctgggtctatgtctggagtctctgttctccttcatttatctacttatgttgattcgtttggcaatcccatactgtactgattattgtgatttttatagttaaattttaaaactggtatgactcrtctaattttattgtttgtttttaaattattttggccattctaggtcccttgactttccacaaaaagtttagaatctggttgagagatta

SEQ ID NO: 812685 - DNA, 619 bp, Homo sapiens
gggtagagatgggttttcaaccatgttgcccaagctggtctcaaactcctgagctcaagcartcctcctgccttggcctcccaaagtgctgggattacaggcataagccacctcgccgggcctattatcactttcttttaatccttcacacgctgtgagctctgggtgcctatgccatttcacaagtgaggaaactgaggctcagcatcactgaaggggctacttgtcaataacacacagctggcagtgtttctccaggcgtgggatgagtgccctggagggtctctgggtgggggttttaggtgaaacatggacatttttataaaacatcgaggcccctcctcctctgtgaaaccatgatttcatattttcatcctcttgtagtctttctgcttaagtcaaaaagaaagtctcatattggtgctattgtgtcataaacacctctccaatgcttgctaatactcccccttctccttctccttttttttttttttttttttttcccgacagagtctcactctgtcacccaggctggagtgcaatggcacgatcgtggctcactgcaacctctccctcccaggttcaagcaattctcccgcctcaacctcccgaatacctg

SEQ ID NO: 812686 - DNA, 619 bp, Homo sapiens
gggtagagatgggttttcaaccatgttgcccaagctggtctcaaactcctgagctcaagcagtcctcctgccttggcctcccaaagtgctgggattacaggcataagccacctcgccggrcctattatcactttcttttaatccttcacacgctgtgagctctgggtgcctatgccatttcacaagtgaggaaactgaggctcagcatcactgaaggggctacttgtcaataacacacagctggcagtgtttctccaggcgtgggatgagtgccctggagggtctctgggtgggggttttaggtgaaacatggacatttttataaaacatcgaggcccctcctcctctgtgaaaccatgatttcatattttcatcctcttgtagtctttctgcttaagtcaaaaagaaagtctcatattggtgctattgtgtcataaacacctctccaatgcttgctaatactcccccttctccttctccttttttttttttttttttttttcccgacagagtctcactctgtcacccaggctggagtgcaatggcacgatcgtggctcactgcaacctctccctcccaggttcaagcaattctcccgcctcaacctcccgaatacctg

SEQ ID NO: 812687 - DNA, 654 bp, Homo sapiens
tgcttgagcccaggagtttgagaccagcctgggcaacacagtgagacatcgtgtctagtataaataaaaaattagccaggcatggtggtgggcacctgtggtctcagctacactcaggaggctgaggtgggagggtcacttgagcccaggaggttgacgctgcagtgagctatgattgtaccattgccctccagcctgggcaacagagtgagaccctgtctcaaaaagaaaagaaaaaaataatcttaggctgagagactgattgtggcaccgcctgttttcagtgatgaaatgtgagatgattctgcctgtttcagggtcaggaggattctttgcttaaaaaattctgcaggttgcttcgtgttctgtggctatgattgctaagtaaatataaagtgtgactgagtctaagttaactaagtacaaattgacctggtaagaaatgacttctttagggtcattgaggcgtctttcagtttcggaacttactggttaaagagaaaagcccaggccttatttctgytctgagcccttttggaacaaggtagaatgtaaataaatacatggagccaagcggcccattcttcagcatctacatgatcatttctctgtttgcagaatgctttaggatgacttattgcttacctcttctac

SEQ ID NO: 812688 - DNA, 636 bp, Homo sapiens
aagttggctgaagactggggaaggtgttccaggtatacctgtctcgtgtcctcttaccttataccttgcagacctgttagctacatacaaggctgaggctaaggctaatgtcttccagttttttctcatggactcatgccaacctagagacccatttttttttttttctggaatcccatttgttttaattgactagactttgagctgaggagggtgagtgagtgtgtgtgtatgtgtgtgtgtgtgtgtgcgcatgtgcatctggtcttatcagctcacttagactgtgctaaaataatgtgttttggtaaaaaaacaacattgccacttggtatcaagctgattaattcctacagaagctgtaatgaaaacgaaaccacatttgtgtcccaaccttgctaccattcagcatcttctgtgattttgtttttcttaatctagtttcagaatcttaacagcttctgtaatcttccaaagattctacaggactttcttatatgacttgcttagagcaaatgaaaataaaattatatttctctggcttctcacaaattcttggaggttgtscatatttcctcaaatgatgggccaccggaaaggtaatctcatgttacggtgatttactgaatcttttat

SEQ ID NO: 812689 - DNA, 631 bp, Homo sapiens
tcatgtagtttctagaacacaaaaggaktcacttcattagtgttgtaaaatgaatgaatgaatgaatgaagaaatgatggggattgagcttcttgaaggaagagagttattcatgctcgagagcttctcagtcttcataagtgggtaaagagtagctgctaagacaaaaataaaaagggtcaaaaagtcagtgttgcaggccgggcacagtggctcacgcctataatcccagcactttgggaggccaaggtgggtggatcatttgaggtcaggagtttgagaccagcttggccaacatggtgaaaccctgtgtctactgaaaatacaaaaactagctgggcatggtggcacatgcctgtagtcctagctacctgggaagctgaggcaggaaaatcgcttgaacctgggatgcagaggttgcagtgaaccaacattgcgccactgtactccagcctgggcaacagggcgagactctgtctcaaaaaaaaaaaaaaaaaaaaaaataggtcagtgcagcttgtagtcccagctactcaggaaggtgatgtgggaggatctctgaggctaggagttcgaggccagtctgggcagcagagcaagacgccatctccagaaaaagaaaaaaaaagtc

SEQ ID NO: 812690 - DNA, 556 bp, Homo sapiens
ttataactttctctcagactccatcttccctaggggattagcagctgacttaaggcagaagcatttaactgcccaagtatctcagtacaccttctttttgttcctcccattcatggagctaattgcttcaggacatcttcatatgggtccttcttgtctctaacctcttatttctctgcaggaatctagaatcccctcaggttgaaaaagctagaaaatgtaagatctttaaagtcagcgatgcaggtgttggaccaggaaagaagaaaaattgagtgacccatggagattctgagcaccaaacaaatgtatcctaaaacagtgtttcttaagctatctttggaaaaggagcattttcctctaatacttcacagaccaatacttgcaaaaaaatttacaaaacagtgaattactagaaaaatgaaatcaagacaagtcctttttttagatttattagactcaaaattattttgcgaaattgccataaaagcttttaagcactggctctcaatttytgcggtcacctcattgtggtgcaatattttatgtttaatgt

SEQ ID NO: 812691 - DNA, 511 bp, Homo sapiens
aaaaagatctctagggtggggatcttggaaacccctctcccttcctctctcctgttctttctctctctttctttgcacttcctaggtcattccatagtctctgtgaaagtgatattatccctgttggtcctcctcagactctccaagatatgcagagctttgggccaggatcctacagccacgggtcatgcagagccagttggccacatcctttggggtgagtgatgcctagaagctaattataattccaaaaggtctccactgaattctaagaactgcccatctgtaccctctttcctggactttatttctttgaagacatccacttgccttaggccactgtaaaatttacgttgtaaccttcagtgtaatactcttcccagactcatytgtggcatcttcagccatttcgagtcaaaagtgttcaccagaggagcgatagtggcagaagttacatctatagtgaaatgaacaaatagactgagctgtactcaaattgaggtttaccaaa

SEQ ID NO: 812692 - DNA, 511 bp, Homo sapiens
aaaaagatctctagggtggggatcttggaaacccctctcccttcctctctcctgttctttctctctctttctttgcacttcctaggtcattccatagtctctgtgaaagtgatattatccctgttggtcctcctcagactctccaagatatgcagagctttgggccaggatcctacagccacgggtcatgcagagccagttggccacatcctttggggtgagtgatgcctagaagctaattataattccaaaaggtctccactgaattctaagaactgcccatctgtaccctctttcctggactttatttctttgaagacatccacttgccttaggccactgtaaaatttacgttgtaaccttcagtgtaatactcttcccagactcatttgtggcatcttcagccatttcgagtcaaaagtgttcaccagaggagcgatagtggcagaagttacatctayagtgaaatgaacaaatagactgagctgtactcaaattgaggtttaccaaa

SEQ ID NO: 812693 - DNA, 569 bp, Homo sapiens
aaggatattttatttactaaaacaaaagaggcaataattttttactgcaacgttagggatttatgctagataaaaggaagttcccacaatcctgggggaagggtgttaagccaaggcaaagatttcacagctgttgggaaattgctttctgaaaatactaaaggatacagtgccagagtcactggccatctgctaataatttatgttcctcatccccagcaaagataaagaacctgtaaagaaccacccatctagggatacatttccagccccccttttatcaaagcggtgacatgtgaccgaattctgcccagtgacatgtgggaagaagtggctctttcaggactgttcccccaaaactgtctttgggatgctccaaacttctttattcccccaatcctctgatgaacatgcacctgacattggatgctacatgttaaaaacggagttgtcatcttctacctgggtsgctgaatgactgtgtggatcaggaagctccccactcttccctgccatgactgaactagccactgtcatctggagggtgtctgtaatagcatctagcattg

SEQ ID NO: 812694 - DNA, 378 bp, Homo sapiens
acttcccctgtttattgtgtgtgtgtgtgtgtgttgagaacacttaaaatctattcctttagcaatttcctagtatacagkacctaattattaactgtagtcaccatgatgtacaacaggtctgttggatttattcctcttatctaactgaattttttttatccattgactaatgtctccccagctcccctctctccgcactggtaaccaccattctgttctctgcatttatgggttcacttctttaagattccacatacaaatgagataatacagtatttttctgagtttggcctttttttttgagacaaagtctcactctgtcacccaggctatagtgccgtggtgccatcctagctcacagcaaacttcgcctcc

SEQ ID NO: 812695 - DNA, 378 bp, Homo sapiens
acttcccctgtttattgtgtgtgtgtgtgtgtgttgagaacacttaaaatctattcctttagcaatttcctagtatacagtacctaattattaactgtagtcaccatgakgtacaacaggtctgttggatttattcctcttatctaactgaattttttttatccattgactaatgtctccccagctcccctctctccgcactggtaaccaccattctgttctctgcatttatgggttcacttctttaagattccacatacaaatgagataatacagtatttttctgagtttggcctttttttttgagacaaagtctcactctgtcacccaggctatagtgccgtggtgccatcctagctcacagcaaacttcgcctcc

SEQ ID NO: 812696 - DNA, 610 bp, Homo sapiens
agaattgaaaaatattaggtattctcgaatgcagtttttagacacacgtttactctgtgtattctcaccgtctagtacagctagacagagattatggggtcctggcttatgtttgggtatagcagagatgaggtgaaataaataaggtattgattcaatcctcaagaactctactcatttaaatggacagagaaaacagatgtacatgatacattcaaaggaaaaagtgtagtactctttggtacagactaaaaactcaagagtctaatgaaggagaaatcacatacgtaagagtggtacataagagaattccttggaggcagtggttctgataacacattcattcatttcaaatgtatccaggtcctactcagtgttggggtaaggagctggtgccactgttaaacaatgggcgaaagtgacagagaacctgttacctaggagcatacagttgagtggggtcaggagaggaggttagtgacatgggtggaagaggaaatcacatcatcacaatagcaaacctctaattactatctgagctaactgggataggtgacctaaaggaaagattcctgattctmgcaaagcagttagcaaaggtgcacccttg

SEQ ID NO: 812697 - DNA, 622 bp, Homo sapiens
aggaaagcatttagcgtagcatctggcacacagcagcactccacatcaacgctggctgttattgtattattatcatggttacttctgtcctagtttttactctattacatagtttgggtctatttgcacaatatacttctttaaaacacacacgtacagtcaggtgcagtggctcacacctataatcccagcacattgggaggctgaggcaggcagatcacctaaggtcgggagttcaagaccagcctgccctacatggtggaaccccatctctactaaaaatacaaaaattagccatgcctggtggccagcacctgtagtcccagctccacgggaggctgaggcaggagaattgcttgaacctgggaaatggaggttgcagtgagctgagatcgtgccactgcactccagcctaggcggcagactgaggctgcatctcaaaacacagacacacacacacacacacacacacacacacagactttagaattatctcattgtcttcctacaagctgtctttttgcttctgcatgaacttttaaaccttctccaccaaggcaaggtaactttaaatggtttwccccacagatagccagccaatgaaaaaattaccaatgtctta

SEQ ID NO: 812698 - DNA, 552 bp, Homo sapiens
cggccgcctaagtcccacagagacgggagtcgggtgggatcccaggctgggccccgcggcgggtaagtgcctgggagaggcggcgggatagggtagggtgcagggaacctcctggcgccgagcctgactttgaaatccgagctcccacagatcggaggcccagatccctaaggcccgaccccactcttagcgtcagtttccccttctcaacacgggtgttggggaaagaagtccacgtcctcacctgggtttccatcctgggtccaggcacctctccttcggttctagattaggaagggagggcagtgcccgacctgtgactgttttttgagagggcaatagttaacccacaagggtggcgtcaggaaggcgacaagacaaagagaacgagtagccccacgggggacgtccccggagcccctcactaccactctacgcaccgtggccaggccacgtctttcctgctcccatcctgggccttcacaccctgccctccccagctcctggcctaaatcgtcatgggatcgcgycaaattcttgattgttgagtga

SEQ ID NO: 812699 - DNA, 532 bp, Homo sapiens
gacagttttgttttttttgtttttttgaggcagagtcttgccctgtcagcccaggctggagtgtgatggtgcgatctcggctcagcacaagckccacctcccgggttcacaccattctcctgtctcagcctcccaagtagctgggattacaggcatgcgtcaccacacctggctaatttttgtatttttagtagaaacggggtttcaccatgtcgtccaggctggtctcaaactcctgacctcaggtgatctgccctcctcggcctcccacagtactgagattacaggtgggagccaccacgcccagcatagactgttcttactcctgttgcatgtctggaatttttcttgataaaaaaatttggaaagaaaagggaaaaaggcaaagagctttaatttcaagtgaaaccatcttgtagactaaggttttgaaaggcaagtggcagggttgggagacctgtttctgaaggtgctcactctctgaaatctctcagaccccagcttcccagcagttttctctctgttctctgtg

SEQ ID NO: 812700 - DNA, 532 bp, Homo sapiens
gacagttttgttttttttgtttttttgaggcagagtcttgccctgtcagcccaggctggagtgtgatggtgcgatctcggctcagcacaagcgccacctcccgggttcacaccattctcctgtctcagcctcccaagtagctgggattacaggcatgcgtcaccacacctggctaatttttgtatttttagtagaaacggggtttcaccatgtcgtccaggctggtctcaaactcctgacctcaggtgatctgccctcctcggcctcccacagtactgagattacaggtgggagccaccacgcccagcatagactgttcttactcctgttgcatgtctggaatttttcttgataaaaaaatttggaaagaaaagggaaaaaggcaaagagctttaatttcaagtgaaaccatcttgtagactaaggttttgaaaggsaagtggcagggttgggagacctgtttctgaaggtgctcactctctgaaatctctcagaccccagcttcccagcagttttctctctgttctctgtg

SEQ ID NO: 812701 - DNA, 520 bp, Homo sapiens
tgtgtgcccttgcccttgcttgctgtgaaaccctcatgtgtggccaggtgcagtggctcacacctgtaatcccagcactttgggaggccgaggtaggaggatcacttgagccaggagtttgagaccagcctgggcaacatagtgagacccattctcatgttatttaaaacaaataattattttaaaaaaaaaatttttttaattttagactcatctaaactaagggagctgggagtaggtggccataccttggccctatgtgagtgactgtgatggaaatatcagtaggtaaccaagcttatgggtctgtgcatcagtgatccacacacaacacacatcttggctgtcggctgcagcagccatgtgtcccctgaatggggaagggcaaaaggagctatggctatgtgcctgggaggtggtcttcccaacgggatgatgatgctrtgtttcctgtctgagccttctagatgctaagtaaatgtgctcttagattaaagcctgttgcatctcaggtgactgc

SEQ ID NO: 812702 - DNA, 408 bp, Homo sapiens
catttagaaccttagctgtgrccacaggtgatggtgcaggaggaaaagccaatatctgtgcagcattttccatttctttgcaagttcacctgcctctatcatctgagactcaccctgagggtgttctttggttgcctgagagtctgctcaacctgaaagggacaggtggccagaagtgctggggagttgacatcctgagcaagcagttcttggccaatgacggggagtagttggtgtataaataccccagcttccttgctccacggtgggataatcctaaagtgactgttctgtgccggctcccagtgttccccaatggaacggagctgcagtcacccacagtgattatttgctagataacccacaccttattatcgacccaccaatatctcctggaatcatcctgag

SEQ ID NO: 812703 - DNA, 626 bp, Homo sapiens
ccctgacacaagccccagtcctcacatttacaatggggacttggggactgctgggtcccaagtccccacttgtcagaggaagcgccaaggctctgcaaaggtcatgaagccaggaasgggcagagctggaactcaatgccatcccccagcaggctgcctcgtggaatccattcctgggtgtcagcgcatccctgcttaccccgtgcgatctttgtgttgaggccattgccaaatctaggcttgccaaaatccaaactgacccaggatagctaataagatcagttgcagctaatgagaatgagatgctggagtggaggctactgcaggaacctcacttgcatagctgggtttgctccaagaactttggacaggtcctgaggatgtcatattccttccctccaaggtcccctccctcttagcccctgcccacgccctctggctttgagttccctgcacattgtctcatctctgttcagaggcctgcgtcttttctcctggggcattgcatgggaaaagagctgaaattctggcagattctctaggaccacccagctgggcagcatggtctgaagtagaggctctctctgtttctgcccccacccagttcccagctaaaggattggttg

SEQ ID NO: 812704 - DNA, 571 bp, Homo sapiens
tgagcaaagtgggctggccaccttgtctcacgtytgcgatcccagcactttgggaggctgaggcggcagaatcacttgagcccaggagtttgaggctgcagtgagttgtgagtgagccactgcactccaacctgggcaacaaagggacactgtaaataattaatcataagataaaaattaaaatgaatagagcacaacccacagaggttgagagacttgctaacaccagaagttgccagtggtgaaattcagctttgagtttgctgatagttacggggccaagagacaggaatctgaggctcatctcagcaggccaagcctccttccttactgtggggaaattccttctctgagcacctagagggatcctggtgtcagactgacctcacctgaatcaggcttccacccacgtgatgacctcaggccagccactttaactctcagtgcctcatttctctaactttaaaatagctaaaaggcaaaggaaaaaacatgaaagccaaaaaaaaaaaaaaaggtagaaggaggaggcaatagtagaacctctctcattgggccgctgtgaggatta

SEQ ID NO: 812705 - DNA, 614 bp, Homo sapiens
taaaaatgagcaaagtgggctggccaccttgtctcacgtctgcgatcccagcactttgggaggctgaggcggsagaatcacttgagcccaggagtttgaggctgcagtgagttgtgagtgagccactgcactccaacctgggcaacaaagggacactgtaaataattaatcataagataaaaattaaaatgaatagagcacaacccacagaggttgagagacttgctaacaccagaagttgccagtggtgaaattcagctttgagtttgctgatagttacggggccaagagacaggaatctgaggctcatctcagcaggccaagcctccttccttactgtggggaaattccttctctgagcacctagagggatcctggtgtcagactgacctcacctgaatcaggcttccacccacgtgatgacctcaggccagccactttaactctcagtgcctcatttctctaactttaaaatagctaaaaggcaaaggaaaaaacatgaaagccaaaaaaaaaaaaaaaggtagaaggaggaggcaatagtagaacctctctcattgggccgctgtgaggattacataaaaccatgtgttccgacccccagtacttagtag

SEQ ID NO: 812706 - DNA, 651 bp, Homo sapiens
tccagactccctcagggcctcagagctgatccaaatgccctaagaggagaggcgtgccaaggctgccaccctcatgccatgggccacagctgtcactgcagaatggcaggtggacattcagcagctctgctctccttaaccaaccagtgatgctttggtctcaccccagaggttctgatgtaattggtcaggattgaggcctcggcactgggactttttctttttcttctttttttaattctcttagcattccagtataacattgggattttaaaagctcccctgatgattccaatgtacagccagggttgggaacccagccccatacaagcagctcatgggccaattatatatcacagaggtattctgttgggttctgagacgtgagtttagatttcgtttagttgttaacatttaaaagcatggaattttcacataaaaacctgaattcctagctggacatggtggctcacgcctgtaagcccagcattttgggaggctgaggctggaggatctcttgagcccagsaattcgagacaggcctgggcaacatggcgagaccccatctctgttttttaaattaaaaacaaaactgaccaaacaaaacacccctgaattcccggcttctcttgaggactgaaaaactctggc

SEQ ID NO: 812707 - DNA, 644 bp, Homo sapiens
ggtactgggtagtgctgtccctttacacaggctgggagcctccagttccccacactctacaccaatccttattgtctcaccagccccttcatgtatttccattatctatccagcccttgcagggctgccctgasccattcatgtcccttgaaggctggaaaacagaggcctatagacaagtgtggcagctgcagacctcctcagctattgcttgggctaagcagacttctttctttcccagccggagaacatattgtgcgtcaatcagacaggacatcaaattaagatcattgactttgggctggccagaaggtaagggggttttatttagataccttaacaaaattccttgggactctttgtggctctctgggcatggttactcctgacccagctaatgcttgagttttggaactgatgcaagaaagctcttgtgtgcagaagctggtggcctttgacttgcagacaggccttgttgctcttgcatgggctggctttgtgctgtgggctctgcttcttcctaaaaggctatggaattaactgaacttcactccacctgtcagaagagaggagagtgatggtgaagggggctgctgagcgaggtgctgggctgcttagttctatgggttccccaggcatcctgg

SEQ ID NO: 812708 - DNA, 600 bp, Homo sapiens
aagtatcttgcagtgggaactcatttgatttagagtagccgtaagatactgatgattgaaaatgttcaagtaatcactctatcatcacattttcttaaagaaaaaattttaagtatcaaatatgtttagtacatccacttttttattttcttaggtttttttttttttttttttttttgagacagatcctcactcttgtcacccaagctagagtgcagtgacgctgtctcggctcactgcaacctctgactcctaggttcaagtgattctagtgtctcagcctccggagtagctgggattacagacatgcaccaacaagcccagctaatttttgtatttttagtagagacagggttttgccaggttggctaggctagtctcaaactcctgagctcaaatgatctgcctgcctcagcttcccaaagtgctgggattacagacatgagccactgcgcttggccaatgggtgrcttttttgcagccatgttatgtagtagtatatgatgtctgtcctacacttgtaagcattgtcatgaaaccagaaacctaagagaagatttatttctgcagataccttttgtatgttttttaaaaaactaa

SEQ ID NO: 812709 - DNA, 461 bp, Homo sapiens
tgtttgactgtaggtcataagatccctattggaaagaggatcctgccccatacctagagggaaggaatgctgcttggagaggccaagaagaatccagaccgacagatcttgctgggtttccccactctgtctattagcgagcgttagcgcagaccctttttgcccaatcctatttctacatggctgtccagactttgtcgaatctaagcgcaaaaatggacaacttcccctgcatctttgggtcttcatttggaagtctcctgtgtatacatgtcatgcttcttctccaattaacctaccttttgtgagctgatttttcagtgaaccttccaagggtgaagtaaaagtctccttggcccccmcacacactggggtgtagtttgctttgaggctggtctgggggtgagggcatggctgttgtggtttgccttgaggctggtctgggggtgagggcatagctg

SEQ ID NO: 812710 - DNA, 531 bp, Homo sapiens
tgcactccagcctgggcaacaagagcaaaactctgtctcaaaaagcaaaaacaaaacaaaacaaaaaaagcagagtctctgctctcctgtagggttggaggccgaccacaaacaagcgcccaaatgcctgagacaggaacagcactgggtggtcacaggaggatggaaaaacccaaacagctgaaacaggaactaggcaaataaaccataggataacagaaaacccaagggagagaagatggccaaaactctggccagggtgacatgtccatgcttcttccagcaaacccagataaggaagaaaggagacagtaattgaggtggaggtccctgaaatcccctccctttccagaatgcctaacgataattccatcctgtaactaaaagaaacacccataaaattaggaacccaaactccattgtgcaagactcattctcacgggcatgcctgcacttctctcttaaatgwgtatgttcactttgcaataaaagcttcttgcagctcggtgcagtgtcttacaactgtaatgc

SEQ ID NO: 812711 - DNA, 443 bp, Homo sapiens
caagaatgttctggacttctacaagcagtggaaggaaattggttgatactgacccccaggccctgcagtggggctgactccagatctctcctgccctccctggcagccaggaccagcacctgtagtcaccccaccacacgcagactcatgcacgcacacaggagggaggcctagctgctcagaggctgcagggagggcccaggagccggctgggagggtggggtccctttgttgccaagacgttaggaaagcgaggaaagtgcttggattaggagagtcttgtgggcccctggccagccttcctgcctcagctcccctgctgtctccaggggcaggtggtaggcatgggtacctgcatttcactggartgggttcttggatctctgaggggaaggaacagcaaaagaggcccttcttcctcacccaagatgcagggtggttgg

SEQ ID NO: 812712 - DNA, 475 bp, Homo sapiens
gaatgtgtgaaagtttccaatttaacatcatatgaaatcacatactttgagctagtttaatgagatagaactgttttttcttcctgcagatcattcatctcttcttgagactagttaattgtgaagacttacatttttaaggccaggatctggacttttattagttagcatcgtaataaaaaaaaaggaggtatgtagagatagagatgaaattttttctagatgaaatggacaaggagtgaaaaagagttgacttaaagctgaaataaggatcatatggcagttttcttctatagcctccactttctctttatattagacattttattttacatttaagtctttgtgagctcccttatctcttgatttttaattgctttttccagtcttctgctaaaaacataatgtgaactcttattcaacttttagstgggaaaggtcttattgtggcctttaggactatggctacacaaat

SEQ ID NO: 812713 - DNA, 603 bp, Homo sapiens
caggctggaataagctagatggataattttagcctatatggatttgttcatttccattttgcmaggacattctatagtaattcaaagttgttaaggtaggataactattctgaattttttcccagtcatcttctatagggctcatttactgtctcagagttttacctgaaggaaagaaaatgagcagttatttagaatttatggtgctagtcattgtgcttccaacatgtgaaggtaaatctgcatgaaagaggtacaactcccatttacaggtaagaaaatctgggctcccaaagattaagtaccttgcccaagaacccacagattagggtttggaacagcttttcctgactccaaatcttaaacaatttctatttcttctcctgtacattatagtgtgatcctactgggtttaataacatttcaacgttaagaaaagaatggtcctacaaggcttaattcacttttgatatggattctaacccagcaatgctcatgggatgtcagcacagaaatggttgtgattgaaaatatctcaggaggatcccatattaccgactctgagaggagaaatatgatggggctttatacacactttaacca

SEQ ID NO: 812714 - DNA, 552 bp, Homo sapiens
agtatagtttgaggttgggtaatgtgatgcctccaaatttgttctttttgcttagtctcactttggctacatgggctctcttttagttccatatgaattttaggttgtcttttctagttctgtgaagaatggtggtggtattttgatgggaattgcattgaatgtatagattgcttttggcagtgttgtcattttcacaatactgattctacccatcaatgagcatgagatgtgtctccattcatttgtgttgtccatgagttatttcagcagtgttttgtagttttccttgtagagatcttttacctccttggttagagatattcctaagttgctattattatttttatgttggtggttgttgtagctattgtaaaaggggttgagttcttgatttgtttctcaccttggttgctgttggtgtatagcaatgctacwgatttgtgtatagtgattttatatctgaaacttcactgaattcatttatcagatctaggagctttttggatgagtctttagggttttctaggtattcaatcatatcattggcaa

SEQ ID NO: 812715 - DNA, 548 bp, Homo sapiens
cactttggacagcctgttaatttaaccacgtttagattaatcactagcaatgtttctccatgttctctgaggcaggtaaggtcaggtacactacacaaatggcacaaaagtgccccaaatagaaaccatggcattttgcaggggttagcatttgcattaccccacagtatcatatccacctgcacagctcaattcctcttcattcccaaatatgagcaacttaagtcatataagccaccacaaaacagctttttcagaacaaaagttgaaagagaaatgactagatgactgtttaatggggtacgaaagtgtcccacagcaccaggacggtcctgcttaaaaccaaacagaaagttcagaaccctgggagcaagaggaggggtggggatttctgggcatttcctggctcctctaggaacacaggggaagctgcaggaygaggctgggctctatgcagacgaatctggagaaaataccccaggcaccagcattttggactctaaaactccactttctgtcctgagaaatatacccttcactctacccat

SEQ ID NO: 812716 - DNA, 649 bp, Homo sapiens
cagggagccaaacataaagagtattctatagttgagagtgaaaaacagtattaaatgccactggtgggttaagtaagatgaggactaacacatggcctttgattgaaaatcatggaagtttggggaccttgagaagaacaatttttgtgaagcagtagatgtaaaatcctgacaggagtagattcaagaaagccatgcaggagagaagttggaaatagtgaggatcaacatctagttcaaggaattttactgtatggggaaggaaacaaatagacttttagctggatggaaacacacagctaaagaaagaaaatttttggccgggcgcagtggctcacatctgtaatcccagcactttggaaggccaagacaggtggatcacctgaggtcaggaatttgagaccagcctggccaacatgacaaaacctcatttctactaaaaatacaaaaattagccgggcttggtggcacatgcctgtgattccagctactcaggaggctgaggcaggaggatcacgtaaacctgggaggcggaggttgcagtgagccgaggttgcmccactgaactccagcttgggcgacaaagcaacgccttgtctcaaaggaaaaaaagaaaatgtttaaaaattggagaaataacagcatattc

SEQ ID NO: 812717 - DNA, 598 bp, Homo sapiens
ttctggctggagcctgaccttactgcttgtccatctctcccagggtggtaggccactttaggtaggaccctgtggatttctccttggtgacccccgcattctgggcacagagcctggaacacaatgtctgcccagatgtgtgactgaaccaccccccaattccttaactgtaggatggcggctgccttcattagaatcttaacaccttgcctgagggctggctttgcaggtctgagtggctaggtcagggcactgctagtgttttctatgtttgtagtcaattggtgagagtttgttttacgcatttgttaaaactgtgggacagtggtctggaagccaacaaggctttagggttggcagagtgactcccatcccatcattgatgtctggctttgacttggcatgggagacattgcctctccagatctcagttctctcgtttgacaaatggggcttagggttgaacagcctctaartcctctgtcagctctgcaattcaggaaagatgtttaaaaatgcatacttgcattgtaggtacatccaacatagagcaaagagagaattttcctagctaaattgactgcaaaaaaatgaaacc

SEQ ID NO: 812718 - DNA, 616 bp, Homo sapiens
cctggcctagcatagttattttgaagtccatcagttgtatataacartggttcattccttcttattgctgtgttgcatttcattgtatggctatgccatatttattcatccattcacctggtgatggacattggggctgtttccagcttttggctatgatgaatcaagttgctgccagtctgcatgtagatttttttttttttttttttgtagacagagtcttgctctgttgcccagactggagtgcagtggtgcgatcttggctcactacagcctctgcctccttggttcaagcgattctcctgcttcagcctcccaagtagctgggactacaggtgcccaccaacagcccagctaattttttttgtatttgtagtagagatggggtttcactatgttggccaggctggtcttgaactcctgacctcgtgatctgcttgccttggcctccgaaagtgctgggatcacaggcgtgagccaccacacctggccacattgctgttgaggaggtgcataggagcagaatgactgggtcatatagtaggtttcactttttaagaagtgacccaactgctcttcaaagtgaccataccgctttacatgcctctgagcacat

SEQ ID NO: 812719 - DNA, 623 bp, Homo sapiens
aggatccttataagaacctgccaccttctctctgccacgtgaggacatggggagraggcggctgcctcccacccaggaggagcccttactggacactgggccctggctgcaccttgaccttggacttctagtccccagaactgtgagaagtagatttctgctgattacgctttcctgtctgcggcctgagctaagacagcagcgcttggggagaagcagaatttgaggagctcctcagtggcaggctgccctggccctgctgtcagcagaggggaatggccatccatgctggcccctcaccagccgggccttcagtgagctccccgggtaggtgaagctctcccagctctgtgtcccccgccaaagcaggcccacaagcgagcgcctatggggtggagtgagagtgaggaagaaacattacccgaggggtcactctcttcagaagacctcaatgactgtagactactgaattatttccttaaaaaaaaaaaaaaaaggctaggtatggtggctcaggcctataatcccagcactttgggaggacaaaggaccacctgaagccaggagttccagactagcctgggcaacacagcaagaccccatctctacaaaaaatttaaaac

SEQ ID NO: 812720 - DNA, 610 bp, Homo sapiens
gaagatgaataggctgggagacttggcctacaaggtatcaagtattattgcaaagctatagacattaaaaaaaatgaaatattcactaacagaaaataaagtatagctaaacagatcaacatggatgaatcttagaaacatgtaacatattgaatgaaacaaagccaagtcacagaagactagaagcaatataacatcatggctgaggcaggagaatggcgtgaacctgggaggcggagcttgcagtgagctgagatcgcaccactgcactccagcctgggcgacgagcgagactccgtctcaaaaaaaaacaacccttaaaatcaagtaaaacaaaaaaatatttttaagaatacctctaaaatgtaaaaggattatttttaaaaagatatgagaatactgatgaaaaaaggaaaaaaaattttggtagaaggccttctagtggaggggcaggttgatgggaaagggacacagttgwtaggacagtacggattatgttctagttgttacactgggtagcaggttatgaagttcacgttattaagcttcttaattggttgggcacggtggcttatacctgtaatcccagcagttgggaaggccaaggcag

SEQ ID NO: 812721 - DNA, 616 bp, Homo sapiens
gtcgagaagagcagaagatttcagactaagcctmgggtcctagaattccagggtcagcagagaaggagaatctagcaggggagactgagctaaactacttagtagataggaggaaaaccaaggtagtgcagagttctgaaaaggagaaaaaaattcaacaagaataaaatggtcaattaatctgttacagaaagaacaaataagatgaagaatgatgaaacatggtaatttttgttttgtttcgttttgtttttttgagacggagtcttgccctatcgcccaggctggagtgcaatgaaacgatctcgggtcactgcaacctccgccttccagattcaagcgattctcctgcctcagcctcctgagtagctgggattacaggcagtgccaccacacccagctaatttttcgtattttagtagagatggggtttcaccacgttggccaggatggtttcgaactcctgacctcgtgatccaccctcctcggcctcccaaagtgctgggattacaggtgtgagcgaccgcgcccagccaaaacatgataattttatctggcaaaattgagatcattgataaccctggcaagagtagtttcaacaaagtgtacaggggcg

SEQ ID NO: 812722 - DNA, 552 bp, Homo sapiens
ctacatccacctttaaacatggggctggcaacttagctcacacccaaccaataaggtagtaaagagagctcactaaaatgctaattaggcaaaaacaggaggtaaagaaatagccaatcatctattgcctgagagcacagaggaagggacaatgatcgggatataaacccaggcattcaagccagcaatggctaccctctttgggtcccctccgtttgtatgggagctctgttttcatgctattttaaagtcttgcaactgcacactcttctgatccatgtttgttacagcttgagctgagcttttgctcaccatccagcaatgctctttgccaccatcacagacccgccactgacttccatccctctggatccagcagggtgtcagctgtgctcttgatccagtgaggcacctgttgccactcccagttgggctaaaggctcaccattgttcctgcaaggctaagtgcgcgggtttgtctagttgagctgaactagttgagytgggttccacagttctcttctgtgacccatgacttctaatagagctgta

SEQ ID NO: 812723 - DNA, 599 bp, Homo sapiens
tctcttaattgtgttgttggcctagctcacagagttcagtttttgctgtcatcacagctgggaatgagaaagggagggggctccggttggtctccctctgcctctggaccatatgtgcaggacatgaggcttccacaggaacagctctgaaagctgaattctcaggtccttgtgaaggagggaagcttgcctgccttggagcgtgaaaaagtcttgctggacagaagtctcacggtttaaaaatgggaagggagaggattgagatcacactagcatgcacagaaaattcttaaaacaaaaagataatgagagaaacttcatcagaatgtgaaaagaactataaagctacagtgctgaagagaaggcaatactggcactagaatgacaagattcatggaacacagtggaaaatccagaaagaaagctgcatgtatgtaatattttatcatgtgataaagtgatatgttaatatccacaaggaaatagtcaattatttcataagttctcttttggatattgacttaccwtatggaaacaaatattgctgcatttctaccttaccagttacaaatagtgatttagttgtaataaaaagaaaa

SEQ ID NO: 812724 - DNA, 604 bp, Homo sapiens
gagtgaaagaaataaaattgaatctcgggaccttaaacttaccatgccaaaggaaagctaagcttgggaacggagtcacacgaaaaccaccttccttttgttcccaaacacagggctgtaatttcacacacttccttcatcttatgtaacatgcagaactacagagcatgagatgaaggcatgagtgagtttgtccccactccctcttttcacatgtaaaatgtagattcactgagcgctaatcagagcctcacaagaatgtgacacttgcctcattgcctaaccaccctctttttaaaaaaattatttccttcttgcttgctatttcccctttaaatactgaagttctcaaaactctcttcagaaaaagcacacgtcacagatcctcctttgactcgtgtctctttttcctgggtgcatccttaaccttggctaaataagcctctccatgactaagacgtgccttggtcactttttgatttacatggcacatctgggtcacaggatggaagtggcctgggtcagagagaaaagccatatcagaaaagcatcctcatcacacaaagtcaaaatttasaaagagtgcattttagtataaactttc

SEQ ID NO: 812725 - DNA, 574 bp, Homo sapiens
taattggtaatgtctttctgctgctttcctacatgaccaactattgacttggggtagaattactgtattgtgtttctttgtgctcaaaatttgtatgttgttctaatagcttctgacctttagtactgatatggataagtcagagaacaacctaattgttgttcatttgtagtgctttcttatttccaacctagatgcttgcagaactttttttttaaactttaaactcaaatatttaaaagaatacatttcaatgtagtctctccccattaagtttgctttttttggtgatttcttatgatccacatgcaggaattccatcaactaggaaaacttcagtttgagcatgtttttttctattatactggccacttctgcttctgtaacattcttatagtctcttcttcaggatgaacttctacccatgagctgtatcttcactccttggyccctaaatctatcatctttgcttgtgcttctctttatgtgttgggagaactcctccagcttgtcctcatatcactaaatcgattctctatagtgttgcttctcgtctttaccacatctcatgcaa

SEQ ID NO: 812726 - DNA, 400 bp, Homo sapiens
cactctccacctcctcacaccaacctcacacacccatgttttactgcataaattaacatgggtccattattctcttctcctagaggcttctgaatttcatgaaaagtatctactctgtcttaaaatttaaaaaaacttataaaatgttctcctctcattttaaataatcttggccagttgtttggataaatgcaatctgattaaactaatttttttaaaggcatgagcgaatgttagtcctttaacactgccagccatttaaaaaaatcttcatagatgcaaataaatctctaattggtggaatctgagygcatataaaggtgaaattttaaaaagattatatagtgaagggaagagattaatatttgagcataatttgcatcatgagccccagtccctc

SEQ ID NO: 812727 - DNA, 400 bp, Homo sapiens
cactctccacctcctcacaccaacctcacacacccatgttttactgcataaattaacatgggtccattattctcttctcctagaggcttctgaatttcatgaaaagtatctactctgtcttaaaatttaaaaaaacttataaaatgttctcctctcattttaaataatcttggccagttgtttggataaatgcaatctgattaaactaatttttttaaaggcatgagcgaatgttagtcctttaacactgccagccatttaaaaaaatcttcatagatgcaaataaatctctaattggtggaatctgagtgcatataaaggtgaaattttaaaaagattatayagtgaagggaagagattaatatttgagcataatttgcatcatgagccccagtccctc

SEQ ID NO: 812728 - DNA, 585 bp, Homo sapiens
gatgcagacctcaaaactgaatctaaagttattgtataagccatgcttgcattgctataaagaaatatccgagamcaggtaatttctaagaaaagtggtttaattggctcatggttctgcaggccacacagaaagcagagcggcatcttttcctggggaagccttaggaagcttccaatcatggcagaaggcaaaaggggagcagtcacatcacatggtgaaagcaggtgtgagaaacgggtggatgcaacacacttttaaactaccagatctcactcgctatcgtgtggacaacaccaaagggatggtgccaaaccatcatgagaaacctgaccccatggtcagatcacctcccaccacgccccacctccaacactggaaattacaatttaacgtgagatttgtgcaggaactaatatacaaactatttcagctatttagttgcctcctaaagtgaatttgatcactttaatagagtttgaacagggcttacaggagatggaaagtcttgctgtagacattgtggagctagtctctaaaaatggctgccatcaattcttccaccaactcctcaccttttcccat

SEQ ID NO: 812729 - DNA, 585 bp, Homo sapiens
gatgcagacctcaaaactgaatctaaagttattgtataagccatgcttgcattgctataaagaaatatccgagaccrggtaatttctaagaaaagtggtttaattggctcatggttctgcaggccacacagaaagcagagcggcatcttttcctggggaagccttaggaagcttccaatcatggcagaaggcaaaaggggagcagtcacatcacatggtgaaagcaggtgtgagaaacgggtggatgcaacacacttttaaactaccagatctcactcgctatcgtgtggacaacaccaaagggatggtgccaaaccatcatgagaaacctgaccccatggtcagatcacctcccaccacgccccacctccaacactggaaattacaatttaacgtgagatttgtgcaggaactaatatacaaactatttcagctatttagttgcctcctaaagtgaatttgatcactttaatagagtttgaacagggcttacaggagatggaaagtcttgctgtagacattgtggagctagtctctaaaaatggctgccatcaattcttccaccaactcctcaccttttcccat

SEQ ID NO: 812730 - DNA, 594 bp, Homo sapiens
tctgggaacactgaaacaatcaacaacacactgcacctgccatccaggagctccaaggctagggttaacactgaggccaactgacccaaagctgtgaccacactttcctgctgcaggcccagcccatcctggttatgaaaaccactcatttttgtccacagacaccaggggataaacaccagcccccacttctgaggctgctcaccaagctgaacttgctgcctgtcagcctaggattggtttattagatttctgtgtgtacatttccctctaccttcatttcttcatctctatcattgaaaactatcccttttgtatccccttccttcttagttgatttcgttcttaaaatttggtgggataaagtgattttcactgcaggattaaattatcagtcctcagtggcatttgattattagcaatgtactcctaaaaattaaagaattactgttctaacgggaaattttcaggtgtaaagtctgttcactgatagatcccacatcaaactgcaaagggttacacacytaagttagaacacatatgtgtatacacacacatctgcagtaaatactgcttactaattatgctatattt

SEQ ID NO: 812731 - DNA, 629 bp, Homo sapiens
ttaacccaataaagattcatcagtttcatgttgtccttttattgtgtcaaattataatgatatcattaaaatcctgctagattcagaaaaaactgtagggaagcaataaacaatttgactttccaaatgatgaggaaagttattgaatttaccaaacataaatataaaaatagtattttgttgtataattaagacttatagctagagaagtagaaatgtacacaaaaaaaacatttggtatcaataatttggttgtgcattcatttattcagtcaacaaatatttagctgagcactggctagctgccaggtattgcactaaggacccaaagatggaagagatgatgtccctgccctcatggagcttgcagtcgtgttgagcagactgtcaaacagatttaggtaaggcaatgtgaccagtgctatgatacaaacaggatgctacaagagtacttggaaagtgtgtatactgcaaactgagggccaagaaaggctccctggaatacgtggtacctgaattacatggtgaataacagatgcaataaagaaatgggctgagctaccagacttcccgtgtgttccatgtaccttaaatactttacaaagtytaacaatgataatgtgtgtggt

SEQ ID NO: 812732 - DNA, 587 bp, Homo sapiens
agagccagggagggacaaacagcctgagaccaggccagcggggttgtgaacttcccccccagtacgggcacccagagttggtgccgcrctccacacccacaacctctgcagggacaggccacccggagctgctgacacagatgtgccagagagagggaacccgtgttcctcgactccaggaatatgaggatcaaaataaccacattttagcatcggaaagggctttaaacatttttaatttcttatttttggagagatggagtctcaccatgttgcctaggctggtcttgaactcctgagctcagggcttcccaaagtgctgggattacagacgtgagccaccgcacccggcctggaagggcttttgagatggtatcattttacagaagagaaaaacggtctcggagaggcctaagtgctttcttaagagggtaccgaagccgaggactggcttgctccctgggcctggctgctcaaggtcctttcccactggctctgcttttgatggccccccagaccctccgttttttcttctgcaaaaccagtgttgaccagaagccaaagtgatcatcagcatagaaatcctg

SEQ ID NO: 812733 - DNA, 663 bp, Homo sapiens
ggtccagcaggaggcatcctgtctgcagggcccatgcgggggacagggcaagaggtgcggtggaaccagaccttgccctccagaaatgcagggagacagacacgggcgtatttaattcaactatagcatgtggttctgagaaggcttcttggaaagggcctggggttgagctgggcaccagcagggaggtctcagagtggaggcggcagttccaccctacggcgtagaggaggcgccctgatcactgcctttcagccgtggccctgcctgtaatcttatcctttttgttgattgttgttggctgatgttggctgttgctgtgtcctccaccagagtggagaactccctggggctggaccccttgtccttattcacccagagaataggtgccttaaaatactgactggacagaaggaggaagagatgggttggggggccgtgtcatggaagaattccttgggccagccgcagaggagtaggccttggcagagagctgggagcctggaggggagctgaagacctctcccatagtcagctgcctttagggaagaaatactagaaagtcasagaagagaaaagaggcggggaaggggaggaaagcatttccacccacagtcctgtcgggagaggtaacattttggagtacagtgtgccctgccccag

SEQ ID NO: 812734 - DNA, 652 bp, Homo sapiens
atcctgcaggacgtatcaaagccttccacatcttgaagagcacagagtaggcttagggatatgttcaagattcggaaagagcacaaaaattcagcagtcaaatgtaatgaatgagtctcaattagatcctgaatcaaaaaacaattcaaataaaaagttataaaggcactcaatcagactttaaaaaggaggaaatcttgccacttgcaacaacacggataaacctggaggacactatgctaaacgaaacaagtcagttacaaaaggacaaataccacatgatcccacttaggtgaggaatctaaaatagtcaaactcatagtagcagagagtaggagggtggctgccagggtttagtggggagaaggggatggggtgtttttggtcaaagcatacaaagttttagtaattcaagatgaataagtcctagagatctactttacagcatagtacttacagaaacaaaaaagtttactgagaaggtggatctgatgttaagtgttctgatcaccaaatcgtatcaataataatacataaaaaggccaggaaggatcttgtggaagcgataatatgtttttggtagagatagtggtgatcrtttcacagatgtgtgcctatctccaaactcaccaggttgtatatgttaaatatg

SEQ ID NO: 812735 - DNA, 619 bp, Homo sapiens
cgtagcactctatggatgcagaaggttcatgttcagatggacaagtgatgaactcmttgttcaaataagagagggggcacctcaaccatgctttgtgtggattcaaagatgtgatggctgagaatctggggataatccagttgtgtgtagaccccaccaggcccagagctataaccagatcatcgagagctctaccttgtcaggtatcaacatttagttgtcagatcttgaggaagtctgaggttaagaagatgggaggaggcagtgaggaaaaagtggttctaagagtggggtttcggatttcagggtaatggcaagaaggcactcccatggggcataaatgatctaacattcaatggggaaggatttcaatatcttgtaaaacataaatgaccacacaggcatgggacagctactgaacgtcagccagccctagagagaaccaagagcaatattcacaaaacaaaggaacagaagtgtgactatcaccaacttgcctctcttgagaaaataagatttccactatgtgatctttgtaatgaataacgggagattgaaacctgttagccagtttcttacccaatttcacttcacacagtgtttacacatagaaagtaat

SEQ ID NO: 812736 - DNA, 613 bp, Homo sapiens
tatatgaacatgtcgtatctttagaataaattgtcaatagaaaacaattctaataaatagttttgctaaaatgcataatatgtaaaattgggaagtttagctgtgatgtatcagttaatcaggtaattaaattgaccaaatggaatcactccaggtaagtcttttcttgatgaaattgatcaatattggaataattctgattaagctgttaatatttaaagttatcttggggtgcgagtatcagggaccagatattcttgaggttcataacagcatttaaaatattctgtaaaccttatcaggctacaaaagtaagattctagcttttaaaatttatgttggctactaattataatgtggggcgcttaaatactcttcatggcctaacagaagaaagaaaataaagaaagacagaaacttatagagaaaacagcacccttgctgccatatatttggcctaaacaaagttttctgttaccctgaaagtatttgcagcctctgatagtcctgtgtggcctcgcatcctatttgaggttaaaatgagggtggatttagaaaatcttctcaacgcaaaatactgaaaagygtggtccacttatgataattcctagaa

SEQ ID NO: 812737 - DNA, 556 bp, Homo sapiens
acaacatgtgtgagcaggattcaaggcctctggagcacagaaggaggatcaagctctgagcaaaagctagaaaacttctgctctctcaagacatttagcatctccccattctcctcttccatgtaactcctaagcagcaatgacaactttctcctttctgagagcacccatattgaagcaagtatctcctagcactgtgattctttctgtataaccgtatcttcctctactagacactgtactaggtgctcatagtctagttcctattagatgcagaacaattttataaatgaatgaatgaatgcctgagtgaatgcatggatcaattaaaaattaactgatgacgataactgagggtcaataggagaaaagcaaagaattatcctgagcaatgctgggtcagacgttggaggtgccgatctataatcgtggatagagacataatataatctgtgtatcccagtgactgatacatggcaaacctttgtaactggtagttgctcattgtaatgatggtgatgtgaaaaagatgwtattgattccacacttagcaatg

SEQ ID NO: 812738 - DNA, 443 bp, Homo sapiens
tccatttacaatagctacgaataaaatgaaatacctaggaattatcttaaccatagaggtgaaagacctctacaatgaaaactataaaatattgatgaaagaaactgaagaggacacaaaaaatgaaaagatattccatgttcatggattggtagaatcaatctttttttaatgtccatacaacccaaagcaatatacatatttaatgcaatcactatcaaaataccaatgacattatccacagaagtataaaaaaatcctaaagtttatgtgaaaaaaagacccagcatagccaaagctatcctaagcaaaagaaacaaacctggaagaaccacattacctaactttagctcacactacaaaactrtaataaccaaaacatcatgatactggcatgaaaaaagacatataaccaatgacatagaataaagaacccagaaaca

SEQ ID NO: 812739 - DNA, 582 bp, Homo sapiens
ccagtgtgtgatgttcccctgtgtccaagtgttctcattgttcagctcccacctatgagtgagaayatgtggtgtttggttttttgtccttgccatagtttgctcagaatgatggtatccatgtccctacaaaggacatgaactcatccttttttatggctgcatagtattccatggtgtatatgtgtcacattttcttaatccagtctatcattgatggacatttggggtggttccaagtctttgctattgtgaatagtgccgcaataaacatgtgtgcatgtgtctttatggcagcatgatttatattcctttgggtatatacccagtaatgggatggctgggtcaaatgatatttctagttctagatccttgagaaatcaccacactgtcttccacactggttgaactagtttacagtcccaccaacagtgtaaaagtgttcctatttctccacatcctctccagcacctgttgtttcctgactttttaatgatcaccattctaactggtgtgagatggtatctcattgtggttttcatttgcatttctctgatggccagtgatgatgagcatttttcc

SEQ ID NO: 812740 - DNA, 582 bp, Homo sapiens
ccagtgtgtgatgttcccctgtgtccaagtgttctcattgttcagctcccacctatgagtgagaatatgyggtgtttggttttttgtccttgccatagtttgctcagaatgatggtatccatgtccctacaaaggacatgaactcatccttttttatggctgcatagtattccatggtgtatatgtgtcacattttcttaatccagtctatcattgatggacatttggggtggttccaagtctttgctattgtgaatagtgccgcaataaacatgtgtgcatgtgtctttatggcagcatgatttatattcctttgggtatatacccagtaatgggatggctgggtcaaatgatatttctagttctagatccttgagaaatcaccacactgtcttccacactggttgaactagtttacagtcccaccaacagtgtaaaagtgttcctatttctccacatcctctccagcacctgttgtttcctgactttttaatgatcaccattctaactggtgtgagatggtatctcattgtggttttcatttgcatttctctgatggccagtgatgatgagcatttttcc

SEQ ID NO: 812741 - DNA, 605 bp, Homo sapiens
tggccgtgttcagggtaccatggagtcacaaagcaaaatgttttaatcctatttaaggacggtgagaagggttatggcagaggtgaggcttgaattggagctttgaaaaaaaaggtgcttctgttaaataagaaattgttgagtaacacatacatctcctaccacataaaaatgtgctcctaatattcatcgtttatttcgaagaggagagttcaaagatttaaaagatctatgcaatgaaaaataaaggaaacaaggaagatagaaacattccaaaaaatgttctttatgttgtacatgagtcacttttcctttatttgtgctttctttggccactgttcagtatcaaaatgttcactgaagttgccggatataatttgggtgatttggccatgtatagagcctttctataaggcttaaaccacttttgccatgtatcatattctgttatactggctatccattattgtgtcctaattggcttaatatattttatacatatatattcattggtcaactaccccwtttttccaaagcacaactaaagaggatgtcatagcttattatcccaacccttttagagagaggaaattattcccttttct

SEQ ID NO: 812742 - DNA, 612 bp, Homo sapiens
ggcacctggaacaccagtgagatagaacagctcactcctctggaaagcgggctgaagccagggagccaagtggtctggcttggcgggtcccacccccaaagagccctgcaagctgagatctacaggcttgaaattcttgctgccagcacagcagtctgagatcgacctgggatggtcgagcttggtgcaggggaggggtatccgccattgctgaggctttggtaggcggttttaccctcacagtgtaaacaaagctgctgggaagtttgaactgggtggagcccaccacagctcagcaaggccgctgcagccagaccgcctctctagaatccctcctctctgggcagcgcatctctgaaaaaaaggcagcagcccgtcagggacttgcagataaaatccccaccttcctgggacagagcacctgggggaaggtcggttaggggcgcagcttcagcagacataaatgtccctgcctggcagctctgaagagagcagcggatcttccagtacagcgttccaactctgatamgggacagactgcctcctcaagtgggtccctgacccccgtgtatcctgactgggagacacctcccagtaggggccgaccatgca

SEQ ID NO: 812743 - DNA, 644 bp, Homo sapiens
aaacatatagccttaagacaacatatattagaaaagaaggytaaaaataaatcatttatgtatccttcataagaagtttatataatagagcagtacattaaaaccaaagaaagtaaaataacactgaggcccaggaaggctgaggatccagtacagtaaagacaacaacagtcttcaaaattgaaaaccaaatcttctgactccaaatctcatatccatttatcaaaccattttgcttctttgccccttcaccaaaaataaaagcaattaatttgtagtgaagtcctatataaaccccattgatcttaaaagcagtcattttgtttgtattatgatctttttcctcacaaagattccagttgttatttataagtttttttaagtaaacattcaattctctactctgagcaaaagtgttaacttcctaaaccgaaggaaactattaaatacagtaattaaaaagagaatgagtttaaaaataaattattaaaagataatttgcttatatacttgagatattgagagtctaatatcttaaagatttaaaggataatgcaccttgtattcttcaaatgtttctaatatgtatctgacattattgtctgcaaatggttttggtcagcagaaaagattagtgaagattt

SEQ ID NO: 812744 - DNA, 553 bp, Homo sapiens
cattgcacaggccaggaaagttctctcacggaactttcttccaagccatcattgattaaagtttttagtaattgggctgccacccygtgccagagactatctgtgccccctgtgccacccagaatgggatcctcatcaccagcttgcaggaagtgatctgctcccaaaacctcattttacctcctgctttctcagaccaattccagtaccaactgtatcagttcagttattctgggaagcagatgctgagacagcgttaggagtgcaagtggttcattgaaagataacatctgtgaaagataaagggggagagccccagactgtgctacagagctgacaaaatcttggccaaaccaatggggagctctagagcaaagactgcctgttagagggacccacattaggcatagaagccaggctctagcaccactgccatgctcagccctgggctgtgggcttcccgggaagagtagagccttggttaaaacactgtgacagttcctgcaggtgctgcagatggaggctggcagctaactgcctcctgacagttaca

SEQ ID NO: 812745 - DNA, 456 bp, Homo sapiens
atataatggacttaaatttacaaagaaaaaataaataaccccattaaaaggtgggcaaaggacacgaagacatacatgtggccaaaaatcacatgaaaaaaggtgccayatcactgattattggagaaatgcaaatcaaaaccacaatgaggtaccatctcatgccagtcagaatggctattaaaagttaaaagaaatgcttttaccctgttgggagtgtaaattaatgcagccattgtggaagacaacgtggtgattcctcaaagacctaaagacagaaataccattcaacccagcaatcccattactggatatatacccacaggaatataaataattctattataaagacacatgtgtatgtttatttcagcactattcagaatagcaaagacatggagtcaacctaaatgtccatcagtgatagactggattaggaaaatgtggtacatatac

SEQ ID NO: 812746 - DNA, 514 bp, Homo sapiens
aaaaaatgggcaaaggacaggaatggacacttcataaaagaagacatacatgggaccaacaatcatacgaaaaaaaggtcaacatcactgatcattagaaaaacccaaatcaaaaccactatgaggccgggacagtggctcatgcctgtaatcccaaaactttgggaggccaaggtgggcggatcacgaggtcaggagattgagactatcctggctaacacggtgaaaccccttctctactaaaaacacaaaaaattatccaggtgtggtggcatgtgcctgcagtcccagctacttgggaggctgaggcaggagacttgcttgaacctgggaggcggaggttgcagtgagccgagattgcgccactgcactccagcctgggsgacagagcaagactctgtctcaaaaaaaaaaaaaaaaacacacacacacatgcacaatgagataccatcttacaccagttcagaatggctattactaaaaagtcaaaaaacaacagatgctggcgagattg

SEQ ID NO: 812747 - DNA, 552 bp, Homo sapiens
gcacacacagggttggatgcaggctttgtgtggcctgaaagcctattcaatttggcaggggtgggtacctctttaagaaaagaatgtaaggccaggcgtggtggctcacgcttgtaatcccagcactttgggaggccgaggtgggcagaccacctgaggttgggagttcgaaaccagccgaccaacatggagaaactctgtcctactaaaaatacgaaattagctgggcgtggtggtgcatgcctgtaatcccagctactcaagctgaggcaggagaatccttagaacctgggaggcggaggttgcagtgggccgagattgcgccattgcactctagcctgggcaacaagagtgaaacatcgtctcaaaaaaaaaagaaagaaaagaatgtaaaagtaccagatataagagtgagtatagattkcaaatgatgaaagaaaacacaaggaagtatatgtttaagaaactgacaaccttacatcacaaaatgcagaaaaataaaatatgattacttgttatctgtttgatatgttacattatttttcttcctac

SEQ ID NO: 812748 - DNA, 640 bp, Homo sapiens
acatgttcacctttggcagtgtggatatgctgtcagcaggagtacgtatttccrcccacgcttttaaaagatgtaagaacatttcatattaaggaccaaattcaggttctttgtccttgaaagacctatattctttatagttactaaaaaccaaaagtataaatttgaattattcatcttatatgtatttctaccgtgtcatttgaaaacttacttttctgcataagagatttttgtgtcaacagattgatgggaggaaacagtgcttttgctatgtagtacctcgcagtgttgcccaaaaatcaagctcagtgtctgttttccaattttgaacatgttaaatgtcagatgtcttctaaatggtgtctttaatgttttattatagtctaattttttcttttctgcctgccagacttgctaaccagtcgcaaaaatgaacatgagaaaagccatggatgtattacttctcctaaagcctaaggaattatttgttagtttggctttctgctctgattttgtagtcttgctaatacatgctttttcttttcttttctttttcttttcttttttttttttttttgagacagaatttcactctgtcacccaggctggagtacagtggcatgatctcgtcccactg

SEQ ID NO: 812749 - DNA, 567 bp, Homo sapiens
tgtgtatgtctgtgtccaaacctcttcttagaaggacaccagtcatagtggattaggggtcaccctaatgacttcattttcccaattacttgtttaagaccctgtgttaaaatagagccacattctgaggtactcggggccagggcttcaacacgtgaattggtttcaacatacgagttgtgcagttcattttgtaacacctgtggagatgggtagagggcaggttctctctgcaataaggttttacagatggtcatttatcttctgcttctttcttttcccttcttattttttactgtgagaaaattcaaacatgcagaaaagttgcaagaatagcaatgagtaattgttaacatgttgttgtatttgcctcctctttatgtgtagattatatgaactgatgaaaacaaagttttaggcatcatggcacctcacctgtaaacttttcagcatgaagctcagaacaaagacatccttttctataaccccacgctattgtcacacctaagaaagtttcaaataattcagttcratgtctgtcatctagtccatattcagatttctcca

SEQ ID NO: 812750 - DNA, 640 bp, Homo sapiens
cagcactgtgcctcagtttacctttttgacagtctcttgtcagaagtgagatccccaggagcagcgagtaaccaggcgcgggcagcccccgggccactgcacccactgctgtcttgctgcatttggtggccacwggggaagcccctctaggaggtcgagctccacaacttgcaccctgagctctccgactccatgggagcagtttttattccagagctcagcctgggtctgacagggactgcactggaacctggactgggatccagagtgaaactgggtgttctacaggaactggcctggatccagtcggaggcctcaggtaagaaaaatgtgagaaaaacagggaattatgggttcatcagaatccatggagtctgggacaccccatctggaactccagctaattacatgttcagaaactacagacccagagcccgtgcctttctggagaaatgggtgcagctcagggggatgactccgagtcacagtggccacagtgggaagtttattccacatgaaatcattcacggacgggggcacattcaagaacaaggaatcgtgagtatctgcaaaccacgcaatatattttttgattggcatacagactgatttcagacagaatgattggcatacagattga

SEQ ID NO: 812751 - DNA, 346 bp, Homo sapiens
taaaatcttgctaggtcctggtagagggaaaacagtccccaagagtagaagatggccaagctgttagcccccacgtagtctakcagtatgttggggagggaggttgttaactctgattttttttctctcacacattaaacagaaaaatgtatcatctcctccatcaccatcacaagagactactgcactgccaagccagtatctgctgcaggaagtggagtgatgggtaacttcaggatctagcctgagccagtttcttttgtgggagcataaagatgaaagaaaatggagccaggctcccctcatcctgacattttttgttttacacaaaaatctgtataggaca
